United States Patent Application Publication US 2012/0017292 A1 - sequence listing, part 11

SEQ ID NO: 42099 - DNA, 480 bp, Zea mays
  Peptide Sequence Number=SeqID_85474
atggaggaaggagttgaaatagactccaagccaaggttttttaagacaggaacatcgattccgctgcaaccttctcgaagggtctttcattccactgcgatccagccttcgagtagaggtaagaagatcaaggttttgacgcaccggcctagatacattgaaacggccagggtgccgaagcttgttgaagggacatcttccacagctgagccaggacgacttgctcatgccggctccaaggaagaatcggctgaagtgctggaaataatagggagactgccgaagttgctacagctcggagctgggccctcagtgcccattgaaacagagcctgttggaactgggcagagtattgaacaaggaccttcggacgtcggtctagttctggagaaagaagacgcgcccaagaaggttgaatctcctactctcgaagcgtctactgaagagctagacttttattattcgacacgcttcgggtaa

SEQ ID NO: 42100 - DNA, 741 bp, Zea mays
  Peptide Sequence Number=SeqID_85475
atggcggagaagagcccgcttcgccggtggaagcgcttcttctcggcgttcggcgccatcgacgctgccattgaggccgccacacactgctcccgagacaatcaccggcaagtgaggggcgacatcgtggagatactctgtgatgtcacgggcaacgatagcgtcgagcgagcggagtggctctgccagctgctcgacgaggcgatggtggaggctctcgagacgctgagggtggtggaggcgaccccgaccctgctggcaaccaccaacgtcatcgaggccgtcggtgatctgtggagtcacgagtctgggagggtgcgcggcctcgcatgcagcatcatcgacgggtggacgacatccatcaatggtaaaatctccagatgcagagccatctttgagaaactatcgcagatagatcaagaacaagaggcagtatgcgttccggtcgacactgatcttccggttcaacgagacaagaagcaatggttgtgtgccaagaagaagatgtctcccgtcgccgtcggcgtcgccgtcggtcgcatccgcagcgagcagacaggggatgcaaagcgcaagttccctggaggctactaccgagaagaagacgaccagaagcggcgacgcaataacaatgtcgtcaggcaggtggttgaccagaggcccagaaagacgacttcgaagcgatcggagaggaagcgagcgagctactggaaaggcgcttcttggctgcttgatgattga

SEQ ID NO: 42101 - DNA, 126 bp, Zea mays
  Peptide Sequence Number=SeqID_85476
atggacgccggctcctgggaagtcgaaccgccactcgcgctagtaccgctcctcctcggggcccccgcagaagacagagaaggtggagacccgacactgccacgcggcctactgcccgtgacgtga

SEQ ID NO: 42102 - DNA, 810 bp, Zea mays
  Peptide Sequence Number=SeqID_85477
atgtcagggattgggctgttgatttcggcggaggtgaagaggccgggccgctgttttcggtggagacaaaggcgcgatacagtagacggtagcgtgctcctcacgcggcggccgacgtccaaggagtatgactcgtgggcccgggccgccgtgctagaggctgggtcaccctggcacgcgtcgggcgagatcttctgcggtgttttggggcgtcagtgggggaatctttctttaaaaagggactcccccgagcgtggtagccattctcatcactcgctgcgccctttcacccttgagttctccgcgctcttctgccgccgtagccgccatggccttgctagatccacccgagcgtctccagcccgaggtggcactcaacttggtgcgcaacctgctcagatggggtgcgccgacattcgccggaaggatctgtgtcggcgcctctcctcacagcgatctcaccgccagagagttcacgctctttgtctccaacctccccagcggtctggcgctgccgatttcatctttcttcgtgctgctgctggaggagcttggcctccaacctcagcacttcacgccctgcttcatcctttaggcagccatcatcgcctacctctgcaaggtgtccatgggggcgatgcttcttcccgcttcttcctccagcattcggaggaaaggatgttcaccagccttgtgaaggtggatagcgggctgagctacggctccatcccccgcttgagcttcaactccatgggagtggtggagatggcggccatgcgtttcaagctcgaccctactgatgtcgagtag

SEQ ID NO: 42103 - DNA, 1191 bp, Zea mays
  Peptide Sequence Number=SeqID_85478
atggctgtccgccctttcacccgctggtctgggcgaaagtggaggaatgcttggggaggaccttggagcgtgttggagaagactcagcccgcgatggctgaggacgcaaccatcgttcgacttcaaggatttttatcaggcagcccggccgcatcccctcgccggtggtcacccaagacggtgaccaccagctcctgggtggggagaagcaagccgggctgcgatcttggtcccgccctcaacttcaaggatcttcatcatccttgctggggcggaggccgggctgagccggagctctacctcccgcgcgggttcgtgagtcagcctctccctcagcattcaagggagagggcgctcaccggcctagcgggagggtcggactccgacaacgcggggacgatcggcggcgagcgtcgtcagcttcagctcgttgggctcgctggctcagctggctctggctcggctcccggtgccccctctcgccgcaagggcggttgtcgcaccgcgcgcactggaggaccgcccaagacgtcgcgcgctgctagggcggcgttcgtgttctggggctgtcccgcctttgccccggtacggcgcctctgcgcggaggtcggtgcttcgctcgtccgggaggatccgagtggggatctgccggtgggcagacggctcctgtcgtcggtgctgaggtggcggcggctggagaagtcctcgtcgccgacgggatcactgccaccatccgcgctccgggcctccggctctttgtacttgtcctcgcccctcgagcgtagacgtgggcgagggcattattgcagcggcgtccgccctgaggccattgctgctgcagttcggccacccggagcggaggtcgttgtcgctgctgctggagcgggcgacgactcgcctgtcagctatctgaaccgcttcaccaagtgtgagttgcctcgtgcgaaggtgacgagtgagagtggggatcctccgaccgcgtcgccgtccgaggctaggtcggacctcgccgaaggtgtagttgacgccgagggtgctgctgctcccttcaactgtcaaggtccgagcctgcaggatcggaaggtgatgagtgaggtatccgtatcccggaggcgtaggagtccctcggctcggtcagtcttgactgcttacgtgtactccgtcgttttcaggatcccactttcgaagtag

SEQ ID NO: 42104 - DNA, 330 bp, Zea mays
  Peptide Sequence Number=SeqID_85479
atgccgaaggagaccgctgctggttccagtgaaggtggcctcgtttacttgaagtacagctatcgcttcaaaagtgcaagaacaagggcagaaagcaacgaccacgtgttcgacgcgctctgggctcgccagagcacgcccgacacgtgccccgcatgccccgcgtcacgccaaagcccagccggcgtcatggcccgcgcccgcgcctataaagcacctagggacttcgaccgtactcctccgcacgcgctcgacctcaccggagcccaaaaccaccggcgtttgcccgtgcacggcgtgcctgcggccgcccgatccccgccaccgtag

SEQ ID NO: 42105 - DNA, 673 bp, Zea mays
  Peptide Sequence Number=SeqID_85480
acagacaagacttggcgccaccatatcttctaaaccagacccgatattcccttggaactcacatgaactaggtagccctaggcgcagggaagaaatcctacacaagccatatggcaagattcacacgtttggctgctcagtaggcgcaagaacaagggcagaaagcaacggccacgtgttcgacgcgctctgggctcgccagagcacgcccgatgcgcgccccgcgtgccccgcgtcgcgccaaagcccagccggcgccatggcccgcgcccgcgcctataaagcacccagggacttgaccgtactcctctgcacgcgctcgacctcaccggagcccaaaaccaccggcgtttgcccgtgcacggcgtgcccgcggccgcccgatccccgccaccgtagaccggccaacagaaccattcccgaccccgttcaaccctcagagaagactgtgcacacctcggtgaagctccccgagcgaggaatcggagtttgcttcgccggaaaagccagtccacggtcgccggacttcgcccaaccgccggtgagcgtagaccggatcgtcgtggtttggccgggaacatccgccgccgacgagaccacccgcctgcgcgcgtggaccggacgattctgccacccccgcggtcgaagccatacaccgtttgtgatcgcctag

SEQ ID NO: 42106 - DNA, 180 bp, Zea mays
  Peptide Sequence Number=SeqID_85481
atggcgaaggtagttgctcgagttcttggtgttgaaggtggtcgtttgagttcaccgaagaattcatattacattgataccttcgtcttgtttgaaggcgatgacgcgagagcaattacaatccagtgtgaacagtatgggggtattgttcatctatttataggcaatcgtaagggttag

SEQ ID NO: 42107 - DNA, 432 bp, Zea mays
  Peptide Sequence Number=SeqID_85482
atggttttcgacggcgtcgcggatggggctgcgcaaaacagcaaacaccaggtgagcgtcgacggcgtgctgtccactgggcttcgcaaaacaacgagccagcagcgcgcggagacgtcgggggctgctgcgcacaacacaatatttcccatgggcattccgtcgaacagccaagggggaagattgcacgggggcgccatggacgacgacgagctcgctgcggctgctgttttgtggggaaaagagggggagcagggaagggtgctgtttgggcgctcggatgggggatggagcagcggcgtagtggatctcgggcgtgtcatggggctggtgctcgcgcgcagggaatcctcggtgtcgtggctgctggccggagctggagctcggtctgcaatagaggggggtcggccatgggaagaagctctctgctga

SEQ ID NO: 42108 - DNA, 432 bp, Zea mays
  Peptide Sequence Number=SeqID_85483
atgcgcgcagccgccctcgcccaacaaccatgtgctcccgcccccacccccgccgccatgcgtgcagccgcccccgaccatgcgcgatcctcgccgccgcgggacgggtcccagcggaggcagaaacgggtccccacggggaagtcatgcgcgtggggcgagcttggaggtcgacgcgaacgacaggcgcagggccgcgtcgccgtcgtcgcggatggcggccgtcggtacgacgcgcaggaaggggttgttgaggcgcacgtggtgcttcttggcagtcttgggcgacaccatagcgacgacggatgcaaagattattcggagggaactttattatcgaaatgtaaagttccgaggacaattcgtgcagatatgccatcccggcaaatatacaacagagagttaacaatattgttaaaaagattacaatag

SEQ ID NO: 42109 - DNA, 258 bp, Zea mays
  Peptide Sequence Number=SeqID_85484
atggctgaggagaggagagaggagagcatagcggcggccggcgcagaagaggagggcggtggccggctgtggctgaggagaggagagaggagagcagatcggcggctggctgagggagtgagggtgccgcgtccagcgctggccagtgcccaggaaagtgacctagaaaatgctgaaggcccaagaaaggctcaggacgggttattgatgcaaaaaacttcaggttcagatgacgagcacaaaaagacgaatctccag

SEQ ID NO: 42110 - DNA, 531 bp, Zea mays
  Peptide Sequence Number=SeqID_85485
atggctgataggtttcaaaaaatacgtgaggaaggaaaaaactttgatcctttgattttagaagactttgattgggacaatgaatgggttgatccattagataattcttctcattttagcaatgctcttggagatgatttcaatttatcatgggaccaagttgatgaagctattggtgcatctgcacatctcagaggtcgtaattttcctaggagagctgttggtgggtgtgtgagaaggaatgaagaccttgaggaagaggagactaatttagcaaatgaagatgacgaggatgaggaatatattcttgatgatcttgatgtggaatatgaaattgaaggaagcaatagtggaaaagatggtgatgatcaaggcgtggatgctcatggtcttcatattgatgagtttgatgatggttactggtcatgcataaaagttgtaacttatgtggttgaacttgtgttgttgaacttgatctgtttctttttatgctattatgctatttgttttgtgaactcaacttatgtatga

SEQ ID NO: 42111 - DNA, 895 bp, Zea mays
  Peptide Sequence Number=SeqID_85486
atggggagcacccgtgttgccttcttcttgcgggtgttggaggagcgcgaccccgtgggggttggcgctcttcagacatcgcccggcttcaaggattttcatcatgcagcccggctgcagtcccccgccgacggaagaggggcatcctccagctgtgcggaggaggcgtcctccagccatgcgggggaaggtcctccttgcgccgtcggctgcaccggggggtcgcacaacacgtcgtacgccacgagggcggtactcgtgttctgggacggtcccgttctcgttcttgtggcgaggacaggagtgaggacctgtcggtgcgctttggggcgaccactgttcgccggcgcggtgttggtgggcaggtggccgctgtcgtcggtgctgaggtggtggcagccagaggagcttgtctccgccgacgagatcgtcggcgccacctgcggttggacctccggctctttggctttgatggcttgtcctcgcccctcatgtggggacgtgggcgagggccttttcacagcagcgtctgccctgaggtcatcgctgctgctgtttagccgcccgaggcggaggtcattgtcgctgccggtggagcggtcgctggtgagccacctggagtttgttatcccgcaggccctctacggtgtcggcgcggacggaggcggtgtcagctcgaatagaggcttcgtcggcccaggagcaggtggcttcctaggtcgaggaggtgcagcagcggcggctagagcttggccaggccggggcccttgcggagagcctgaccatgagggcccaagcgcggtgctggcgtcctccttcgaggtggagatcctttcacccgtgtcgccgtctgaggccgggccagattccgccgagggtggaaatgacgctgagg

SEQ ID NO: 42112 - DNA, 138 bp, Zea mays
  Peptide Sequence Number=SeqID_85487
atgggaactaatgggcatctcgacctcgacacgggagtctatttcaaaccaagtcataggtgtattgaaagggaaattggagtcttcggcgaagacaaaggcttcaacttcgtaactcatccttcgccgtcgctctga

SEQ ID NO: 42113 - DNA, 111 bp, Zea mays
  Peptide Sequence Number=SeqID_85488
atgaaggcgatggatctgtcaaagctggtgaaggagaagcgctttttggtggcctccttgttgtatggggagcagcgctgcaggtgccaaaggttcaacacaaaccaataa

SEQ ID NO: 42114 - DNA, 661 bp, Zea mays
  Peptide Sequence Number=SeqID_85489
tgctgctggcagaacttttagtactgacctcttgaatgctgcttggtcgctactacggaagtccctgcgccagaaaagggcacccaccccagagacatatcttgccaagatctatgctcattcatcaattggccagcttcaaagggcttttggtacattgcatgaatttgaaaatgcctatgggaactccaaggacgttgatttagagctcttctcaccatttacgtccttgcatcctcttgttgttgcttgctgcaaagatggctttagcacattggatttgacaggagaagcatgtaatgtgttccagcatgtattaactcttggtgttaagccaaatgcaacaacatactcccggcttgtcgatgcccatcttgcaaacaaagatccaaaagctgctcttgccataattgatgagatggttgatgctggcttcactccttccaaggataccctcaggaaggttcgaagacggtgctctcgtgagtcagactttgacagtgacgagaaagtccaatccctggctaagcagttcaactaccgaatgggtggtgagaatcgaagagagatgctttatagcatagaatacaatcctgcagtttctactgagtttgctggtcgttgggagagcacggacattgtagcttgtaaatttacttga

SEQ ID NO: 42115 - DNA, 225 bp, Zea mays
  Peptide Sequence Number=SeqID_85490
atgaacacaaaggatcctgagccaagagccaagttgactgcaatgaactctgcagatcaatttgcatacctgggctacttggtcactggcggaaaggagatcgtcgaagcggcggcgttgtacagttctcactggagagaggaggcgtcgggctccaaggaggcggcgacagtgatgtacactgaagagagcatgggcaaaaccatcctagattttttagcgtga

SEQ ID NO: 42116 - DNA, 342 bp, Zea mays
  Peptide Sequence Number=SeqID_85491
atgcagacgcgcgcgctgtcgacagcctccttagcagggttcctcgaccggacgagagaagaagcaagccgactgttgcatggtcgtcatcctcgtcagtggccccacgcgctcgtgctcctccgcggcagtccgccgcacaagctcgtcctcgtccctggtgattcgctgcgcgggctgcttctcgtcttcggcgatcgacacgtcatattcaaaaagttcaggatttcatatgatgagattgtcaatgatctctgcccagtactaagtgtgcagcagctttacaaaatatgcactcagtactgggatgataaatataacacagagagtgtgtcagaagag

SEQ ID NO: 42117 - DNA, 435 bp, Zea mays
  Peptide Sequence Number=SeqID_85492
atgggccgtcaccgcgcaagcaggcatgcgcgcatgagccgtcgtggccagtaccctctccgctcgtcgtggctagccccgtcatcatggtatgcctccccatccccaacgttggcgcctcgcttaccggtgcgggtgccctccacggtgtgtgcttcctcggctcaatgggcgagccagctactgcgccgccgagcgggcgtgcaggcaggccacaattgcctctcgggcgtgcaggctgaccgccactgcctcgtgggcgcgtgtgcacgcggcgccgtcgtgcactctcgtggccacgtctttgtcttctccaccgcaggcgacgcgctgctcaagctcaaggccttcgcctccagtggcgagttctgcgtcactacactctttgcctgggcaccctcgacgtcaggcaagcgcgctagcagtcgcccctag

SEQ ID NO: 42118 - DNA, 264 bp, Zea mays
  Peptide Sequence Number=SeqID_85493
atgacgaaggacttcgccatgacgatagtgttgccaccatatgatgatatgacttctcttagagggagcccttcttggttgatgtccagccgtggaagggcagcccctggcgctaatgccttcttcggtggcatgacgaaggtggttgctcgagttgttgtcgaaggtggttgtttgagttcaccgaaggtgggcgccaatgttggtcacttgttctcaaatgctgtgattgaacaacaaggcaacacaattgttaaagattaa

SEQ ID NO: 42119 - DNA, 111 bp, Zea mays
  Peptide Sequence Number=SeqID_85494
atggagaaggggcggctgcgctggagaagggatggccctggagaagggcgcacgcgatggtgggctggcccatgtaacagagaccggattagtggcccaaaacaggcataa

SEQ ID NO: 42120 - DNA, 1071 bp, Zea mays
  Peptide Sequence Number=SeqID_85495
atggcatccaaagtccgctttacagtgggttctcaagtttgggttgaggatgctgaggtggcttggattgatgggttggtggaggaggtacaaggagatgaattaattataaactgcacttctgggaagaaggttactgcaaatgtctcaagtgtgtatcctaaggatgcagaagcgaagcgctgtggcgttgaggatatgacgaggctagcttatcttaatgaaccaggagttttacagaacttaaagtctagatatggaatgaatgaaatatattcaaatcctgttcttgaggcatttggaaatgcaaaaacagtcaggaataataattcaagtcgttttggaaaatttgttgagattcagtttgacaagaatgggaagatctcaggagctgccataaggacttacctcttagaaaggtctcgtgtctgccaaatatctgatccagaaaggaactatcactgcttttacatgctatgtaatgcaccagctgaggaccgtgagagatataaactgggagatgccgcatcatttcactatcttaaccagtctagttgtattaagcttgatgcgatggatgatgcttcagaatatatcataactaggagggcaatggacattgtgggcatcagttctgatgaacaggatgcaatatttagagttgttgctgctattcttcatttgggcaatgtggaattttcagaagggagtgaagcagattcttctgtacccaaagatgacaagtcccagttccatcttaggacagctgcggagcttttcatgtgtgatgagaaggctcttgaggaatctttgtgtaagcgtgttatggtaacacgtggtgaaagtattgttaaaaatttagatgcacgagcagcagctctcagtagagatgcactagccagaattgtttactctcgtttgtttgattggcttgtaactaagataaatacttcaataggacaagatctaagctcgaagcttttgattggtgtactggatatatatggttttgagagtttcaagacaaacaggtgcttaactgatccaagagggtcagtgaaaatcccgtga

SEQ ID NO: 42121 - DNA, 270 bp, Zea mays
  Peptide Sequence Number=SeqID_85496
atggcaggatctagggtgtctcgtctatcggtgcatagacagctaggaaccatagggatattcaacgctgagaaaggtgcattaaagaagatgaagagtgtttggattcccaagaggaagttgaagtcgactgcgtccgtttggattcccaagtcatcgtctcctatagtgcctccgcttccagttcgtgtgagactgggcccagaggaagaaaattatgagcagatgctttggttggctctcccccgcctgttttatgtcaagaggtaa

SEQ ID NO: 42122 - DNA, 162 bp, Zea mays
  Peptide Sequence Number=SeqID_85497
atggggcctgagctcgtcgttggtgctgccgtcgccggaaacagagctaccgacgctactgccgcgcagagcctcgagctctgtcgtcgccgcacgggcagcatccactgcctccgctgcttctacttccgctctcgctgctgccagttccgcagccgctag

SEQ ID NO: 42123 - DNA, 423 bp, Zea mays
  Peptide Sequence Number=SeqID_85498
atggccgaggccgagtccgggccctgggtcgggcgaggcggagactgtcggctgaggccagggctgagtccgagccctgggctcgggcgaggcggacctcactctgtcgagtggcacaggagtcggagcggcgcaggcgacgctgtcctctcgtcaggccggtcagtggagcggcgaagtgactgcggtcacttcggctctgtcgactggagggcgcgcgtcaggataaggtgtcaggccatcctcgcattaaatgcttctgcggtgcggtcggtgtggcgatctggccaaggttgcttcttggcgaagactgggcctcgggcgagccgaaggcctttgcagctttgtgctgatgggggttaccagctgagattaggagtcttgggtgtacccctaattatggtccccgacaatatgttatga

SEQ ID NO: 42124 - DNA, 320 bp, Zea mays
  Peptide Sequence Number=SeqID_85499
atggaggcggccgcacccaaatcaatggcagaacctcgacttttggtaaggaattgtgcccaccgtgggccaaatccgcgcgagctgaggaagaacacggtgcccccgcctcgtggtggtggccagggtgattctctcagccgcaacgaaccccggagactaggagcggacgaggtggggagggccttataccccgcggctagacctaatcttctcctggtgctgcggatccgaccaagaatcacggcagccatacctgcggagtccgtgctttgcggcatggtgaagacgacgtaccggccgcggtaccccacccagcg

SEQ ID NO: 42125 - DNA, 588 bp, Zea mays
  Peptide Sequence Number=SeqID_85500
atgacttttttcgtttttttcggtctgcctcggttgtgtgggcctggtgggctcttttttttctgccatctgattttggtgtatcatccacaaatgctagaggagtacgtgaaaagtggagaacagattagcttcctctatccaagttgcatccaactcaattctttgtcaacctgcttgcattccagaatgatcgttcaccacaacgtgtcatcgaggctccctctgatccataaggaaggtcctaaagaccaatgcaaactcgaatgcgagttggagaatgcctctaacgggtttaaaacgtcctcgctagtattcttcacattcacacctttctctaagtatttcatgactatttccaatgtttctaagcaagataacatcagcagcgccaatcactatgtggtgtaccgcctggcggtaccctctgcggcggcgcggacggtccgcggctctgggccggacgatatgcgacctggacgcaggagcggtgccttctctgcttcacaccagacggtccgcagctctgggatggacggtccgcgacctggcgacaggatcgtcttcctcctccttgttggaatctag

SEQ ID NO: 42126 - DNA, 276 bp, Zea mays
  Peptide Sequence Number=SeqID_85501
atgagcaagaacacaagagacacaagatttatcccgaggttcggtcacaccaccaaggtgccctacttcctcgttgaggcgcccacaaagagccgggtctctttcaaccctaatcctccctttgccgaccacaaaggtcaagcccacacactaatctttgctcaaacgagcgggagagaaaaccccagctcaactgcccggaggcaagttcagctggtgtatggtcaaagaggttcacagctgaagttgagttcagctgaagttcagcccagctga

SEQ ID NO: 42127 - DNA, 1839 bp, Zea mays
  Peptide Sequence Number=SeqID_85502
atggccgcggccgcgacgacgtccacggcaaccagttgctcgtcctcgtccaccagccccggccctcaccgcaggcgccagcccaacgacatcgagcgcgacgacgactcctgctgcggctgcggcggcggcgccgatcaccacttcctacacgcctgtgcgcacgacgacgccgagtgcgacctccacgggcacgccgccgccgccacgccctgcagcgggagggcgctgcagttggcgcggaggaagcgagcgtgggccgtggcaggcgcgccaccccggacggcctggatgaggggcatcgtgctctgcctcctcggcctcgtcgccgtcattgggttcctgggatcgcaccggggcggcgggcgcacggccacgagcgcgggcggcgctggcaccgacgacggcgggaggctcagggtggaggtggccgacgccgacgtcatggagtggacggaggagaatttgacggcccttgcgcgccgctcgcctgaaccgccgattcagctgcattttcttaatcaggacacgcttgcttcagggaaaaacaatgcatctgtcggttacctggtcgttgatgcaaacggtggcctaaaccagatgagaatgggaataagtgatatggttgcagtggcgaagatcatgaacgcatcgctggtgatccctactctggatcatcagtcattctggactgacccaagcgatttcaaagatatattcgacgtcgatcacttcaaggagtcgttgaaggaagacattgtgatcgtggattccctcccaccacattacagaagggtgaaaccgtacgtgagagcgcccacctcctggtccagggcttccttctacagagactttgcgaaaatcctgaggaagttcaaagtggtgaggtttacacacacggattcacggatcgtgaacaacggcctcgctccttcgctgcaaaagcttcggtgccgcgcgaactacgaggcgctccagtacaggaaggagatcgaagagctcggcaacacgctggttgatcggctgagaaacgagtcccagcattacatcgcgcttcacctgagatacgagaaggacatgctggccttcaccgggtgcaaccacaacctgacgctggatgaggcggcggagctgacggacatgcggttcaaggtgcggcactggaaggagaaggacatcaacagcgaggagaggcggctacagggcgggtgccccatgacgccccgcgaggcggccgtgttcctcaaggccatggggtacccctcggccaccaagatctacatcgtcgccggcgagatctacggggcgcacagcctggacgcgctccgggccgagtaccccaacatctacacgcactacagcctcgccacggtggacgagctggagccgctggagctgtaccagaacaggctcgccgccgtggactacatcgtggccctgcagagcgacgtgttcgtgtacacgtacgacggcaacatggcaagggccgtgcaagggcacaggcgatttgaagggttcagaaaaaccatcaaccctgacaggctgaagtttgtggagcttattgacaagctggatgaaggttctatgtcctggactgagttccagactgtggtgaggaagcaacatgagaatagactcggagctgagatatctggagagggcacagggtgtgcagaatgtgaagtgcgtcgtcaaaagagttgtgtaaaagcaaggaatgcagatgtgcagcttgaaggagatgaaagtacaagcgtgacgcaaaagcgattgtcagattcgcgtgaacagtacgggggtactgttcacctatttataggcacaggacacaacccataa

SEQ ID NO: 42128 - DNA, 558 bp, Zea mays
  Peptide Sequence Number=SeqID_85503
atggaacgaattaatatatggatctctcccactcagacacacagtcgccgtcaatcgtctgtagcagccaatcagccatggcgcaacccactgtcggctgccgcctgccggcattcgcagataagtggccggtggtataaactggcgcggccagtgatcggctgggcgcaccgcagagcgagggagggtgaaggccacaagggcaaggggcaagggccgcttgggcattctgtcgaacttgtcgaaggcgttcgattcttcaacgagcacgctaatcccacatgccagccatttaacaaaagcagcccacttgtaatgcgactccacctggcccggcctgcccaatcccctttcatctccaagccgaaaaaacacccacagaaccctaccctcccgagtcccgaccccgtcctgctcgctccgccgtccttcgcccgccacccgccacccgccggactgccaaagcccggaggcctgaggcccgagttacgcgaggagcagccgaaccagcggcccggcgcctcatccctcagcggccccgcccctggggccgtgtag

SEQ ID NO: 42129 - DNA, 1600 bp, Zea mays
  Peptide Sequence Number=SeqID_85504
cctccgatccttcctcgagtgcttgctgtctggcggaacttcaactgaaacagctgacctgactactagtgaagcaaataaccaggagagctctgtccaggacggtttagacaccacttgtgctaaggaaaacaagggaaacgacggtgtcgataatgctgctgagaactcgactcaaatttcagaatcctctgatggtggccaactatcactgcaggacaacaagatgggtgattctgatgctgcagatgcgaatagatcatcagcatcttcgacgatcgtgtctgaaggcaaggaaagcatactcaaacacgactgtgacagcgtccaggctccaaagctgggtgcttcagctgctaacggtccatcgtccaagagcaaaagaagttaccgagtcaacattcttcgctgcgagagcttagcttctctggccccatcgacgctagagagactccttgctagggactacgacatcgtagtgtccatgatccctctcccatcttcctcagtcctgccctgcccatctggtctagtgcattttggtccgccttcctactcttccatgacaccttggatgaaactggcgctgtacacatcagggacctgtggcccggtatctgccgttttcatgaaggggcagcggctgaggttgctgcctgaaccattggccagctgcgagaaggcgctgatatggtcctgggatcagtctgtgccattaagcgaacacgatcttgacgagacagggagcatcgtcaccatagacgtcccgctgccgctgaaaaatgccgatgggtcgattccatccacggtagtcggcaccgacttgccggaggaccaggtctcgagtctgatcctcttgttagaggacctgtccaatagagtcgagctgagcacggttgggtaccttcggttgctaaggcttcacagggcgaatgagtcgtccgagcacggaagctttgagtgggtgcctctgaccatagagttcggcatccctttgtttagcccacagctctgcgagaggatctgcgagagggtcgtcgagtcacagatgcttcagaaagacgacatcgctgagcactacgagacgatgcagaacgtgaggaggaggctgagagagctgtgcaccgagtaccaagcgaccggcccaacggcgaggctgttcaatcagcggggaggctccaagaacaactccccgcgcaaactggtgcagattgtcagcggcagatggagcccgttccatgatccgtctacgcccactcactccagtagcccccccgctgaacacgaaagagccaaaccagcgagacggcagagatgcttcaccgaagttctgagctttgatgggaggatcctcaggtcatatgcgctcactcctgtgtatgaggctgctacaagatcggtctccgaagagcagcctaccacgcccgcagcgaaaccggatcacgaggacgccaacaccaaggacgtggccttgccaggagtcaatctgatattcgatggaactgagttgcacccgtttgacatcgttgcctgcctccaagctcgccagcctctctcgttgatcgccgaggcgtcggccacatctttggcaatgaaatga

SEQ ID NO: 42130 - DNA, 939 bp, Zea mays
  Peptide Sequence Number=SeqID_85505
atggcggcggagtctatcaaagaggcgaaaggcgccaagctcaatcctggtcttggggttcatcatctccaggcggggcatcgaagcccacccggagaagatcgcgaccatcgcacagcaccccgagcccttgttgggggcactcgggggctacgcgctcatcgccaaggttctgaagcccgcaacgtacaagctggccaacagtcaaggcgaggtctacggcaacgcttggaacatccaacagctacgtcgcttctacccttaagatgttttcaagagcctcatggacgggtaaaagtgcgcgtaagcggcaaggccgagccgagggactcctatgcctccgggatacggatacctcactcatcaccttccgcgagaagcaactctcgctcgcacaaacatccctattaccgacaaaaaagtccagatactcgaaacaagaggaaaagagacgcagctttacaacacaacgagggtgtgttctggcctcagcggccgcaggagacacacgctacaagacaatctgatcctgcaggctcgggtcttgatgctggaaggggcagcagcaccctcggcatcaacgacaccatcggcgagggtctcctccgggaacccggcccgagccggcggctcggccggtcaccccggggcctcggccagccatcctcagagggcgccagcccgacccgaggcttcggttggtcaactctggcgtcggtcccgctaacggacgacccggctaggctccggccaaccaggtttcattttcgagccaactctgcccctgttcatgctgatgtcgctacccctggcctcggctcatccaagagcggccgaggggtccctttaactaagctagaggagcctcggacaacaaggccgaccgagccgagggactcctacgcctccgggatacggatacctcactcgtcaccttga

SEQ ID NO: 42131 - DNA, 318 bp, Zea mays
  Peptide Sequence Number=SeqID_85506
atgtcaatctgtttccaggatattgaaaactgtgggaaacctctatttagagagatcaaattagaacggaattacttaacgagggataaatactctgccacttcgagtacgaaccatcgtttaaggaagacttgcactaaagaacaaggtaaaacaatcgaccgcgtccgtttccgcactggattcgttacacgcaaagcaaagcaaaagcatcagctgcatattgcctccctccggaccaaaagctatgcgattcaggtcttgggtctcgaggtcacaacagattcttggtctccggcaggaccagcacttggttga

SEQ ID NO: 42132 - DNA, 468 bp, Zea mays
  Peptide Sequence Number=SeqID_85507
atgatgaacaaagtgcaaatcaagagtaaagtgctagaaacaggaaaagaccaatttggaaaagacttggcttggcagccaagactctgcgcagtctgggtgcaccggacagtgtctggtggtgcaccggagagtgtccggtgcgctaggctggctctggcgaactggctgctctcgggatttcgtcggcggcgtacggctaaaattcactggactgtccgctgtgcaccggactgtccggaaagaaatccgcaccggacagtgtccggtggtgcactggactgtccggtgcgccagacgacagaaggcaagaattgccttcctggaatgctctcaatggctcctagctaccttggggctataaaagggacccctaagcgcatggaggaggacaccaagcattctctaagcattcctgagcaccaagactccaattccgcgcattcgattctttgtgatagcaactag

SEQ ID NO: 42133 - DNA, 717 bp, Zea mays
  Peptide Sequence Number=SeqID_85508
atgagcaacacgagatctagtggttacctccagtcgacgtttcgaccccagggggtccctggaccgacgagtaaattgtcgctgtgtgtcccagcccagatgggtctatgcgagatggaacacaagggggaaaaaagggaaccgcggctcgtgttatcctgcacccagggcagatgcgcttgcagtaggaggttacaagcattcgcgagagagggggagagcctgctcgtcagcccgtcctcccacgcggccaccttctcgtacgagggccctggaccttccttttatagatgtaaggagagggtccaggtgtacaatgggggtgtagcaacgtcgggcgaggcggtgacttctctgaggtcgaggctgagtccgagccctagggtcggggcgaggcggagaccgtcttccgaggtcgaggctgagtccgagccctggggccgggcgaggcagagaccgtcttccgaggtcgaggctgagtccgagcccttggggtcgggcgaggcggagaccgtcttccgaggtcgaggcgggggccgagccccggggtcgggcgaggcgaagcttcctatggtgcctgaggctggactcagctactgtcagcctcaccctggcaggtggcacagcagtcggagcagggcaggcggcgctattttcctgtcaggtcagtcagtggaggggcgaagtgactgcggtcacttcggccctgccgactga

SEQ ID NO: 42134 - DNA, 711 bp, Zea mays
  Peptide Sequence Number=SeqID_85509
atgggtccacagatcccagtgggggtcaatccccaaaaatccttcgcaaaccgccgcgaagatggccgcttgcacgatggagttggggttgagattgtgcagctccaccccgtagaaatgcaggatcgcccacatgaaacggcttgctggcactccgaacccccgctcatggaaggagacgaaactcagcacataccccggcggcggggccagggcggccccgctcggagggaccatccactccggctgcgggtcaccagagaggggacggagcaagccatcggcgacaagggcctccagatcgtccaccgtgacggtggagaaaggccacgggtcgcgcggtggaacgacgattacccggtcggccatcgccaagcgaagggggtggcggcggagtggacaagggaccgggaaaggggatactccgaaagggatccttcttcgcgaaggaagcgggctccgagccctcctaatgatctggggttcgaaggctggcccctcggaagggttcgacagccgccccagagcactcgggctccgcgcccactactgatcagaggttccaaggctggcccctcagaagggttcgacggccgcctcagagcactcgggctccgcgcccactactggtcagaggttcgaaggctagcccctcggaagggttcaacagccgcctcaggccactcgggctccgcgcccactactgattag

SEQ ID NO: 42135 - DNA, 141 bp, Zea mays
  Peptide Sequence Number=SeqID_85510
atgggcaagaacaacaagcgcaagcgtgagccaactcctccatcggaggagtttggtgactcggagtactcagaggaggagttctcctctgagtcggaggggtctctggctcccgtccccctgcgaatagccgtcgagtaa

SEQ ID NO: 42136 - DNA, 723 bp, Zea mays
  Peptide Sequence Number=SeqID_85511
atgcgccaaggggtcccttttatagccccaaggcagctaggagccgttgggaacaaatctggaaggccatctttgccttctgtctcgtggcgcaccggacagtccgtcgccggagaaaaacccgagagcggcctcttcagccgaggcagcctggcgcaccggacactgtccggtgcaccaccggacactgtccgaacgtctttcgtgcttttcgactacttcgaaagtgggatcctgaaaacgacggagtacacgccaaccgagccgagggactcctacgcctccgggatacggatacctcactcatcaccttccgtgaaaagctcggacctcgacggagggggagcagcagcaccctcggcgtcaactacaccttcagcgaagtccgacctagcctcagacgacaacacggtcggaggatctccactccgaaggacgacatcagcaccgcgcccgggccatcgccgccagggtcttctccaggaatctggctcgagcagacagctcggtcggccaccccgaagcctcagccagctgtcccccgaggacatcagcccggctcgtggcctcggcaactcgactccggcgtcggtcccgccagtggacagcccggccaggctccggccgacgaagtcttcttttcgagccaactctacctctgtccacactgacaccgctgccttcggcttcggctcatcgaagagcgaccgagggatcatttaa

SEQ ID NO: 42137 - DNA, 842 bp, Zea mays
  Peptide Sequence Number=SeqID_85512
atggagattcataagcggcttgctgaggacagcagcgtgcagtacggtggcaggagcagctactacctcagaacgcagaagttgttcaatgtttggatgcgaaagctgatttgccttatcgccaatggtaaactgcagacagaaccaatcttaaatctcgttcatggtttaatatcatttgataaatggtactctggcttgcctaaagatatgcaagttgaggattttgatgtttatgatgaatcatgcggtattccgatgaagtcaaatggttctgcaggaactgatcttctggttaattcagatgaggatagcatgaatattgatgagtccagtttggctacttgctcttcagaaagttctatcaataatgagaatatagacaaaaaaatgaataacaaacctggttttcttcaccctaaagaggaaatggatccacttgaatcacaaggaaatgaaaacttgcgaagcatatttttggatacctctgatggtcctacttgtggtgggccctcctcggtagagggggaggggccatcggtcgtcgggggtcaattgcgcctgaccctcgggctctggttccttagggactttgcctcaaggtcttcgccgcattcccatttccccgcgacaaagccggaggggaacaatcacccttcggcctcgccaagccttcgcctcgggatggccctgtcgcttaggcggtcgggcgtgggccaggggggcctttgggccctcccaatccgcctttgcttgaagaggtcgagcccccgctggttgctgggggcaaccaagtttgtggggtgccttcgaggagcaaaggggccccttgtcctttcgcg

SEQ ID NO: 42138 - DNA, 333 bp, Zea mays
  Peptide Sequence Number=SeqID_85513
atggctgcagcggcgtcaggcggcgacaccccgaagcagctcctctccatcatccgcgacttcgcctacgagaaatcgcacggcgagcgcagggtgtccgacctcaggcggcgcctcgctgatgcgcgcgccgcggcagacgtggccgcggcggagctcgacgccgcgaagcgcgcgcgggaggctgcggagcaggagtttcgcgggagccaagtgcaagacgcgatcgccgccgactccatccttgcgctagaggcgacgatctcgtgtctccatgaggagatctcgaaggccagcactgatctggacgcgctcaaagttagagcatcataa

SEQ ID NO: 42139 - DNA, 309 bp, Zea mays
  Peptide Sequence Number=SeqID_85514
atggcccttggtgatgatgtcatggacagcgacgcatggtggtcagtcaatttaagaggggaactagcggaccgagaatatgctttgcttctaggtctgggagtgacaaggaggaagagaaatgagcgtcgggtttctgagccgagcataaaagacatgaaccgtctttctcatggtgttcatgatcttcatgctcgaagacgtcctgcgaggcctagaagtgctttgcctcttgctggtaggcctcaggtagagagaccacagggtgatagtgactttggttcttacttcccgagcggagcacaatga

SEQ ID NO: 42140 - DNA, 423 bp, Zea mays
  Peptide Sequence Number=SeqID_85515
atggcacggctggctaggcttgcacaaagcgagaagaggcagcaaggacgcgacgcgcacgaccggcgcgacagactgcccacgccgaccactggcactccagactccactcctactcgctctgtttctcacggccgccgtccgcgcgagacgaggccccgtgggttcagttcaggcagtaccagtacgaatcacatcaaggatggggaatctagatcattttttaataggaaaatagaattgtcatatgaaatcgtaatatgcgacctcaccttcaggaggagggagaactcagttataatgtttggtagtttagggtcaacaaagagaataaggtgtaatcttaaaattctagaagaaagatccaaacggggggtggccatcgggatcattgtcgagaatccagagttggtgcccctcgag

SEQ ID NO: 42141 - DNA, 420 bp, Zea mays
  Peptide Sequence Number=SeqID_85516
atgtcacattctattatttgcactgaaggattggagcagagcttgctgcctttaaagctgaagttcgctactggggcttccaatgattgttttgataaatatatgaagtacaagtcagtgcctaataccttgtatgaagatgcagaaaaatgtctaagattggctctttattcaaatccgccagtgatggctgcattattgccactaatacagattctcctcctaggtgataaactgaaagttgcactaaatgagcttgagaaggcctgcctcagtttagctacagccctccctttcaggttgagaggtaggttggtaaaagactatgaccaaaaacaggtatcaaccattttctccttttatgaggaggtcaggagaagagatcatacatgtacggtctccatggagaggctaatctaa

SEQ ID NO: 42142 - DNA, 1047 bp, Zea mays
  Peptide Sequence Number=SeqID_85517
atgtcttcgcgctcccttatgcatcgtgtctttccaccttccaagcccccggatgggggatacccgccgtctttttgcctcatcgttggaggaacgcaactccgcgggagttggtacctttcagccatcgttcgacttcaaggattttcatctgtcagcccggctgtaccctcccgccggcggtcacccaagacggtgaccaccagcccctgggtggggagaagcaagccgggctgcgatcttggtcccaccctcagcttcaaggatgttcatcatccttgctggggtgggggccgggctaagccagagctctacctcccgcgcgggtttgtgggtcaccctcccctgcggcgttcgagggagagggcgctcactggccctgcgggcggcccggacttcgacaatgtggggctggtcgacggcgggcgtcgtcacccccagcgtgtcgagctcgtcggcttggctcccggtggcccctcctgccggaaggcggctgtcgcgccgtgtgcacgggaggaccgccctaggtgtcgcgcactgctaggcggcgttcgtgttctggggtggtcctgcctttgcaccggtatggcgcctccacacggaggtcggtgccccactcgtccggcaggatttgagtggggatctgccagagggctgatggcccccgccgtcggtgccgaggcggaggcggctcgagaagtccccgtcgccgacgggatcaccgccaccatccgcgcttcgggcctccggctctttgtacttgtcctcgcccctcgagcagcgggcggctgcgagccgctcgtcagtcttctgttgctccgcaggcccacccctatcgagtggggttactcgcctgttggttgcctgaaccgcttcaccaagcgtgagtcgccccgtgtcaaggtgacgagtgagagcggagatcctcggaccgcttcgccgttcgaggctaggtcggacctcgccgaaggtgtcgtcgatgccgagggtgttactgcccccttccagcgtcaagacccgagcctgcaggatcagagtgtcttgtag

SEQ ID NO: 42143 - DNA, 876 bp, Zea mays
  Peptide Sequence Number=SeqID_85518
atgggtcggcgcgagacggagcgcgaaggggggaaaccagagggagacaggcgtaaaggggaaacccgtgaccttcgtgtttgtcccgcgcccaggtcgggccgagtccgagccctagggtcgggcgaggcggagttcgtcatcttccggggccgaggccgagtccgaaccctgggtcgggcaaggcggagaccgtcggctgaggccagggctgagtccgagccctggggtcgggcgaggcggagttcgtcgtcttccgggggcgaggccgagtccgagccttggggtcgggcgaggcggagttcgtcgtctttcggggccgaggccgagcccagggtcgggcgaggcggagaccgtcggctgaggccagggctgagtccgagccctaggtcgggcgaggcggagttcgtcgccttccggagccgagggcgagtccgagccctggggtcgggcgaggcagagtttcctatggcgcccgaggccggacttggctgctgtcagcctcactctgtcgagtggcacagcagtcggagcggtgcaggcggcgctgtcctctcgtcaggccggtcagtggagcggcgaagtgactgcggtcacttcggctctgtcgactggagggcgcgcgtcaggataaggtgtcaggccatcctcgcattaaatgcttctgcggtgcggtgcggtcggtcggtgtggcgatctggccaagtttgctttcttggcgaagactgggcctcgggcgagccgaaagtgtgtccgttgcttgagggggccctcgggcgagaggcttgtgctgatgggggttaccagctgagattaggagtcttgggggtacccctaattatggtccccgacacagttgtagcccattttacataa

SEQ ID NO: 42144 - DNA, 525 bp, Zea mays
  Peptide Sequence Number=SeqID_85519
atgcaggcggcatacaaccgcaccaagggggcgcaccctttcgacttcaacgcatccagcatggaggcccaggcccacacgtcatgtaaccggcgcgccggttgctacgtgcaagaaactgtaccaccactcgcgccactaccgtgcatcctcgactgcggaaccagtaccacgactcgaggcaaccctgcgcatgacccaacagtgccaactaggcacatcggtcacggggcaggcggcacctttggcaggagaagcaggcgacgcttcgcttccaccataatgaccgcgtcaaaaaagggaccgggaaaggggataccccgaaagggatccttctccgcgaaggaaacgggccccgagacccctactgatcagaggttcaaaggctggcccctcggaagggttcaacagccgcctcagagcactcgggctccgcgcccactactggtcagaggttcgaaggccggcccctcagaagggttcaacggccgcctcaggccactcgggctccgcgcccactactga

SEQ ID NO: 42145 - DNA, 1092 bp, Zea mays
  Peptide Sequence Number=SeqID_85520
atggataaatattcacaatatctatattatattgataccttcggtttgccagaaggtgaaaatgcgagggtgacgcaagagcgattacagttcggcgtgaacaatgttgatcctagggaaatagatcttgccatgagaatcgccgaaaggatgttcctcaaaatgaaggaagatgaggcgaagaacaaaattgaagaagaaaatgatctatggagatcaaacgatgaatccacctcttcacaaggttcgtctttcaaatccacttctcatatgcgctttattgctaatgggagtgacagtgaaagcgaaagtgaggatgaggaggagcaagaaagtgatagtgaagatgaggatgatcttcaacaattcttcgctcagctaagcaagaaacattggatgagcttgctcaaactcatgaaaagagcagaagaacaaaaagaaatgcttcataagcaagaaaacttcctcatcagaaaaatcgaagacttagagaagttgaccaaagagcatgagaagctaaaggactccaactccaaactgctcaccttcaggaattctggaggtcgctccgctataattcaccggactgtccggtggcgcaccggactgtccggtgtgccagcggagcaacggctacttcgcgccaacggtcatctgcagaaggcattaaatgcgctacagtgcgcgccagagtcagagcagagccagacagcgcgccggacagtctacaggacctttctggtgcaccaccggactgtccggtgccccagaagacagaagcttcaacggtcagaatccaacagccaggtgacgtggcaggcacaccggacattgtctggtgcgcctgccacgtcacctggccgttggattctgaccgttgaagcttctgtcttctggggcaccggacagtccggtggtgcaccggacaggtcctgtagactgtctggtgcgctgtctggctctgctctgactctggcgcgcactgtagcgcatttaatgccttctacagacgaccgctggcgtgaagtagccgttgctatgctggcacaccggacagtccggtgcgccatcggacagtccggtgaattatag

SEQ ID NO: 42146 - DNA, 846 bp, Zea mays
  Peptide Sequence Number=SeqID_85521
atgggccctgcgccgagggagcccatgaagcagcgcgtgaaccgctgcctgctgcgcctctcggaccgggacacggaggcgatggccgcggcggagctggacgcgatcgcgcgcgagctggacgccgacgagctgccggtgttcgtggccgcggtctccgacgcgcggcccaccgacaggacgccgctgcggcggcactcgctccggctgctggcgctcgtcgccggggagcacccgcgggacgccgtcgcgccgctcgtgcccaggctcctggccgccgcgctgcgcttttttttgggacccggactcctccgtgcgcgccgcgctcgtcgacgcggcccgcgccgcggcgggcgccgcggcgtcgcctcccgcggcgctggccccgctcgccgacgccgtgctccacgagcaggaccagcctcggagcccaccgacgacctcgccgcgtacctccgggggctcctcccgcgcctttacaagctcctccgcagcgcggcgttcaaggccaagcccgcgctcatctccctcatcggcgctgcctcggcagcctccggcggtggagccgcctccgccgccgtgccttgcctccgcgacgcgctcactgccgacgattgggccgccaggaaggctgccgccgaggcgctcgctttgttggccctcgagcacggagacgacctcgtctcacacaaatcttcctgcattaccgtcttcgaagccaagagatttgataaggtgaaaatagtgcgcgagtccatgaaccggttgatcgaagcatggaaggagatcccggatttggatgaggaggttcgcttcgataggtgggagaagcatcaggcagcataa

SEQ ID NO: 42147 - DNA, 504 bp, Zea mays
  Peptide Sequence Number=SeqID_85522
atgtggtctggtggatattataacaccatccaactacttgaggcaatagctttacatttagattccgtcaatgggaaatcctgcatctgggaagagcttgtatcatgtttccttcggcttttttctgacaatactgctgactacgaggattgcatatcatgtactaatacccatgggggtgaatcattggaggcttccagtaaattttcttcagtcttttttgagcagtttaccagagaatcatggaaggcccgatgcagatggtgggcacgccatcatttcagccaaaatgcttatacatcagaagctcagtcaggtgattgcaagctcctggctgccaaggcagcttgtgctgctcatttgtttggaccagaattcccatatgtcaaagcagttggtgtctatattgcaaagcaagaagctctggacgaaatcagtgtcctagtcagaaataagcagaactctgtcaggctattacaaactttggagaaactaacacgatga

SEQ ID NO: 42148 - DNA, 120 bp, Zea mays
  Peptide Sequence Number=SeqID_85523
atgccaccctggcgaccaacacacgcaccccgggcctcggccgccgtcgccctccgcccacagcgcgagcgccagggcgcccaagctcctcaggtgtgttcaccatttctggaatcatag

SEQ ID NO: 42149 - DNA, 180 bp, Zea mays
  Peptide Sequence Number=SeqID_85524
atggaggtgctcacggggatggcgtcggcgaggctaggcctagcgtcgcggggagccggggcgatgggggagatgctcccaagaccagtgatcgaacagtttgtgcagaatcaatctaagagaggaattgtaagcaaaggacacagtgttactcaaggaaaacgagtattgtgtgcatga

SEQ ID NO: 42150 - DNA, 270 bp, Zea mays
  Peptide Sequence Number=SeqID_85525
atggaggacggacgagtggccgcgctggctcgcgacgagcagcggctgagctctcgtgtggacgaggtcatggttgggcggtcgtggcaaagagagaatcctgggttgtacaaagataatgattctcggccaagtggaaatccaggaggcaaagcaacagatactaaaaatccagatggtgttggtgcaggacggagagaagctgcgagtgatgaactcatgcttcagcgtttccgcaaacgagaaaaattccgcgcccttcgaagataa

SEQ ID NO: 42151 - DNA, 588 bp, Zea mays
  Peptide Sequence Number=SeqID_85526
atggaggaaaatgatgtctgtctgactgccattgtcgaccaggactttgtgcaggtcccagcctgccacgctgcagttgataaccatggcgttgatgtggggggcgctgcgcaggtcgacgtctctggtcccgcttctgccgctttgtgtcgaagtcggtgctggacccccagtgatcatatgaatgactccgcgatacggctgatcggcgaagtcttcttgttttggggcgtgggggtgggggatgttctgatgttgctggtgtggaggtgggggtgggggagtcttcgccatgaaaaagacagtagaatcggcgcggcggctgcgcacgcccccgacccctaccgcgagttccgtttccgcggccctggggggatactcctggcggcgaggggcatcagctgcggggtgctggttggcgatgttgtgcacttgctgctgattgcggctgtctcgaccggagtctggctgcggagtcctcgtccacgtgcggctggactgtggagcatctttgggtttcctctgagactcgaccttgcgctggtggagctactcagattcggtgaagcctcaaatagcgagatatag

SEQ ID NO: 42152 - DNA, 477 bp, Zea mays
  Peptide Sequence Number=SeqID_85527
atgggaaggcatctagcgagggcatacttcgcccaacgcccagccatgcgccaaaggccacaccccgtatgccacaaactcctcaaccaaatcgcgcccgctgctcaggccggcggcgcaccgaagggccccttcgtccgcatcctccttcgccacttcaaacggcgggacttctcccacaaatctgtgcgcaggcaggcgaagaccagcgacaaagaacgcctcgaacacaaccaactcgccttccggctcggggacctcctccgtccccggaacacgagcaactccgccgccaaactccagttcaaggagcacaaggagcagctgatccaagaggcaaaggcgaagttcctggccaacttcaaagtggacaggaacaacaaggtcgttcggcaacaggcgacggatctggcttcgcttcgacctactatgactacccccgagatgaacagcgagaacaaatgcaaaatatcatag

SEQ ID NO: 42153 - DNA, 1008 bp, Zea mays
  Peptide Sequence Number=SeqID_85528
atgcgggcggcatgcgaccacaccaagggggcacacctttttgactccgacgcatccagcgtggaggcccaggcccacacgtcatgtaaccggcacgccggttactacgtgcgggaaactgcaccgccacttgcgtcagtaccgcgccttctcgactgcggaaccagtgccgcgactcgaggcaaccctgcgcatggcccaatagtgccaaccgggcacgtcgatcatgggtcagtcagccacgggagaaggcgcgacgatcgatatggccaaaagtgggccgacagtaatggcggcggcaggcgggcggaagcagcggtcaagtcgtttggaggctcacgtcccctcctgggacagcgagagagccctctcccacggcgtgaagacgacgcgcccgtgtcccgctcctcgaacggctcgtgcacgcacaacagctgccccggaccgggaaaggggatactccgaaagggatccttctccgcgaaggaagcgggccccgagccccctactgatcagaggtttgaaggctggcccctcggaagggttcaacagtcgcctcagagcattcgggctccacgcccactactgatcagaggttcgaaggctggcccctcggaagggttcgacagccgcctcagagcactcgggctccgcgcccaccactggttagaggttcgaaggctggcccctcggaggggttcgacagccgcctcaagtcactcgggctccgcgcccactactgatcaggggttcgtaggctggcccccgaagggttcgacagctgcctcagagcatgtagagcgagggatgactctgggtacgtccgatacatggtcgaggctcgggctacgctcccgaggtaccctaggacatttccgagaccagcaggagcgattctgtaacagaatcccatcagagggaggcatcgagccctcagaccctatcaaacgggaccgggtccgggcaatcacctgtaggtacttttggagcgcgcccctgggccactag

SEQ ID NO: 42154 - DNA, 288 bp, Zea mays
  Peptide Sequence Number=SeqID_85529
atggggagtccaggtctgagatattggacaactaaggctcgtagcgtggtagcagtcggcatatgctacgaagttggtggtggtgttgtgtcgctttggtgggtccagggctgggaagacactcgcattctctcgcccttctcggaccaatgcctggtgcaggtcttcgtcgtgtccttctccggcaacgaacaggggcggacggtccgtgaccaggggtcggacagtccgcggcctggtgcagggctcaggttttcctgcctgacggtcggacagtctgtgccctag

SEQ ID NO: 42155 - DNA, 270 bp, Zea mays
  Peptide Sequence Number=SeqID_85530
atggatgagcacgatcaatatgagtcaattggtttagatgattcactcgaggatgagaggaatcttgatgaaaccatggctgatcgaagggtcgtagaagtagagcctaatgcaagggatgtgaggactggtgtagcagatgacaagaagtatgccttcaagacaagttttagttactgtatgatattagagaaattatcatatttatattctagattaatgatcttgattgaactaccgaatgagtatttgatcatcccagatgaatag

SEQ ID NO: 42156 - DNA, 198 bp, Zea mays
  Peptide Sequence Number=SeqID_85531
atggcgacggcatgtacggaaccgaccctacaatgctggtggtgtcgtcgttgcggtttcatggacgatggatggatggaccagcagttattatttgcaagacgtggtggtgggcttgtgtctaacatcacggaggagaagaacgtgttaagagcatctccaacaatgcctcaaactatagggcaccctctcaagtga

SEQ ID NO: 42157 - DNA, 1009 bp, Zea mays
  Peptide Sequence Number=SeqID_85532
ggctgctaccctagaaccaagcctgcgacagaggggtataacctcgccggagaagacagctatccccatggaccgaaggtccatgacacctggtatcagctccaggttatcctcaccaccaccagccgcctatccctcaccaccaccagccgccgcgcaatcagccgccgcaacgccctcccacccgccctctccaactctagatgcattcactcggctcaaagagagttttggtcgtctcacagagaagtgggatcagttcgttgtgatgttccaccgctacaaggagaagacagagaaggaactccaagcagcgttgcggcttcaggcggcagcgcgagggttcctggcacgccgccaggtacagtcccttcgtggggagaagcaccttgctgtggcctccagggccaccccatggccgtcatcacatgagcaggctgtggtgcgcctacaagccgcagtgcgcggcttccttgttaggcgagcggtgcggaagctgcacttgctgattagctcatcgctgcaccaactcgcagcctgcgcgcccaaccaccaggtctcgtctatactttttgaaccctctgcagaagtcgagatctgggtatgcagcccccctgcacggccaaagagggtcgtctccttcattcggacaactgccttggtgctggacaaacccaacataagaacgggctggttcctccttcacctttcatccaacgtgaagtccgcagttccgctctttccttgggatccaggaggacatagctgcagttctgtcggcgtttcgagacagggggtccctaagccgacgagtgagtgtgctgcgtgccccagcccagatgggtcgagcgcgtgggcgagcgcgaaggggggagaggcgaggtggccggagtcgagcgtgagagaggtggaagtcccgcggccttcgtgttcgtcccgcgcccaggtcagtcgtaaggagaggatccaggtgtacaatggggggtgtagcagagtgctacgtgtctag

SEQ ID NO: 42158 - DNA, 531 bp, Zea mays
  Peptide Sequence Number=SeqID_85533
atggaggtatgtcgccaaaccagcttttgccataatgaagatggtttccccaagttgctgagagcatgcacagttcgcctcggaatcagaagccagccagagtatgatggtcgtgaattcgtcgagcatggcacaaagaagtgtgtcgtgactgtatacattggatccagtccgcaccatgtggaatggagtgtcactgctgctgggcacagattcaaagacacctgccaagtcgtcgctcgcaaggcattgagggccctatatcagatctatgaagaagaagtggccgacaccccgctcagattctttccgccctttcagagaaaccgtcctgtttggatggccaggatacgtgcattggaagggtcaaggctccgtccactcaagggacacgatcccgcctcgcccgagcccagcctcgggcaaaggcagccgacctggaggattcacgtctcgcccaagggtcccctcaagcaacggacgcaccttcggctcgcccgaggcccaggcttcgcggagaagcaaccttag

SEQ ID NO: 42159 - DNA, 156 bp, Zea mays
  Peptide Sequence Number=SeqID_85534
atgacgcaggagatgactctggaggaatatgaaaagggctctgacaaggacttgaaaaagaaagaaagtgctgaaagagaagaacggggcaacaagggctctgacaaggacttgaaaaagaaagaaagtgctgaaagagaagaacagggcaagaag

SEQ ID NO: 42160 - DNA, 837 bp, Zea mays
  Peptide Sequence Number=SeqID_85535
atggctctttgtctttgtgcaatggtgactggtgcgagtggtgttctgaaatttattttctgcaagcaccaccagcatgcagactcttgcttgaagcagatcagcctgggtctgcactatgcagaatcaaagccagacttctcgccgattggctctgctctgctatatagtggagtaactgtggagtttggggatcaaggagaggactccattatcttgtcaccgtggctgaaggagattagtactcctgaccgccctgctgccctccgtttcctaggggagaagtataataacctcatagagagatgcagacctctgagctctgatgaggtcaaccatgggtgtttatctgttgttgagattgacccatcacacgagactgagctgcagtttgtccgagtgaaaaagaaaggaagccctttaagttcgatcacgtttctgggccagaggatgaccaagaatttgtgtcctgttctcgttgtgtcaccaggttctcgtggtgagggtggtatccttagaaatagtgaagggccattgaaggaccacatttatttgcatcaaaaccatctgccgcctgaggtactcaaagaaaggctccctggtatttctgaaactgctgctatttttgctggtgttgacgtcaccaaggagcccattccagttttgcctactgtgcactacaatatgggtggtatcccaacgaactaccataaggaggtagtggatatcaagggtgataatccagatgctgttatccctggtctaatggctgctggtgaagtagcctgtgcagcaccgcgttggtggatgatcgatcgtccagttgtatgtgactaa

SEQ ID NO: 42161 - DNA, 360 bp, Zea mays
  Peptide Sequence Number=SeqID_85536
atgagccgcagcctcggtatcccggtgaagctgctgcatgaggcggcgggccacgtcgtcacggtcgagctcaagaccggcgaggtctaccgcggctccatggtcgagtgcgagacactggaactgccagctcgaaaacatcaccttcacggcaaaggacggcaaggtgtcgcagctggagcacgtcttcatcagggggagcagggtcagggtaaaggctcagctgttggtgtcggccgaggccgcgcggtcgccatgcgggctagggctgctgctggtcgtggcggtggtcctgttggacgaggtggtgcaccccctgtgaggagcttttttgagaatttggctgtagaaagaatctaa

SEQ ID NO: 42162 - DNA, 210 bp, Zea mays
  Peptide Sequence Number=SeqID_85537
atggcgccctggctctgctgtccgtcgagctcgggcatggggaagcaggagcaccctgcgcgcgaacgagagggccgagcgggccctgagcgccatgctatgaggaagccgaacgatgggcgaagcagggcgcgccatggagaagaggaaggcgtgctggttctacaatttgtattgaaggtcaatcctcatatcttgaatataaattaa

SEQ ID NO: 42163 - DNA, 399 bp, Zea mays
  Peptide Sequence Number=SeqID_85538
atgggtgtaggcaagggacggcttgagcaagaaaggcggaagctcctcacaccattccggcaacaagcggaagcgcgagccgactcctccccggaggacttcggcgattccgagtacttggaggaggagttctcctccgagtccgaggggtcgccggtccacgccactcccccggcgtcgtttgacgactcagacgattcccaggggattgctgcagaggtgtggacatatatccgggccgtcgagcgcgctgggctcaagggctcggatgagtcggaggaggggagcgacggtgacgacggcgacgacgacgggggcgacggcgatggcgatggcaacggcgacgacaagggcggcagcggcaagggcggcagtggcagcggcaaagctagtggctag

SEQ ID NO: 42164 - DNA, 372 bp, Zea mays
  Peptide Sequence Number=SeqID_85539
atggcggggagcgtccgagaggagcaggaagcgaagcaccacttgcgtgtggagaagcccgtggctctctatggagttactcgaccaaggaatatccacccctccagagatatcatgggggtgatcacatccctcgtagccttcggccatctcccaattaccgatgaattggagtttgttggaatggttgaaagcggcgaggacctcatcttcgacgccctttgctcgaacttagaatcagacgatgtctccccaacgagcagtgatggcagacgtcccagtgatggggagagcaaagcacacattacccttgcaacccctgctcaaatggaaggggcaggcgtcattggtagcaccagagaaatggggtga

SEQ ID NO: 42165 - DNA, 399 bp, Zea mays
  Peptide Sequence Number=SeqID_85540
atggcagagtgcgttgtgaaccccggagcatgttgcgtggaccctttcatctcccccggtcgttataaggtggccctggtcgcggtcctcccctttcttttcgccttgcgcgcaccagtagccacaccatcgtcgagctctaagaaggacgctgccgccgcgccataccctgatttgggggtgttccggtaccagggtgggtgtctggagcttcctcgcgtgggagcaaacatggtagcgtcaacctgggagatcggcagccaccgtcgcgcccgtaattgctcgtcgtcgcacttctggacggtggatctacatgacgagcaagccactgtggatcctgaggttcagcagatagaagtagctgagcaggagctcattgaaggcaagttgtgcccttga

SEQ ID NO: 42166 - DNA, 510 bp, Zea mays
  Peptide Sequence Number=SeqID_85541
atggagcttgcagccattgactggtttaaggacaccaaacgtatggataacgttgctaggcagaagggttgtgttgctcaggttgctgctgagaaagggatgcatacatttattgtcaacatacagggctcctggttagtgcgacagagtgttggaagcaccccttgtctgttgggaaaggctgttgattgtagttacgttcgaggtcctgcatacttggaggtggacgttgacattggatcttcggcggtagcaaatggagttttgggtcttgtttttggtgtggtgacaacattagtagttgatatggccttcctaatacaggccaacacatatgaggagctaccagagcaagtgataggcgcagctcgactggctcatgttgaaccggccacagcagtagttcctgatcttagcaacacatcaaatgacagtagcaacagcaacgacgataatagcaacaacaacattggttcctcagaggatgatgtgtccaagaaaacaaactga

SEQ ID NO: 42167 - DNA, 1236 bp, Zea mays
  Peptide Sequence Number=SeqID_85542
atgatttatgtcctgtgcatttataacaagaaagaaaaggagcaccagataacgatcacaaatgaactcaattcacagatgggcgcttatgatattgaggatgcaatgacatggaaaaagaagatagagctcatcattgatctgcaacaagactctatcacagctaagaaccgtagagcctttgcttcagtggactttgacagggaacttggaggacagtttctgttttcagatcatgacaacacagcggaagatgacgacgaacgatccactttgactcacaggcctactatagggaacggattatttgaagctgaagttgtcactgttttggtattgccagggttgcgcatatttgaagaacttctggaagtagattaccttgcacgaagttgcagccgagctatgaaggctgttggtgtagctgaagccacatgtgaagccatttttggtcttgtaatgagcatggatgtaacaagatacgagttagtttggcctcgggatctttgttatgctcgatattggcgtcgtaatgatgatggaagttacgttgtgctgttccggtctatagaacatcctaattgtggtcggcaacgaggatttgtgagggcattcattgaaagtggaggtttcaagatttctcctctcaagtgtcacaatggaagacctcgtactcagatactgaactgtgttgcagatgaaatccatataatcccaagaattcatgtaatggaaaccatgtttgatgtggattcaaagccaaaatttcataagcttcaagaagttgaaaccaaggaaaataaaaacatgggaatcattgatgaagaatcagatgatgatgatgattatcaagttcctgaagctaatatagagaccttgaccaaaaccaatatacaggaagacccaaacacatctgacaatgataacaagcacacagacgtcaagggagcccccgccagggaggccgacagcagcgcacgcggctgcgctggtcaaggtgtcccgcgcccgcggcagaaaagaaggggaatgtcggatccggccgggaaggccacggcagcgacggatccggacggggagacgcgatccagccaaagggacggcggatcgagccgagaaggacgcaacaacgtggatccggccgggaaggccgcggcagcgacggatccaacgaatgcgaggaaggggagggcgacggggcggtttcagccaggcaggggcctgcgccggacctag

SEQ ID NO: 42168 - DNA, 123 bp, Zea mays
  Peptide Sequence Number=SeqID_85543
atggcgctcctcaaagttgttgattttggtcatccattttgtgagcctcgtctagggaactcctcatggcgctttgcacttgcgctcgaactcgtcgacgcgctgcttgatggcatcgggcgt

SEQ ID NO: 42169 - DNA, 1035 bp, Zea mays
  Peptide Sequence Number=SeqID_85544
atgaccaaaatcaacaactttgaggagcgccatctcaagctgccactggagtacagggtcatcggcgacatgatgaaccgtctcaaggatgccacggggaaagagcgcttcgttctccttcagaagctcaaccgagccgtcaggatcatggaaatcaaggaagcctacgaccccagtaaccctgcaaactttgggatcatccagcaccagcaggttggttctcctgaggatgtcgtgctcaatgccggctttgataaggagaagcagatgatccaaggggcagaacttgaggatgtcgacgaggaattcaatgatgtgaaggagagggatgatattctcatagataaactcgatgctattgaaaagaagattgaggggaagctagaactgttggatcataccttcggtaagaaaggcagagctttggaggaggaaatcaaggatttggtggaggaacgcaattccctgtccgagaagagcaggagacctatgtacagaaaaggttttgatgtgaaagttatcgatgttaacaggacatgcaaagtcacaaagggaggccaaatagcaaaattcacagcgctattggccactggaaattacaatggtgttgttggcttcgctaaggctaaaggcccaacagccaagattgcaatacagagagcgtatgagaaatgcttccagaatctccactacatggagcgatacgaggatcacacaatcgctcatgctatccaggccaaatatgagaaaacaaaggtgaacacatggaaataccgaatttctcttatatttgtcaatcctgctgtgatatatctctggcctgggccaatgaggagtggaatgtctgctgctggtaggactgttgagactgtgctgtacttggctggtttcagcaatgtcaagacaaagattatcggatcaaggaacccacttaatgtgattaaagctctcttcatagctttgaatgctattgaaaccccgaaggatgtccaacagaagtttgggcgtactgtcgtcgagtcatatttattgtga

SEQ ID NO: 42170 - DNA, 456 bp, Zea mays
  Peptide Sequence Number=SeqID_85545
atgtccatgatatgtaactgctgtgtacgtgaattgctaatcctggcacatacatggttcgcattcggtttgccttctaaaaccgggtgtgacaaaactctatccactgcagatgttgagactggaccgaaactctacaaacaccacagatggaagccctttggtgaagacgtcggtgaactaggaggtggtcgagacgtgaaggacgcgaacagctccacaggcaactcattcgcggacgaagtaaaggtcgatcttgacatgcttcgtgcactggtgctgggcggggttggtggagaggtagacgacgctgacattgtcgcagaaaaccagcatgctcgtggccagcaaactatggagcttttgaagaagctggccctcggcgctggagcgggagacaaccggctggcgcttggacgaccaggagatgaggttgtcccgaggaacacggcatag

SEQ ID NO: 42171 - DNA, 351 bp, Zea mays
  Peptide Sequence Number=SeqID_85546
atgtcgcacccggatagtccggtgcgccaccagacactgtccggtgcgccaaccacgtcacccggccgttgggttctgaccgttggagcttctgacaggtgggccaccggacagtccggtggtgcaccggacagtcactattcactgtccgatatggacctcggtggttttctcctagagatggcaatgggtaaatacccaccgggtattactaccccatacccatacccacgacacaaaaataacctcaccgggttacccatatacactagcgggtatggatttaccctcatacccatacccatgtgggtatgggtcacccatcgggtcacccgtacccacaaaaattaa

SEQ ID NO: 42172 - DNA, 531 bp, Zea mays
  Peptide Sequence Number=SeqID_85547
atggcgggacgacgtcgaccgactactcggtatggcacattatacctcaaccagatcgaggacacagtcatcccgacgccagcacgaggcgttagcgtctgtgcgctcgccctcagatcagtctactcctgggaagagctctacccgtggttcgtagaaaacttcgccagtgcttaccagcagcacggtgtggaggcccacctccatgcggtaaggcaggagcccggggagaccctctggaagttcatctcccgcttcaccaagaggggtaacagcgtctcatgccctacgcaccccaacggtcgccacagagccgcggagtttcgcgagatcattgacctcgcaaaacgcgtcagtgagcggcgcgagcagtcttccaaagacggctccccacctcgtcgccgacctggcaaagaaaaggtggacgacggcgaggtggccacggctgaacgggacctcaggtatcagtcgcccgagagggacctgaaggatgtcttcgctggaggctcctactccggtggagacaactag

SEQ ID NO: 42173 - DNA, 558 bp, Zea mays
  Peptide Sequence Number=SeqID_85548
atggggacccagggtcgggacctagccctacggcaagtaccagaccaagaagggctccgcaactctcccccagctgggaaggacccttcaaggtatgaactacctccacaccagcagggccgcgggattgctagctccgagcggctcgccagaggaggcgaccacctcagcaccgacggcagcgaccgcctctgcaccgacgactcgccagcagtggcgatcacctcagcacgtgcgccattgcgaaaaggtcctcacccccgtcttcctacggagggtgacaacgaggccattaaagccaaagagttggaggctcgacggcaggtggcactgatggtctcgccagcggaggcaaccacctctgcaatgggcagcctcaccagcgacggcgaccacctcatcaccgacgacagcggccacctccgcaccgatgggcggcggctacctcagcatgcgcgaacaggtcctcgctcccatccttactgcaggagtgaggacaaggccatccaagaacacgaccgccgcccccgcagcgtacgatgtcttgtacgaccggcg

SEQ ID NO: 42174 - DNA, 2766 bp, Zea mays
  Peptide Sequence Number=SeqID_85549
atggccgcgttcgccaaggcgcgtgtggcggctgccaagatcttccgcatcatcgaccacaggccgggcatctcctcgcgcgacggcgcggagccagagtcggtgacggggcgggtggagatgcggggcgtggacttcgcgtacccgtcgcggccggacgtccccatcctgcgcggcttctcgctgagcgtgcccgccgggaagaccatcgcgctggtgggcagctccggctccgggaagagcacggtggtgtcgctcatcgagagattctacgaccccagcgcagggcaaatcctgctggacgggcacgacctcaggtcgctggagctgcggtggctgcggcggcagatcgggctggtgagccaggagccggcgctgttcgcgacgagcatcagggagaacctgctgctggggcgggacagccagagcgcgacgctggcggagatggaggaggcggccagggtggccaacgcccactccttcatcatcaaactccccgacggctacgacacgcaggttggggagcgcggcctgcagctctccggtgggcagaagcagcgcatcgccatcgcccgcgccatgctcaagaaccccgccatcctgctgctggacgaggccaccagcgcgctggactccgagtctgagaagctcgtgcaggaggcgctggaccgcttcatgatcgggcgcaccaccctggtgatcgcgcacaggctgtccaccatccgcaaggccgacgtggtggccgtgctgcagggcggcgccgtctccgagatgggcgcgcacgacgagctgatggccaagggcgagaacggcacctacgccaagctcatccgcatgcaggagcaggcgcacgaggcggcgctcgtcaacgcccgccgcagcagcgccaggccctccagcgcccgcaactccgtcagctcgcccatcatgacgcgcaactcctcctacggccgctccccctactcccgccgcctctccgacttctccacctccgacttcaccctctccatccacgacccgcaccaccaccaccggaccatggcggacaagcagctggcgttccgcgccggcgccagctccttcctgcgcctcgccaggatgaactcgcccgagtgggcctacgcgctcgccggctccatcggctccatggtctgcggctccttcagcgccatcttcgcctacatcctcagcgccgtgctcagcgtctactacgcgccggacccgcggtacatgaagcgcgagatcgcaaaatactgctacctgctcatcggcatgtcctccgcggcgctgctgttcaacacggtgcagcacgtgttctgggacacggtgggcgagaacctgaccaagcgggtgcgcgagaagatgttcgccgccgtgctccgcaacgagatcgcctggttcgacgcggacgagaacgccagcgcgcgcgtggccgccaggctagcgctggacgcccagaacgtgcgctccgccatcggggaccgcatctccgtcatcgtccagaactcggcgctgatgctggtggcctgcaccgcggggttcgtcctccagtggcgcctcgcgctcgtgctcctcgccgtgttcccgctcgtcgtgggcgccaccgtgctgcagaagatgttcatgaagggcttctcgggggacctggaggccgcgcacgccagggccacgcagatcgcgggcgaggccgtggccaacctgcgcaccgtggccgcgttcaacgcggagcgcaagatcacggggctgttcgaggccaacctgcgcggcccgctccggcgctgcttctggaaggggcagatcgccggcagcggctacggcgtggcgcagttcctgctgtacgcgtcctacgcgctggggctgtggtacgcggcgtggctggtgaagcacggcgtgtccgacttctcgcgcaccatccgcgtgttcatggtgctgatggtgtccgcgaacggcgccgccgagacgctgacgctggcgccggacttcatcaagggcgggcgcgcgatgcggtcggtgttcgagacgatcgaccgcaagacggaggtggagcccgacgacgtggacgcggcgccggtgttccgcgacctgagcctccgtgcgcgcgccgggaagacgctggcgctggtggggccgagcggcggttatacgagcccacgtccgggcgcgtgctcctggacgggcaaggacgtgcgcaagtacaacctgcgggcgctgcggcgcgtggtggcggtggtaccgcaggagccgttcctgttcgcggcgagcatccacgagaacatcgcgtacgggcgcgagggcgcgacggaggcggaggtggtggaggcggcggcgcaggcgaacgcgcaccggttcatcgcggcgctgccggaggggtaccggacgcaggtgggcgagcgcggggtgcagctgtcgggggggcagcggcagcggatcgcgatcgcgcgcgcgctggtgaagcaggcggccatcgtgctgctggacgaggcgaccagcgcgctggacgccgagtcggagcggtgcgtgcaggaggcgctggagcgcgcggggtccgggcgcaccaccatcgtggtggcgcaccggctggccacggtgcgcggcgcgcacaccatcgcggtcatcgacgacggcaaggtggcggagcaggggtcgcactcgcacctgctcaagcaccatcccgacgggtgctacgcgcggatgctgcagctgcagcggctgacgggcgcggcggccgggcccgggccgtcgacctcgtgcaacggggccgcgtag

SEQ ID NO: 42175 - DNA, 474 bp, Zea mays
  Peptide Sequence Number=SeqID_85550
atgggggatacccgccgtctttccgcctcatcattggaggaacgcaactccgtgggagttggtacctttcagccatcgttcggcttcaaggattttcatcagccagcccggctgtacccccccgccggcggccgggctgagccggagctctacctcccgcgcgggttcgtgggtcaccctctcctgcggcgttcgagggagagggcgctcactggccctgcgggtgggtcggacttcgacaacgcgaggctggtcgacggcgggcgtcgtcagcctcagcgtgtcgagctcgtcggcttggctcccggtgccccctcctgccagaaggcggctgccgcgccgtgtgcacgggaggaccgcccacgatgccgcgcgctgctatggcggcgttcgtgttctggggcggtcctgcctttgcaccggtatggcgcctccgtgcggaggtcggtgccccactcgtccgggaggatctga

SEQ ID NO: 42176 - DNA, 270 bp, Zea mays
  Peptide Sequence Number=SeqID_85551
atgggggcccaggcccacatgtcatacaaccggcgcgccggttaccgggtgcggaaaaatcgcaccgccgctcaatgccacgtcttctcggggctcgcatcctcccctgacatgggcccgggggccactgtcggtaccctgaatcaggggtaccctcttctacagtatgaagacgctgcacccgaacgacacctacaggccacacggagaacagcacccgaccccaccatatgggcaggtttaagggcaccacgtggcaaggaaagataa

SEQ ID NO: 42177 - DNA, 567 bp, Zea mays
  Peptide Sequence Number=SeqID_85552
ggttgtcgcgctccaaacaagccgccgtcgctcccgctcctccccacatcgtcgctccctctcctccccacaccggcggcttctcagggttgccgcacgaacgccgccatcgcagctccgtcctcaagccttctccccgtcacgtcgtcgtctgagcagttcactaaccacctaaatccacatcagatggattcagcagactccatagccgacaaggcaattggaaggatgcaagagattgcggacaagatattttccgtagctcgtgaaacaatccgtccaggacgcgggttgacctcatttgaggctaccaaattacgtgtagcattggaggacattgcttgcatgcttgagcaagactctctggtgttgcaagagaatttggacaacgtgaacaacgtaaccaaccctggtcaaagcagctatgaatcgtcagccttgtcctcaccaccccctgctgacgagtaccttagtccggattgggactttgatgagcacttcgcaaacttctggggtcttgaatatgactccgaccagatgccatcgtttagtgacaatgaagtttaa

SEQ ID NO: 42178 - DNA, 411 bp, Zea mays
  Peptide Sequence Number=SeqID_85553
atgggaggcaagtgcccgcaccgcaaggtaaagaagcgccgcctatcccacaagacggctcgccgcggcaagttcctcctgaaggccgacgatgccgtctatgacgagctcgtcaagctggccgaccagggcaaggacgctgaagccaaggagctccccgtcgatgaggacctcccaggcctgggacagttctactgcctccactgcgagtatgcgcttcccctctcctctctttccctcccttccattccaccggtatgctatttcttatcctctgccaatacagaaactgagaactattcctgctgcaccgactgtaaagctggcatagctgaatatgtagagcttcttgttgatggggatgtctgcaagagcttaccgtttggtatttgcattgagaatggactgtga

SEQ ID NO: 42179 - DNA, 769 bp, Zea mays
  Peptide Sequence Number=SeqID_85554
atggcgcctcctgttgacgtggctggtctgcgccctaggttgggcgatgtggaagctcctccgaagccgaggtcgaggctgagcccaagtccgagccctgtgtcgggcggagcggagttcgccgtcttctgggacttagcccgagtccgagccctgggtcgggcggagcggagttcgccgtcttccggggctgagcccgagtccgatccctgggtcgggcggagcggagttcgctgtcttccgggacttagcccgagtccgagccctgggtcgggcggagcggagttcaccgtcttccgggacttagcccgagtccgagccctgggtcgggcggagcggagttcgctgtcttccggggctgagcccgagtccgagccctgggtcgggcgaagcggagcttcctatggccggtcagtggggcggcgaagtgacggcggtcacttcggctctgccagccggggcgcgcgtgtcaggataaagctttatgctgatgggggttaccagctgagaattaggagccttgagggtacccctaattatggtccccgacgcaatggcctcggcctctcgggcgagctcttcgcctcctccctctgccgcgtgcgaggcctggtcgcgctgagcctcgcatccaacggcttcgagggccaggtgcccgccggcctcgccacgctcggcggcatcctccaggtgctcgaccttggggagaacttgctctccggcgtgctccacccagcgctgttcggcaacctcaccagccttttgaact

SEQ ID NO: 42180 - DNA, 171 bp, Zea mays
  Peptide Sequence Number=SeqID_85555
atgagtgatggtgctggagctgttctcatgaaaagatatgtggctctgaagaaagtaaatgtaaatggaggcgtgattgccataggacaccctctgggtgcaacagaaaaatacaatgctcaccacttctttctggacacgtggtccctaaggatcctcttattatcatag

SEQ ID NO: 42181 - DNA, 534 bp, Zea mays
  Peptide Sequence Number=SeqID_85556
atgactgacacagggttgattctgggagaaccttcttcttatcttctcttcactatcttcttttcactgaccctttctttctctttgctcttcccactggaggattctatcaaagagtatcaccatcatacagaggaggaaaccgaagactatgaaacatgtacaagagtcttcaacccaataatcaccaagcattgtgatcttaggggcgagggagtgggaaatggggttgcttgcgatttggcagagggggttttatctggagtgtgctttgctttgagtgatatgggagttaagggagctggtggggggttttataggcgagtgttggtgtttggttgcggagtagtggtggagcaggtgacacaaggtaacaagttcgatggaggggggatggtgttgctggcggtaatggcggcggtgggtgcgctgcaaaaagggcatggggcggtggtagtgcgcatggaggcagggcacgcgtgcggggagcacgggggcagtgctttgattctcacggttgatccttttgactga

SEQ ID NO: 42182 - DNA, 294 bp, Zea mays
  Peptide Sequence Number=SeqID_85557
atggcgcctgggacccacgttgaccgcatcatccgccataatcaataccaggtccactggaaggcaaaaactcttgcgtggggccacaaaccagtcgccccagaaggtcgtctcatcgtgggtcgggcaaagattacaattgaaatgggccaacccaagaaggcaatgggctcgcgcccggatcgtccgcggattatgcgtaatcttaagggagccgtctatctttcccgtgcgagatgccctcaaatgccggggatagatcgggatgaagccattgggttttccttaagataa

SEQ ID NO: 42183 - DNA, 273 bp, Zea mays
  Peptide Sequence Number=SeqID_85558
atggagagagcagaagtgaatgaagagatagagtgtggggggtatttaaaggatcccccaaaagctgacagccgttgggagaagtggaccaaaaaccggttgaaccggttcttaaaccggttgaaccagtttccaccagagagttctcggttcactgagactggcaggtcagaggtgacagaaggaacagtgcagaaaccggttgaaccggttttaggtccggttgaaccggtttttgaaactgaaggacaagttttgagaaaactgaggtga

SEQ ID NO: 42184 - DNA, 834 bp, Zea mays
  Peptide Sequence Number=SeqID_85559
gaagtgcagaggatcagacacgaacatccagatgatgatcagtgtgttgttaatgatagagtgaaaggtcgtctaacagttacccgtgcatttggtgctgggtatctcaaacagtacctaaacaatgaggaggtagtgccgcatgttgagaattttatggagcggtttcctgagggtgatcctgcacagagtttaattgaggagctactctcccgtgctgcaaagaaagctggtaagcttattgtgtggtcttcttcttccaagcccgacgctcccaggaccacaccgtccaagccctcgagcgaatccgcgatacgcaagtggtggcgcagcctcacgcctgccctgctcgccgccgcactagcgatcacagtggccgcgctgcggccgacgatggagcacgcggacgccaaggggcggacgccgctgtggctcacctgttcggctgctcggctggcagcttttctagcctcgcgttgtcgtgatcagggtggaacgaccatcgggcacgaagggttgcaaagccacctcaaagagaatgtcctagagctcaagccacagaaaagaaggcaccaggcgcattggtggatctgtataggaaaagccacccaagggcgagatctggctccgttttttgtaaccacagccatctcattaatagtgccaacaaagattttgaaggttagaaattccctgtcgaccaagctccagacagagacaggttttggtccaagtgttgtggactcattcttctacaggaacacctatgggcgcaggcacaagaagggaacctccaccaataaggcaaccgagctagaagagctggaagaatag

SEQ ID NO: 42185 - DNA, 681 bp, Zea mays
  Peptide Sequence Number=SeqID_85560
atgtgtcgcgcgaagattgcgtggtcgaccgttggcgcaggcgaccgttggcgtatcgaacagtccggtgcaccaccggacaatccgggggtgccgggtgcgaacggtcgagcacggtggcggtcggagtggaagggcgagggtgcccagggagttgcagagctcgggctggaccgaagcaggcaccagctaggtggcgtctccggcgtaggggcgttgagcgaatgcgaccaggggagtggtgccacacggtcgggggagggaaatgagggcgagcaacacgaacacgaaccaggggacgtggctggggtatggcgtacctatgggagtggtgccacacagtcgggggagggaaatgagggcgagcgtgcacgcgcaggcggcggggggggggctcggtgtggatgcctccgttgttgtgggggtggggcaggagagcggatggtggggtgtgtgcgacgtgggggaggcgggatgaccggaggggatggggtcgatagcgggggttcaggccccaagctgcgcgctgcggcggcggcgcccgacccctgcatcctcgacgacgcgctcgtcgagatgttcggcctcctccccgccaattccctccaccgcttcaagtgcgtctccaaggcctggtgcggcctcgtcacggacccgctccactgccagcggttcgcgtag

SEQ ID NO: 42186 - DNA, 162 bp, Zea mays
  Peptide Sequence Number=SeqID_85561
atggccgccccgccaaccactcgccccatcgcattaactccacggcgggacaggcggcgcctctggcaggagaagcgggcgacgcttcgccttcaccgtaataattgcgccaaaaaagggaccgggaaagggggataccccgaaaaggatccttctctgtga

SEQ ID NO: 42187 - DNA, 444 bp, Zea mays
  Peptide Sequence Number=SeqID_85562
atgggcaagagtaacaaatgcaagcgtgagccgactcctccgtcggaggacttcggcgactcggaatactcggaggaggagttctcctccgagtccgaggggtctccggctcccgtctctcccccggcgtcgtctgatgattcagacgactcccaggggattgccgcggaagtctggacgtacatccgggccgtcgagcgctccgggctcgagggctcggatgaggaggactcggacggcggcgaggacgaggatgacgacgacgacgacggcgacgacgacgacggtggcgacggcgatggtgacggcagcggcagcggcggcggcgacgggagcaagggcagcaccagaggcggcagcagcacgggcagcaccagaggcggcagcagcaagggcagcaccaggggcggcggcggtggctgtagcagcaaggccagtggctaa

SEQ ID NO: 42188 - DNA, 201 bp, Zea mays
  Peptide Sequence Number=SeqID_85563
atggaggttgtcgcggccgtcctccccacgctggtgccctcaggaaacgcggtggtggtactcctcgccgacctcgggtatctcgccgccgcggagcagtgctccatcggctgttgcgccatcgggagcgcagggcgttttgagtctaggaacttttacggagtagcccttgagcttttggttattttgcgtgcagtctga

SEQ ID NO: 42189 - DNA, 390 bp, Zea mays
  Peptide Sequence Number=SeqID_85564
agcgtgaaagcttatttacggagaggcactgcaagggagatgctaggttattataaggaggccgttgatgatttcaaccacgcccttgttctagaaccaatgaacaagacggctggtgttgccatcaacaggagcgctaacgggctccaacctaagctcgttaccctgattgtgtggaactcacctaatgctagcgagctacggacactggacgttgcatgttgtgcggacccagtactgggatgtgcagcttgcaaagattctattccccttgctggttctaagcgcgacgccgtgtcgtcatatcgcacgaggcctaacaatttgacgccctgcgagaaggaagacgggcctctttggtttacgcataaggcgtcgtaccttacatag

SEQ ID NO: 42190 - DNA, 1227 bp, Zea mays
  Peptide Sequence Number=SeqID_85565
atgggggatgcccgccgtcttttcgccttatcgttggaggaacgcaactccgtgggagttggtacctttcagccattgttcggcttcaaggattttcatcagccagcccggttgtacccccccccccccccccgccggcggtcacccgagacggtgaacaccagctcctgggttgggagaagtaagccgagctgcgatcttggtcccaccctcagcttcaaggatgttcatcatccttgctggggtgggggccgggctgagccggcgctctacctcccgcgcgggttcgtgggtcaccctctcccgcggtgttcgaaggagagggcgctcactggccctgcgggcggcacggacttcgacaacgcggggctgggcgacggcggacgtcgccacctccagcgtgtcgggtgcgtcggcttggctcccagcggccccttctgccggggggcggctgccgcgccgtgcgcacgggaggaccgccctagatgccgcgcgctgctagggcggcgttcgtgttctggggtggtcctgcctttgcaccgggatggcgcctttcacgcggaggccggtgccccacttgtccgggaggatttgagtggggatctgtcggagagccgatggcccctgccgtcggtgccgaggcggaggcggctcgagaagtccccatcgccgacgggatcaccgccaccatccgcgcttcgggcctccggtccttcgtacttgtcctcgcccctcgagcgtcgacgtgggcgagggcaagatcgcagcagcacccaccctgaggcctgcgctgctgcagctcggccatccggagcgggggccgttgtcgtcgtagtcagggcgggcggcagcgtgccgctccaccaagactcgcctgttaattatctgaaccgcttcaccaagcatgagtcgccccgtgtcaaggtgacgagtgaggccaggggtagcggtatcagcatgaacagaggcggagttggctcgaaaatgaaacgtggttggccggagcctagctgggttgtccgtcagcgggaccgacgccggagtcgatcagccgaggcctcgggtcgggctggcgcccttggaagatggttggccgaggccccagggagcggagatcctcagaccgcgtcgccgtccgaggctaggtcggatcttgccgaaggtgtcgtcgatgccgagggtgctgctgcccccttccagcgccaagacccgagcctgcaggattag

SEQ ID NO: 42191 - DNA, 216 bp, Zea mays
  Peptide Sequence Number=SeqID_85566
atggaccggccatcccgagcatccatcggccaaattaaccccacctccgtgatcccctacctctgctcgtgccttgccatctctccgtcgacgcagaaccggaccaccggcgacgaaccgccgtcgggttcaccggcgactggttctcaccgccgcggaccgcccttcttccccccccgcggggggtggaagccgttaccacccttctccctctga

SEQ ID NO: 42192 - DNA, 1131 bp, Zea mays
  Peptide Sequence Number=SeqID_85567
atgcaaccggcgcgccggttgctacgtgcaagaaactacaccgccactcgcgccactaccgtgcctcctcgactgcggaaccagtaccgcgactcgaggcaaacctgcgcgggcggaagcagcggtcaagtcgtcagccaagctcacgtcccctcctgggacagcgagagaaccctctcccacggcgtgaagacggcgcgcccgtgctccgttcctcgaacggctcgcgcacgcgcaacggctgccccgcgaaccactcgtcccgtcgcattaactctgcggcgggacaggcggcacctttggcaggagaagcgggcgacgcttcgccttcgccataatgaccgcgtcaaaaaagcagggaccgggaaaggggataccccgaaagggatccatctccgcgaaggaaacgggccccgagcccccctactgatcagaggtttgaaggttggccccttggaggggttcaacagccgcctcagagcgctcgggctccgcgcccgctactggtcagaggttcgaaggctggcccctcggaagggttcaacggccgcctcaggccactcgggctccgcgcccactactgatcagggctcactggagacaccatgttcggcgccctccgagggcaacatggcgctcccccccccctcctccttgcggaaaggcgaagcaggggccgccgcccgcatcgctccgactgctgtgccactcgacagagtgaggctgacggcgaccaagtccagcctcgagcgccctaggaagctccgcctcgcccgacctagggctcggactcgggctcggccccggaagacgacgaactccgcctcgcccgacccagggctcggactcgagctcggccccggaagacgacgaactccgcctcgcccgacccagggcttggactcgagctcggccccggaagacgacgaactccgcctcacccgaccccagggctcagactcggcctcggcctcagccgacggtctccgactcgcccgacccaagggctcggactcgacctcgatctcggaagacagactcaacctcgacctcggaggagcctccgcctcgcccaacctagggctcggaccgaccacgccacaggaggagccatcattaccctacccctag

SEQ ID NO: 42193 - DNA, 786 bp, Zea mays
  Peptide Sequence Number=SeqID_85568
atgtcttctcgctcccttatgcatcacgtctttccaccttccaagcccccggatgggggatacccgccgtctttttgcctcatcattggaggatcgcaactccgtgggagttggtacctttcagccatcgttcggcttcaaggattttcatcacacagcccggttgctcccctccgctggtggtcacccaagacggtgacctccagctcctggatggggagaggcaagccgggctgtgatcccgatcccgccctcagcatcgagggtgttcgtcaccctcgctggggcggggagcgaggcgagccggggctctacctcctgcgcgggtcggcgggccacctcttcttccagcttctagtggtggcaatcgccctccagccctgcggcggagacgtcctccagccatgccggggaaggcgaactgttgctgcccagctaggatgcaacattccgccctctccctcgcattcgcggcgaggacggcactggtttgcgtcccttgagcgggaccgcgaacgagagccctccggtggccgcgtccacccgggaccatggccgctgctgcagaggtcgctggcagcactagactcgcctgttggttgtctgaaccgcttcaccaagcatgagtcgccccgtgtcaaggtgacgagtgagagtggggatccttggaccgcgtcgccgtccgaggctaggtcggaccttgctgaaggtgtcatcgatgccgagggtgttactgcccccttccagcgtcaagacccgagcctgcaggatcagagtgtcttgtag

SEQ ID NO: 42194 - DNA, 609 bp, Zea mays
  Peptide Sequence Number=SeqID_85569
atggacgtcaaaaaggtcatgcctgaacgagtgctcgcaaagtactcagacatgttaagatcccatgaagattcattctttgtgaagcgctcgatagttctgcttcagcgcagtgatatggagttaccggatctcgtggagctcatagtgctcaacatcggccgcgaccacaactccacaaggtgctcaacgaggaggggttcccttcctcgtgctcatggcgctcacaactaccttgatcaaggccacccggccttcaccgcgatggaggcttcccgcggcacgcggcggagcaagctcacggtgctcaccatgtacgccatgcaccttgtcgacctgtcggaacggttgtcggctatctccatggggcagcgcgcacgccgcaacgggctgccgttctcgtgccggcgctggcgcgacggcggggcggagatagtggtggcttacgaggcattccggcgcctgagggctgttgcagtgaagcctatgacggccatctctgacctcggcaccatccacgagggcatgatgacggcatctttttctttgattattaaatacatgaagaatcattttctttattttcatacagacggacccttagtataa

SEQ ID NO: 42195 - DNA, 657 bp, Zea mays
  Peptide Sequence Number=SeqID_85570
atgacgtacggcagcgggtggacgtacgtcttccaggggaccgagaaggccacgttcgggtcgtccacgccggcggatcaggtccgcgtccccggcatcgcgttcggatgcagcaacgcgagcagcggcttcaacgcctcgtccgcgtccggcctcgtcgggctgggcagggggagcctgtcgctcgtctcccagctcggcgcccccaagttctcctactgcctcacgccgtaccaggacaccaacagcacgagcacgctcctcctcgggccgtcggcgtcgctcaacgataccggcgtcgtccgcgcagcggtcctctccctggtgacgctgcccacgacagacggatcggcagccacggggctcgacctgtgcttcgagctgccgtcctcaacatcggcgccgccgtccatgccgagcatgacgctccacttcgacggcgcagacatggtgctcccggcggacaactatatgatgtcactctcggacccggactcggactccagcttgtggtgcctggccatgcagaaccagaccgacactgacggcgtggtagtaagcattctcggcaactaccagcagcaaaacatgcacatcctctacgacgttgggaaggagacattgtcgtttgctccggccaagtgcagcacgctgtga

SEQ ID NO: 42196 - DNA, 417 bp, Zea mays
  Peptide Sequence Number=SeqID_85571
atgtcggtgaacaacctctttgtaactgtctttgcaggcgaagaccttgtcctagaacgaaaaggtttgatagacaatgttttgagtgactacctgtgggcgaaagcgatccttctcacaacaaccacggtctccacaggatgttcagcaggagcaggaaactccgattatggaacaacaattgactggaaagtgttcatgcaggtcctaaattcaccatgggatgtatgctacgatcccgcagaggaggccgtgtatattgcaatggctgggcaacaccagatctggaagcacaatttacatgatggagtaaccaaagttattagcggtgatggctatgagaggaatctgaatggctcaagcgcagtaatgtttatgaagatggttaatgacggtttctatctgatgagtggctaa

SEQ ID NO: 42197 - DNA, 825 bp, Zea mays
  Peptide Sequence Number=SeqID_85572
atggctgatgcggaagctggtgaattctggggtttttttggcggctttgcccctcttcctaggagggcacctgcagaaggcaatgagaaacatgatgaaactgctttcaaattgctatgttttgaccaaggaaagctggagcctgtcgactgccaatctttagcacatgaattacttgagacaaacaagtgttacttcttagactgtggtgctgaattgtatgtttggatgggtagaattacatccctgatggagagaaagggtgctagtgaagctgctgagaaattgctctctgattcaaaccgaacaagaacacatataatcaaagtgattgaagggtttgagactgttacgttcaagtcaaaatttaaggagtggccacagacacctgagttgaagttgtcatcggaggatggaagaggcaaagttgcagcttccatatgcaagcaaattaacagtgttctgacttactttttccattatacttatcctggagatgataaggaggaatgtcttattggaacctggtttgggaaaaagagtattgaggaggatagggtaatagcagtttcacttgcaagtaagatggttgaatctgctaagtttcaggctgtccaggcgcgcttttatgaggggaaagaaccgatccagttctttgtgatatttcaaagcttccaagtgtttaagggtggtcttagttctggatacaagagatttatcgctgaaaatggcatcgatgatgaaagttattctgaagatgggcttgcactctttcgtattcaaggttcaggaccagaaaacatgcaggcgattcaagttgaacct

SEQ ID NO: 42198 - DNA, 678 bp, Zea mays
  Peptide Sequence Number=SeqID_85573
atgtccggtggggatggacctcctcccgtttttgatggtgacgattttccatattggaaaattcgtatggaagcatatttagaggctatagacattggtgtctataaagccgccacacaaggattccccgaacctagagatcccacaaatcttaaaaggatttggctctcaaaagcaaatcatgacagaaaaggaaaagcaaaaatacaaattgaggaagaatcctcaagtgatgatgaccttgatgcaaacattgccttgatggtaaggaagaccaccaagatgttgaagaagctaaatagagaaggcatcaaatttgattcaagaaagaagaaattcttttccaacaaaagaaagcccatttctgagatggactgctacaattgtggtgagctcggtcatcttgctcatcaatgtaacaagcccaagaagaataagttcaagggcaagaaagaagatgacagcgatgatgaaaagaaggaaaagaaattcttcaagaggaaggatgggaagcaaaagaggttccacaagaagaagaatggaaaggcatatattgttggtgactggctcaccgacattgaatcatcaagtggatcttcttcaagtgaagaagagaatgatgaaaaagttgccgccatcgccggggccttctcttcaccaccaccatcgccatcatag

SEQ ID NO: 42199 - DNA, 606 bp, Zea mays
  Peptide Sequence Number=SeqID_85574
atggccgacatagtgccgtcctctggtgatctgggtgcctgttgcctgggtgacttttaccgctgcttggaggactcgccgcttcggatttccggtcgtcgtgatctgggtgcttactgcttgggggcatcttcgaggagaccactcgccatttcgcgttttcgatcgtcggggctacgagccaatttttcaccaatgttacgtgacattcttctatgctatgcggtatatagtgctatgtctaattctccatgcgtgcgtgttgcgagtcgccacgaagcgaagcgcccgaggcacagtgcatttgcacaggattgcccggtctttgagacagctgatggccatcgcattttccatgctgaagccgaaatagactcgtctaaccttccggggacctctaaccagccaatacctgcgctacaagaatcacctggtacagccatgtttgcccattcgttccttcagcaaaaacaatatggtgttagtgatgcttatgtcgacacagcgcttgccgcatacaataggcgacgccggcgcagtagagtacgtcacatggtagctgacgagccctgtcaatcacgcttcctttggacaggtcatacgtag

SEQ ID NO: 42200 - DNA, 501 bp, Zea mays
  Peptide Sequence Number=SeqID_85575
atgggggccgccgccgccgcaaagcacgccttgcaggttgtcgcggcgggaggagatgctgggcaatcgagcttcagcgccaactcaccccccaccaccggcgccgggttcgtcgccctcgacgtcggtgagctctcgtctctggccggcgacgccggccctccgggcacgcccatcgcgccgccccggacacccagggtggtgaggtcgctgtcgaggaagggcgacaggaagccggccgacgccgacgccaacgccaccgccggtggcggtagagagcgggccgcagctgttcgtacacgtggctgccggcgacctcggggacgcgcccggcagcgcccggctggtcgtccacacgccgctggccggcacgcccggaagcaagtcccggcggttcggaaggcgggcggcgccgtggctcgatccccgcagggtggtcttcctcttcgccacgctgtaaggaaactgtccccttcggttgtcagtccttacgatttctaa

SEQ ID NO: 42201 - DNA, 303 bp, Zea mays
  Peptide Sequence Number=SeqID_85576
atggccagcgtgtccctgggctgggcttatgatgcggacgaggcgcctctgtccagcattacatcgcccagcgcgctctcacctagtgcgatctcgcccaacgtggcggtcggcgcggccttggccagcgcgcgtagggccgagcttgatggcggacattgcagcagggatctggaaattctcagatcaggccaaacgccccctcgctctagacggctggcgtttcaccgggcgtcgctgccgccgctgccgccgccgccgccgctactggagtccgccctgctcatggatagcgtgaagtag

SEQ ID NO: 42202 - DNA, 794 bp, Zea mays
  Peptide Sequence Number=SeqID_85577
ttgttgatagactgggaaaggaaaaggagggttttattcatcattgtacagaagcatttgtgcagttggttgcttccttggtccctggtattcttgacactgtctccagcgatatacaacaggttatggttggcaaacgccatggacctgttactgctttagctgggcgagctcatccaaagagcacaattcatatgttccctgttattcttcatcttctgggaagtgcatccttcaagcatagagttgtgacaggccatgtattgcttcagttggcaaatcttattaagattttggaggcaccatttcaggtgctatttaagaaccttactgttgacataaaggatgtgaaaccaacgtccctgctcaaagatcgtctgcgtgaagtcgagggaaatccagatttttcaaataaagatgttactgcatctcaaacccctgtggttgcagaagtcccttcagggaccatcccttcactaactcatatggaacaacaacctgagatcaatatcacatcccgagctatgagccttccaaatatacttaatcagtatgctgctcctgtccgtctacctacaaacagcacggtagaagatgacaaagttgctctgatgatgcctgagcaagtgccctcgttgacccaggtttcgccagcacaaacacaatcaacatcaccatctccattttctgttaaccagcttatggcgactattccacgtgaagagatacgtttcaaaataaatccaaagctcggctcccttggtccacaactgcaatatagcaagaaaacatag

SEQ ID NO: 42203 - DNA, 984 bp, Zea mays
  Peptide Sequence Number=SeqID_85578
atgattcttgctgccctcctcctacttctctctttcccgaagcagctagctggaagtcagtccgtctgcagcagtgctaacatcgtgtacatgcaaagcagtacctacatgtccaacctgaatgcccttgccggagcactattcgccaaggtgacaagttcaaactcacactcagcccatggcacagctgggacaggttccgacatgatctatggagcagtgctttgccgaggagacatgatccccggcgctgcctgtgcaaaacgtctcaaggaggtccttgatgcagcaatggacaacccagctaatagttcttgctcttcccagaaggacataaccttgttcgacgatgggtacctggtccagctaagattctctgaccaggatttcatctccaacttccgcgactctcaggaatgcgtagtaagggctaatttgaaccctccgctgttgggcgatgtttcagagcagttccatagtcttgtttccaagctcatgaccaagctcacagatgctgcagtgaagaatatgggcaggtatgagacaggccaaggctggctcactgagaagagccagactgtatatggacttgtgcagtgtcaagaggacatgctgaagggcacttgccaggattgcttgagtagtgccatggcaaagagggagcagatggttgaccagatgggtggtgcaatcctcggcgtgggatgcagcttgtggtaccaaacagaagttcagttctttgctggcacaccagcgttgtcgttaaatatgcccacacaacgagcaagatacgaactacagttgctgtcaatggcaatacaaaatgtaataaatctgtggaggattgaagaaggcaattctggattttcactgtacgatttctctcagataaaagaagctacaggaaacttctctagtgaaaacaaacttggacaaggtggttttggaccagtttataagatgttaacaaaggagtacagttga

SEQ ID NO: 42204 - DNA, 241 bp, Zea mays
  Peptide Sequence Number=SeqID_85579
atggcggagatgtccagagggaccccgactgcaagagatattggagcgactggagacttgggacatcacgtcatgtctaggttgatcgaggcaatgatgctaaatagcggaggtggtggtggcagtaagggcatggggggaggatacaccggtgggggaagtggagggcaagtgaatggagtagagggggccagagctgtcacagcgagcgagcacatcacgagtgggaaggtggcgtatg

SEQ ID NO: 42205 - DNA, 462 bp, Zea mays
  Peptide Sequence Number=SeqID_85580
atgaagccatttcgagctctccccgcgttttgcggtcgttgttttgcagaaaggcccttcgtcttttcgcgattcaacccgcggtcctcgcccgaaccccaatcagatccgacagtggggtgtgcgagggattgctcgtggttttgctcctgcatctctagcgtaatccgcatctcgtgctgctacctgcctgtttctattgatgcatctctctcgagagatacactcaaatctccagccatcctcttcataagacaaacaaaccaggcattttgtccatggatgttcatccttcaaagctaccttgtggattcacaggatgttgttgcaactgggggtatcgatacaaatgcagtaatctttgatcagtcatctggtcaaatcttgtgcacgcttactggtcactcaaagaagaacagatactatggaattgagatgtttggttctacatatagagtgtag

SEQ ID NO: 42206 - DNA, 213 bp, Zea mays
  Peptide Sequence Number=SeqID_85581
atgagcggcttggaaatatggcgtattgagaatttcaagccgatccctgcccctgcatcttcgtatggaaagttcttcatgggtgattcttacattatcttgaaggtatcaagcggcatgatatcttcctgtcatcaattgtattttgcacttgaccttatttccattggcggaggagttgaatgcagcaagtatattatactgttactgtaa

SEQ ID NO: 42207 - DNA, 1065 bp, Zea mays
  Peptide Sequence Number=SeqID_85582
atgggggatatccgccgtctttccggttcgtcgttggaggaacgcaactctacgggagttgggtaccttttcagccgtcgttcggcttcaaaggatttttcatcatgcagtctggctgcacccctccaccgacggtcacccaagacggtgacctccagcccctggatggggagaggcaagctgggctgcgatcttggtcccaccctcagcttcaaggatgttcatcatccccgctggggtggaggctgggttgagccggagctctacctcccgcgcgggttcgtgggtcggcctctccttcggcgttcgagggagagggcgctcactggccctgcgggcgggtcgaacttcgacaacgcggggctggtcgacagcgggcgtcgtcagcctcagcacgtcgggctcgtcggcttagctcctggtgccccctcctgtcggaaggcggctaccgcgccgtgtgcacgggaggactgcccaagatatcgcgcgctgccagggcggcgttcgtgttctggggcagttctacctttgcaccggtacggcgcctccacgcggaggtcgagcggagacccttggactgcgtcaccgtccgaggctaggtcggacctcgccaaaggtgttgtcgacgccgagggtgctgctgctccctttagccgtcaagatccgagcctgcaggattggattatcttgcagcgtgtgttttctgcggccgccgaggccgaaacacaccctcgccgtattgagtccctcggctcggtcgaccttgccgcttacgcgcactcttacccgtccatggggttctgtcaccgacgcagtcgagaaggctcgaagaatcgctccggcagaagagcttccgaacgtgatgttcggcccgcggaatcacttatccgaaccgttgctgtagaccttgccttgactgttggccagcttccgaagcaccaggtcacccacctagaggtctcgggaccggacccctcgggcgtggtagcgtcgcatggactgctggccctcgtcctcggggaaccgtattccaggtctgtgggcaagatggcctcggccccatag

SEQ ID NO: 42208 - DNA, 336 bp, Zea mays
  Peptide Sequence Number=SeqID_85583
atgggcaagagtaacaaacgcaagcgcgagccgactcctccatcggaggacttcggcgactcggaatactcggaggaggagtttctcctccgagtccgaggggccgtcgagcgctccgggctcgagggctcggatgagtcggagtactcctcggacgaggaggactcttcggactcgtccaaggagggtggtggcggcgatggcggagacgatgacgacggaggcgacggtgacgacgacgacgaaggcggtgacggcggcagcaggggcggcaacggcggcagcaagggcggcaacggcggcagcagcaggggcagcaacaaggccagtggctag

SEQ ID NO: 42209 - DNA, 521 bp, Zea mays
  Peptide Sequence Number=SeqID_85584
atgggagacgtgttgatcccggagctccaacgtgggaacacttctgtgaccatatgcgctcgcgtttctcgtttatgggacttctgtgatcctcaggatgaagcaaagttgctccattgtgatatggtgctgcttgacgaagagggaaacggtatccatgctgcaatattcccaccagtcatacaaaagttcaaacctctgataaaagaaggagtcgtctacaacatcacatacttccgggtcagagcctcgaacaatttgtacaagcctgttttcaatgagaacatgattacctttacaaactggacaaaattggaggaggttgttgaggttccgccagcatttcctgtgcttacctactcactcacaccaatagaccagctccatttatgtgtcgaccacagagagtactacacagatgccattggaattgtcacttccatctcggccgtggcaccgcaccgatccagagggcaacatacaaccagctctaagaggactatttccttgtgcagtgtcag

SEQ ID NO: 42210 - DNA, 896 bp, Zea mays
  Peptide Sequence Number=SeqID_85585
aatgccccacaatcctcgccgccgcgatcccttccataggcgcccccatcctcgcccttccatcggcgccggtcgctggtgtccgcgctcgcactgcgatccactccgccgccgcccgcgtgctcaccgacatcaaggccgacctccgagatgccgaaggatccggagggcgtagccgagcgccgtccctggatcgggaggccgccgaagcgagcgccacggggcggaatccagacgtgaagtcgccgtcgccgctgtggctcagcagaatcgtgaagctctggattcaagctttgttgggctttgtcaatgctccaggacgcttcctggcaacatataaggacaactttctggcaacatggaatgactgggagatccgcatgcttgtgctcgcagtcccgccctccaccaggacaccatcaccgcctgccttctccaccgaagacaacgacgtgctctggaagcgccacctgctcagcctcctcacccaggctggcccatcggatcctcagcgctttctgttcattttggtcgggaacaagattgatttagatggcgggagcaaacggatggttccggagaagaaagcgagggaatggtgcgcctctaagggcaatattccatacttcaagacctctgcgaaggaggtccacaacgtcgacactgctttcctatgcatcgctaggctcgccttggagcatgagcatgaccaagacatgaaagcgagggaatggtgcgcctccaagggcgatattccatacttcgagacctctgcgaaggaggaccacaacgtcgacactgctttcctatgcatggctagactcgccttggagcatgagcatgaccaagacatgttgccaaatcctggccactcccagattgatttgcagttctaa

SEQ ID NO: 42211 - DNA, 357 bp, Zea mays
  Peptide Sequence Number=SeqID_85586
atgtacgacaagctcccgcgaagccgtcgcttggacacggtccagagcagctgcaacgcgctgtctatcgttaagcaggggggcctcatggttgtcgccaacgtcaacgactcttggcgcatccggtggtgcaacggccaggggtactacctcgctgatgagcccggggtgcacttcgtttggcagcccaaccaagagtcatcggtactcgtcatgtcgcgcgcgttcgacgactactatatcgaggattgtggcgtcatcttggcgccagaggtgacgcagaggaggatcgacaacagtgaccagttcgtcatcctcgccaccgtcagggtagcttttgtgccgacctgcctttaa

SEQ ID NO: 42212 - DNA, 861 bp, Zea mays
  Peptide Sequence Number=SeqID_85587
atgacatggtcaaaatcaaattttctcttgacttcatctaaagacaagactgtacgcatgtggaaagttggctgtgatgactgtctagcagtattcaagcacagagattatgtaacatgcattcagttcaatcctgttgacgaaggatactttgttagcggctcaatagacggtaaagtccgtgtctgggatgtttcagagaggcgagtagttgactgggccgatgcaaaggatatcataactgccgtgggttaccagccagatggacagggtcttatcgttggcatcgctgcagggaggtgccggttctataaccatgcaggtgaaaacgtggaactggagaaagtactgaaggtaacgaagaagaaatctgctggtagacagatcaccagcctgcagttttcgtgcggcgatcctgctcggatcctgatcgcatcagcaggttctaagatacgagtatctgatggaggagctaagatcaaccgaaagtttgaaggacgtcgaggctccaaggtcctggtgccgccgtctctgacctccgacgggcagtacctcgtgtccgcaggtgccgactccaacgtctacatctgggacttggacagaccagcaaggggcaaaagccgcaccagaggaccaagaagggtgcgttcctgcgagcacttcttctcggagggcgtcacgtccgtggcgacatggccgggtctggcgcaccaacaagaagacctccagtcgccggagaagggggccgcccccacgctctgccgcgaccgcgagctctgctcgttcgggacgtggttctcggcagacggcgcgaggggcgccgcgacgtggcccgaggaaaaagctgctgccgtccctcag

SEQ ID NO: 42213 - DNA, 864 bp, Zea mays
  Peptide Sequence Number=SeqID_85588
atggatgcgtcctcgggcgaccgctcgtcgccgcggagccggcagctgcagggcccgcgcccgccgcggctcgccgtcagcaaggactcgcacaaggtcaggaagccgcccgtcgcgccgcagcggcagcagcaccagcaccagcagccggccgcgcagctgcagcagcagcagcaccagtaccaccagcagcagcagcagcaggggcggcagccggtcatcatctacgacgcctcgcccaaggtgatccacaccaagccgggggacttcatggcgctggtccagcgcctcaccggcccgggctccacctcgcaggcccaattcgacgccgccgccgccgcggcggggccctcgcacccggcggcgatggagttcgagccgcgggagttcctcctctcgcccaccgccgcgctgtcccctgcagcgcggctggccgccatcgagaggtccgtccgcccgctgccgccgcaccacgcgccggcggccgttcctccctacttcggcgccaccaacgacgacggcttcttcctgcccggttcggcggacatggacagcctctccgcggccctcggcccgcccgccggccgccccggcatcctctcgcccgcggcgctccctccggcggcctccacggggctgttctcgccgatgccgttcgacccgagctgcctgtcgtggctgagcgagctgagcccgttcctcccctccgccggcacccgcgccgccgcggccgggctgctggaccaggcgccgttcgcccccagcccgcgcagcagcttgctgctgtccacgcccaccatgccgtcgccggccaccttctccgtgctggagttcttcagcagccccaacttcccggacctgtaa

SEQ ID NO: 42214 - DNA, 837 bp, Zea mays
  Peptide Sequence Number=SeqID_85589
atggtgagagaacgaagaacacaaacaaacacaatgagcaagaacacaagagacacaagatttatcccgaggttcggtcacaccaccaaggtgccctacttcctcgttgaggcgcccacaaagagccgggtctctttcaaccctaatcctcccttgccgaccacaaagtaccaaagctcgaatcaagaagagcaagagggatttaaagatgaagcaccaaaatcgcagctcttcaatctcactcaaagatttctctccaaagatttgaaatgggagaggcaagaggtgtgcgagagagagtgggaggtgtttctcaggttagaaatggagtccaagtcgtgctcttctatggaggagagagaccctccaccatcagaaaaggctagaaaggaaactagggttcgctacgtcgcccaccgtctccacccaggaccgccgccctcatccgtctcccccgtcttcctcgccctcgtctacctcgtgctcgtcggaaaaaacagctcagtttcatcacaagtttgttttgggatctttcgcctcaagtttcatctagctaccttcaacaaatccttcaatctccatggctacatcggtgatagatgtcagaatgggtggaagtctcatgtatacacagctgctgtgaagaatgtttgtgagaagtgtaatgtcaccattacaaaggaaaatattagctctcgcagcaagacctttgataagcactacaatatcattaatggtttgttgtccactagtggttttggatgggattgggagaagaacaagctcaaagttgatagtgacactgtatgggatgagtacgttgagatttctatataa

SEQ ID NO: 42215 - DNA, 231 bp, Zea mays
  Peptide Sequence Number=SeqID_85590
atgaagaaggtgatctactacgagatcgactcatccacgccctcaacctctaacgccgagtcaacatcttcaaagtgccaagagcgtaagaagtataaaaaaccaccatattttgatagtgaagactattctatgtggagtgataaaatcagggtcggccctgagaatttggtggcccagtgcaggacaaaaattgaggccccattgacaacaaataccaaaaatttatga

SEQ ID NO: 42216 - DNA, 195 bp, Zea mays
  Peptide Sequence Number=SeqID_85591
atggctctaaaaacttcgccttgccatctttgttcgagtcggtcttctggtaccatatcccgttttgacctgaaccgttttcgtatttccgagaaaaatggtaacgtgatgttgcgtaaacgagatatgcagaaatggaagtaccgccttagccctatcctctatggattattttgtgcaacttgtggtggataa

SEQ ID NO: 42217 - DNA, 229 bp, Zea mays
  Peptide Sequence Number=SeqID_85592
atgcgactgcagccttccaacggccacttttgtggtggttggaagactgctgtcaagcctgggcgtgaggtgctcaaacaactgcgttggcgcgtattatatagggttggaggcgattgtactgcgcggagtagaagtgtttttgatgtagcaactggaataggaagagtggatgaaatcctcgacggcgtgccgtccagctggaggatggggggaaaccggaaggaag

SEQ ID NO: 42218 - DNA, 234 bp, Zea mays
  Peptide Sequence Number=SeqID_85593
atggggggctcggagcccggttccttcgcggagaaggatccctttcggggatgggacgtgagcctggctgacgaccaactgacgcaccggttgctcgacgcgtgggcctgggttcccaagctggcgtgtcagaagtcggagaagcgcgtccatctggcgcggttgcatgccgcctgcatggctgcccgccccttctgcccgttggtctgggcgaaaatggggggtcgcctgtaa

SEQ ID NO: 42219 - DNA, 674 bp, Zea mays
  Peptide Sequence Number=SeqID_85594
atgcaggtggcgtgcaaccgcaccacggggacgcaccccttcgactttgacgcatccagcatggaggcccaggcccacacgtcatgcgagcggaagcagcagtcaaatcgtctgcaggctcacgtcccctcctggagcagtgggggagccctctcccacggcgtgaagacgacgcgcccgtgttccatccctcgaacggctcgcgcgacgaccgccccgcgaaccacccgtctcgtcgcattaacttcgcggcagggcaagcgacacctttggcaggcgaagcgggcgtcgtttcatctccgccatgatgaccgcgtcaaaaaagccgctccagagcactcgggcttcaggctcattactgatcagaggttcgaaggctggcccctcggaagggttcgacagccgcctcagagcactcgggctccgcgcccactactgatcaggggttcgaaggctggcccctcggaagggttcgacagtcgccccagagcacgcagagcgagggatgactctggtacgtccgatacatggccgaggctcgggctacgctcccgaggtaccctaggacatttccgagaccagcaggagcgattctgtaacagaatcccatcagagggaggcattgagccctcggaccctatcgaacgggaccgggtccggcaaatcacctacag

SEQ ID NO: 42220 - DNA, 921 bp, Zea mays
  Peptide Sequence Number=SeqID_85595
atggtcacccaggatggtgaccaccagttcgatggtggggagaagcaagccgggttgcggcctctgccccgccctcagcttcaaggatcttcatcatccttgttggggaggagggcggagcaagtctggggccttgccctccgcgtggggccggcgaaccccccctcttcccttccggcatccgggggaggaaaccatcctccagctctgcggagggaggcgtcctccagccatgcgggggaaggcgaactgctgctgcctggccagggtgcagcattccgttctccgcccgggcgactgtggccggctgcaccagagggtcgcacaacacgtcccgtcgctcgttggtgcggtgttggtgggcaggtggccgctgtcatcggtgctgaggtggtggtcgccagaggaggtttctccgccgacgacaccgtcaatgccacctgcgctccgggcctccggctctttggctttaatggctggttctcatcccccatgaggggacgtgaacgagggccttccagcggtagtgttcgccctggggccatcgctgctgctgtcttgccgtccgaggcggaggtcgttgtcgctgctacagtggtcggcggcgagccacctggagtggagatccttccggccgtgtcgccgtccgaggccgggccagattccgccgaaggcggaaacgacaccgagggtgctgctgctccctctgttgatgacttgttcgtcggtagcagaatcgtttatctgagcgagagttacttttcacgggaggtgatgagtgaggatcccgctatcgaagcagtcgaaaagcgcgaaagacgttctggcataaagacttttactgaggaaaatcttgacgcaccccttctagcccccgagggagggtcgggctttgccgaggcaaggctgacccttccttga

SEQ ID NO: 42221 - DNA, 1734 bp, Zea mays
  Peptide Sequence Number=SeqID_85596
atggcttcgctctgccccttatcagccgcgcccgctttcccgcgcgctgctcgacctcgtgccgcaagcttcaggggacccgcttcctggagcggcctcgcggcgaccgcgagcaatgcctgtgtctgtagctgtggacttctgcccactggaggctacgcgaggctgcggtcgcgactaaggagtcccgtgcgcgccaagatcgacgaggcggacaagggcacgggcgccggtctgggcttcccctcgccacgccgtaggaagctacgcttgcgcctgcgaccacggctgcgcctcttgtggtggcggctccggcggctgtcgccgcgggagctcatgaccgacgccggggccgcgctgcggcgcgccgttcgccgcgtgcctcccgcggccgcggcgccggtcgtcctggcgcttctcctcgccgtggcgcggctcgcgctgcccaagaacgtggcccgggaggtggcctactcggacctcgtcgcggggctccgcgagggcgccgtggccgccgtcgctttcgaggaggactcgcgccgtatctacttcagcaagaacgctggggatgatgttggctccgacacgaacgagaccggtgagaacgctgcggcgccggcgccgaagtggccgtactacgcgcggagggtgccgcacgatgagggcttcttgctcgggctaatgcgggatggccgggtggactaccgttcgtcgccgcggcctgctgggaggctgctcgtggacatgctgagcacgctgctcacgctttgggtctcgctggtgcccgtgatgtggttcatacagcgtcagatgtctggtgcgggcggtgctgacaagcgacgcaaaccgaggaagcagagggtgggctttgatgatgttcagggcatagatgaagccaaggaggagcttgttgagatagtgagctgtctgcatggttcactgaattataagaagcttggagcaaaattgcccaggggtgttctgcttgttggccctcctggaactgggaagactctgctagcaagggcagttgcaggagaggctggaattccgtttttctctgtttctgctagtgaatttgttgaagtttttgttggacgaggtgcagctcgggtaagggatttgttcaaggaggccaaagaagctgccccgtcaatcatttttattgatgaacttgatgccgtgggtggaagtcgaggtagaagttttaatgatgagagggaccaaactctaaaccagctgcttaccgaaatggatggttttgactcggacatgaaagttattgtaatggctgctactaacagaccaaaagcactggatgctgctctttgtcgacctggccgcttctccagaaaggttgttgttggtatgcctgatgtggagggccgcaaaaagattctggatgttcatctaaggaatattcctttggaagaggatcacggaataatcagtgatctggttgctagagtaaccccagggctggtcggcgcagatctagcaaacattgttaatgagtctgctctactagctgcacgaagaggtcggaatactgtgtctcgggaggatattatggatgcaatcgagagggagaaatacggggtcactgggaggcaagaagctgattctgaaaggcaaggcctcaccaagttatttccatggctatctaaacctggaaataaaccatcaagccctgatgatttccgaggattgatgggttatcacacattaagctaa

SEQ ID NO: 42222 - DNA, 540 bp, Zea mays
  Peptide Sequence Number=SeqID_85597
atggcgtacgacatcttgtacgaccccccgggcggcgtcctcggcagccaggccagcgatcaccattggaggcggcaccgaagccatcaaagccaaagagatggagccacagcatggctcgcttcccaccccaaggagttgggggcgcgagggatggagtcgcggctcaccccgttgtccaccttcacgacgcttgccagcggcggcgaccacctctgcaccagcggcttgccagcggtggcgaccacctcagcgtcaccggactgtccggtgtgccagcggagcaacggctacttcgcgccaacggtcgtctgcagaggcattaaatgcgctacagtgtgcggctgcgcgcgtagaagtcagagcacgcgccagaaggtgcaccagacagtttacaggacctgtccggtgcaccaccggactgtccagtggcccgaaagacagaagctccaacggtcagaatccaacggccgggtgacgtggcttgcgcaccggactgtccggtgcgccatgcgacagcagcctccaccaaacggctag

SEQ ID NO: 42223 - DNA, 228 bp, Zea mays
  Peptide Sequence Number=SeqID_85598
atgggagggaggtcgttcttctgcatcttcagcttctcacgcaagtccaggcgctactccgtcgacgacgaggaggcgggcgacgccgcctgggaggtcccggggaggctgcgcaaggtgcgctccagcgacgaggacaacggctggtgggtcggcgagcgcgacgttgaccagaaggcctccgacttcatcgccaccttccaccgccagaggcgcctcgtcgtctag

SEQ ID NO: 42224 - DNA, 165 bp, Zea mays
  Peptide Sequence Number=SeqID_85599
gtatcttcggaattggattacgagcacataagattatggttaagacgaagcttaactgagccagcaatcacgacgaaggataaggcgatcacgaagctatgcgcagaagagcttcggcataacggcggaaagggaaaccgacttaaagatgaaaagccagattag

SEQ ID NO: 42225 - DNA, 438 bp, Zea mays
  Peptide Sequence Number=SeqID_85600
atggcgcagtcgaccgttggcagcctgagagccgttagcacaccggacagtccggtgcccccttctagccgttggctcggccacgtgtcccgcgcagatcgcgcggccgaccgttggccctgtcgaccggttgctcaccggacagtccggtgcacaccggacagtccggcacttgtgttggacactaaatcaccaaaatacttagaaatggcccaagggcacatttccctttcagtcaccttgaggggaagcgctggagtcatggggcaacggcggaggcacaaggacacgatggggctccggttgcgcaagaatcgctccggtgagcgcggaccggacgaaccagagaggggaagggcaaaccgaagggtgtcccgagcagatgacggcaaggcgaaactcaccgtggcacgggacggggcgtggacgcgacagtga

SEQ ID NO: 42226 - DNA, 402 bp, Zea mays
  Peptide Sequence Number=SeqID_85601
atggaccgccacaccttgtcaatcgagtatcattgtgtagtctaccagcatagtagcgagacgtacccggatcgctgggaggctacttgcttggtgcgccgactggaggataacctctggggtgaaggcaatcctaggttgaacaacatagtcaacctagtcgatgtgctcaatactgagctagaccacactcttaacgagctgagtaaggctcgtgctgagatcgcagagttgcgagctgagcgtgtggagcgccttcatgaggattatggttctcctgcctctgctaggactcagcacccgtaccgctcaccgccacaagggtaccatgcttatgatgtctcacaacaggcgtcgaggcaagaggtgtacccagcaagagcagcatgtcctataggatga

SEQ ID NO: 42227 - DNA, 969 bp, Zea mays
  Peptide Sequence Number=SeqID_85602
atggcccgtctcaggtgcaccgcacgtaagtctgtgatcccctttttgccttctcgccgggcggagcgtccactgcgtcgcacggtgccaggtcagtctagtcacctggagagactgcactgtcgcctgcacgaggaacaggagcgccgacaccaggagcaggagcaggagaaggagcagcaggactcttccccctcgcctcagaaggagggcatctcggctgctgtaggagaccctgacgaagacggagacgacgacgacgccagtggcagttcaagccacggcacggagcgctcggaggagccggagtcggagggatggatcgctagacccatcactcatgacgccgctcgcgggtgtcacttccacgacgctctcgataccctgttgcgttgggccttcgaccgacacacttggtctatcaagtatcgttgtgtagtctaccagcatcgtcgcgggttatacccggaccagtgggaggctacttgcttggtgcaccgtccggacgattatctccggggtgcagaggccttctcagagcactattctattactgagagggatactgccgaggcagccatgcaggatgcagcacgacgggcactttctcagtattgcttgttgttcagcgaggtagctaatggccttgacctgaagtactaccctcgtcgtttgaccggcagtgctggaggtgtgattgtctcgccagttggtgagggcaatcccaggctgaacaacatggtcaacctggccgtcgtactcaacacagagctggaccacgcccttgatgagttaggcaaggttctggcggaggttgcggaattgtgtgctgaatgtgcgacacgccactatctagatggtggttctcccgcccctgtcgggattcaacacccttaccgctcaccgccccgtggtcgctttgactatggtaccccagactacaggacccagatagatttagatccatag

SEQ ID NO: 42228 - DNA, 267 bp, Zea mays
  Peptide Sequence Number=SeqID_85603
atgatggcacacagtggcaacgggacggctcggcagacggtggtgatgggatggctcagggcaggcgcaaggggacagggacgcaaggcgccaaaccttggtggtggtattggacgttttcacctcttagttaggttggtggcttgtggtctctattataaatcccatgtgaaggttgtgcatggctctgaagaaggctttcggagggaggctttgggaggggcatcatgctcgtcccatgggagtcctaaagagaaacactggtag

SEQ ID NO: 42229 - DNA, 255 bp, Zea mays
  Peptide Sequence Number=SeqID_85604
atggagaaccgccacagaacctcgcgggcggttgaccccgaccggtttgcccccttcctcgtcagaccgcggacgccgtcagcccaccctctctctggagaagagggatccgatcctccggaaattgtagctccggaagaagggcaggaacccgacctctccgaaatagaccttttgggccaagagaacttcgacgaaggcaagtccattcttcccttgatgcataaattacctactctttctaccactgcctaa

SEQ ID NO: 42230 - DNA, 445 bp, Zea mays
  Peptide Sequence Number=SeqID_85605
gctctggtgctggatctggggctacctcctgagcagctccttgcttcggcacgaggacgtactctccgtcagcaaggttacagtctatcgaaattcaatgaacattatccgcaagaaagaaaagggtggcgcggcttaccggtggcgagataggtccggcgaggggcggggctggctcggggaggctctggcggtcacagcgatagactgtgtgcacaaggaatcggaaaatggttcagtggattacccggtccacgcactccggcggggttgtgaactccggcgaccgtggactggcctctccggcgaagcaggcttcgattcctcgctcggggagcttcaccaaggtttgctcaatcgtctccgagggttggacagggttgggaaaggctgggctggccggtttacggcggcaggggctcgggtggccgcggacacgccgtga

SEQ ID NO: 42231 - DNA, 1658 bp, Zea mays
  Peptide Sequence Number=SeqID_85606
atggagaaatgcaaaccaatcaagacccccatgcctacaaatggacatctcgacttagatgagggagtgaccttgtgtgaccgtgtgccgtctcccgtcctgcctggatcgtcacctctagtgatgccgcgcacaaagaatgcgtcggcatcaggaggtggcgacgatgaggaccctcgtcgccccttcaggcaggtgaagggcaagactgtgtatctggagcagcaggaaggccgcaagaagcggcgttcagacagagaggctcgtgcagcagcagcagctgcagcagccgctgcacaggcagcacttggagatcagccggatgttccttcagatcagattgctttccgtggtcgtcgtctcgcctcccggtctcgctcctccactcacacctccgcttccactccgccacccactctgcctgctccagtcactcctattgctccatccacctccaccgccatacccactaccagcaccacgccagcttccactgctacccctgctcaggctcccacttccgctccacctgtccctcctcctcgctttcgggagcgtgatgagactgaggtccgtcctctggcttcggatcctcgtctatttgatcttcagcgtgctactgcagcccgggtacgtcggttcagggcacagatgtcagctcagattgcgctacgtgttcaccgcctcttagatcttccagccttcttgctagcagccggtgctgagtctgaggctcatctcacctatttgccagggcttctgtcctttctgactatcagcggcagatacgttgaggagtgggtccgcgtcttctatgcctctgtttggattgacccggatcatcattggatgaggttccgctttgagcgcgaggatgtcacaatcactgccgatcagatccgacagctatttggcttccctgtgtcgacgactcgcctgcacagtctctgctatggcacttcagatcctccacgtcgccctcacggcggtgtggctccagggacagctcacgtcgcggctctgttccgaccgcctttttcagatgggtcgcgacgttctccagcagacttcactactgcagcgaagtacttgtatgagctcgtcagacggactctcctgcctcggatgggatacagggaggctactactcatattcagctatggctccttggtgccctggtatcccactctgagtttgatgttgtggactttctgatctgtgagattgaggacactgttctggatgggattcgtgctcgacgacagctgccctatgctcactacttgtgccacatctttgcgcagctgatccagccacctcgttttcagagtacccttgaggcctcacgccttgtgtttggatcttaccgtcctgctcctgagattcctgtgccagcttatgctcctatgtttgacactcaggccgaggatgccgcacttcgacagtttgacacccagggtgcagcagatgatgatgatgatgatgatgattttgggattcctcctccacctccgcctcctatgcctccacgctctcatgatcatgaggctgggagctctagtgctgcccctgctacccctcaggctatggaccctgctctagcttcgattcttcagactctcactcagtgctgctcagctggcagccgagcaggccc

SEQ ID NO: 42232 - DNA, 201 bp, Zea mays
  Peptide Sequence Number=SeqID_85607
atgggaacacatttcacaaagaaattcatcggatttcacagagattggaaaggatttgcaaaaaggggtgggaaactgcctaaaaatcagagagatggagaggcagagaagggggacttgctcaccgaggggaagcaggagggaagcgcagattcaccggagcacggccgggacggtggccgtcggggttttcatgagtga

SEQ ID NO: 42233 - DNA, 312 bp, Zea mays
  Peptide Sequence Number=SeqID_85608
atggaggacttaatcacaatgaccgtagcaattgtcattggcaagttggtggaatttgagatgtcagaaaagataagtcaagatgaggcaacttcatcaagcaaaattatttctctcacacatgatgagcataagaagatgaagggcaaaaagcaagatgatgatgatgaatatgatgataaagcctccacctcctccttcgccaaagaagagatcaaagaaaagggatgctatggtaatggtaaaaaggcactatggaagattggccaaacaaagcccacaccaaatgcaaagaagaaggaaaagagctaa

SEQ ID NO: 42234 - DNA, 381 bp, Zea mays
  Peptide Sequence Number=SeqID_85609
atgcagaatggaattgggattcaggtgggtcagattcaagtgatagaagtcaaggagaccgcggaagaaaggggaaattggaagaccaaggccgcggatgagaaaaggaacgtaaatgacggattcgtgggtgtcttctgtcggaacagtgaccccacgacagatccgccaagaacagagctccttcggaggaagaactccgatggatacaagatggaaaaggtcagattcagagacaacagacatgtggttacctgcgaaaggcaattgactgttgggattgatgaggggaatgactgcggcagacaaactctgggatttccgcttgggcgccatctcaaccttgctagcgaacagagcggaagcagtattgtaagatag

SEQ ID NO: 42235 - DNA, 531 bp, Zea mays
  Peptide Sequence Number=SeqID_85610
atgggtcaagcactcggcttgattcaagtggatcaatcgacagtagccatcaaggaaacttttgggaagtttgacgaggtcctagagcctggatgccacttcttgccatggtgcatagggaagcaaattgctgggtatctgtcactgcgtgtgcagcagcttgatgtccgctgcgaaacaaagacaaaggataatgtcttcgtcaatgttgtggcatctgtgcaatatcgtgcccttgccgataaggcatctgatgcattttacaggcttagtaacaccagggagcaaatccagtcatatgtttttgatgtcatcagggcaagtgttccgaagatgaacttggatgatgcctttgagcagaagaatgaaatcgccaaagctgtagaaaatgaacttgaaaaggcaatgtctatgtatggatacgagattgtgcagactctgattgttgatattgagcctgatgagcatgtgaagagagctatgaatgagatcaatgcaggcaagttgcacatatttcttgttcatagttga

SEQ ID NO: 42236 - DNA, 579 bp, Zea mays
  Peptide Sequence Number=SeqID_85611
atggagataccaagggtggttccaagccgtggccaacgcacggtcgcaccacgcttcgccgcgagggagttccgcctcaccgtcgtcctcctcttccgaagctgggaggggctcaagttctcctcctcgaggttcaagtaccgcgccgagctgcgccgcatccgcctcctgttccggccggacaataacgcggcccttctggcgttggagacgtgccgcgccgcggacttctctcgtgatgcctgtcgggacggtggacgcggctcgccaagaacgacagctgcgaggacgtcgacgcagcggggcggtacatccgcgagatccacctccgcgacggcgacagaggcgtctgcgccagcggcaagcggcgacgcggcggggcagagccacccgttcccgtggcaagacgctgccatctcggagccctactacttcctgcacctcctcgccttcttctcttactttgcggcccgcagcacgacgctctccgccgacgacggaggggagctccatgaccaccttctccgtagggagatccaggcagtgctcgtgttcctgttgctctttgagtcttcgtag

SEQ ID NO: 42237 - DNA, 837 bp, Zea mays
  Peptide Sequence Number=SeqID_85612
atggtgttgggccagcctatctggaatgacatggaggagtttcttcctgctagggctggcagtgtgctagaggatagcctggagaaggagcagaaagctaaagatcaggctgctgttagtaaagtggaagaggttggcacaacggctgaaaatgctgatgctactggagttggcggtattttctctcaacttttggctttggaatcaaccgttgaatttaatggtgcagggagctctgaggctgtgaagcagatcttgaaggagttggcagaatgcttctctaatggtagcatctctcgagagttcatcagtagcagggttggccttttaaagctcgtagttacggcttaccctatagaagagaggaacggtggagacctggagattggacttggacagaagatggcagttgcaatcattggcaagcttcttgcagacttagtgttgtcatcagagcaaatagtttggagtggactcgatagtgtatccatctactggcctgaagtgttgttgatgattggtccatatggaggtcttgttcaatacaagtatggtgaacctacaaaacatattcctgagtgtgatggtgtgagaatcctctttaactcaagtatgagagttatacaccgagtctcagtctttactacatcatttgttggcattggaagcaagattccaacaacatttctgtacgaggttcgttatcaatgtgccagtcagaacaaagacagtgttcgatatggaataactggactgacacaatggtggctcaaggcttttagccaaggaaatagtcactacaccaaaatacttaacttccgaggggctaaaccgtag

SEQ ID NO: 42238 - DNA, 141 bp, Zea mays
  Peptide Sequence Number=SeqID_85613
atgcggtgcgcggcgtgcgggctcgcggtgctcgccgcggcgctgctgggcgccgaccgccagacccgcaccttcttctccgtggagaaggcggcccggttcaccgacatgcagtcgctcgtcagctctaaggcattctag

SEQ ID NO: 42239 - DNA, 309 bp, Zea mays
  Peptide Sequence Number=SeqID_85614
atgacggcgagctctcgtcggccggccatgtgttcgatacgctcagcaccgactcttacgttcactgttgtgttcacgaccgaaaatggtcagagcattgaaaagatctcaattcggtgtcaatgcacttttagtgactctgttcgggatggagatcaatctaacaatgggaagagggaccttaccgacgtgtccaatgaggagaacatcctctatcccactactatcggtaagctcctagagaggcttcacaaggagttaaagaagaagaacacttctaatgtggcagctacactagcaagtttctga

SEQ ID NO: 42240 - DNA, 537 bp, Zea mays
  Peptide Sequence Number=SeqID_85615
atgggaggcgcaggcgaggtgacggagctggagctgcgcatccagctgcctgacggcggcggcggcggcggctacaacatcaacgacaacgccgacatcctggccgagatcctggcgcgtctggacgggcgctcgctggccgcggccgcctgcgtgtgccgcctgtgggccgccgtggcgcgccgcgacgccgtctgggaggcgctgtgcctccgccacgtcggccccgcgccacctgcggcggccgcgggcccggccacccgcgccgtcgtcgccgcgctcggcgggtaccgccgcctctaccgcctctgcctcggcccggcgctcgaccggctggcgcaggcccaggcccaggcggcgcgggcgcaccacctgtcgctctccctctcgctctcgctcttctccatcgactgctacgagcgcctcggcggcggcgggggagcggcggggcccagcgccggcgcgggtgcgcgcgggagacagcagcagcagccgtcgtcgctgctgttcctctgcaagcccgtcgacgtgtcgtga

SEQ ID NO: 42241 - DNA, 885 bp, Zea mays
  Peptide Sequence Number=SeqID_85616
atggctgaaaggtaccaactcccacggagttgcgttcctccaacgacaaggcggaaggactgcgggtgtctcccatccgggggctcggaagccgtcgtgggccgagtcttctccaacacgctccaaggtcctccccctacggcgcgggggctgggtcctacacgtcatgcaaactggcccagagcagaagaagccaaaccgccgcgcgcggtgcatgcaacacccagcggttacgagcattcctccactttcgcccagactagcgggcgaaagggcgggcagccatgcaggcggcatgcaaccgcgccaagtgggcgcgcccctccgacttccaacgcacccagcatgggggcccacgcccacgcgtcacgcaaccggcgcaccggttgcaacgtgcgagcaactgcaccgccgctcgcgccactgccacgcctcctcgactgcggaaccagtaccgcgactcgaggcaaccctgcgtacgacccagcagtgccagcccggcgcgacggtcaatacgaccaaaaatgggccggtagtgatggcggtggcaggcgggcgggagcagcggtcacgtcgtcagccaagcttgcgtccctgttggaacttgctctcagtcgcaagggaatccaacgaggggcccgttacaatgggccggatcacacgtgggcctctaagctcgacgaggccgcacggtgggatgacctcgtcgcaggccttcgtccgatgctgtatcaagcgaagggtgtccctgcccgttttgtctccgtcggaccagcgactgtagcgaaggcctcgagcgaagggtggcgtctttgccttcgccccaacatttgccctccgagggaccagttcgacaaagtcacctggtgccgaagacgtcgctag

SEQ ID NO: 42242 - DNA, 69 bp, Zea mays
  Peptide Sequence Number=SeqID_85617
atggcaggtaacccagggcccctcgcgttaacaaaaatgttttctcaggtgaccgttggcgcgaagtag

SEQ ID NO: 42243 - DNA, 414 bp, Zea mays
  Peptide Sequence Number=SeqID_85618
atggagaaggtccgtagctcgcgtgcgcatcgttgcgatttcctagatccgtgctgcgggtctgctcaagacgcgggggctctaggcaatccacgtccagtcgggagaacagaaaaacagagagccgtcaccaccgagatcacagttcatcggttccgaatccatgtggtcgcgggagcgtgccgccgcgggagccatggaatttcttgtcaatatgaaactctgcctcaaatccattccctatcgtggactggcttccttatgaggcgattgacggtaagtatctcaactgcgggctcaacttgtcctatgcttcgggtcacagcgttcgagttggcgcggtctggccatggcctccgccgtgcgggcgccgccgccgctgcctgggagaaacgcgagatgtatgggaggtag

SEQ ID NO: 42244 - DNA, 555 bp, Zea mays
  Peptide Sequence Number=SeqID_85619
atgaacaaaaaacactggcattcgaagtgccattacaaacggaactccggttcccctccgcaggaacaaacaaccccactccgagggggaaggcctgcggagcaacgggaggccgacggatggcgcgccgtcacctgctccagcagcggcgactacgacgacttctgctccgaggggccaagcagcggcaatgctgacctcaggctagatgccgctgccaagaggcccccgcccatgccaaaactcgtaaggcaaggacgggcagaaggccgtagagttggaggcaactctccctacgtgcgcccccagacgccgcaggctaagtcttctccaacacgctccaaggccctcccctgcgactcgggggctgggtcccgcatgtcatgcaaaccggctcagggcagaagaagccaaaccgccgcgcgtggtgcgcacgaccgcccagcggttacaagcgacccccccacttttgcccagaccaacgggcggaaggggcggccagccatgcaggtggcatgcaaccgcgccaggtggatgcgcttctccgacttctga

SEQ ID NO: 42245 - DNA, 504 bp, Zea mays
  Peptide Sequence Number=SeqID_85620
atggcgcttcctgttgacgtggctggcctgcgccctaggtcgggcgacgtggaggctcctctgaagccgaggtcgaaggccagggcggagtccgagccctggggtcgggcgaagcggagttcgtcgtcttctggggctgagcccgagtccgagccctgggtcgggcggagcggagttcgccgtcttccggggcttagcccgagtccgagccctgagtcgggcggagcggagttcgccgtcttccggggcttagcccgagtccgagccctaggtcgggcgcccgagtccgagccctgggtcgggcggtgcggagttcgccgtcttccggggcttagcccgagtccgagccctgggtcgggcggagcggagttcgccgtcttccggggcttagcccgagtccgagccctggggtcgggcggagcggagttcgccgtcttctggggcttagcccaagtccgagccctgggtcgggcggagcggagttcgccgtctcccgggttttag

SEQ ID NO: 42246 - DNA, 450 bp, Zea mays
  Peptide Sequence Number=SeqID_85621
atgaaccgtgagaagtggttccttttcaagtgcttcgactcctataaaaaggcacttgagaggagccgtgccaaaacaagctctaaagataatttggaggctgtcggcgtttcgagacagggggtccctaagccgacgagtgagtgtgctgcgtgccccagcccagatgggtcgagcgcgtgggcgagcgcggaggggggagaggcgaggtggccggagccgagcgtgagagaggtggaagtcccgcggccttcgtgttcgtcccgcgcccaggtcaggtgcgcttgcagtaggggggttacaagcgtccacgcgggtgagggaagcgagcggccccaagagagcgcctgtcccgtcctcggtcccacgcggccaaccttctctgagaaggccctggtccttccttttatagtcgtaaggagaggatccaggtgtacaatggggatgtag

SEQ ID NO: 42247 - DNA, 528 bp, Zea mays
  Peptide Sequence Number=SeqID_85622
atgacgccctgcgccgtgcacagcctcgacacctccgccggcgacaacacagccgccacccccttctcactcccctcacttggagccctaacccgtgaaaagtaccagcaggcttcagctggtggatttatggtagcatttgctggtaggaagtatgcagctagatcaatcccgatattcgtatccaacacctcagttacagtgtccagcttcaccctggtgctcgagttcaacaaaggcagacttgaaaacctgcactggaagaaggacggctgcggtgcctgctccggcaaatcaaacttcgtctgccttggcaaacagacatgcgccatccggacgcagagctgcaagagccaagggcctgtcgactgcagcgtcggcatccagctggctttctccggcacggacaagcacgagtcggttctgaactcgtggtacgaggtgtccaacctgaggcagtactccctctacgggctctactcaaacctcaagggcaccctgagcggccagttcaacaagatcttctag

SEQ ID NO: 42248 - DNA, 348 bp, Zea mays
  Peptide Sequence Number=SeqID_85623
atggcaggaatgtactgcaacgcccgcgactgcctcaacaagagaatgcagccgccggcccgcaccgctgcacggatcctcctctcccccgtcgacaaggcgaaaggctcggcgaggaagaaggaccgggaaagggggataccccgaaagggatccttctccgcgaaggaaccgggctccgagccccccattactgatcaggggttcgaaggctggccccccgagggttcaacagtcgccacagatcgcgtgggcccgacacccactactggtcaggggttcgaaggccagccccccgaagggctccatggccgcctcaggctactcgggctccgcgcccattactga

SEQ ID NO: 42249 - DNA, 363 bp, Zea mays
  Peptide Sequence Number=SeqID_85624
atgggcaagaacaacaagcgtaagcacgagccgactcctccatccgaggacttcggtgattcggagtactcagaggaggagttctcctctgagtccgaggggtccccgactcccattcctctgcgtaactgccgggtgctgactgggcgctttttgaaacggtatctggctcgggaatatcccataagtactgcgcttttagccgcctctgctttccgtgccctagttcttgctttcctgcctccaaatcctttctgcaattcggctcttgctccgtccgccagtagaattgagatggcgcccaagcggaaagcctcgagttcatctgccgcggtgattcccccaatcgaccccaacagttag

SEQ ID NO: 42250 - DNA, 846 bp, Zea mays
  Peptide Sequence Number=SeqID_85625
atgcgtcgcgtctttccaccttccgagcccccggatggggaacactcgcagtccttccgccttgtcgttggaggaacgcaacttcgcagaagttggtacctttcagccatcgttcggcttcaaggattttcatcaggcagcccggccgcatcccctcgccggtggtcacccaagacggtgaccaccagttcgatggtggggaggagcgagctaggctgcgatcttggtcccgccctcagcttcaaggatcttcatcatcctggctggggcggaggccgggctgagccggagctctacctcctgcgcgggttcgtgggtcaccttctccctcagcattcaagggagagggcgctcactggcctagcgggagggtcggacttcgacaacgcggggctggttggcggcgagcgtcgtcagcttcagcgcgttgggctcgctggctcagctggctctggctcggctcccggtgccccctcccgccgtgagagcggttgtcgcgccgcgcgcaccggaggactgcccaagacgtcgcgcgctgctagggcggcgttcgtgttctggggctgtcctgcctttgccccggtacggcgcttctgcgtggaggtcggtgctccgctcgtccgagaggatccgagtggggatctgccggtgggcggatggcttccgtcgtcggtgctgagctggtggcggctgaagaagtcctcgtcgcctacgggatcaccgccaccatccgcactccgggcctccggctctttggctttgatagcttgtcctctcccctcgagcggagatgtgggcgagggcgttgttgcgcccccttgtgctctgatggccttgtccctacag

SEQ ID NO: 42251 - DNA, 150 bp, Zea mays
  Peptide Sequence Number=SeqID_85626
atggccgataaaggtgaaggcaagggcatcgtcatcagcaatcctcgcatgtcagatatatcacaaaaggagattgctcgaaaggcttcggacgagaaggctaaaagttgctcctccaaaaatactagcaaaaagattgtttccacgtga

SEQ ID NO: 42252 - DNA, 459 bp, Zea mays
  Peptide Sequence Number=SeqID_85627
atgagccaggcctcccatggcgccgcgcctgccggagccccgctgccgtggtgggctggggcccagctgctgtccggcgagccggcgcccctgtccccggaggaggcgccccgggacacccagttccaggtcgtgccgggggcctctcagggcacgccggatccagcgccgcccaagggagggacacctaaggtcctcaagttctctgtgttccaagggaatttggagtcgggtggtaaaggagagaaaaccccaaagaactctaccgctgtcgttctgcagtcgccattcgcggaatacaatggtcgtttcgagatcggtctcggtcaatctatgttcaaatcatttcttggagttcctttcaatgttgattcgtcaactgatttctttgcaaaaggggttgaaaagctgacctcattttttttcccagctggtcccttccagttattcttgtgctga

SEQ ID NO: 42253 - DNA, 1008 bp, Zea mays
  Peptide Sequence Number=SeqID_85628
atgtcccccgctgcccggaaccataaccctaaccgctgccaccgctgctgcggcggaggtttcggagacgagtccagcagcagcggcgaggcctcgacgtgcccatccgcctgcttcaccgcaagctcgtctgggaccgcgtcctcgcactccttctctgccttgtcctcgtcggcgtccacagcttcgtcgtcggccgccggcgaggagcggcgggacctcacctggctgctcgacgcattcgccagcgccaccttcgaccagatcgactccgcctaccgcgaggccggaggggaccctttcgtggccgccggtatcctgtcctccacgcaggacactcacccgccgcagcccccgcagccggcgccgcagcccccgccgccaccagacctctcgccgcgcagtggatctggtggaaggaaggctggtcggaggcccaagcgggttgccgtggccgctacgggcatggtcgcggacgtgattggcaaggagtacacgcgacccgcggctaattctgtagtaagcatgccaaatgcttggaagggtcgggacggggagagcgatggcagcgggtctggtggccgcaaggacagtgttgaagaggcagagcagttcctgtgctccatgctcggggataattccgagcttggcatgggtgttgtcagagacgtgctaggccagtatgggtacgatgttgagaagagctttctaccatctatcagtctagtagcccttgatggtttagcatcaattagtaaaaatataactacagtgtgcatcaatgtgatggaaattctttggttgtttgttgtgctaatcaagtgctttcaggctttggatgcattgcttgatatatctggtgtgtcttcagttgaaaacatggaaacaaaccatcaaagtgccagaaggaatgacacatgtcatctagatatgttttctggaaatgggctatcagtggagaatctgactgcagggaatagaagaagtctacgccaggtgtttgcttag

SEQ ID NO: 42254 - DNA, 282 bp, Zea mays
  Peptide Sequence Number=SeqID_85629
atggcaggaatgtactgcaacgcccgcgactgcctcaacaagagaatgcagccgccggcccgcaccgctgcacggatcctcctctcccccgtcgacaaggcgaaaggctcggcgagaaagaaggaaaggaagggagcggagcgaagaaccgtcaccggaccccctctcgagtatatgaaggccagggcgaaaccgtttccagcacgccgcctggaccggacgcaggattcgaaaagcgcgaagcggcacagccgttcctcgaaacggctcgcgcacgcgtaa

SEQ ID NO: 42255 - DNA, 591 bp, Zea mays
  Peptide Sequence Number=SeqID_85630
atggcgtctgtcttctacgttaatagtcagttgcacgcaatgcagcacggcgagatggtggcaccgttgtcactgtatgacgatgggtggccgggtggaggagaagttgcaatggggatgaccggcgacggagaactgcaaaactgtagaccatctccttgcccccgcctccacgaaacctccacgacatactacgtcagactccgcaccggggatgcccagctgggctaccgcttcgagctggtgcccgaccacaacagcaacatcacggactcggccgtgtgcgtggccgagtctagcgtcccggcggtccgcggtgggcagttcgccatcgatcttaccacggccggatcccccgggcggggcagcagcgagttgggccacgcgctctggcccccgggcggcttcgtgatgtcggccgccgtgcaggaggagggccggcgcggcaggccctccgtggggatcagcgtggcgcacttcgggtgcgccgaggacgccgccgcgttcgtcgctctggcagccgccgtcgacctcagcatggacgtgtgtcggctcttctcctgcaagctgcgccgagagctgtcggcgtga

SEQ ID NO: 42256 - DNA, 207 bp, Zea mays
  Peptide Sequence Number=SeqID_85631
atgtcgctggcgccctaccagagccaacagcccccaggaggctttgtgcgtccacctgctctgccgaccacaactgggtctagatgcgccacgtgccctcaggtcttcggcttccctgaggagctctgggcacaccacgtgtctggcctcccacgccgtggttggtcaagtagtaggtggagtcggaaagtttctgtgcctatatag

SEQ ID NO: 42257 - DNA, 291 bp, Zea mays
  Peptide Sequence Number=SeqID_85632
atggccagcggtggtggggggcccgcgttcgtgggccaggtgttcaccatgctcgacccatccgggaacgggctcatggccgttaccacacgcttcgagctcccgcgcttcctcaccaacaggattgcaacacagctgagctgtacctctgaggctccaccaaacgtcataaatccagtcattccaaaagagattgatcaaagatttcaaaaactccccctatttcccatagtcaaaacttctccccacaagaagccaacttttgacaatagagacaataaaagacaataa

SEQ ID NO: 42258 - DNA, 87 bp, Zea mays
  Peptide Sequence Number=SeqID_85633
atggcgacctatgaccccatcacacaagcgacacccgacgataggcgcgagagggtctctgttgtaaagaaggttatcactatctaa

SEQ ID NO: 42259 - DNA, 835 bp, Zea mays
  Peptide Sequence Number=SeqID_85634
aggccacgtggcccagaggccttacgtcaggctccgcccgctggcttacgtcacgggcagtaggccatgtggcagcatcgggtctccgcctgagcgaagagcagaagcgtacacggtatggtctggacacatgtcggctccagacccccgcctggccttggttaaggcctgggtattctttgtcccagaatcccgggaccctgctgtgactggcccgaaccttacacagaggggtccggaacccatcctaggggtccggtttgcgcccgtgcgggtcctggacctctcccggaggtccggcccccgtgtcagagactgggccgttgttttcggcggagatgaagaggcgcactaccgcgggcggcggttcgctcctcgcgtggcggcgttcgccggaaggatccgcgctggcacctctcccctcggcaatctcgccgccggggagttcgtgcccttcgtctcctacctctcctgcgggttggcactgccaatctcgcccttcttcttgctgctgttggaggagctcggcctccagcttcagcacctcacccccagtccatcctcaaggccatcttcgcccacctgtgcgagatgttcgtgggggtggtgctcttccgcccagtgtgcagatgaaaggatgttgcgcatcgaacttccgaagatggaaagcgagctgagctgcgactccttccatcgcatgaactccatcgcctcttgtagcggcctcgttagctcctccctgggctttacccgcatctcgtgggtgtgcggtaggcttgcgcccagcggttgcggcggtagcggcgctatgacgacgctgagcaaggatgcccac

SEQ ID NO: 42260 - DNA, 1281 bp, Zea mays
  Peptide Sequence Number=SeqID_85635
atgagcgttttaagcgttgggtacctcctcccccgaatcctccaccaaaagaagaggtgtttctttttccagtggatcgatggtcctgataaatttgaccctctgaccctcgatatcagaggtgtttctttttccagtggatcgatggtccatacggatgcggagaaggaggtagcaacagaaagacggatggactcaccgcctcgatgcgattgtggagaccgtgctgtcatcgacgaagactatgacaagcagttctgttgtccgaacattgattatccatacgggtggcgtaagtgtcgtttcagagagtggttgtatggtcctttgtcccattggccagagccagaggtaaaggaaaagagatacatggggtgggcggcagaagaggtcaaatttgatccagtactctgcaaatgtggtattgaagctaagtatggattagttccttcggagcttggtgttggatatttttgtggacatatggtcgattacgatgaggagacgaggaaatgcagttgggagagttacgatgacaaaggagaggtgatgcgcacaatagagtcgaagagaataatgggacagaagatgcgttgtggatctcggctcgttgattcgtacattaacgatcgcatacgcgacatgcgtagggaagcaaaatctgccttttatgatagcccgaagcgtgcagagtataggaggttgaaggcggcagatgagaagagagcacaggatgcaagggaatgggaagcggctcaagccgagaaacagatgttggataatcttgctgatcgcctcaagggaaagattggaagcggcgtaaactatttggccgatgaggcgcatgcgagatatgttcaggataaaatggcaacggttgagctgatggaggaggaggacgacgacacatctagattgagtgagcttatcgccctcgcagaggcaggattacatgaagaagaggaggacgacatgtcaaggttgagtgagctcatagcactagctgaggctggattacgtgctcaagaggaagaggatgagtttatgtcacaggccgccgcagaggtagaggcagcttattacaagaagaagtctgatgaggctgaggctgaggatgagctattctcccaagctgcagatgaagcagaagccaattattacaaaagaactggtgacaagtgtgatgcaggacaatgcagcaagtggaatgaggttgttgttgaggattgcgcgacggatgactccgaagatgagttactcatagattgtgattcagactga

SEQ ID NO: 42261 - DNA, 268 bp, Zea mays
  Peptide Sequence Number=SeqID_85636
acgtattcccggcagagacaaattctccaacagagatgtagatgggagaaaaaccttcctcatgaacattcacatggatagattctcgtttcaaaatctgtacagggcctcggattttaccggcacgaccctggataaatatgtggtggaaatcgatgcttacacaaccaaacctttgaccatcaccggtgtacgtgctggatggaagaccaagcaggcaggaccgagaggatccgcaggagcaggactgttcaagtttgaactctga

SEQ ID NO: 42262 - DNA, 282 bp, Zea mays
  Peptide Sequence Number=SeqID_85637
atggggcccgcatggcggccactcggtccgtgctcgcgtctcaccttcccctggcgcatgggtcccactgcaactgctcttcttcccggacggaagaatcggcatggtagttgcgccaccccggtctacagctatgggtcggagtccaccgccggggctgctacacgcgtggtcgcggctttcgacgtcggggttactgacgagcaaaccactgtggagtctgaggttcaacaagtagaggtagctgagcaggagctcattgaaggcaagttgtgcccttga

SEQ ID NO: 42263 - DNA, 441 bp, Zea mays
  Peptide Sequence Number=SeqID_85638
atgaacaagacaccagcactcaaggtgccattacaaacggaactccggttccacctccgcaggtacgagcaaccccacacgattggggggcctgcggagcaacagaaggtcgacgggtggctcgccgccgccagctccaacaacgacgacgacttccgctccgaggggccgaacagcagcagcgatgacctcagggcggatgctgctgccatagggccctcgcccacttcctcactcgagaggcaaggacgagcagaaggccgtagagttggaggtcagtccgtgggcggcaccggctatctcgtcggcggagaaacctcttccggctgccgtggcggaaggcggcaccggaagcggctccgaagccactcgggccagagagccgggcacgcggcagctgccagcgccacgaacggcgaacgcccttcccccgatcactga

SEQ ID NO: 42264 - DNA, 303 bp, Zea mays
  Peptide Sequence Number=SeqID_85639
atgcaaaaagctgccgtcgaggtaggatatttgtcagtaaatgtgcttcgactctggcacagtgctattgactgtgcgagcttcggactcctctctgaagtcccgctggaggctgttgccaagatgcttggggttggcttgccgaagcgacagaagttgcagggtgattgcctacgtattctggaatcttctcctatctccttttgcttctggatggaacgtgatgcttcctggcccaaaaaggaaataaccggggtattgggaataaatcttgacggcccagaggaaagaaatttcccctga

SEQ ID NO: 42265 - DNA, 47 bp, Zea mays
  Peptide Sequence Number=SeqID_85640
atggcgagcacagactcgctcctatccaagcgactggccatgggcgg

SEQ ID NO: 42266 - DNA, 132 bp, Zea mays
  Peptide Sequence Number=SeqID_85641
atggacctcctctcgtggatcgttgccggctccatcgtcgccctcctcatcctctgtatcttgctcatggcccttgagaggtgtggtctggagtctggactcgatgcatgcgtgtgcgtacatgatagctag

SEQ ID NO: 42267 - DNA, 348 bp, Zea mays
  Peptide Sequence Number=SeqID_85642
atgacgaacggtgaggtgagcaccaacgacatgaacgcggcagcgctcggcgagcttgggatcgtgcagcagggccctcggccgaggttcagcgctagtggccatagagcaggcatgacggtgctccggccgtccggcgcgcagcagcaactacaaaaaagagaaaaacaggtaaaggagagggtaacacctgaatttggtgaatatttaaaaagaaattttatacctctaaaatcagggtgttacaaatctaacccccttaacagaatctcgccctcgagattcaagaagaggttagcaagaaccacaaagctggttcatcggttgtccaaggctttcttgagttaa

SEQ ID NO: 42268 - DNA, 168 bp, Zea mays
  Peptide Sequence Number=SeqID_85643
atggccaaagccccgttggcagtgtcggctgagccgaccgagcccctgctcgggccctgcgctctgcagtgggccatgcctccctggcccctgcgcgcacaggtgtggccgagcacctccctcccatggccgacccctttgcttgctgctggtatttcatggagaaag

SEQ ID NO: 42269 - DNA, 315 bp, Zea mays
  Peptide Sequence Number=SeqID_85644
atgcaggcggcatgcaaccgcaccaagggggcgcaccctttcgacttcgacgcgcccagcatggaggcccaggcccacacgtcatgtaaccggcgcgccggttactacgtgcgagaaactgcaccgccacttgcgctagtaccgtgccttctcgactgcagaaccgggaccgggaaaggggatactccgaaagggatccttctccgcgaaggaagcgggccccgagccttcctactgatcagaggttcgaaggctggcccctcggaagggttcgacagccgcctcagagcactcgggccccgcgcctactactga

SEQ ID NO: 42270 - DNA, 669 bp, Zea mays
  Peptide Sequence Number=SeqID_85645
atggcgtcgccgtcgcgtaaggttctcctaggcgtaaccttcgagaggcggctccggtctcgcactcggcaactcttctgggccgccgatctccctgtagctaccacctctcgctctctcgcggccgccgctgccacgacgctgccgtcgggcgggtctccagcggctcttctgttctctttgaggaccatctcgtcaacgcgcctctcgaaactgtccgccttcagtgacgcgcccggcccatctgtggtggaccacaagtttgtttctcgacctcgcagtctcagcactgacaatggacaaaaggttgttcaggagaggtcgataatgcaagaggatgaatttcacaaattagcagatgagacaattcatgatttgcttgaaacacttgaggtggaatatggtgactccattcagatggatggtttcgacatagactatgggaaccaggttttgacattgaggcttggggatttggggacatatgttgtgaacaagcaatcaccaaacagacaaatctggctttcttcacctgtaagtgggccttctaggtttgactgggatgcagcaactaatggttggatatacaagcgaactggatcgaatcttgtgcaacttcttgagaaggagattggtgagctctgtggtactccagtacaactttcataa

SEQ ID NO: 42271 - DNA, 237 bp, Zea mays
  Peptide Sequence Number=SeqID_85646
atggatgcccaagtgtcttatgcatttcattctcagaggaaactgcatccagagaagttcaagaatcagttgtccaatcagaaaacatacttgaagctggcatgcacacaaggatggttttgtgcctctttgtttcatccaatgtcacggaacattgcttgccttgcgaaagtgaagataatgaaaaaatctggaaaatgggaaaccatggaaattccacaaagctccatattttaa

SEQ ID NO: 42272 - DNA, 468 bp, Zea mays
  Peptide Sequence Number=SeqID_85647
atggagaacgatgttgagaaaaataacatggtgaaagagttctatatcccaacctatattttcgtgccagagtctccagtggagcatgcatctcagatacctacttgtccggtgattgtttttgtcaacacaaaaagtggaggtcaactgggacgtgagttgattgtcacataccgtaagcttctcaaccatgcccaggtatttgatctgcttgatgaagctccagacaatgtcttgcacagactatacagcaacctggaaaggctcaagcacggtggtgacactcttgcttctgaagtctataggagactaaggctaatagttgctggaggtgatggaacggcaggttggttgcttggagttgtatctgatcttaagttaggacatccacctcctgtagctacagttccgctggggactggaaataacttgccatattcttttggatggagctgtctggttaagtaa

SEQ ID NO: 42273 - DNA, 216 bp, Zea mays
  Peptide Sequence Number=SeqID_85648
atgactgcttctgctggtgcaaaactcatggttgccatcaactttctggtgatcatcgcgacttcccctatctggggtgctgaagattattcattagttaatttatatgacaggtcacataatcaagaactaaaggagcatgttcacaatggcagcactagcaggacatcagtcccaattcatactcatttaggaaagatggctgctgcagcttaa

SEQ ID NO: 42274 - DNA, 237 bp, Zea mays
  Peptide Sequence Number=SeqID_85649
atgggcctatggctcgctctactgctcgccgaccacggatcgctcatgtacctcttcctcggagacctcgggtgcatgctgtacacggggtgcttccggtgggagctcgggagcgataaagcgcggcgggcgaagcaggctttactggacgagctcggcggggataccattattgatgtgctctatttggagttctggacaacacctatcgtcgctgagcaggtcaatttcacttaa

SEQ ID NO: 42275 - DNA, 891 bp, Zea mays
  Peptide Sequence Number=SeqID_85650
atggcggccaagctctccaccagcgccgacgccccggcctcggtgcggctctccgcagcagcgcaggcggctgcgatccagccctcctctccgcgcttcttcttctcctcgctggccgggaccaacccggcctccccgcatcgccgcatcgccattgccgtcgatctctccgacgagtccgccttcgccgtcaagtgggccgtgcagaactacctccgccccggggacgccgtcgtgctgctccacgtgcgccccacctccgttctctacggcgccgactggggttccatcccggtctccgtcgctgacgaggccgacgctgccgaggacgccgccgccgccgccgagggcggcccctccgaggaggagctgcagaagaagcgggaggaggaatacgacgccttcacctctaccaaggcgcaggacctcgcgcagccgcttgtcgatgcccagatccccttcaagatccatgtcgtcaaggaccacgacatgaaggagcgcctctgcctcgaggctgagcgccttggcctgtccgctatgatcatggggagccgcggttttggggcctctcggaaaggcggcaaggggaggcttgggagtgttagtgattactgtgtacaccactgtgtatgccccgttgtggttgttcgctaccctgatgatgctgcagatgccagtggagatgcatcaggggcgacagatgagttgcacactgtaccagaggacgaacctgtttatcacgatgcgcctgaggtgcagaaaggtctattccgtcacacatttaatgttgccactaaagcagaaatttattcactgccaccttcgtggaagttattccacttcgaagtgtttgctttttggaaggttttgcctagggactcagacaattaa

SEQ ID NO: 42276 - DNA, 321 bp, Zea mays
  Peptide Sequence Number=SeqID_85651
atgacgaacggtgaggtgagcaccaacgacatgaacgtggcagcgctcagcgagcttgggatcgtgcagcagggccctcggtcgaggttcagcgctagtggccatagagcaggcatgacggtgctccggccgtccggcgcgcagcagcaactacaaaaaagagaaaaacaggtaaaggagagggtaacacctgaatttggtgaatatttaaaaagaaattttatacctctaaaatcagggtgttacaaccggacagtgtccggtgccccagggaagaacgactctggaactcgccagcttcgggaattcgctccgctataa

SEQ ID NO: 42277 - DNA, 252 bp, Zea mays
  Peptide Sequence Number=SeqID_85652
atggccaaagccccgttggcagtgtcggctgagccgaccgagcccctgctcgggccctgcgctctgcagtgggccatgcctccctggcccctgcgcgcacaggtgtggccgagcacctccctcccatggccgacccctttgcttgctgctggtggtgacaaggatgatggttatgactatggtaatggtaaagaagaaggcatcgaggcgaatctccaggagttccaggacttcgacgagttcgaggattag

SEQ ID NO: 42278 - DNA, 147 bp, Zea mays
  Peptide Sequence Number=SeqID_85653
atggggtccgggcacagtacttgctctgccgagcctggttgcagaggtggtgacaaggatgatggttatgactatggtaatggtaaagaagaaggcatcgaggcgaatctccaggtgttccaggacttcgacgagttcgaggattag

SEQ ID NO: 42279 - DNA, 375 bp, Zea mays
  Peptide Sequence Number=SeqID_85654
atggggagtagctctctccgggcagaatgggaatcacggcttgtgggtggttatgagattgatggttttggttatgattatggtgctgctagtccactacagccaaacaggatacttgctgagtatgttgatgtgtactcacccttgctctacacaccaaaccccccccaggttgtcagcattgcaaccactgctcaggcgaagatgaagctgtggaaggagacttccaggagttccaagattacgacgagttctaggtgtgggttagcggcaacccccagtcggctgcctgtgaaggccgcagttatctacgtttcttttccgcactttgatttattgcaagaactatatggacgtctcagacgtatgatgtaa

SEQ ID NO: 42280 - DNA, 806 bp, Zea mays
  Peptide Sequence Number=SeqID_85655
acttagtgatggaggctccccacatggacgggggaaagggataaacaaggcgggccctttccctgcaaatgtggagatgatgtttcgaatccacgacctggatccatattttaggatgactcgtgatgttgctcctagaattggttatcagaaaccatcactgattgaatctagattttttcctgctcttcagggggagaacacaaaaatgtcagctagtgacgcaaattcggcgatatacgtgacagatagtgctaaagaaataaagacaaaggtgaataaatatgccttctcaggtggccaggactcaatagagctccatagaaaacttggcgctaaccttgatgtggatgtcccaatcaaatacctgaacttcttccttgaagatgatgacgagcttgcgcacataaaaaaggcacacagcacactgatccttgcgactgggcgttcaatccagccatatcaatcggatccccatccgacggcccagcagatctcgaaacccaacacactaggcctcgccctttcgcccgacacggacatcccctggcccctgccgctccccacccatctccgatctgcgattccttccagccgacgcctccgcatccacctccccggagccaccagcggccagccactggccgtccaaccatcgtccccaagcggcgagttgcggggtgtggcgaagatgatcagcaggcagctcgtgctgacctacctctacctgctgatctacatctgcctctcttcgggcgtcatcctgttcaacaaagtagggctctgcttgcttccttccaatgcgg

SEQ ID NO: 42281 - DNA, 320 bp, Zea mays
  Peptide Sequence Number=SeqID_85656
atggacgctcggtgggcggtgctgctcgcgctgctggtcgccagcggcggcgtccgtgtctgcgccgccgctggggccaagggcgccaactggctgggcgggctgagccgcgcgtcgttccccaaggggttcgtgttcgggacggcgacgtcggcgtaccaggtcgagggcgccgcgtccaccaacggccggggcccctccatctgggattcattcgcgcacgtcccaggtactgcttcgcttcgtcactgtgtccctcctacgctgaactctgctagactgcttcggctggcacgggagtggaggaggaaatctgatgc

SEQ ID NO: 42282 - DNA, 1305 bp, Zea mays
  Peptide Sequence Number=SeqID_85657
atgaagctaggtactgcggtgggagaactgggggtctccgatagttttgctatggagttgatggggacatgcgtggccctcgggggaaggatgtcttcgcccgagctccgggagtcttcggcgcggatgctggaggttaccgggggtcgatggcccaagaacgttcctatcccccgcgcggctggcgaagacttctttacgtctcgcatggctcgtgacttgagagtatttccttacgggcggaatattgctgctgttgtgtcagcagtgatgaccaaggaccgtcaagatgcggcgcagaagcgccgggcggtcatcaggatggtcgatcccgtgcgcgaggcgaagagggcgcgaggaagcgcgaaggctgcagcctccggtagtggcaagctggtgccggctgcgaaaatggctgcgccctggggcagcgaagcgtcgacaggcgagaaggctgcggccgctggcggaaccaagcctctcctgggcggaccgtcgcccgcgaagctgcctccgccggggaagcgtgttgctgacttcggcacaaatatcagtgtcgaggattatctgggtgggtcgggcgagggacagttggttgttgtcccgccttcggtggcagccacgtcgccatcggcggtggtaaaggcgaagggggccacgcatgacccgtgggccgccttttgcgcgagcgacgagattttgacggccgctgccgctagggacgtggtgggcaccatgtcccagcggttgagggaagtgtctcagcagttgtcgcagcaggtgacacagcagctgaagcaaggcttcatgtcttacgcctccctcgtcacatgcgagggggccatgaacgcgttgtcgcgcgaggggtgcaaacactatgaggtcttcgaccagtcagatgacaactttgagcgggaaatttttaaggttgatgaccatgtggtaaaggattccacgggggcactcttcgattggatgtggggccctcatggtcgagaggcggttagggagcggtctgacctggcgagggagcagatggtgcgtgccgaggatgtggaagacctcagacatctgaatggcgcgcagcccgaggcggaggtcaacccggtgctgcccgaagccgaggtcgaccctgcaccgccctcggaaaccggtgaaggatccctcgctgcccctgcgtctactgtgtctggtgaaggctcgtcgccagcctctgcgccgatggcagaggatcccccgaaggcggcggcggagctggcaacagaggatcccatggcggcggctgggtcttcgcaggtggcttag

SEQ ID NO: 42283 - DNA, 342 bp, Zea mays
  Peptide Sequence Number=SeqID_85658
atgccgtcttcctcctcgtctgctgcgaccacgccgacagccgaggcgtcgtccgaagatacctcgggcactgtggcggcggcggagttacgaccgggtgatacggtggaattcggtgtttcgcggatgtcgtcggtccgcgtgcaagatatgcaacagttggggtattttggcggcggggttgggcgtgtcccgggggcagaggaggttcccgagcccgagggcgaattggttgtttttgaggcatttttcatcgccgaacttcgtctgcctgcgcatcgttttgtgtcggaggtgctgcagaagttcgaagtccagaggctgaagttgaagaccacctag

SEQ ID NO: 42284 - DNA, 750 bp, Zea mays
  Peptide Sequence Number=SeqID_85659
atggccgccgcgacagagaagacggctgaggacatccgccgcgagctccaggagctccagcgtcagcaccgcgaggctgtgggtccggaatcgggggatcaacctccgcagaagcgtcggctgctatcagccgtagttaaggtggatggggctgaaaataacgaggaaggcacaaaggatgcggatgcggaggggcatgggacaggttcaggtgccactgaaggcagtgccgggaggggtttcaacaatggcgggttcagaagggatggtggcttgcggatgcagaggagagtggactataattcgctgccagagccagctccaagggagcttcccaggaatgaggacccgaatttggtgagaagaaataagaggatgctggggcagcttcttgtcggtacattagagaaatttcaacaagaagataaaaaactatctaactccgaggcttttctgcgtagatcagagactcagcgaaaggctgagcaaaaggtccgcgaagaaagtgaaaggctgcgacagaaggaacgtgagcaaattgcagagaagcgtaagcgtgatatgacgcttcgcgctcgtgtagctgctaaggcggaagaaaagaggttggagctgttgtacattcagtggactgagcaccataaaaggctgtccaatttcttaaggacaaaagctgaaccacctatttactacatgccaactaaaccaattattgacgatccagccattgttgaacagaacaaggaaaag

SEQ ID NO: 42285 - DNA, 330 bp, Zea mays
  Peptide Sequence Number=SeqID_85660
atgtcgaaaagcactttgaaaagagattattacgaattgaaagaatgccacttgaaaggaactattattggtcacataccaaatgaaacagtaaaagtctgcaaaaataaagctgaaaagactgaaaaagcgtctgaaaaagggctgacgcagtctgaaaaaatggtcagactggccggtcaaactgtgctagaccggttcaaccggtcctggacaccggttcaaccggtttcagccagggggtttcctggtgaataccagccgaatctgaagttcaacttagaagttcagctggtctccccagctgagctagaaagttcagctggttag

SEQ ID NO: 42286 - DNA, 729 bp, Zea mays
  Peptide Sequence Number=SeqID_85661
atgcagcccggctgcacccctccgccggtggtcacccaagatggtgacctccagcttgatggtgggggaaagcgagtcgggctgcggcctctgcccctccctcagcctcaaggattttcatcaccagggctggggaggggagtgtgccgagttggggtcggcccctgcgtgggcggtggcccgctccttcactcagtgatcggagggaagggcggtcgtcgtccgtggcgccggcagctgcaccgtgcctggctctcggatgcgagtggcttcggagccgctcgcgcgccggcgtctgccacggcagctggaagaggttcttctgccgacgagatagccagggccgcccacggaccgacctccaactctacggccttctgcccgtccttgcctcacgagtttgggcatgggcgggggcctcttggtagcagcatccgccctgaggtcagtgctgccgttgttcggccccccggagcagaagtcgtcgtcgtcgctgctgctggagcgggcgatggcgcgccgttcggcgactcgcctgttggttgtctgaaccgcttcaccaagcgtgagtcgccccgtgtcaaggcgacgagtgagagcggagatccttggaccgcgccgctgtccgaggctaggtcggacctcaccgaaggtgtcgtcgatgccgagggtgctgctgcccccttccagcgtcaagacccgagcctgcagggtcagattgtcttgtag

SEQ ID NO: 42287 - DNA, 530 bp, Zea mays
  Peptide Sequence Number=SeqID_85662
gaaatattgcagggaatcaaaatggagacgttgcagtggatcaataccatcgctacaaggaagacgtcgatctcatgaaaagtttgaactttgatgcctaccggttctcaatctcatggtccaggatcttcccggatggcgaagggaaagtcaatccagaaggtgtagcgtattacaataatttgataaactatctgcttcagcaaggcatgactccttacatcaacctttaccactatgatcttcctcttgcgcttgagaagaaatatggagggtggttaagcgcgaagatggcggacttgtttacagactatgctgacttctgttttaagacctacggcgatcgcgtaaagcactggtttacattcaatgagccaaggatagtagcgctacttggctatgacacagggtcaaatcctcctcaaagttgcaagataccgtacgaaatatcaggtatttccatcttgagaacctcagaagttcctctgaaaaataacatcactctagcactcctaggagtggtaaactga

SEQ ID NO: 42288 - DNA, 486 bp, Zea mays
  Peptide Sequence Number=SeqID_85663
atgcgggagttcagacctctcttagtcattccagtaacaacagcagatgtcctttcccaccaatccaagaaggaagtagcagccggctgtggggctaaggagtgcaggcccaacttccttagaaggttataccagaaaactcttgtgaatacacaagacgctaacagggatgagctgactcggttccaaaagcaagttgaggagcaatatctctcaaatgtggagaggcagctggagaggatccagaatgcccggaacgctcgaaaggcgaacgggcatgctaacatgcaagaaatggacaaggagctggacacacacagggcggagcatggtccgaagactcggcgagttcctgaggagggcggtaatgatgacgacgaagacgcagaggacatggctgcggaagacgaggtgatggatgaagttctgggcatcaacgatgggatcaacgaggacccatccaagccgtccgagagctactactga

SEQ ID NO: 42289 - DNA, 774 bp, Zea mays
  Peptide Sequence Number=SeqID_85664
atgcgtgcaccattgcgaagaggtcctcgcccccgtcctcctacggggggcgacaacgaggccattaaagccaaagagttggaggctcggcgacaggtggcactgatggtctcgccagcggaggcaaccaccactacagtgggcagcctcaccaacggcgacgaccacctcagcaccgacgacagcggccacctctgcaccggtggcttactggcgacggcggccgcctcagcgcacgcgaagaggtcctcgctcccgtcctcctatgggagtgaggacaagaccatccaagaacgcgaccaccacccccacggcgtacggcgccttgtacgaccccccggatggcatcggaacagtgcggccggcggcgcgggagacgccgtggatgtggcggacctgcgcacggcgcaaccgtcgcccgtgcggtggacggacatagctgccgcgtgtctggctccttggcttggatggcctcggtgccgcctccgacgctgtctcctgccacttggtcagggcgtggcagaagagcgccaaccccgcgaggtcgcgctcctccaacagcagcaagaagaagacaagatcggcagcaccaccacgcaggaaacgaagagcgcgagctccccggcggtgagaccgccggagggggtggccctgacgtggatccctctagtgaacaccagcgcgccccatccagaggcccagaaggcggaagggcgcgacgaatgcaagaggagcgaggcatggcaactgcccgaggaatggacccctttttaa

SEQ ID NO: 42290 - DNA, 234 bp, Zea mays
  Peptide Sequence Number=SeqID_85665
atgaacccaccgtgctgggggaagaacctccctagcgcgacgctcggcgacggagaaacagaggctgaaacgtgcggcgacatcatgaagctggagaatgggatccggctcaacccatctcacgagacgaagcctcaaagatgggggaggcccctaatgaaagaacacatcgagaacagcgcaactcccatcgccgtgaccgtcgtcaaactcaggaatgcgagcgggagctag

SEQ ID NO: 42291 - DNA, 141 bp, Zea mays
  Peptide Sequence Number=SeqID_85666
atggccatgatgggttcaacatcggaaaagatgtacctctgtcaggtgaggaaacaacaaatttttgttgcttttgttccaaggtggtgcccaaagaagaaaatcaagactgaagcctcgggaggaagtgtcctcctttaa

SEQ ID NO: 42292 - DNA, 861 bp, Zea mays
  Peptide Sequence Number=SeqID_85667
atgaagctcccagagcgaggaatcgggctctgcctcgccggagacaccagatcaaggtcaccggacttcacccgaccgccggcgagcgtagaccgagctccacggccgaagcacccgccgccgacgagctcgcccgcctgcgcacgtggaccggccgattccggccatcaccgtcgtcaagtcgtacctcgccgtgaccgcaaggacttcccggagccaaccccgtccttcgccggacctccctcgccgccgctgttcgaggagcaccgggtgccctgctgtagggtgaggatgaccctggagcctcatcccttacagccaggctggcgttcgttggactctgagtctttcggataccgggctgaagacaccatcgaggccattgctctccatgggctgacgaccttctatggttttcaccccttggagttgtctactcgtcccattggcttgttccccgcagagaaggaggacgacccaatgtggaaagacagagtggaacatgccaaggatatatgggctctttaccaagggcagactgctcacttgacggtgcgatgcatgaatgccctgtaccgcctgcaagcggtgcgaggcgaggcaatgtctcagctaatggcattggtggaagataccaagatcaccctagataacagagaggaactcgtggtagacctgtccatggagatggtggaaaaggacctgcaggtggaacatatggccaaccagatccaagagcttgaggagctagagggagctagggagaacaccatcgaggttcttgaggatcagctgataaacactcaacaacaactcgaggaggctaaccagcatttggatatgcaccatcaggagatttag

SEQ ID NO: 42293 - DNA, 201 bp, Zea mays
  Peptide Sequence Number=SeqID_85668
atggggaagcttgtcccatcactcctcatgctcctcctctgccgagcaatcaataacttttgccaagtcatcacatttccacttgttactcaatgtagcagcatggatcaagcagtctcattagctgcgagaagcagacaatttgaatcgagtttttatccttgcaagtgggtaaacccttacctctgtgggttattctag

SEQ ID NO: 42294 - DNA, 399 bp, Zea mays
  Peptide Sequence Number=SeqID_85669
atggctgacccgactaccgccgtttttgccaagatgatcgagaacttgactacaaccgtgacatccctccaggcgactgtggtacaactccagaaggacaagtcctcgggcgcccctggggaccactacgggccacgccaccatgagcgaccttccgccggggaccactacaggcagcaccaccatgatcaacccccacggttccggaagatggattttcccagatacagacgtatgaaggcacccccatcgtggcgtcgagtcaaggagctgttcaacctgcgctatggaccgccacggcgctctgctccactggccgaactggctgcgtgcccggcgtacaagaacggtagccgaatatcaagatcggttccaggtgcttcttcttctgccgtttag

SEQ ID NO: 42295 - DNA, 255 bp, Zea mays
  Peptide Sequence Number=SeqID_85670
atggtgaagcttgctatttcgatgaggcagggcttcgatcctttcttggagaagcttcacggctcctcggggaagctgtccaagggctcggttgaggctgagggtctctggaaatggctagccgtggtggccggcgctcgggtggcgcagagctcgccggagctaaggacggtgtctggtcagcgaaggcttatgggttttgctgactggagccaaagatatggcgtgatgaagtttggtttgtctcacttctga

SEQ ID NO: 42296 - DNA, 162 bp, Zea mays
  Peptide Sequence Number=SeqID_85671
atggacgccctgcgaaccgctcgccccgtcgcattaactctgcggcgggacaggtggcgcctctggcaggggaagcgagcgacgcttcgccttcgccataatgaccgcgtcaaaaaagggaacgggaaagggggataccacgaaaaggatccttctccgtga

SEQ ID NO: 42297 - DNA, 1053 bp, Zea mays
  Peptide Sequence Number=SeqID_85672
atgaacaaaagaccagcatttaatgtgccattacaaacggaactccagttccgtccccgcgggcatgaacaacctccacaccggggagcctacggggcgacgagttccgggcgactcgccagcgacctctgcagcagcagccatggtcctaggacggacacggccaccggaaggctctcgttcgcgtccccgctcaagggacgcgaaccagacatcaaagccaaagagcgggccgctccaaagcgcaccggcagcaacagtccgcctcccccggcatggctggaggacatctcctccgcagagctggaggatggtttccaccaacagaagctggaagaagaggtgtccagccgacccgtgcgggaggtagagccccggctcgcctcgctctccgccctagcaaggatgatgaacatccttgaagctgagggcgggaccaagatcgcagcccggctttgcttctccccatccaggggctggtggtcaccgtcttgggtgaccaccggcgaggggatgcagccgggccgcgtgatgaaaatccttgaagacgaacgatggctgaaaggtaccaactcccacagagttgcgttcctccaccgacaaggcggaaggattgcgggtgttccccatccgggggctcggaagtcgtcgtgggctaagtcttctccaacacgctccaagctcctcccctatggcgcgggggctgggtcccacgcgtcatgcaagctggcccagggcagaagaagccaaaccgccgcacgcgcggtgcatgcaaacgcccggcggtcacaagcgtcccttcgctttcgcccagaccagcgggtgaaagggcgagcagccatgcaggcggcatgcaaccgcgccaagtgggcgcgccccttcgacttccaacgcacccagcatgggggcccgcgcccacgcgtcatgcaaccggcgtgccggtcgcctacgtgcaagcaactgcaccgccgcttgcaccactaccacgcctcctcgactgtggaaccagtaccgcgactcgaggcaaccctgcgtacgacccagcagtgctag

SEQ ID NO: 42298 - DNA, 291 bp, Zea mays
  Peptide Sequence Number=SeqID_85673
atggggagattgaaagggaaatgtgcctttgggccatttctaagtattttggtgattgagtgccaacacaagtggtcatgtgttaatctatgccaaatgatggacaaagtgaaaatcaacataaagaaacaggagaaatcaatttggaaaagagatgactttgttcagccaaagacagttcagtctgggagcaccggactgtccggtggtgcaccggacagtgtccggtgcgccaggctggctctggcgaactggctgctctcgggtttcattggcggcgtacggctataa

SEQ ID NO: 42299 - DNA, 64 bp, Zea mays
  Peptide Sequence Number=SeqID_85674
gatggtggtgcagaagattgataatcagaagcacgttctgaaggctgctgaagcttctctttag

SEQ ID NO: 42300 - DNA, 59 bp, Zea mays
  Peptide Sequence Number=SeqID_85675
atggggaggcagctcccgctattaattcatcggaactgtccggtgaaaccaccggacag

SEQ ID NO: 42301 - DNA, 855 bp, Zea mays
  Peptide Sequence Number=SeqID_85676
atgggtgatccaagtgagaggaatggacacggcgctcttacccgggtgctattctgtggtccatattggcctgcttctactaactacaccagggagtatttgcaggactatccattcattcaggttgatgaagtaggtcttgagcaggtacctgatgttattcacagctatcatatatgtgtagtaaaaaataagcgtatagattcagatattattgccaaggcaactcagatgaagattataatgcagtatggtgttgggttagaaggtgttgatgtaaatgctgctacagaacacaaaatcaaagttgcacgaatacctggaagtacgacaggaaatgctgtctcttgcgcagaaatggcaatctatcttactctaggcattctgcgtaagcaaaaggagatggatactgctgtgaaccggaaagaccttggtgttccagttggagatacattatttggcaaaacaatccttatccttggatttggggccattggcatcgaggttgccaagaggctaagaccctttggggtaaaaattcttgctaccaaaagaaattggtcatcggacacattgccatcttatgttgatgagctagttgacaagaaaggtgggccggaagatatgtatgagtttgctggacgtgaccatcttttacagattggaattgtggatcataagtttgtttcatcaatgaaaaaggggtcatatctggtcaacattgctcggggacgcctgctggactacaaggctgtgtttgatcacctggaatcgggccatctagctggtctggggattgatgttgcttggatggagccatttgatcctgaggaccctgttctgaaattcccaaac

SEQ ID NO: 42302 - DNA, 795 bp, Zea mays
  Peptide Sequence Number=SeqID_85677
atggtgaccaccagcccctgggtggggagaagcaagccgggctgcgatcttggtcccaccctcagcttcaaggatgttcatcatcctcgctggggtggaggccgggctgagccagagctctacctcccgcgcgggttcgtgggtcggcctctccttcgacgttcgagggagagggcgctcactggccctgcgggcgggtcggacttcgacaacacggggccggttgacggcgggcgtcgtcagcctcagcgcgtcgggctcgtcggcttagctcccggtgccccctcctgccggaaggcggctgccgcgccgtgtgcacgggaggaccgtccaagatatcgcgcgctgccagggcagcgttcttgttctggggcagtcatgcctttgcatcggtacggcgcctccgcgcggaggtcggtgccccactcgtccgggaggatctgtgtggggatctgccggagggcggacggcccctgtcgtcggtgccgaggtggaggcggctcgagaagtccccgttgccgacgggatcaccgccaccatccgcgcttcgggcccccagctctttgtgcttgtcctcgcccctcgagcgtcggcgtgggcgagggcaagattgcagcagcatccgccttgaggccctcgctgctgcagttcggccacccggagcgggggtcattgtcgttgctgtcggagcgggcgacggcgagccgcccgtcggtcttctgttgctctgcaggccccccccatcgagtggggttgttcgtacccgcggaggtggaaccggagtttcgtttgtaa

SEQ ID NO: 42303 - DNA, 567 bp, Zea mays
  Peptide Sequence Number=SeqID_85678
atggcaaccaccggaacatgcatgggctccatcattccgccgctcgtgctcctgatgaccgtcttctcagccgcaccacgcgtctccggcgagccaccgagcgtggtgccgtcggcgtgcaaggcggccacagccgcaggcggcggcactttcaccgaggacttctgtctgtcggcgctcgacggcaaatccgcaggcgccgcggactacgccgacatggccctggtcgcggtcgacctcgccacggccaacgccacggccaccgaggcgaaaatcgacgcgctgctgggcagcagcagcggcagtggcgccgcgtcgtccgaggggctgcggtcgtgccgggcgctgtacggcgcggtggtgcggcagtaccagccggagtgccgtgccgccgtggccggcggaaggtacggcgacgcggaggcgtgtctgggcaggacggcgcaggcggccgcggcgtgcgagcggtggttcgtgcagcggaaggtggcgtcgccggtggcccccgaggacgacgccctcgccaagctcgccgacctcgccatcgcgctggcttcggtcgcctga

SEQ ID NO: 42304 - DNA, 432 bp, Zea mays
  Peptide Sequence Number=SeqID_85679
atgatcttcgcctcgcccgacccccggggcttggactcagcctcaactccggaagacggtctccgcctcgcccgaccccagggctcggactcgacctcgactccggaagaagttctccgcctcgcccgacccccggggctcagactgagcctcgatctcggaggagtcaccacctcgctcgggccgaccacgccacaaggggaggccatcattaccctacccctagctagcccaggctacggggaacaagaccggcgtcccatctggctcgccccggtaaaacaagtaatgatggcaccccgcgtgctccatgacaacggtggttctcagccccttacggaagcaaggatacgtcagcaaggatccgacagccccgacaactgtgcttctacagggctcaagcgctcctccgacggccacgacgccacatga

SEQ ID NO: 42305 - DNA, 1281 bp, Zea mays
  Peptide Sequence Number=SeqID_85680
atgcaggcggcatgcaactacaccaagggggcgcaacctttcgacttcggcgcatccagcatggacgcccaggcccacacgtcatggaccgggaaaggggatactccgaaagggatccttctccgcgaaggaagcgggccccaagcccccctactgatcagaggttcgaaggctggctcctcggaagggttcgacagccacctcagagcactcgggctccacgcctactactggtcagaggttcgaaggctggcccctcggaagggttcgacagccgcctcaggccactcgggctccatgcccactactgatcaggggttcgtaggctggccccccgatgggttcgacagtcgccccagagcacgcagagtgagggatgactctgggaatgattctgtaacggaatcccatcagagggaggtatcgagccctcggaccctatcgaacgggaccgggtccggcaaatcacttgcaggctcgggggctgctctcgcaaacccggctccggccaaaccgttgacagcgtcaacataccagcccgagaacttggaacctgactatgcacccgggctacggccactggtaacccccatcagcacaaagctgcaaaggcctgatggggtgcaattccggttaagggctccgtccactcaagggacacgatctcgcctcgcccgagcgcagcctcggggcaggaacggaagaccaaggcagattcacgcctcgcccgagggtctcctcaagcaatgggcgcaccttcgactcgcccgaggcccagctcgggcaggcttcacggagaagcaaccttggccagatcgcctcgccagccgaccagatcgtaggagcattcaatgcaaggatcgcctgacaccttatcctgacgcgcgctttccagtcgacaaggctgaagaatctccgcctcgcccaaccccagggctcggactcgacctcgcctcggacgacaatctccgcctcgcccgacccctgggctcggactcgacctcgccttggacgatgatctccgcctcgcccgacccccggggctcggactcagcctcaactccggaagacggtctccgcctcgcccaaccccagggctcggactcgacctcgactctggaagaaggtcttcgcctcgcccgacccctggggctcggactcagcctcgacctcggaggagtcaccaccttgctcgggccgaccacgccacaaggggaggccatcattaccctacccctagctagcccaggctacggggaacaagaccggcgtcccatctag

SEQ ID NO: 42306 - DNA, 312 bp, Zea mays
  Peptide Sequence Number=SeqID_85681
atggttaaaaattttggcagcaaaacagtgcaaatagcaatgaatgctgtggtaacttcacacctactcgtctgtttatatagtgctgcagcatttgagaacaagctcccaacagtaccgcaagcaccacctccaggctttgctccaccagagggcgaagatgcaatagaggacggcgaagtcatcgacatctcagccgaagaccagctaaagctgtgggacctgcgcatcaagaaccacaacctccaaaagctgaaagatatcctcaaggccaagcgccaacgtgtcaccacccaggccaaggtgcgctag

SEQ ID NO: 42307 - DNA, 660 bp, Zea mays
  Peptide Sequence Number=SeqID_85682
atgcagattattgaaagaaagtgcgaggttcaaaagggtgctgggataagttcaattctattgcacgggcccgagtcactggcccaggtggaaggggtggcgcctgaactggggaagatggtgcctgggctggagaaggtgctgctggagtccctcggctcggtcgaccttgccacccaaggcttctcttgcttagttaaaggaaccctcggccgctctgcgatgagccggagccagaggcagcggtgccagcacggacagaggcagagttggcttgaaaagaagctttgtcggccggagcctggccgggccgtccactggcgggaccgacgccggagtcggattgccgaggccatgagccgggctgacgtcctcgggggacagctagctgaggctacggagcgaccggttgagctgtctgctcgggccgggttcccggaggagaccctagcagcgatggcccaggcgtggtgccgacaggacttgtttgtcggcaacagaattgtttgtccgagcgagagttacttttcacggaaggtgatgagtgagaaggtgatgagtgaggtatccgtatcccggaggcgtaggagtccctcggctcggtcggccttgcctgcttacgtgtactccgtcgttttcaggatcccactttcgaagtag

SEQ ID NO: 42308 - DNA, 435 bp, Zea mays
  Peptide Sequence Number=SeqID_85683
atggacatcgaggagcagtccgcaccaggtgaagccaaggaggccgtctcccgcgacatgctccaggccaacggcgcgggtctggccgtggtgatggctgcgagtatcaacaggatcgacgacgtcgaagcagcgaaatcagcagagtcgacgaggttagaagatcacgagcagtcgcgtgaggacgcttcccaaaaaccttattcgccctctcccggtgcaggatctagaagacgaagggttctggagacctgctcttctgatcgcagatgcacgtctgcggtcgggacgaagggaactaaaaggcgactcagctatgaagagaggcgaaagcgaaactgggatgatttggaggctggctgccgggctccttttatagggccgagtccgcgacccccgatcttatctgcccacaaaaatctcacgatcagttga

SEQ ID NO: 42309 - DNA, 255 bp, Zea mays
  Peptide Sequence Number=SeqID_85684
atggccgccgagtcccgacccagccgtgtgctcgcccagctcggcctctactccgtccctgttgcgcgcgcgagctcgtcggtcttcccagctcgcctgtgctccttcctctgctccagcgcatttccttcaactccttcccatggtagccacgccctctactccttccagccggtcgagtctctctacagccgtgcgctcggcctccagctcccgtgcgcacgcgtccctggttctcgctcagatctcgcctga

SEQ ID NO: 42310 - DNA, 171 bp, Zea mays
  Peptide Sequence Number=SeqID_85685
atgcagattattgaaagaaagtgcgaggctcaaaagggtgctgggataaggtctaacctgaattttgatgtgatcggcctgatcatgaagatcgtttcctatgcacaatcgaagaacgaacaagaaaaagatgtgagcaatctaatttattactcgatggtggagttctga

SEQ ID NO: 42311 - DNA, 768 bp, Zea mays
  Peptide Sequence Number=SeqID_85686
atgctccaaggtcctccccctacgacacgggggctgggtcctgcgtcatgcaagctggcccaggacagaagagccaaaccgccacgcgcggagcgcacaactgcccagcggttacaagcactccactttcgcccaaaccagcgggtgaaagggcggaccgccatgcaggcggcatgcaaccgcaacaagggggcgcaccctttcgacttcgacgcgtccagcatgggggcccaggcccacacgtcatgtaaccggcgcggcggttactacgtgcgagaagctgcaccgccacttgcgccagtaccgtgccttctcgactgtggaaccagtgccgcgactcgaggcaaccccgcgcttgacccaacagtgccaaccgagcacatcggtcacgggtcagctagtcacgggagaaggcgcgacggtcgatacggccagaaatgggccggcagtaatggcggcggcagggaccgggaaagaggatacaccgaatgggatccttctccgcgaaggaatcgggccctgagccctcctactgatcaaaggttcgaaggctggcccttcagaagggttcgacagccgcctcagagcactcgggccctgagccctcctactgatcagaggttcgaaggctggcccctcggaagggttcgacagccgcctcagagcactcgggctccgcgcccaccactggtcggaggttcaaaggctggcccctcggaggggttcgacagccgcctcagaccactcgggctccgcgcccactactga

SEQ ID NO: 42312 - DNA, 381 bp, Zea mays
  Peptide Sequence Number=SeqID_85687
atgtcgtcgtggcagttggagaggttttggcgccctgttcatgtgatgtcgtggccgtcggaggagcgcttgagccctgtggaaggtcgggtgaggcggaatccatcttccgaggtcgaggctgagtccgagccctggggtcgggcgaggcggagtctatcgtccgacgtcgaggttgagcctgagccctggggtcgggcgaggcggagcttcctatggcgctcgaggctggacttagctgctgtcagcctcactctgtcgagtggcacagcagtcggagcggggcaggcggcgctgttttcccgtcaggtcggtcagtggagcggcgaagtgactgtggtcacttcggctctgtcgactgaggagtgcgcgtcaggataa

SEQ ID NO: 42313 - DNA, 246 bp, Zea mays
  Peptide Sequence Number=SeqID_85688
atgccgccagaaaagaagtacaagcatctaaaggcactatacctcaaagggcacattgatgtgggatggagacaaagtgtaagtagtccctcggacgactcgtgcaaaatttcactcacagatatgaacgtgtgggacgtggatggacaggagccaatatcaggaatcgacttggaaggctgcgaccatgtagaagcatcaaaaaatgggttgaggttggtcttatccactggcctcacagagtag

SEQ ID NO: 42314 - DNA, 360 bp, Zea mays
  Peptide Sequence Number=SeqID_85689
atggcgcagagtggctccagcggcaacaaccaagttctgcgagcaattgcgccatgcccagtggccgtctccacacgcgaacgatgtggcacccttccaatagacttggagacgctccaaggccggtcaccggggacccaatgtcagcgactacccgatttggtcacagtggcgcaaaaattggtccggggtaagccttcgtggcgaggtcactcatgtgtcacgggtgataaccaacggagcagtggtatagtgattgagaggatccgttcgctcagagccgatcataaacgtcgagatctccacctaatcaagttatcgtacctcatggaagattgggccttgccttctatcagataa

SEQ ID NO: 42315 - DNA, 285 bp, Zea mays
  Peptide Sequence Number=SeqID_85690
atgaggatcaggctcaagttgatgaaaatgaagatcaagaggatgagtcacctcaagaggaagacaatgatcaagggggagatgaagagaatgaagacaaggaagatgatcaagaaattcagtgtcaaagactgccacacccaagagtccaccaagcaattcaataaggtcaccctgtcaactccatcctcggtgacattcataaggggggtagtggatgcactaagagatccagattgggtgctagcaatgcaagaggagctcaacaacttcacgaggaatgag

SEQ ID NO: 42316 - DNA, 201 bp, Zea mays
  Peptide Sequence Number=SeqID_85691
atgggagaccagggagagcgcacagtcgggccagagatggggaagaagaagctcggttgcttgcaggctggagggacgcgcgcaggaaggcaaaaatcagagggaggagagaggaggagcggctgggagatgaagccgagggagctgccgtggaagaagcaggagagaagtgcgcagcggccagaagataacgacggttga

SEQ ID NO: 42317 - DNA, 474 bp, Zea mays
  Peptide Sequence Number=SeqID_85692
atgtgcctccttccgaaccaacatggtcaggctaagccatcaagcgacgaggacctagaggctgaagccctgccgccaagccaagacttagctaggactccactctataactacctccaccatgataagataagcgaccggaccaggccaatgggcactaggcatccagcgttgctacgacgtgcagctaggcaccatggcatccaagtggcaccaccactagtagtcactcgacgccagcctcattgcccgcctctccgtcatgccacaatccccatttcacacgttcctcccctccccattacgcgcgcgcctcttatctgcccttcttgtgggaggatgggaacaccgtctacccatctcccatatgcccacctggaaagtgatcctccacctccaaaggcaaacaagacgagtctcactctcgacatcgctgctcatccactcctacaatcctacgctgatggaatgtga

SEQ ID NO: 42318 - DNA, 690 bp, Zea mays
  Peptide Sequence Number=SeqID_85693
atggcgagcagtggacgccggcttggaggagcgcgcgccatgggcgagcgcagggagcttgaccggcgggagaaacgccgggctggggcagggaggagcgaccggcacaggggcacacggccaggggatccgccagccaccaacgcgcccaggaagaaatcgacggggttagggagacggacgagcagaggaacccacgactgcgcgcagacaaatctgagggagagagtgaagcaaggagggagccgagggaggaaatcaatggaaggatgccctgctcaccaccgctcgtctccacatggccggatagccaccgtgctgaccaccacggccagacccacgccgctggcctggagcatgtcgcgggagatggactccttgccttcacctggcgcggactgctcctcggtctgcagtcgcgtggcgtggagaggagctgggcatgtgctggagattagagagaggagaaagacgacggaagggttggaggctaggggaagccgagcgttgctgcttcaccagtgcgacagctcggtggtggaaggagctggagcagggagaggggcgccacggaggtgggctggaggacgaacgcacggagcatgtgggatatttcaacgacgcagaaaaatcccagcgactgtccgtagaaaaagatcggccagaaacaaaaaatcgcgagagtggtga

SEQ ID NO: 42319 - DNA, 282 bp, Zea mays
  Peptide Sequence Number=SeqID_85694
atgaaccggtatgtgcccacgatggtcggatctaaaactaacggctctgatttaatacaacgaggggatatgcccaaactaatctctaccgtccaaggctggatcagtggtcccgaggcgttcttctacctcacgatggaggctctactcgaagagaatagtgaagcaaatcgtgggacggtgatcttaccggcagtgtgggtgcagaccgcgctggccacggcgtcatgcggcccacggcggaaggaggagcgcagtgaggaattgccggtgtgcagatga

SEQ ID NO: 42320 - DNA, 89 bp, Zea mays
  Peptide Sequence Number=SeqID_85695
ttccgccacagtctggccctgtgccgcggaccatcggcgcctctccagagagccctgccatgcagtctgttcccgtatttggcgcctag

SEQ ID NO: 42321 - DNA, 363 bp, Zea mays
  Peptide Sequence Number=SeqID_85696
atggccggttctaaggatcacaccaagatctccaccactaacatcatcaagccagccatggaggcactcccggctgatgaccaaagaccctttgaggacctcgtgatgcacgatgagaaggaggtgccagaggttcacaatgagtcaataaaaagaccaagaatgggttcgaacaaagtgagcaagggacaaccgaagtgtgccttggtctggcgcaccggactgtccggtgtgccaccggacagtgtccggtgcaccaggggactccaagctgaacacttcaccttcggaaattctcagaggcgcttctctataattcaccagactgtccggtgcaccaccggacagtgtccggtgccctag

SEQ ID NO: 42322 - DNA, 717 bp, Zea mays
  Peptide Sequence Number=SeqID_85697
atggagcacgaagacatggtcgcctttcaagggggtcaccctccttttaaaggcgactctccctacttgcgtccccagccgtcgtgggctgagtcttctccaacactctccaaggtcctccccctacggtgcgggggttgggtcccacgcgtcatgcaagctggcccagagcagaagaagccaaactgccgccgcggtgcatgcaaccgcccagcggttacgagcattcctccgctttcgcccagactagcgggcgaaagggcggacagccatgcaggcggcatgcaaccgcgccaagtgggcgcgcccctccgacttccaacgcacccagcatgggggcccacgcccacgcgtcatgcaaccggctcgccggtcgctacgtgcaagcaactgcaccgccactcgcaccactgccacgcctcctcgactgcggaaccagggctgggaaagggggataccccgaaaaggatccttctccgtgaaggaaccaggctccgagcctccctactgatcagaggttcgaaggctggcccctcgggggggttcaacagccgcctcagagcgcgtgggttctgcacccactaccggtcagaggttcgaaggccggcccctcgaaagggttcaacggccgcctcaggccactcgggctccgcgcccactactgatcaggggttcgtaggctggccctcgaagggttcacagccgcctcagacatag

SEQ ID NO: 42323 - DNA, 874 bp, Zea mays
  Peptide Sequence Number=SeqID_85698
ggaaaatcccttaaacaaacaacagcagctactacgtcgagaaatcctcgaggctctcggcctcaactccgtcctacactgccgaaatcctcgaggctctcggcctcaactccgtcctacactgccatgggaacctcactggtggttcagtgaagctctcgaggccctcggcctcaactccgtcctacactgccatgggaacctcactggtggttcagtgaagctttgtggccggtatcagaggcccgtatttataaggccaaagcctaggaatccacggcggctcacccagatttgcccggtcatcacggagaaggtctccgcctcgcccgaccccaggcctcggcctcgggaggagtcacatcctcgcccgacctcggcctcggcctcaggagaagtctccgcctcacctgacctcagcctcggaccgactacactacagaggatacatcattactgtcggcgtttcgagaccggggggtcggatgcgcttgcagtagggggttacaagcgtccacgcgggagagggagcgagcggcttcaagcgagcgcctgtctcgtcctcgtccccgcgcggccaaccccctctaagagggccctggtccttccttttataggcgtaaggagaggatccagctggtgtgatgtcgtggccgtcggaggagtgccggagcctggcggagggacaactgtcggagctattgagtccttgctgacgtcctcttgcttccgtaagggggccgagagccgccgtcgtcacagagtcgagtccgagcccctgggtcgggcgaggcggataccgacggctgaggccagggcggagtccgagccccgggggtcgggcgaagcggagttcgtcgtcttctggggctaa

SEQ ID NO: 42324 - DNA, 564 bp, Zea mays
  Peptide Sequence Number=SeqID_85699
atgcaggctggtatgaaccattgcactctcctttcatccgctctagatctgggaacgagcaatccccatgctctggatccccacactctggatctgggaacaagcaatctccgtggtcaacatcctacaatccccacgctctggatctgggaacgagcaatctctgcacatttgtgctggttcgtcctccatccgcacgcccccaatatcctacatcagcgcacgtatctttcaccgatatctgccccattccatctaacatggaaacccaaatccccaccacaatcagcgttcatcgtcgattcctacatccgcgccattccatcgaacatggaaacctcaatgcccacctcaatcagcgttcatcgtcgagtcccaccttccagtgcacactcggttccctcgacgctctcaacttctattaaaacacacgaccactgcgagggatgtagacaaatcccccatcaaacttcaacactcgttgtctgttcaacacccattacgatcgcagtgggcttcaacgccttcgccgtttttatgttgtcagtttggctggtctcgtaa

SEQ ID NO: 42325 - DNA, 285 bp, Zea mays
  Peptide Sequence Number=SeqID_85700
atggggctcggtgtatgcggctcgctctgccaagtttgggttcgccccttggggaggaagtgtttgaaaactgatatatcagccgtgctcgcggttatgagcggccaagggagctccagcgatttagtggtacttgatcagagacattatggtacaggtggttatgagatcgatggttttggttatgactatggtgctggttgtcagcattgcaaccactgcttaggagaagatgaagccgtggaaggagacttccaggagttccaagactacgacgagttctag

SEQ ID NO: 42326 - DNA, 300 bp, Zea mays
  Peptide Sequence Number=SeqID_85701
atggccgcccacttggactccgccggtggaccttgtgcaagcttcaatggcgtggtccagggtgccgtcgcgatctcccgggagctccctcggatgagattaggtctcctattcctaaaggtcactttaggcacaggatttcaaagtgtgaaatccacatttgcctttagaaggaaaaggttttgtcctacagtcaacattcctctgataccacttctatcacacccgggtttcggggcaccaagacccgggcgcaaacataatcaccaggtgtgctgggaccaagtctcacacatatga

SEQ ID NO: 42327 - DNA, 45 bp, Zea mays
  Peptide Sequence Number=SeqID_85702
atggtgctggggcttcgggaattcgggcatgggagcgacgacaag

SEQ ID NO: 42328 - DNA, 456 bp, Zea mays
  Peptide Sequence Number=SeqID_85703
atgcaggtggcttgcaaccgcaccacgagggcgcaccccctcggcttcgacgcatccagcatggaggcccaggcccacacgtcatgtaaccggcgcgccggtttttacgtacaagcaaccgcatcaccacttgcgccaatgccgcgcctcctcgactgcggaaccggtgccgcgactcgaggcaaccctgcgcatggcccaatagtgccaatcgagcacatcgatcacggggaccgggaaaggggatatttcgaaagggatccttctccgcgaaggaagcgggccccaagccctcctactgatcaggggttcaaaggctggctcctcagaagggttcgacagccgccccagagcactcgggcttcaggctcattactgatcagagattcgaaggctggcccctcggaagggttcgacaaccgcctcagagcactcgggctccgcgcccactactga

SEQ ID NO: 42329 - DNA, 348 bp, Zea mays
  Peptide Sequence Number=SeqID_85704
atgaagttacaaaagccgttcctaagggagcgcagccgaaaagtcaacgctgattccgccgaaataaaaggcgaagaagctcctaagggagccttacagcgaaaaactattcgagcttcaacagcatcaatggagcttcttccttttattctgcagcttcagcttcggcttggtcaacctgtatgtaagtactataagctaaattcaaaattcaaaggaaaagccagatttcaggaacgcatcagcggtgccccgagaagctaccagggcacaaaagtcgccgtgtccagcaataacatcatcgaggtcatcaatctcaccttcgatgtgttcgaaggctcctggtag

SEQ ID NO: 42330 - DNA, 484 bp, Zea mays
  Peptide Sequence Number=SeqID_85705
gacggacgacaccactgaagcggcagctatgaagacgctaacgactttctgtggctaccatcccttggagatggccctgcagagcgacgctatggcacatcttgccaacctcgctcaaaccaccaagctcacccttgacagccgagaagacttcgtggtcgacttgtcctcagagttggtggagaaagacctacagcaggagcttgaggaagccaatgaccacctggacatgcaccacctggagatggaggccaatgagggtggaagcaagggagaagaggatcccgaggagttaggaccagcccctggtgccaatgtgactacctctgtgatgcccccttcacctatggtagctaggcagcattgcgggcaaaacgagcaagttcccccgccacctcccccagctcccacggtgcaggagctgatggctcagcagaaagaaattctgcggcagctcttgcagcgccagccccaccctcaatag

SEQ ID NO: 42331 - DNA, 315 bp, Zea mays
  Peptide Sequence Number=SeqID_85706
atggtggtcctcatctcaattgctgccacctcattcgccatcctgcttcttttatctctcccctcatgcctccacctctgcgccaccctgttctcggccttcaccatgttcttcctccccaacctactgcccctgcccatggtcgtagccgcgagccgaccaacgctcgtaaacgcgggtacggggcgagtcggtcttgctcctggcctttccccgtgtgtgccgccgagaaggacacagtggcacctgccacgcttaggttatcttggcgatgaggagtccggctctgagataatggacatccaaggcccgtag

SEQ ID NO: 42332 - DNA, 210 bp, Zea mays
  Peptide Sequence Number=SeqID_85707
atggcctacttcccagattcctgcccccgctcttgcagcccgtcctcacctgaccgaatcccctcatgcacctgtgtcgctgacgcatgggaccccctaccagttcgttcgtccccaattgaacgtgagcttcggggacaaaatctcctcaccgagatccttgcccctcgtttatcgggctcacgcgccactgatgcggatttcgggtga

SEQ ID NO: 42333 - DNA, 402 bp, Zea mays
  Peptide Sequence Number=SeqID_85708
atgagaacgatccggttgaagagcccgaggaactcgcaggagaagcccctgagcagcagtcggttggtggaggcaagtggcaatgagactgatggttttggttatgtctatggtgctggtaagtggtattctttccgtttggaaagggtcatggaattaccactagacgcgcagagcagcggaagatgtctcgatgtagacgaacgcgtcgagcagtgccgtgcagtcgccggcgtccttcacgtcctcgcacggttcgtccaagtgctccagatgcagcacctccgaggtatccacacgtacagggaggaagcgccgcgtaccgaactgctaggttcgcgacggcggcttggcgagggcgagaggtgggcagcggctgttagttcgcaggtggcgaattag

SEQ ID NO: 42334 - DNA, 945 bp, Zea mays
  Peptide Sequence Number=SeqID_85709
atggctacggaacgggtgggcgtcgacaccaggctgacgcagcaagcatcaaggaaaccacgccgacatggtgcacgtcgggatgaaactccaacacgtcgggcaccgacaagctgtaacccagctacaactgaactgaacaggaaggacaagtctccaccaccatctccaaaactgaagagtcacttccgtccaggttatgtgaaccgccggcgccgcaacacaacctcgacaggcactgtggagaacgaagactcgtcgggtgcactctccgctcccttagaggttgctgctacacatggcctaatagacgtgtcacgggttttccgccgcatcctggaatccttgctgccagtgcaaggagggtccagttctcccctagtgcttggcgcagaggatgcgctgcagcaggtaccggacagttgggggctatcctcacccactactgtagagggggtggcagcagccacatcgacagcgaccgacgactccgttctcaagaccatcttcgtcccgccgtctgcagcggtacttgaagcggtggagccgaccgctacgccggctgttcgaaacaaccgtccacgcagcttcaacgtctccgcggtatgccgaagtgcaagaatctctgctactaagccaatgccctctatgatacgcgcacaacaaaatttatgccacaagcttggacttctaaaaactgatgatcggtcagctttcgacgttgctttgcagaaattctccactcttttcaaggggccactaccaaaggaggtggctgctgctttagagtccctcttcaacttggatattgttgatgcagagctcgtggatgaggcattgatggaagtcgctggggacggcattgcagaaatccaagagagtgcggcggagttgcaggaagaggtcaggcgcaatgcctgctcaagcctgctggtggctgcttga

SEQ ID NO: 42335 - DNA, 300 bp, Zea mays
  Peptide Sequence Number=SeqID_85710
atgagacaaaagggaagtgcatataacaatttacgtactaacaacagtttcctccctgattctgcacgagctcaagcggctgctgtttggaacctcgacagcttcacggcagccttcctctccttcctagtccgggaaggtggtggtgccggaaggcctctacgcaaacagaaagtgaagacaaatgtgtgtgtcagaaggaagaagtgggttttgagcatcaggctgcaatcatgcctgatgttcctccgccagaacaggcaaggatttttctctctttcctttgatatctgtggatga

SEQ ID NO: 42336 - DNA, 528 bp, Zea mays
  Peptide Sequence Number=SeqID_85711
atgatgattgagcaaaggtacgtgaagcaaattgagcttggaagaggacatagtacaaatttatatggactaagtaaaaagggactttatgaagtcaagacaaaaggagcaaaagagaacaagaaagaaaaaggagaaagtgtgctggactgcatagcaccggacagtccgtggaccgtctgtgcggagcgccagacagtccggtgtgctagccgccaacggctagctgccacgtcggccgagggccaatggtcaagtggagcaccagacagtctggtgccccttagaacaggaaaccagtcaatcatgctattctctgtccacgccctgttcactgtcaggtgtgtaccagacagtccggtgcacccacggacagaaggcaatgagggccttccaaatagagcttcaatggctcctaggtcccttaggactataaaagggacccctgggcgtatggagctccacaccaagcacccaatgaacatcctacaatgccgagacttcgcaatcacaccattgtttcattga

SEQ ID NO: 42337 - DNA, 471 bp, Zea mays
  Peptide Sequence Number=SeqID_85712
atgtactgcttagggtttagggtatacggatccgatctcgtggagttcggtgtttgtctctgttgcatcacaatctcctctcctacgaagatggattcagcagactccatagccgacaaggcaattggacggatgcaagagatttcggacaagatattttccgtagcgagggaaacaatccgtcctggacgcgggttgacctcatttgatgctaccaaacttcgtgtagctttggaggagatagcttgcatgctggagcaagactctctggtgttgcaagagcatttggacatcgtgaacaacgtaaacatcccggttgacagcagctatgaaccttctaccttgtcgtcaccacccccatctgacgacgaccttactccacattgggactttgcggggcatttccaaaacttctggggtgttgaatatgactccgatcagatgccttcatttagtgacaatgatgtttaa

SEQ ID NO: 42338 - DNA, 1491 bp, Zea mays
  Peptide Sequence Number=SeqID_85713
atggagaagatctccgtcggcgtccgcttccgccatcccaacctggtggccgctaacatctctccagacagttccggcggaggcatcgaccacgagtggcgtattgatgactcccacatttccctcctccaccgcgccgctggccccgtccttggtgcctccttcgccttcgaccacgtcttcgacggtgcggcgaccaacgagcggatctatggcacggtcgtccgggaactcgttggcgccatcggcggtggattcagcggcaccgccttcacctacggccagaccagctgcgggaagacattcacaatgaacgactccgatgccgacccgggcatcattcgccgtgcggtccgcgacgtcttcgacaccgtgcgccaggatggtggtggccttgcgtttcctcgttatggggtttgtggtgccaaatcggatggaaagcatagtgcgacctgtgattttgaggagtccggattgagtgcctgtggttatctgggcgctgaagacatcatcagctttggtggttcttgtgaaaggttggaccttagggacctcaatggtgggatcttctgcgatcttgctggagaggttggttctcttagttgctgccacaacgatggcgggtgtgccagattcatcaagaagacaaagagtgatggatggcctgctggtcttgaaaggcctagctccgctgcaaaccagatagagaacttcgttgatgactcaactataggtgaaagcaaccatggaagcgaggtggggttcacatatacggtaaatggtaatctgtctcattctgtagtaacaaatgactcagactcagatgaagttaatgggatggtcaatggctgcaacggtatgggaaaagaaatagatgaagttagtgctgctattggacaggactggaccaggaaaaacatggataagtgcactattgcgtacacagagaaggaactaaggattggtattgagcgtggagtgaaacccaaaatcagatggttatcaagaggcccgctaggtgaagcagctgtctcaaatggctttcttgtcacaaagatacagatgaagaagtgtaaactcactggagaaataacagtgtttgaggaattctcaatcaccataccgccaaaatctgctttgctatttccgtgccagcgggcaatcagcattgatgctttaggttgtcaggtacaacatttgattgtgttggatggcacttgggcaaaagcacagaagatgtaccatgagaatccatggctgcaacttctgccacacgtgaagctggagtcggatagggttagcttgtatagtgaggtgaggcatgagccgaaggctgggtgcttgtctaccattgagagtatagttgttgccatgaggaaactgggagaggattcaaagggactggatgatctcttggatgtttttgagtcgatgattgctgatcagcgacgatgcaaggatgagaatgtgaagcaaaagctcaagtcctaa

SEQ ID NO: 42339 - DNA, 1029 bp, Zea mays
  Peptide Sequence Number=SeqID_85714
atgatgctcttgctggacgaggagctggtcagcctcagtgccctcatgcgcgtccgcggccttgggcttggccgcttgggggcttgcagtgagactgtgggagtcgacgcggtggagcgtgcagccgccaaagccgatggagaggcgctccaggccaggaagtctcccgagaagctgtggctgtcgcagccgactgagcgcgacctcgccaccttccgtccgaacgacggcgatgacaacgagccctcggcccctcgctgcggcgggagggtgtgcgagaacagaaatacgtggtccctgatcgccggtcatttgcctggccgaactgacaacgagatcaagaaccactggaactcgcacctgcgcaggcgcgggcgggcgggcgactcccgcgacgacggcgtcgtcgtcaacatcgacctcgtcaagctgcccggcggccgccgggccagcagccgaggcatcgtggccgcggccaagccagctggaaagaacaaggagaagaggaagaacggcaagggcaggaacaacgtagcagaagcggagcagcagctcgaggaggaggacgccaacgtgtcaacaactacgccgaggactcagtctcactgcgcctccgctgcccagagcgaggagcaagcgcaggccagcgctagcggcctgacctccgaggaggacctgctggccctgagcgaggagatggtggtgagtgcgctactggccccgggaagcccgaagctgctggaggtgggccccgacggctcgtgcgtggacggtgacggtggcctgtctggggacagcggccgtgggtcaggcgggccttctggcgatgtggcccaggagctgcacctcgacgacgacgccatcatggactgggactccatggggctggacatcccgaccgccgatgacacgtggaaccccctggtgtgggactacgaccagacgtcgttggtcccggaaccggaaggagaggggcgccggcagcgggacgagatgatgtcagacctcttcttcctcgacaatctctag

SEQ ID NO: 42340 - DNA, 198 bp, Zea mays
  Peptide Sequence Number=SeqID_85715
atggcgggcggtgggagggggaggacttggacgttgctcttggggcgagcgcggctgtggctgtggctgcggcggcacctttgctgcggcgcggaggcaaacgcgcaacggcgaacgggggccggggaacagacgatgcgcatggaagcgcgcctggtggcggccgcggaaggtgacgacggcgtaggtccaagctag

SEQ ID NO: 42341 - DNA, 411 bp, Zea mays
  Peptide Sequence Number=SeqID_85716
atgggcaagaacaacaagcgcaagcgtgagccgactcctccatcagaggacttcggtgattcggagtactcagaggaggagttctcctctgagtccgaggggtctccggctcccatccctctgcgtgagtcgtctgacgattcagacgactcccaggggcttgcggcggaggtctggacttacatccgggccgtcgagcgctccgggctcgagggctcggatgagtcggagtactcctcggacgaggaggactcgtccgagggtggtggcggcgatggcgacgacgacgacgacggaggcggtggcggcaatgacggtgacgacggcgatgacagtgacggcggcggcaggggcggcagcaaggatggcgacggcggcagcagcagaggcagcaacagggccagtggctag

SEQ ID NO: 42342 - DNA, 1629 bp, Zea mays
  Peptide Sequence Number=SeqID_85717
atggcgcctctgcggcggcggcggcggcctccgcatcgtcgccctccgcgtcgccccgggtggtgcacttctttgtgcgcgctaccgattccagaaccatcgcgatgcacgcggggtgggacgacaccgtcggcgccgtgctcgaccacctcggcgcctgtgggtacgggcgcgattttgcggctcctctacgcgggacggcagctcgcgctggattccaccctcgctgagctccgcctcccgccggactccacacttcaccttttggcgcgtctcaggtccactcagcaccctcacgcgtggcagctcgcatcgcacatcgccagcactgccgccatcgcggagtccgagccctctaggatgccctccgccgccttctccctcgacgaactagtgaaggagtttatcctccgcgcccaccgcgccaacctgaggctttcccgctacgatcgcgccgctacagtcgaggaccgggccgcggcggaccacaccgccgagtacctcgaaatcttcctccaggccggcgccgccttagcgctggttcgcctctacctctcaaagtcccccttccgttcttacgccgagagtgccattaaatgctttgtccccacggacccttcgtccttacctatggacttactgatcgtgctgcttgaattctgccgcttgctctccttggctgcaggcaggaatgaattactgtatagatcatgtcgtcgtacacttgcctcagctttatccactcgccccaagctacccccttctatgaactcaccaaccaggttgatcgagcaagtcctgccatttgcccgtgaaacagtggatatggtccttgatgggcttgcatcaatgccaatgattatatcgcctagtgatctagatgagttctcaaactttctcaaagtgatgtgccagcaggcacgccgttggatttctgatgaggggccgatacccagtattttttacagcagggagtctcagcatggtgacacatggatatggaggtttcacatcatgtcgatgtacatgttgaaaaggttggatgagtgcttgaagacattggagatggacctgccattgtcatcagagagtatcggggtcatggaaagtcaaaccatatgggctgctcgatcacacatcctggtcatgttgactgaacttgatttcatcgcagcgatttatgaggatgtggggcacaacctacagcttgtgttgctggcacacaaagcaccactcaatgctcttgtccgttgttccaagagaaatgagcgtctacattggctcgtgaagcataagaatcttctctgctttgaggcaagaaggagtttagtcttcatgatgctgcctgaagggaaggatgactttggggagctgcatgagatgttaatcgatcgatcacatttacttgatgaatcctttaattacatcgcacaggcagaacaagctgaacttcacggtgcgctgtttatggagtttaagaacgaggaagctacaggtcctggtgtcctgagggaatggttttgtttagtgtgccaagctcttttcagtccgaagcaagttcttttctcaccttgtcctgaggataaacgaaggttctacttgaacgaaagtaagtttcccgggtactag

SEQ ID NO: 42343 - DNA, 501 bp, Zea mays
  Peptide Sequence Number=SeqID_85718
atggcgaggtgtatggggtctgatcaactccgtggcaaatgggtaacacgacttgtgggtaaagatacgcaacctctgcagagtgtaaaactgccttacacatcacatgaactcccacctttgatggtcaataccaggaagggtggtggaattgatctacctcccaatcgacacactcggaggatatttggacaaccccagccacaaccagcagagatggaccctccaccaccgcctccaccagtcggagttgacccaacagttatagctcagatgaggatgatgcaacagatgacagataccatggcagatatgcacgcgcagatgcggaaggaacaccaggagacgtgccaagagagagagaggatatacaccaggaaatgcgctaggagagagaggagatacgccaggagagaagggcgcagctgcaacagcagcaagcaccactgcatcctccaccaccaccagttccacccggggacaagcaccgggaatttataa

SEQ ID NO: 42344 - DNA, 129 bp, Zea mays
  Peptide Sequence Number=SeqID_85719
atggcgtctgctacaacacaatggcaccataggggacttgggtataggaacgcgctactcgtcgggcacaaagtcaggatcctctgcaacaaatcatcaacgggtgagcacaaaggtgctaaaggttga

SEQ ID NO: 42345 - DNA, 663 bp, Zea mays
  Peptide Sequence Number=SeqID_85720
atggagttgttcaagcccaactgcgttgcagagttcaccgcgcaggtggccgtgtggggggggggaggagcatctgccgtggatccactgcacctgaagtacttcacttttgcggggcgaataattggattagccttgatgcataaagtgcaagttggagttgttctagaccgtactctgttcttgcatcttgctgggagaagtattacattagaagatatttctgttgcagatcctgtcaaatatgcaagctgtaaaaagattctagagatggatgctgctgaaattgataatctatacctgacattttctcgaggagctcatgagttaggtactgaaaagattattgatctttgcccaggaggagaggatgtcagtgtgaatatcgggaacagaaagcattacattgatcttcttattaagaatatctttgtggactctatttcatctcagctaacccattttgcggaaggatttgctgacatactagttaatccaaaacgccgggaagaactttttgagtgtttagacctcgaagactttgatcgactgttagggggaagcaacaatgcaataaatctgcaagattggaaatcacatactcaatataatggctacaaagaaaaggatcgtcagattaccttgttctggaagatcgattag

SEQ ID NO: 42346 - DNA, 297 bp, Zea mays
  Peptide Sequence Number=SeqID_85721
atgggtgtgggcaagggacggcttgtgaccgcggttagaagtgagcggttgcctttcccttctataaataacccctttgcttctctggtttcttcgcatctcttcgctgctccttactgcctcttccctttcttctctcccaaagcttcaaccatgggcaagaacaacaagcgcaagcgtgaaccgactccctccatcggaggagttttggttgactcggaatactcggaggaggagttcttcctccgagccccgaaggggtcctccggctcccgtctctcccccggcgtcgtctga

SEQ ID NO: 42347 - DNA, 1116 bp, Zea mays
  Peptide Sequence Number=SeqID_85722
atggtgcaggcggaggcgactaggcagcacatagcgtggaagaggtcaagaaaagaggaggctcaggatgaggaccctattcctcctgccccggaagatggtcagcagcttccattggttttcttcggtctgggccagccaatgcccccggctgggcttgacctaaatttcccaccggggcctatgggtggtgatttgccagctcctcaggatgacaacacccatggggattgggaccagtggatcgaaaacgtacaacccaatcaacatattccgcagcccttcccgcctgatttgcaacccgttcaaccggatgagcttcaactcagtaatcagcactcaggcttgtcgtcggatagttcctttggcgctggtcaagttgcacctcttcagaatggccatgttgttgaggagggacctgttttgctaggggatgggcttgctgttaatattgctgcattcaatggacctcaggaggttgatggaccgacgcttcaagtggaccatgttcctggtattgctgatttgccgcttcaggcccatgttggggatccaaacaataaccatttccagaatttagagatgaatttcatgatcaatcaggaatggcaacctggccccgtgtttcagatgttcgaggagaggaaaagggccgaccagttctccaggctttggaccagttggtcgaagtcctttctgttatcaacgattccctcagctctgctgaagccgggaatgaaatctttaccttttgccatccctaaggaatgtccaaatgtcaaacttctggatgatgtcctttctgagagctccaaagattcagacagttgtgatgccccgacacctatcattgtggagtcagaactcagaaggagtaagcgcttgaaggaatcacgtgctgggttcatgcatggggcctgcccaaaaaggaattgtctcatgtgccaacataactttgatggcccacccctgctgtcctccaaggtgatgcggaatctggggagcaggttctgcaacctgtcagatgatgacttatctgagaaaaagattgaagaagaagaaattagctgtgggagctgttggccagcagaggacgggcagaaaggattcggatga

SEQ ID NO: 42348 - DNA, 1686 bp, Zea mays
  Peptide Sequence Number=SeqID_85723
atggggcgcgcgttcgtgtacgtgatcctgggcggcggcgtggccgcgggctacgccgcgctcgagttcgcccgccgcggtgggtactcccgcggagagctctgcatcatctccgaagaggccgttgctccttatgaacgtcctgcactaagcaaaggctatttactcccagaaggtgctgctcgtcttccaggatttcatacttgtgttggtgctaatgatgagttactgacaccgaaatggtacaaagaacaaggcattgaacttgttcttggaacaaaagtgatttctgctgatgtgaggcgcaagacattgcttacaggcactggtgaaactatcagctacaaaactctaattattgcgacaggtgctcgggctttgaagctgcaagaatttggaatacaaggttcagatgcttcaaacatatgttatttgcgcaacatcgatgacgcggataagttggtgagtgtgatgaaatcatgtcctggtggaaatgctgttgtcattggtggtggctacattggaatggagtgtgcagcggcattggttactaacaagattagggtcaccatggtcttccctgagaaacactgcatgggtcgtctatttacaccaaaaattgcagaattttatgaaaactactacacctcgaaaggggtcacctttgttaaaggaactgtgcttacatcctttgaaaaagatacgacggggaaggtgactgcagtaatactcaaagatggtaggcaccttcctgctgatatggtagtagttggtattggcatccgtgcaaacactagcctttttgaaggtcaactgatgatgtcaacagagaatggtgggataaaggtaaatggacagctgcagacaagcgacagctctgtgtatgccgttggcgatgtggccgcgttccccatcaagctttttgacgatgatatccgacggctcgagcatgtggactcagctcgtagaactggtagacatgctgttgcctccatcttggatccttcaaagacgagggacatcgattacctgccgttcttctactccagagtgttcacgttgtcctggcaattctatggggataatgtcggggaagtggtccactttggagacttcacaagcagcagtccgaggttcggtgcatattgggtcaacaaagggcggatcgcgggtgcgtttcttgaaggcggaagtcgggaagagtacgaggccatatcgatcgctgttcggcgggaagctgtggtcacagacatgggtgaactcgagaaacaaggcctggcactcgccattcaggagagccagaaggaggtgcctgacagtgggcttgctgttgtcggaaaacctacttatgcgtggcatgccacagccggtgtcattgcagctgtgtcgattgctgcaattgggtattggtatggcaggaagcgccgcaggtgcccgatccgctggtccatagaatggcatcgaactgtggcagcaaagaagcgaagaaggatgaagattattgtcttcgccaagaagaatacccacatttcccttgtcggcgacggaaagaacggcaggcacccaccgatcgggtcccgcagaaggtggaatacgagggaaggcattgtttcctgtccacctctctcgtccttggaagccaagaaccgcgccgggcgcgggccagtctcctacttaaaggagtag

SEQ ID NO: 42349 - DNA, 375 bp, Zea mays
  Peptide Sequence Number=SeqID_85724
atgcaggcggcatgcaaccgcgccaagtggacgcgcttctccgactcccgacacgccagcatggaggcccaggcccacgcgtcacggaccgggaaagggggaaaccccgaaaaggatccttccccgcgaaggaaccaggctccgagccaacttactgatcagaggttcgaaggctggccccccgaggggtttcaacagccgcctcagatcgcgtgggccctacacccactactggtcagaggttcgaaggccggccccccgaagggttccacgaccgcctcaggctactcgggctccgtgcccattactgatcaggggttcgaaggctggcccccgaagggttcacagtcgcctcagacgccgagcaagggatga

SEQ ID NO: 42350 - DNA, 716 bp, Zea mays
  Peptide Sequence Number=SeqID_85725
atggcgccccgcatgctctgtgacgacggcgactctcagttctcttacggaagcaggaggaccactctgctacacctccattgtacacctggatcctctccttacgcctataaaaggaaggaccagggccctcttagagagggttggccgcgcggggacgaggacgggacaggcgctctcttggggccgctcgcttccctctcccgcgtggacgcttgtaaccccctactgcaagcgcacccgacctgggcgcgggacgaacacgaaggccgcgggattcccacctctctcacgccggtctccggccgcctcgctcctttccccccttcgcgctcgctccacgcgctcgacccatctgggctggggcacgcggcgacactcactcgtcggcccgagggaccccccggtctcgaaacgccgacaatattgctggtggaaacctcagagctatcttttgaaccggccattgagggccgatttgataggtctatatgtgttgtccctagcggagtcgccaaaaagtatgttgacacctttttggaggcgccaatcacttcaaaagaaccagcggcggtgctttctggtcaggcgcggacggtccgcggcacagggctggacggtccgcgacctggcgtgaggcggcagtgctctctggtcaggcgcggacggtccgcggcacagggccggacggtctgcgacctggtgcaggagcccgg

SEQ ID NO: 42351 - DNA, 912 bp, Zea mays
  Peptide Sequence Number=SeqID_85726
atggagctggagccgggcacgaccatgcacgtgtgggcgcccaagcaccacgtgggcaagaagggcaccaccatcagcccgctcgagcctaccgccgccaagaagaagaagaagaataggaagagccccgagtcgaggcccaacgtggtgctcatccacggcttcgccgccgagggcaacgtgacgtggcagttcaacttcggcgtgctggtgtcgcgctacaacctgtacatcccggacctgatgttcttcggcaagtcgtcgacgtcgagcgcggaccggtccccggacttccaggccgagtgcgtggccggggcgctggcgcggctgggcgtggcgcggtgcgacgtggtcgggttcagctacgggggcatggtggcgttcaagctggccgaggcgcggccggggctggtgcggtcgctgtgcgtgtccgggtccgtggtggccatgacggacgcggtgaacagggagaccatggagcggctgggggccgggtcgtccgccgagctgctcatgcccgacacgctcaaggggctcaaggcgctcctctccgtctccatgtacaggaagatgtggttccccgacaggttctacaaggactacctcaaggtgatgttcaccaacaggaaggagaggatggagctgttgcaggggctgataaccagcaacacggacgccaagatccctgtattccaacagaaaataatgctgctgtggggcgaggaggacaagatcttcgacatcgagctcgccaggaagatgaaagagcagctgggcgacaactgcttcctgtacggcatccgcaaggccggccacctgctccacgtcgagcggccgtgcgcctacaaccgccagctccagaggtggttcgcctacgtcaactccacagaagaccacgtccaggccagatga

SEQ ID NO: 42352 - DNA, 570 bp, Zea mays
  Peptide Sequence Number=SeqID_85727
atgaggatggttatgattatgcttatggtaatggttgtcagcattgcaaccactgctcaggagaagatgaagctgtggaaggagacttccaggagttccaagactacgacgagttctaggtgtgggttagcggcaacccccagtcggctgcctgtgaaggccgcggttatctacgtttcgttttcgcactttgatttattgaagacccgggcatcctctcctgcacgcctgcggttgagctctgcccggaggtcgtcggtcggcgcgcccctcacagagggtgagcgcacagacgccgtcgcctcgtgttggtgccgggatgaccgaggcctggacctggtcgaggtagaatgtgccatgctgagcagccggtcgacgtcatcacgccattgcttcatggccctcggtgaggccgtggagcttgaagggtggcgtagcaactctctggccacggacaacgccccgagcgctgcccttgatggagtccgcgacgcctgtgcaggcgtgtgctgccgcgcagcgtgcacaacagctagggatgaaaacggttggaatgcttggatgtcttga

SEQ ID NO: 42353 - DNA, 741 bp, Zea mays
  Peptide Sequence Number=SeqID_85728
gggttacaagctagcgaagagaaggaggaagagttcccaggtaccttatgcatggatggacccaaagactacaagactggagtcctaaaagactgcacggcccagaggccttatgtcaggctccgcccgctggcttacgtcacaggcagtaggccgcgtggcagcatcgggtctccgcctaagcggggagcaggagcttacgcggcatggtccggacacgtgttggttccggacccccgccaggccttgatcaaggcctgggtatcctttgcgccacaaccctgggaccttgctgcgagtggcccagaccctgcccaggggggtccgggggctcgtcctaggggtccgagcacgcttgtggttatctcgactttcttccgaccacgtggtggtcctggggccgaccacatggaggggtcggacgctgtttacgacgcgactatagatagccgcgtaggcaccgtgccttcacactgtagcaaggggccgacgcccaagaagtatgactcgtgggcccagacccccgtgtcagaggctaggccaccctggcgcgcgtcgggcgagatttttagcggcgtctcggggcgtcagtgggggaatccttctttaaaaagggactccctcgagcgtggtagccatcctcatcactcgcagcgccctttcgctcttgagttctccgggctcttctgccgccgtgcttccaactctttggcttggatggtcttgttgtcacccccgtag

SEQ ID NO: 42354 - DNA, 429 bp, Zea mays
  Peptide Sequence Number=SeqID_85729
atggagaaaagaattggaaaaagacttggctcggtgcagccaaaactcagctcagtctggcacaccggactgttcggtggtgcaccggatagtgcccggtgcgccacgctggtctccggtgaaaaggccgctctcgggaaaagatcagcggcgtacggctataattcaccggactgtccggtggtgcaccggactgtccgtgtgatcctcttgcaagttacaactgatattcagctgtcaagcacgaccaggcaaccgccgaccacgcccaatcgggagctctatcttgtcgtcaaagtacattgtggcgaggaggtggctatcaagttgctgtttaacccatattcagaaaagatctatgattacttgggaggcattgaagatattaagaaatccaagttttctccctttaataggttcgtactgtaa

SEQ ID NO: 42355 - DNA, 864 bp, Zea mays
  Peptide Sequence Number=SeqID_85730
atgtggccggaccgtccgacattatattcggactgtctggcgccatacgcagacggtccagatgggctatctagggtttgcacggcatgtggtggcttgggtgcaggtctcggtaattggcttctaaaaatgggatcagccgccgctgacccggacggtccgcacctacgtgcggacggtccggacatgtgcagatcggcaaatttatcgccgatgtgtgtggggaggctgtcgttgcctaggagctatcctttgaacccggccattgagggccgatttgatgcgtctatattcgctttccccagcggagtcgccaaaaagtatgttgacgcctttttggagcgccaaacactcaacaagaaccgtggtggtgccctctgcataggggcggacggtctgcgcgcaggggccgaacggtccgtggcctggtgcgaggcgcggcggtgctctctacacaggggcggacgatgcaaaggcatcgacaactatgaattgaagcccaagggaaataccttcaggcagttttgcagcaggcccaagaggcacttggagaacataatttgggccctacaaacctcagatgcaaaaataaaaatgtcaaagttagtttcacgagtatcaaatgaattctttagtaatgtgattacagatgtaaaaggaagttcaagtgtgcataaattagagcccaaacaaatcgagtttgttgaaagttcaacaaatagttatttgtctgttgttgaaggattcaaggagcacagactacataaccatggagtactaaaaccatatgatgagacagaacagcagtattcggaaaatggaactgaaaagaaatcacaagtgaacacaggatggaggaactga

SEQ ID NO: 42356 - DNA, 84 bp, Zea mays
  Peptide Sequence Number=SeqID_85731
atggctgctgcgatgaacaacaatgaagttacggattggtattctagggacttaggaatcgatcctaggcaccatataatctaa

SEQ ID NO: 42357 - DNA, 93 bp, Zea mays
  Peptide Sequence Number=SeqID_85732
atgacgaaggtgatgcttgccgaaggtgttcaaagctcaagaaatggaagaaagcaggggtacaatcgtgatgccaatgccaagtcagcgtga

SEQ ID NO: 42358 - DNA, 399 bp, Zea mays
  Peptide Sequence Number=SeqID_85733
atgtcaatgctagtagattgctatagtagtactgattgcctctctggcgagctcggtggtttggaggaagtgcgggtgcgtgggcgggaccctggaggagccgaggtttcccacctcgcgggggctgctcctcggaggacccaagatcgatccagcttccgcctccgcctccgcctcgagctctcgcagccgccgccgctggtcgccatccgcgacggggatagcgccgcggggacgggctcccccgccaccgcagaggccaagcgaggccggccggggcggatgcaggcgccaacagcaaaaaaagacacggcgctggctgtgtctgaacccgagagcgggatgcagatgaggtccgaactccgccccaaccgccgcctccatggacatggacagtga

SEQ ID NO: 42359 - DNA, 291 bp, Zea mays
  Peptide Sequence Number=SeqID_85734
atggataagaaagacatcaaaaaaggccttacacatctatcagcgatcaagtgccctctgcttatgtttattcccagcgacgagctggaacagcattatcagagggaaaacctgatgaagatagagcacttggtggcatcacgatttcctttgatctgggaggtagactcaatgtcacataaggcgctacatgtggagcattcatcaactaatgccacagatgaatcatggcatatgaaaacatcttcaaaccattggaagcgatttagaagagatgaagtgtgtgtgtga

SEQ ID NO: 42360 - DNA, 2973 bp, Zea mays
  Peptide Sequence Number=SeqID_85735
gtggtggtgagggtgcggccgacggtgagccggccggtgaacggcaaggatctgtggttcgtccgcaagaccgccccagactcagtcgctgtcggcgaccggtccttcccagtggatggcgtcctcgacgacagggcctctcaggccgatgcgtttgatctggtgggattgcccatgatcgagaatgctatggccggattcaacacctccctcgtctgctatggccagagtggcaccgggaagacatacaccatgtggggccctctcggcgccatggttgacagtggctctgaccatgctgaccgcggcgttgttcctcgggttttccagaacctgttctctcggatccaaagaatgggagagagttctcctgagaagcagacgagctaccagtgccgttgctcgttcctcgaggtacataacgagcagatcaatgatctgttggaaccatctcagcgtgacctacagataagagagaacgctagcaatggtatccatgttgagaacttgactgatgaatacgtgtcaacagcagatgatatcagtcagatcttgatgaagggactgtcaaacagaaaagttggtaccaccagtatgaacttaaaaagttcccgctctcatgtgatattcacctgcgttattgaagcatggagcaagggttcatcaaatgggtttagcagctcaagaactagcagaatcacctttgttgacctcgctggtcctgacactgatgaacttggtgcagcaaagcattccacaaaggaagaaagacatcttaagaagtctctttcaaggcttgggaaactagttaacgttctttcagaaactccagagtcacataaagttgatttaccatatgagcaatcccgtttgacacatgtgctgaaggatacactaggtggcaactccagggttatatttttgtgttcgatttcttcagagcacagatgcagatctggaactttaagtacactaagatttggtgagcgagcaaagctaatgccaaacaaacctgtgataaatgagatatcagaagatgatgttaatggtttgagcgatcagatacgtcagttaaaggatgaactcataagaacaaagtctggagacaccacaacttgcaaggctaggtacttcagtgcacaaagtgcccgtgaaagtttgcatactttgcgagtgagcctcaaccgctctcttatctttcctcacatagaagttgattcagaggaagaaatggatgttgatgaagaagatgtgcaagaactgcgtgatcaaattagcaagattcactcttcatctgaagatacattggatgactttatggatgcagaaagtggagacgaaagcactccttgttctgtgggaagaagtgaagatgatcaagtaatcatagatgattttgaaggtccacaacaggaagagcaaaaagaagtatctaacaatacaaatgctaatgaagacctcggttctgacagaaaatctaatctatcaattattgcctccacacggttatcacctattcaggatccaacattgtgctcttctccaaagatccacaacaaggcaagaatgagcatcacttcactggggctatcaccaagcaagattagaatatcagacagcccaggtgatagaaatgttgaaatgtgtacaaatagtgcatttcgttcctctctacaatcaagcaagcttagccccactgactcactggctgcaagtcttcaacgtggcttgcacattatagagtaccatcaacagaatccagccccaagaaaatcatttattggtctttcatttgaccatttcgctcgtcagtcagtagcaaaaatcagttcagctgttcaggctctaccagaggaccaaggaaacaacctttgttcattctgcaagaagccaatgaacacaaatgataatcagacagaaaacgtaaatttagacaaacagattaaggatggcaacataactaaggaaattgcttccaagagagaaactgagcttgaagctttatgcgaagaacaaagagcaaagatccaggagctgagcagtttgattgaccaatataagaacaggtcagaagaactaactagtgaaggcaaggtttctgtctcactcagtgtgaatgagagggaggtacttcttgctgaaatccagagtctgagggagcaactcaaaaaccagactactgtatcaactactggtagccttcttgaccagttaaggaacggcagcacagaccaggagtatgaacttgacaaagaaaggcagaaatggatggagtctgagagcaagtggatttcacttaccgaagagttgagggtcgatctagaatcaaacaggatgcacgcagagaagaccgagatggagctctgcaacgagaagaagtgcacagcagagctagatgacgctcttcaacgagcgatgtacggccacgccaggatggttgagcattatgttgagctgcaggagctgtataatgatcttctcgagaagcaccgccgagtgatggaggcgatctctgaggtgaagagggcggctgccagagcaggcaggaagggctgtgggacggccttcgctgctgccctcgccgccgagctctccacggtgagaatcgaccgagaaaaggagagggctcagctgaaagaacaaaacagaaggctccgcattcagctgcgagacactgccgaagctgttcatgctgctggagaactgctcgtcagattgagagaaaccgaggaagcatctacactagaaaaggagaggactgccgcgttgttgcaagagaacgagaagctgaagaagcagctggagaagctgaggaagaagcacgagatggagctggagacgatgaaggtgcaccttgcggagagccggctgccggagtcggctttgggtgccttctaccaccacgagaacgagaggacgccggacgacgatctgtcctggcgggccgccttcgcttctgcgtacagtgactga

SEQ ID NO: 42361 - DNA, 285 bp, Zea mays
  Peptide Sequence Number=SeqID_85736
atggagactcatgatctccgggcagaaagggaatcacggcttatgggtggcaatgagaatgatggtttggcattgactatggtaatggttgtcagcattgcaaccactgctcaggagaagatgaagttgtggaaggagacttccaggagttccaagattatgacgagttctaggcgtgggttagcggcaacccccagtcggctgcctgtgaaggccgcgtgtatctacgtttcttttccacactttgattattgtaaagactatgtggatgtctcagacatatga

SEQ ID NO: 42362 - DNA, 138 bp, Zea mays
  Peptide Sequence Number=SeqID_85737
atggcgaccggagtaaccaccgacacccatcgtcaagctatgcctttggctattgccaaggcagaacgacccttcgaatctgaagagctattcttagtgaatctagagctgttggagctgtcgcaaacatgctcatag

SEQ ID NO: 42363 - DNA, 361 bp, Zea mays
  Peptide Sequence Number=SeqID_85738
ccacttggagaggctgcaccaccgcctgcacgaggagcaggagcgtcgacgacaggagcaagagcagcagggctcttctttctcgctccagcaggagatagagtctgtgaggagctgctcccccgtgcttccgctggaggcgccccatgcaccaccactgagcgccccagcccctggagtagctgctggaggagacccagacgacggaggtggcgacgatagctcgagcttcagtgtggcagaaccgcccgaattattccagcttaagtgcctaagtcacgccccatgggtctacaaggaatcaagcagtctcattagctgcgagaagcagacgattcgaatcgagttttatccttgcaag

SEQ ID NO: 42364 - DNA, 912 bp, Zea mays
  Peptide Sequence Number=SeqID_85739
cccacgccggccaagggaacacccgcttgggactgggtgcccattggtctctgtggtgctaccgcagtgaagtcttggtcgaggttgtggccctcaatgttttggcggcgctcgcgcgccctctccaaagagaccagggcgtcctctcccgcacgcctgcggttgagttctgcccgaaggtcgttggtctatgtgcccctcactgagggtgagcgcacagacgccgacgcctcatgttggcgccgggatgaccgtggcctcgacctggtcgaggtagaatgtgccatgccgagcagtcggtcgacatcgtcccaccatggcttcatggcccctgatgaggccgtggagcttggagggtgtcgcagcaactcactggctactgacaatgctcccggggtcgccctcgacggagtccgggatgtctgtgcagttggggaagcttctcgtataagggatgagtacagtgcaccgcgcagcacgggcacactgttccggcaacggactggacatgcggcgtgtcctctccgcaataaatgcgagggccgcgcggcccagagcccttacgtcatgcttcgctcgctggcctacgtcacagacaataagccatgtggcagcattagaccctcgaccgagtggggagcggaggtgctccggatagagtctggacacgcgtcaataccggacccatgcctaggtcacgacacttcctttcctgggaccttgtcatgggtggtccggagctcacttggtagggtacgaaccctatccaacggctctgggctgctttacttcgggggtccgggttgtgcgtacaggggtcctgtgtcctctgggcccgatggcgttgtctccgataatgccacctcaaccgctcacgagatactcctggagctgttctccgcgcggctaagg

SEQ ID NO: 42365 - DNA, 240 bp, Zea mays
  Peptide Sequence Number=SeqID_85740
atgccttcgccctcgcctcaggcagggtccctctcccgccttgcctggctctacgtggtcggtcgggtgattggaaagaaaactattgaggtggagatggacctgaccaaggccaagagcgagaggtacctatgggggaacaacactgcagctatgaactccgacaagaagcagcagtttacactgggtttggctccagtctcaaaagaaacgtctgtttcaaaccaggctgagtattga

SEQ ID NO: 42366 - DNA, 808 bp, Zea mays
  Peptide Sequence Number=SeqID_85741
atggcgcgggggctgggtcccacgcgtcatgcaagctggcccagggcagaagaagccaaaccgccgcgcgcggtgcatgcaactgcacagcggttacaggcgtccctccactttcacccagaccagagggtgaaaggacggacagccgcgcaggcggcatgcaaccgcgccaagtgggcgcgcccctccgacttccaacgcacccagcatggaggcccaggcccacgcgtcatgcaaccggcgcgccggttgctacgtgcgagcaactgcaccgccactcgcaccactaccacgcctcctcgactgcggaaccagtaccgcgactcgaggcaaccctgcgtacgacccggcagtgctagccaggcgcgacggggaagcgagcgacgctacgccttcgccataatgaccgcgtcaaaaaagggaccgggaaagggggataccccgaaaaggatccttcttcgtgaaggaaacaggccccgagcctccctactgatcagaggttcaaaggctggcccctcggaggggtttaacagccgcctcagagcgcgtgggctccacacccactactggtcagaggttcgaaggccggcccctcggaagggttcaacggccgcctcaggccactcgggctccgcgcccactactgatcaggggaacgatcttgttatggaatcccatcagagggaggcatcgagccctcggaccccgtcgacaggggaccggctcaccggagacaccatgttcggcgccctccgagggcaacatggcgctttcccccctcctccttacggaaaggcgacgcaggcgc

SEQ ID NO: 42367 - DNA, 546 bp, Zea mays
  Peptide Sequence Number=SeqID_85742
atggagcgctcggaggagcaggaaccgaagggatggatcgctagacccatcactcgcgacgccactcgcgggtgtcacttccacgacgctctcgataccctgttgcgttgggcctttgaccgacacacttggtctatagaataccattgtgtagtctaccagcatcgtcgcaggttatacccggaccagtgggaggctacttgcttgcggggtagctgcggtcttgacctgaagtactaccctcgccgttcaaccggtagtactggaggtgtgattgtctcgctagttggtgaggataatcccaggctgagcagcatggacaacctggccgccgtgctcaacacagagttggaccacaccattgatgagttgggcaaggttcgggcggaggttgcggaattgcgtgctgaatgcgtggcacgccactatctggatggtggttttcccgcccctgtcgggattcagcacccttattgctcatcgccccgtggtcgcttcgactatggtaccccagactgtaggacccggatagatttagattcatag

SEQ ID NO: 42368 - DNA, 213 bp, Zea mays
  Peptide Sequence Number=SeqID_85743
atgcacgacctcctacttgtgctggtgctgcttggccattttggttggttgctagggcaggaagacgagctgtctggttattctgacgctggaactgatttcctccagattgggtgttctgacggtactgctgctgctgctgctgctgaggaaactgcctctggtactgatgctggtgctgacgctagtgctggtgctggtgaccttgcttga

SEQ ID NO: 42369 - DNA, 462 bp, Zea mays
  Peptide Sequence Number=SeqID_85744
atgacgcttcagggcacaggcggggaaatatgccttgaaaaaggagctcatccctcgggcagtagccatgcctcgctcctcttgcattcaccacgcccttccgccttccgagcctctggatggggcgtgccggtgttcgttggagggatccgcgtcagggccaccctccccagtggtctcgctgctggggagctcgcgctcttcgtttcctacgcggtggtgctgccgatcttgtcttcttcttgctgttgttggaggagcgcgacctcatgggggttggcgctcttctgccatcgctcgacttcaaggatttttatcatgcagcccggctgcagtctcccgtcagtggtcatctacaaggatgaccaccagcctcgtggtggagggaagcgagctgggctacggcttccccctgccctcagcttcgaggatgttcatcatcctcgctggggtggaaggtga

SEQ ID NO: 42370 - DNA, 411 bp, Zea mays
  Peptide Sequence Number=SeqID_85745
atgggggccaggcctcacacgttgtacaagctggcccgaagcgcgaagaaggcgaaccgtcgcacagggagcgtgcaaaccgccctgcggttacacgcccttccaccttcgccgcaaccagcggtcaagaaggcgaactgccacacaaggagcgtgcaacagtcctgcggttattcgcccttccatcttcaccacaaccagcggtcaaggagcgaaccgccgcacaaggagcatgcaaccgccccgcggttgcgcgccccctcagcttcgctacaaccagtggtccaacctctagcatgggggcccaggcccacatgtcatacacccggcgcgccgactcctaggtgcagggaggtcacaccgctgctcgtgccaataccgcgcctcctcgaggccgtcgcagaagactaa

SEQ ID NO: 42371 - DNA, 288 bp, Zea mays
  Peptide Sequence Number=SeqID_85746
atggaagaccttgaagttcaagaggatctaacatacattgagaagccaactcaaattctagagacagcagatcagggagctccgccaccacccatcgtcgatcactgcctgttctgcggccaccatcgcgtccgcgccccgtccagtgccatgccggagtcccaccaccgtcgccccatcgagtctctgcgcctccgtcgttgcttcgcgacaccagcgcttcccctcaagaccgccctgattgcgcccaggctagtccccaagccccaggagccccgccatggctag

SEQ ID NO: 42372 - DNA, 150 bp, Zea mays
  Peptide Sequence Number=SeqID_85747
atggtgtggtggtggtggctcgggaacgccgtggcaggggcgatgtgtcacacccggttttggaagaggtcgcacactttaccacaagtcatgattcccgttctgcccggaggtcatgactctccattgatcactaccaaggtgacctag

SEQ ID NO: 42373 - DNA, 168 bp, Zea mays
  Peptide Sequence Number=SeqID_85748
atgggggaagaggccaagaatattgttgacaacaattatgataaactacaaatgcatgggcgtggtaaagattattcgtcaaactggtggaaagcatttggtggtcttcttatagcacatggtactaatgttgacctctctattcattctattattcttattatttga

SEQ ID NO: 42374 - DNA, 234 bp, Zea mays
  Peptide Sequence Number=SeqID_85749
atggagctgagtcttacccaagattgcagtggcgaggatgcagcccacggtgacacttgtggtctacggacgcgtcccatgactccaggcgacacgccctgcacccgccgcagagcccagcctgccgcgaaggttgaaatcaacgacggtgacaagtctcaccgagggtcgcactccttacggatttctcgcagggtgatggcgaaggcgttggtggctcgagttcggctgtag

SEQ ID NO: 42375 - DNA, 261 bp, Zea mays
  Peptide Sequence Number=SeqID_85750
atggggcttggtgtatgcggctcgctctgccaagcttgggttcacccccttggggaggaccgtgctcacggttatgagcggccaagggagctccagagattagtggtacttgatcagagacattgtggtacaggtggttatgagattgatggttttggttatgactatggtgctggttgtcagcattgcaaccactgctcaggcgaagatgaagctgtggaaggagacttccaggagttccaagattacgacgagttctag

SEQ ID NO: 42376 - DNA, 1224 bp, Zea mays
  Peptide Sequence Number=SeqID_85751
atgccgacctcctcttcttccgctgccgctacgccgccgtctgattccttgccgccggccgctgcctcgtctgaagagacgttgagtagtttgatggcggaggagctgcgcgccggcgattctgttgattttggcgtgtcgcggatgtcgtcggcccgcgtgcaagatatgcagcggttgggttacttcggcggcggagttgctcgtgtcccggggacggaggaagtccccaagccggagggcgagttggttgttttcgaggcgttcttcgccgccggtctccgcttgcctgcgcaccgatttgttggcaaagtcctacgcaggttcaataagaggatgattggggacgaagttgctcagtttgggtcctgcacattcacgccgaagaccggcaagaccacgatgcagggtaccgtcgaaggccatgagggactccccgtgtccgagatgtgttctcatttttactcagtgtacccgccctttgaagtggctgaggaggacgtggacgaaggggcccttcggtgcgccgccggcctgagcagtgggcgcgatttggttgaagagtttgtcgcgtacggggtatggcccttggcgcatggctgggtgttgggcgaagtgtgccctcgccagatgccttttcacggtggaagggtggtgcgaagtcctgccttcgcgctgaatctgcaaagccgcgacccggctgcctttgtgcgtgaggcggaggatggggcggtgcggctcgttggacgttacgtgccgaggacagagggccagcgcagctttgatatccgcgggtcgaatgaccgtttgaacaggagagttgatgaggacgtgcgcggccccggggggaaggatgtcttcgcccgagctccgggagtcttcggttcggatgctgaggtgatggacaaggaccgccagggagcagcacaaaagcgccaggcggttgtcaggctcgttgaagctaggccgaagaggcagcgggggtctgcgaaggttgcggcccccggcggaggcaagccgccgctggtggcgaagtcgggcgcccctacgtctagcaaagcgccggaggcgacgacaggcgccgggggctcaaaatcgacgaaggcagtgctgccggccagcagagtgccggaggtcgcgaaggcggcccgagcgttgccgtcggcaggcaagcgtgtcgccgacttcgccaccggatatttagtgtggaggactatcttggtg

SEQ ID NO: 42377 - DNA, 471 bp, Zea mays
  Peptide Sequence Number=SeqID_85752
atggtcattccaagccagtgccgttctcctttggccgtccctgctcccgctgtgagcacaaataagcttggattcacaccagagtttctagggcgtgtgaagcttgtaacctcctttgcatccctgctcggtgttgggctctacaactattttctgaaggaagttcctctaaggaaaatatttctcgtgacaaccattatatgttcagctcttgggatgacacaggtgcttcttgtaactggattaaatcggaagtttgggattagtgacaagtggttttctattggtgattcattaatcatcacagtccttggtcaggtactggagcaactgagcggccagtcaccggcaatgcagctgctggagtgtggcttgaaggtgaaggacaacgagctgctgaggaggaacttcagtgacactggttgctttggatgtggtatccaagagcacattgatcttggcatcaagtaa

SEQ ID NO: 42378 - DNA, 195 bp, Zea mays
  Peptide Sequence Number=SeqID_85753
atgatgttttgccgagctatggcaaatcttgacggtgcccgagaggccaataattctatacgcagaaaatttgagatgaagaaggaaaatcatgaggatgaggtgttgcagcaaaaggaaaagatccagggtcttgagaacgaagtgaatcgtcagaaggaacaaaaccagactctaatgaagtgtttggtttaa

SEQ ID NO: 42379 - DNA, 1197 bp, Zea mays
  Peptide Sequence Number=SeqID_85754
atgtccggcgaggatggacctcctcccgtttttgatggtgatgattttccttattggaaaattcgtatggaagcttacttagaggctatagacattggtgtctacaaagccgccactcaagggttccccgaaccaagagatcccacaaatcttgtaggtgaagagtttaattatgaaaagtggaatgccaaggccaaaaacactctctttagaggcctttgcaaagatgtctttaatagagtaaaaatcatagaaatgctcatgatttgtggatggatatttgtgctctacatgaagggactaaaagaagtcaatggcttggggctcacccaaatttcacaatcagatgttgtgaggaagattctcagtgttctcccaattgacaaatatgggacacattgtcactgtgctacgtcaaatgaatcttttcatttgctactcccacacaaatattgggaaatgatcaatgctcatgaaatgtacatgcacataaatgacaaggatgggtcttcttccaagagaaaagacttggctctcaaagacagccaagaaaagaaagggaaagccaaaatgcaagttgaaaaagaatcctcaagtgatgatgatcttgatgcaaacattgctttgatggtgagaaagaccaccaaaatattgaagaaactcaatagagaaggcatcaagtttgattcaagaaagaagaagttattccccagcaaaagaaagcccatctctgagatggactgctataattatggagaactcggtcatcttgctcatcaatgcaacaagcccaagaagaacaagttcaagggcaagaaaaatgatgatagtgatgatgagaaaaaggaaaagaaattcttcaagagaaaggaagagaagcacaaaagactccataagaagaaaaaatggagaagcatatattgttgcacctcatgtgatgatttgagccaagttgatcaatctagtcttcatgatgaattgattgaaaaagctgaagtcatgacactagagaatcggaaattgaagaggtacttgacagatgcaaccactagaggaaaagttgccatagaaagcaatgacattaacaatgagttggcagtggacaatgaaaggcttagaaatgaagtcaagaaacttaagattgaaaatgaacattttgccactgttggggacttgttctcaaatgctatgaattaa

SEQ ID NO: 42380 - DNA, 135 bp, Zea mays
  Peptide Sequence Number=SeqID_85755
atgtcggaaaatatggtaaccggtacgctacaggatatggttgatggtgtgacttggccttctaccctgccaccgggttggacggttgagtgggatgctgcctcgacaggagaggagcaggaggagaggggatag

SEQ ID NO: 42381 - DNA, 342 bp, Zea mays
  Peptide Sequence Number=SeqID_85756
atgagggcttggggatcccgccacccccttctgttcctcctcgctcacaagatcacgaggccggtcacgttggatttctcatcaccggtcatcagacccgttagcgctctgccgctagtgccaccagcgcctgctattaccactgttgtcgtggcggtgtccgtgactgcaccagctctagtggatcttgcatcgcagcctacgttagagtcagtaccagctctagcttctacttcagatcttggattcgagactgactccgatcctcagcttgtgtttgctcttctgcctcgaccacgacctgatgcgccctcgcctcctccttcctcttctggtttgtag

SEQ ID NO: 42382 - DNA, 444 bp, Zea mays
  Peptide Sequence Number=SeqID_85757
atggctgaaagggtaccaactcccacggagttgcgttcctccaacgacaaggcggaaggactgcggggcatcccccatctgggggcttggaagccgtcacgggctgagtcttctccagcacgctccaaggtcctccccctacggcgcgggggctgggccccacaccagcgggtgaaggggcgggcagccatgcaggcggcatgcaactgcgccaagtgggtgcaactctccgacttccagcgcgcccagcatggaagcccaggcccacgcgtcatgcaaccggtgcgccggatgctacgtgcgagcaactgcaccgccactcgcgccactgccacgcctcctcgactacggaaccagtaccgcgactcgaggcaaccctacgcacgacccagcagcgccagtctggcgcgatggtcaatacggccaaaaatgggccggcagtaa

SEQ ID NO: 42383 - DNA, 344 bp, Zea mays
  Peptide Sequence Number=SeqID_85758
gcgccgggcgagcggtggacgactttgggcgtgacgacgtgctgctgacccggagccacctcggcggagccgtgctgggtcgcctggagccaacccccagagactgcgaaagaccgcacggatgcctccgcgtccgctgcgacccggcaaagacctgccccccagaggtcgcagaaggcgcgcctgatgcccccgcagctgttgcgccgagtgctgaagatcccgtggtgggtggcggaaacgacagcggaagcaacggcggagccagcggcggaggctcccgcaacgtcagggccttcgcaggttcaagattttgggcctgcgcacgcaaccgctactactaa

SEQ ID NO: 42384 - DNA, 966 bp, Zea mays
  Peptide Sequence Number=SeqID_85759
atggatgaaggagctcccctcggtggtctggagtctgaggacaacgccgagtcgaaccacgggctttacaccgttctttctagtctgtggggccgaggccatcttgcccacagacttagaatacggttccccgagggcgagggcctacgacgaccaaagcaatcgaacaaaccgagaagactcactggaccagctagaagaggctcgggacatggccttactgcactcggcgcggtatcagcagtccctgcgacgctaccacacccgaggggttcggtcccaagacctccaggtgggcgacttggtgcttcggctgcgacaagacgcccgagggcggcacaagctcacgcctccctgggaagggccgttcgtcgtcgccagggttctgaagcccgggacatacaagctggccaacagtcaaggcgaggctcggaccgtgacggagggggagcagcagcaccctcggcgtcaactccacctttggcgaagtccgaccgagcctcggacggcaacacgggcgaaggatctccgctccgaaggacgacgtcagcgccacgcccgggctatcgccgccagggtctccttcaggaatccggcccgagcagacggctcggccggtcgccccgaagcctcagccagctgtcccccgagggcatcagcccggctcatggcctcggcaactcgactccggcgtcggtcccgccagtggaaggcccggccaggctccggctgacgaagttttcttttcgagccaactctgcctctgtccatgctgacaccgctgccctcagccccggctcatcgcagagcggccgaggggcaacgaaacccctggtggctcaccgccgcctgaacagcagcagcgacaacgacttccgccccgggcggccaaacagcagcagcgatgacctctgggcagacactgctgcaacaaggtcctcgcccgcgtccccgcccaaggggtga

SEQ ID NO: 42385 - DNA, 294 bp, Zea mays
  Peptide Sequence Number=SeqID_85760
atgggcaaccaaaaattagctaagtccctgatgggacaatccaccagagaaaaatgcaaacccatgaagaaatcatacccctttaaagttgtaatttctaaaagcacatatcatatcatgcctatatcttatgcattgcattcattagattgtaatcttgccgacggagagtacgtgctcatccccgagcaaggacctgtccaagaggaggaccaggagcaggcttcagaggctgctattgaggatctccccgcagccccagcaattgaaggcaagccccgatcttatgcataa

SEQ ID NO: 42386 - DNA, 291 bp, Zea mays
  Peptide Sequence Number=SeqID_85761
atggcgggcggaattaagctcgccggagctaaggggaagtggctggccggtgaggggtatgggtttgggtcaatttctctacctatgggtttggtaatgggttcaaatggaaacccaacggtgggtatgggaaacccgttgggtacccaaaacccgcatgggcatgggtttgggcaaaattttatacccgtcatggatatggattttttagcgggtgtattttttcttcgcgggtatgggtttgggcaagtaatacccagcgggtttttacccattgccatctctacatag

SEQ ID NO: 42387 - DNA, 651 bp, Zea mays
  Peptide Sequence Number=SeqID_85762
atggagtgggggtcagcggcgtacacggccgcgacgctagtgtgcgccgcggcggcgagcgtggtcgcgctcacgcacatctaccgccacctcctccactacgccaagcccatctaccagcggttcatcgtccgcatcatattcttggtcccggtaacgctttccgcccgccgctcacacccacaacaagccctcgcgccagatctgtcacccgccttcgctgtagcttttccatatcgggtgagctcgagggactgcccccgccgctaccgctcgtctgcccgccgcagcacacgctccacgaatcccgccgcgaatcccgcacgcccccacagtccgttggttgctgctgctgcgcgcgcgccgcggcgggacacgggaggagcgccggtggtggtggccggcccgatggagtgggggtcagcggtgtacacggccgcggcgttggtgtgcgccgcggcgacgagcgtggtcgcgctcacgcacatctaccgccacctcctccactacgtcgagcccatctaccagcggttcatcgtccgcatcatattcatggtcccggtaacgctctccgcccgccgctcacacccacaacaaaccctcgcgccaagggcgccctcgcgccagatctgtcacccgcctttgctgtag

SEQ ID NO: 42388 - DNA, 423 bp, Zea mays
  Peptide Sequence Number=SeqID_85763
atgacaccgaagcaaccgctcagtcagctccacgacctccacttcttccgcttcgacgccatagatctcgccattggcaacctcccctccgcagtcgcagctgagttgactgtgcgcgccaccgcaagcagtgacgggaggaaaattgccccttctctggctctggctctgttcccctccggcacttcgcccccgccctctttcttgcaaaacgacaccctaattttgtcgaggaatgaactctgttcggtgaccattacgatctcagtcagttcggtcaccacagatgcacagactttgttctctaacgaaaatcatcctctgttactctccaacctaccagttgtatctcctccactccaccgaaatgtcattgtctgcaccgaggctgttagtaacttccagttgctttgcttctgctaa

SEQ ID NO: 42389 - DNA, 1056 bp, Zea mays
  Peptide Sequence Number=SeqID_85764
atggctagattacaatcctcaccatctatggcaggcaggaaatcacaacagaaagttgcttgtccaaaggttcaaatgctgaaatctctatcattccagtcatctaataagcggtctgcacagaaggagccaacgtcaaaggtccagcatcatcaacttgaatctgttaggtccaagttcagggagtcacttattgctgcgctgagtttggattcggatcagcagaataggagtcaatctcctgataatgtgcagtctgatggttctacagataaattcaaaccggcagcaggagatgtggtacaggatttagtggcaaacacatcaaaagatgtgtgcacaaccaattcaggtatagccacaactgtagctcctagtagatgtgaggaaaatgagaagttaatcagtgatttagcttcacagatgaccatgagtatcaatgatggcatgcagcaaccgtcaaatcaggtttcttcagaagacgacttattaggtcagtgtatggttgcagaagaacttttgcaaggtcacgggcttagttgggtttctgatcatgttgttgggatttctaaacctaacgcagaacctaatgatttaaaaagtctgcgaacttctgatgtggagtctgagtcaaaaagaatgaagtctgctaatgaattagcaatggatgaggagaaatttaatcaaaggcctgaaagtttggcgtttagaattgaagaggagccgttcaaattgtttcgtggggtaaataagaagtacaaggaaaagggcagatctcttttgtttaatttgaaagacaaaagcaaccctgagctaagagagagggtttcgtctggagatattgcgcctgaacgcctttgttcaatgactacagcctccaaagaactctcagagtggcggctggctaaagttgaggagtttgcacagatggttgtccttccgaatatggaggttgacccaaggagtttggttagaaaaactcacaagggagagttccaagttgaagtcgaagaaccagatggaactgaaatgtatatttataataaattaatttaa

SEQ ID NO: 42390 - DNA, 759 bp, Zea mays
  Peptide Sequence Number=SeqID_85765
atgacgcccttgcccccttctcggtgcctgctccactgcctcgacctggcaccatcgtcgacgtcctgcgagacgcgctcgacaacctccacgcgctcattcgtcgcgctggtggccacacatgggaggctgcgggccggcagggtctccatcgccgtagcagcggtggatgtgggcccatggactgggatgcgaggaggaaccagcgcgctggccgcctgcgcccgggcgtcgtcggcgcctccaccgctcccgtgcacgctcctgctcctgctccatctccagccaacagagaagtccatggtgaaaatccgcacggtcgaggtggagggcaagaccgtaaagctgcagatttgggacatagcagggcaggagcggttcaggaccatcacgagcagctactaccgaggagctcacgggataattattgtttatgacatcacggacatggagagcttcaaccacgtgaagcagtggcttggcgagatcgaccgatacgccaacgacagcgtacgcaggcttcttgttggtaacaaatgtgatctggccgagaacagggctgtcgatacttcagtagacagtagcacaggtcaaaacttccaagcttacgctgaagaggtaggcatcccgttcctcgaaacgagcgctaaggagtcaatcaacatcgaggaggcgttcttggcaatgtctgctgcaattaagaaaagtaaagcagggagtcaagcagccctagagaggaagccctccaatgtagtttag

SEQ ID NO: 42391 - DNA, 243 bp, Zea mays
  Peptide Sequence Number=SeqID_85766
atggatatggtggcatgctccacatttgattcgggacatatggcggtggtacgtggtcgttgtggctcttgggcattaccagaccatccatttgaatttccggactgtctgatgatgtcccggaccatccgcgtctatgcgccggaccgtccgcggcacgcagaacagggacccgcgcctggttacctgcctgcgcctgtgcctacccccagggttggaggtcattatggtaaccttctgtaa

SEQ ID NO: 42392 - DNA, 237 bp, Zea mays
  Peptide Sequence Number=SeqID_85767
atggagacccgtgcactcttgttttgcttaggaaccagggagaagaccgaaagggaaaaggatttgaacatgctggattcggactgcagaagaacaccaacttgtgacggtcaccacgatctggacgagtgccctagtggccagggtgtcacgctccacaagatcgtgacagccataggaggtggtgtatcggttgctaaggcgcagcgtcttgggaaggctgtagtcgggccgtga

SEQ ID NO: 42393 - DNA, 699 bp, Zea mays
  Peptide Sequence Number=SeqID_85768
atggcccgtatcaggtgcaccacacgtaagtctgtgatcccctttttgccttctcgcctggcggagcatccactgcgtcgtacagtgtcaggtcagtccaaccacctggagatactgcatcgtcgtctgcacgaggagttggagcaccgatgccaggagcaggagcaacatgactcttccccctcgcctcagtgggaggtggagtctgagaggctgccttcccctgcacctcagccagatatgccccctgcaccacctcagggcatcccggctgctggaggagaccctaatggagacggagacgacgatgacgcaagtggcagttcgagccactacacaaagctctcggaggagctggagccggagggtggggtagctgatggtcttgacctgaagtactaccctcgccgttcgaccagcagtgttggaggtgtgattgtctcgccagttggtgagggcaatcccaggctgagcagtatggtcaacctggctgccgtgcttaacacagagttggaccacgcccttgacgagttgggcaagatgtctgagaacaggcgtagaggtgcgaggcgtgctcaaccagaaaagcaggcaccccaggaggatgcagctcagaagcagcagttgccacctccaccctcgatgagagtcgagcagatgttcatgatgcaaactcaggcagttcaggcaattggttag

SEQ ID NO: 42394 - DNA, 636 bp, Zea mays
  Peptide Sequence Number=SeqID_85769
gggggacgcaagatccacggcgagcatggcgggcacgccactgggcgattctcgcaccgcacgcacggtcgccctggaatttcgccgctcgcgtctgactcgccgctggcttcaaaaagcatagctcacttctcctctcaccctctgttttcgcatccactcttcctacagccgccatcgatccacgcaaacgccgccgcgggggaatctctaatttgccgccgtcaggactacaaccttgggtctggcagattccgtgatgacctcctcaccgttccgtgcgccgccatcgcaacaacgcctgggttgccaccgaaatcgggggagaagggcaccgccgcgggtcatgggagccattgccgtcaacccgaggttgcgtcacagttgaggcctcgaatctgggctgtcgcgcctcggggagacacactgatggtgcatagggtcattccgggcgcgattggggggcaaggcgaagccgaattcctcatcggaaatcaagatttggggctgtgccgccatctcccgtgggcgtgcgccttcgcagcagctaggccgggggctcttaagcaaaactcacacgcgaaggggtacggggtaatgtcgaccatcgaatcagagatcggcggcccagattag

SEQ ID NO: 42395 - DNA, 348 bp, Zea mays
  Peptide Sequence Number=SeqID_85770
atggctctgggtttcagtgcagcaattagtccaaatttctactccataacacgtacccatccatcggcttccagagggtcttcggctttaacgaagagtgggggacgggtttcagagaagtccagatatgaagtctcacgtggtccctgcagaggagcccttccgccttgctactggaattggttacccgccatctcgtgtaaaaagcgggtattatcggaagtcgcgttgaccaaggcagcgatagcctcagccaatgttggcggtacaggcggtggatttggagtatcttctcgaccacgggaagtacccgcaccgtcctgcgcaggagtccttgatggcatctga

SEQ ID NO: 42396 - DNA, 348 bp, Zea mays
  Peptide Sequence Number=SeqID_85771
atggccacctgcctagatcttacatacagcagggctatcagcacggcgctggcagtagaagccaagaatacaggacaaggaaaatccaagggatttggaggtgacaggtccaatcagggacctaagaagcgaacaagttcctcaactggctgcttcaactgtgggaagtctggtcattttatcaaagactgcccatatcagtggcggaataaatccaacaatcaacagaactcagggagctcaaaacaaagcaagggaaacatggctaataattcaatgggcaaaaatgtcaagaagactgggcgaatctattacactcaagtggccactacgccagaaggagagccg

SEQ ID NO: 42397 - DNA, 1176 bp, Zea mays
  Peptide Sequence Number=SeqID_85772
atggacgcggaagattggctgcgtattgtggagcgtgagttgcacactgcccagtgcaacgaccaggagaaggaaaacagcgccgctcgcccctctccgactgctgtgccacccgccagggtgaggctgacagcagctgagtccagcctcaggcgcaacaggaagctccgcctcgcccgaccttgggcctcggccttaggaggaagtctccgcctcgccccgaccccagggctcggcccccgcctcggcctcgagggatggtctccgcctcgcccgaccctagggctcggcctcaacctcgacctcgggaggaattgcgtcctcgcccgaccccagcctcggcctcaggaggagtctccgcctcgcccgaccttgggctcggaccgaccatgccgcagggggctatgggggaacaagaccggcgtcccatccaggctcaccccggtaacaagtaatgatggctccccgcgtgcgtccatgacgacggtggctctcagccccttacggaagcaaggagacgtcagcaaggtcccaacagccccgacaactgtgcttctacagggctcaaacgctcctccgacggccatgactccgcatatgccgccgcacacgaggaaaaccacacgtaagtccactaggccgattggcgtaccttggcaccagctggctccaagacatgaggagagcagcagcggcaataacgaccccattggagtcctaaaagcccaggtggagcagcttcgaacagagctacgtcacagaaacagggtgtgggtaaaagatggtcagcgtataaatgagttaagagttgatgtccgacatctgcaagacgagcttgctgaacgggatttggcaatcgattgggctgtcaattcacgttccattgcttgggaccgggaagccaaagctcgagcccgtgtggaggagcttagcacggccgttgacaacttgcaggtgtactgcaatacattacatgaggaagtccatgtactgtattcgcgactacacccagacatacctgccgaccctgttggaatgggagccggaccttctggaacagcagatgaagcacttggtggggaattggaccttttcaagcccccttcttctatgaacctggctgatgaatggtcccctacaaccgacagtgaagctaccaaggacgataaatactag

SEQ ID NO: 42398 - DNA, 498 bp, Zea mays
  Peptide Sequence Number=SeqID_85773
atggatgaaggaactaccctcggtggtctgaagtctgaggacaacgccaagccgagccacgagtttctcatcgttctttctagtctgtggggccgaggctatcttgcccacagacttggaatacggttccccgaggacaaaggcgttcagacaccgacagagggagcagcaacaccctcggcgttgtttcctccttcggcggaatctggctcggcctcggacggcgacaagggcgaaaggatctccacctcgaaggaaggcctgtccctcgaggacatcagcccggctcacggcctcggcagcgtgactccgaagttggtcccgctcacggatgacctggccaggctccagccgccgctgctgcgccttctcggccagggaagccacgtgccccgggccgacgaagcctcttctcgagccgactctgcctctgtccacgctgacaccactgcctctgactccggctcatcgcagagcagccgagggttccttaactga

SEQ ID NO: 42399 - DNA, 701 bp, Zea mays
  Peptide Sequence Number=SeqID_85774
atgcaggtggcgtgcaaccgcaccacgcggacgcaccccttcgacttcaacgcatccagcatggaggcccaggcccacacgtcatgtaaccgacgcgccggttactacgtgcgaaaaactgcaccgccacttgtgccaatgtcgcgccttctcgactgcggaaccggtgccgcgactcgaggcaaccctgcgcatggcccaacagtgccaaccgagcacatcggtcacgggtcagtcagccgcgggagggggcgcgacggtcgatatggccaaaagtgggccagcagtaatggcggcaacaggcaagcggaagcagcagtcaagtcgtctgcaggctcacgtaccctactggagcagcaggggagccctctcccacggcgtgaagacgacgcgcccgtgttctgtccctcgaacggctcgcgcaacgaccgccccgcgaagcaggcgttgtttcacctccgccatgacgaccacgtcaaagaagggaccgggaaagggaatatttcaaaagggatccttctccgcgaaggaagcgggccccgagccctcctactgatcaggggttcgaaggttggcccctcggaagggggttcgaaggctggcccctcggaagggttcgacagtcgccccagagcacgtagagcgagggatgactctgggtatgtccgatacatggccgaggcttgggctacgctcccgag

SEQ ID NO: 42400 - DNA, 309 bp, Zea mays
  Peptide Sequence Number=SeqID_85775
atggcccgcgccagcgcctatataatgcccagtgaccttaaccgtaccattccgcgcacgctcaacctcaccggagctcaaactcactggcgtttgcccgtgcacggcgtagagtacgtcctcgtgtcggagcaaggagctgctcaggaggtagccccggatccagcaccagagcctgcaccagaggatctgcctgccactgctttggaaggcaagccccggaatccttttgagatggatactagtatgctaggtcgagtagctgctttattaactaggatctctgtagaagtcgagtggtttttctag

SEQ ID NO: 42401 - DNA, 273 bp, Zea mays
  Peptide Sequence Number=SeqID_85776
atggcagtcggggtcagtgaggcattgtacgccaaggcggtgagccctgatctgctgacggggaatcgatggggacggttgatgtgtgtggggacggagtgcccctacatgtcgtctagtgcttttggcaacccaaccccacagccaaacagctgcatgtctagaggatctctggaggacatggttgctggagtgacttggccgtccatcttgccaccgggttggactgtcgagtgggaccctgcctcggctaaggaggagcatgaggagtga

SEQ ID NO: 42402 - DNA, 266 bp, Zea mays
  Peptide Sequence Number=SeqID_85777
ccttggcgtggaggccgcgtgtccaacccatgcagctgtcgaccgaaacacgaataacaatcacagttcgacgagacttctccgcgtccatgctctcgcgtctgcgtggaactgcgttacctcgttcaactcgcctgaggccggggctgttgccgttctctctgagcagagtggtgatactcatcggcctggctgtttcatctttactgctctagcgtatcggaagcgtcacgacgccgctgccggcgcgcgcgaagagagcgcgg

SEQ ID NO: 42403 - DNA, 354 bp, Zea mays
  Peptide Sequence Number=SeqID_85778
atggcgggggctcataggagacgagggtgcgggcgcgcttggggccccagagcgacaggaaaggctcaaggaggtcgagtgaagtgtgacgaacacagaggtgggggcagcatcgacgtaggggcgctacaggatggcggcccacggcaagacggctctgcggcggtgctacctcactccggtgaggaattgcgcacagtcgagagcaggaggtggaaaaagggagggccggggaggttggttaactcgaggggagtctccggtacctttgaacggcggcagaggcacggtggggactcgggtcgacggcgacagcgctgtggctgcatgaaggaggaccagtttgcgcggtag

SEQ ID NO: 42404 - DNA, 376 bp, Zea mays
  Peptide Sequence Number=SeqID_85779
atgaagaacatctgctccactgacattggggtggtggtggagacaactgctagggtgcctcatctcttggggcttactgctcttgctgggggtgccataagcatgatgaccatggggcggagagtggtaagggtgctgagtcctagcaggggcaggggaaccatcctcctgatggcggcgctccatggtcaagggcgtggtccaggcctctacacctcagaggtcatcctccaggcgacacaccaagcaggtagcctcccaacgatccgggcggtggtgaagcctctcaaggtgactcgactgtccgggcaccatgcggcgaagtggacgctccgcaaggcaagagggcaggaaagggatcatcgacttgcgtgcg

SEQ ID NO: 42405 - DNA, 210 bp, Zea mays
  Peptide Sequence Number=SeqID_85780
atggataccgggtcatgcaacaaagcggcagcgccaccaccaccacgcaatatcgagaagaaccagcaggtcgagaaggaaccgatcgaggagaagccgaacgcggcggcgcagctgcaggatagggtgttcaacattcttggcgagaacagctcagaactcgctggggataggccgcaggagcgttaccaggccaccacaagttcttaa

SEQ ID NO: 42406 - DNA, 177 bp, Zea mays
  Peptide Sequence Number=SeqID_85781
atggagtacctcgatgaccccaatcgtcttcctatccgctacagatgtgtagatgggaagatggaggactgtgagtggatgtacatgggctgctcaagtcagggtctggtcaccaatgaatggatcgacaagactgatgctttcttggaacaagcatttggcgaggttactaaatga

SEQ ID NO: 42407 - DNA, 393 bp, Zea mays
  Peptide Sequence Number=SeqID_85782
atgtcctataccaaaaatgtggcataccacccaaggcacccactggaaaaagctgagcccgagactcggacgtttgacatgccttggcatggtttttgtcgcgagatagcctatacgtcaccccaggaagctcaccgtgcccttggattgaaccagatcgccgtggtttggccggttaagaaaaatagaaaatgtgatttaaataatgaaccagagggcacccttatttttgttaggatacttattcaagactgtaatcttgctgacggagagtacatcctcgtgccggagcaaggagctgctcaggaggtagccccagatccagcaccagagcctgcaccagaggacctgcctgccactgctttggaaggcaagccccggttttatgcataa

SEQ ID NO: 42408 - DNA, 456 bp, Zea mays
  Peptide Sequence Number=SeqID_85783
atggatgtggacctcgccgaggtcggcccaaagagcttctgcgcgcaaggggaaaacagaggcgagggaacgctatgcagggccagacggccatggggatcgcagagagggaggaggtcgggtgggagatggaggcactggttggaggagcacggcgtcacgccatgcatgggagagagggtgacgtccatggaagaggaggagcagagctccttgctgctttgctgtggagaccagggaggaagaaaaagtgtgccggctgctcgcctgcagggagcgagcgcccagggaggagggcgccatggtgaggatggaagctcgagcgcccggccctggaaggagagtagggcgtcggcggccatgggaggagctcttgcgcgcagccgtgaggagaaagggctccctgccctagcgtgcgtgaaggagcagggaaggaggatggcgtggggagaataa

SEQ ID NO: 42409 - DNA, 567 bp, Zea mays
  Peptide Sequence Number=SeqID_85784
ggagtttacaactgcatggctttggagcggtggcgggatcgagcccgagatcccagaaggatttcggcccattccctggccttgaaatccacgggtccaatttccctggggcaaacaaaaagtgtatttggtgtcacacgcctctcggcccaatccgcgggggaagagcaggctttcgcccccggcctcataaggtcaggtaggttttccccgactcgactgcgctcctctttgtctccattgcgaatacgtcgactcctctcgctcactcatgaactcgtcgtcgcccactgcctcctcttcctctacctcgcgcactcaacgccgcctactgtctcctctctcacgcgcactgatggcgaaatgagaagcaatgaccaagtggactactacgccatctgcatagctaatgaagacaagctcttcaggaccgaagatgccgattacaaagttttccttcctaccaatctgtcgcaccagctaatattatcaagcgatgaagagtacaatattccagtagctctaaagcttctcagaatgcggtgcacaaaagaccagatcctgaag

SEQ ID NO: 42410 - DNA, 591 bp, Zea mays
  Peptide Sequence Number=SeqID_85785
atgaagaacgtagcaaaatgcgatacctggtgtgaattgcagaatcccgcgaaccatcgagtttttgaacgcaagttgcgcccgaagccttctggcggagggcacgtctgcctgggcgtcacgccaaaagacactcccaacaccccaccgcggggcgagggacgtggcgtctggccccccgcgccgcagggcgaggtgggccgaagcaggggctaccggcgaaccgcgccggacgcagcacgtgaggcgtcctcagcgacggaccgggcccaagttctctggaaagggacgcctgggagggtgagagccccgtctggcccggaccctgtcgcaccacgaggcgccgtcaacgagtcgggttgtttgggaatgcagcccaaatcgggcgggttcgagttggagcacgcctgtcgggacccgaaagatggtgaactatgcctgagcggggcgaagccagaggaaactctggtggaggctcgaagcgatactgacgatagctggagcccacacgagttctatcgggtaaagccaatgattagaggcatcgggggcgcaacgccctcgacctattctcaaactttaaataggtag

SEQ ID NO: 42411 - DNA, 1377 bp, Zea mays
  Peptide Sequence Number=SeqID_85786
atggaacgttggcgacggggcggcagggctgttcggcctaacgtctgggctgaaaacgagggggcatggcagtacggagggaaaacggcacggaggcgcgcggcgacgggcggcatggctattcgtcctagcgtctgggccaaaaacgagggggcaaggtggaacggagggaaaacgggaggacgagcgcggcgccgggtggcagggctgttcggccttgcgtttgggctgaaaaacaaggtgttcgccatgggcaaagtggaacagagggaaaacgacaccgaggcacgcgacgaactgaggctcgggcacggaggcgcgcggcgacgggcggcagggctgttcgtccttgcgtttgggctgaaaacgaggggttcaccatggcgcgcgctccgaaaacaacggttcggccacgaccgcgaaaaggggctaagtcccggcgtgtggaaagacaacgaagctaaagtgcatgtctggagtgaaggtcaaggtggaacggagggaaaacgggaggaggcgcgcggccgacgcgcggcatggctgttcggccttgcgtttgggctaaaacgagggtttcgccatggcgcgcgggtccaaaacagcggctggggcatggcctcggaaataagccaagtgcaagcgtgtggaaacacaccgaagctaatgtgtatgtcttgggtgaagggcatggtggaacggacggaaaacgacacggaggcacgcgcgacgggcggcagggtcgttcggccatgcgtctgggctgaaaacgagaactccccgaagtcctgggagggggtctcctcagccgagcctcgcaccccctcgcggcctagccgtggccggtcggcaccctaccgcgcccagctccggctggcgctgttggctgcctggccggccatgaatcccacgaaccatcgagtttttgaacgcaagttgcgcccgaagccttctggcggagggcacgtctgcctgggcgtcacgccaaaagacactcccaacaccccccgcggggcgagggacgtggcgtctggccccccgcgccgcagggcgagcgtcccggcgcgcggccggccattcggccctaaggacccatcgagcgaccgagcttgccctcggaccgcgaccccagaggcgtcctcagcgacggaccgggcccaagttctctggaaagggacgcctgggagggtgagagccccgtccggcccggaccctgtcgcaccacgaggcgccgtcaacgagtcggattgtttgggaatgcagcccaaatcgggcggtaaactccgtccaaggctaaatacaggcgagagaccgatagcgaacaagtaccgcgagggaaagatgaaaaggactttgaaaagagagtcaaagagtgcttga

SEQ ID NO: 42412 - DNA, 657 bp, Zea mays
  Peptide Sequence Number=SeqID_85787
aatcccgcgaaccatcgagtttttgaacgcaagttgcgcccgaagccttctggcggagggcacgtctgcctgggcgtcacgccaaaagacactcccaacacccccccgcggggcgagggacgtggcgtctggccccccgcgccgcagggcgagaggcgtcctcagcgacggaccgggcccaagttctctggaaagggacgcctgggagggcgagagaccgatagcgaacaagtactgcgagggaaagatgaaaaggactttgaaaagagagtcaaagagtgcttgaaattgccgggagggaagcagatgggggctggcgacgcgcaccggccgtatgcggaacggctcctgctggtccgccgaacggctcggggcgtggaccgtttgtcgcccgcgccggcggccaaagcccgggggccctatgcgcccccggcagccgtcgtcggcacggacgggttcgagttggagcacgcctgtcgggacccgaaagatggtgaactatgcctgagcggggcgaagccagaggaaactctggtggaggctcgaagcgatactgacgatagctggagcccacacgagttctatcgggtaaagccaatgattagaggcatcgggggcgcaacgccctcgacctattctcaaactttaactaggtag

SEQ ID NO: 42413 - DNA, 828 bp, Zea mays
  Peptide Sequence Number=SeqID_85788
atggcgaacgggccaaaaacggattttcggccacagccgcgaaaacgggcacgtggaagggcacgggaccctcccgtggtccccccgcgtgagacgtggaagttcgggtccacccgtgagggaaaacgggtcacgctagcgaaacccctgattctgagcaaaaacactgtgtccagccatcttagatgggtttcgtggggtcctgggaaaatgccctggttttctaaaggcagaactccccgaagtcctgggagggggtatgcccctcagccacgaccggctatggctggctaccgccggccagacgccctggacgagtggctgcacagtgggatggcccgttgctcgatgcgttttccgtttctcccgcgctcggtggaccttcggtcgccgtcctcgcaagcagacccgccgcacccagcgcggagggatgctttggatggctcgaccgtagcggctacgctggcgcatgagttgtcttggacccgtgactgcttggaggaccccgctgccgtgcggccgactcccggcgcccgtgtcccatcgctcgtgcgggcatcctatgcctgctgcgttgagaagtgcttgcgtgctgctacccgtcccacgggaagccgtgctcgatacacgttgccttcgtcgagctcaccccccggggtgcggctcgtcggctcgagagcgcccgcggcgtttgcctcgtgccgccatcggcctatggccggcggcaccgaggacacctcgctggcgcttttggtctcggatgtggctcacgctgaaggccggagacgcgttggcgtcacgcgcccaagaatcggtccgcccgaatga

SEQ ID NO: 42414 - DNA, 525 bp, Zea mays
  Peptide Sequence Number=SeqID_85789
atgaagaacgtagcaaaatgcgatacctggtgtgaattgcagaatcccgcgaaccatcgagtttttgaacgcaagttgcgcccgaagccttctggcggaggcgtcccagcgcgcggccggccattcggccctaaggacccatcgagcgaccgagcttgccctcggaccgcgaccccagaggcgtcctcagcgacggaccgggcccaagttctctggaaagggacgcctgggagggtgagagccccgtccggcccggaccctgtcgcaccacgaggcgccgtcaacgagtcgggttgtttgggaatgcagcccaaatcaggcgggttcgagttggagcacgcctgtcgggacccgaaagatggtgaactatgcctgagcggggcgaagccagaggaaactctggtggaggctcgaagcgatactgacgatagctggagcccacacgagttctatcgggtaaagccaatgattagaggcatcaggggcgcaacgccctcgacctattctcaaactttaaataggtag

SEQ ID NO: 42415 - DNA, 579 bp, Zea mays
  Peptide Sequence Number=SeqID_85790
atggcgaatgggccaaaaacggattttcggccacggccgcgaaaacgggcacgtggaagggcacgtgactctcccgtggtccccccgcgtgagacatggaagttcgggtccacccgtgagggaaaacgggtcacgctagcgaaacccctgattctgagcaaaaacgctgtgtccagccatcttagatgggtttcgtggggtcctgggaaaatgccctggttttctgaaggcagaactccccgaagtcctgggagggggtatgcccctcagccacgaccggctatggctggctaccgccggccagacgccctggacgagtggctgcacagtgggatggcccgttgctcgatgcattttccgtttctcccacgctcggtggaccttcggtcgccgtcctcgcaagcagacccgccgcgcccagcgcggagggatgctttggatggctcgaccgtagcggctacgctggcgcatgagttgtcttggacccgtgactgcttggaggacccccgctgccgtgcggccgactcccggcgcccgtgtcccatcgctcgtgcgggcatcctatgcctgctgcgttga

SEQ ID NO: 42416 - DNA, 957 bp, Zea mays
  Peptide Sequence Number=SeqID_85791
atggagagtcatgatctctgggcagtaagggaatcacggcttgtgggtggcaacgagattgatggttctggttatgactttggtgctggtaagtggtattctttccgtttggaaaggatggctcgtcttagacacactgcacaaaagtccgtcatccccttcttaccctcccgtcttgctgagcgcccgcttcgccgtcccgtggccgcctctagagtagctactggaggagacccagacgacggaggtggcgacgacagctcgagccacgacaccgacttttcagctgaccaggagccggaaggatgggttgctcgacccatcactcgcgacgctgctcgcgggtgtcacttccatgatgcgctcgacaccctgctacatcgggcacttaaccggcgtacttggtctatcgagtattgctgtgtggtctaccagcatagtcgcggggtctacccggaccgctgggtggcgacctgcttggtgcgccgtccggagaacagtctccagggtgcggaggcctgcttagagcactattctatctctgagcgggactcagctgaggcggccatgcaagatgccgcacggcgtgcgctttcgcactactgctcggttctcggtggggtagctgacagtctcaaactgaagtattacccccgccgtccatctggcagcataggaggcgtgattgtctcacctgttggtgaggacaatcctaggttgagcagcacagtcaacctagccgccgtgctaaacacggagctggaccatgcactggacgagctgagtagggctcatgctgagatcgccctgctgcgagctgagcgcgcgaaacgtcgtcacctggatgatggttcccccgctcccgtcgggactcagcactcgtaccgctcacctcggcgtggacgccagtcttatggcaatcccgactgcaagaccaagataaatctagaaccatag

SEQ ID NO: 42417 - DNA, 1317 bp, Zea mays
  Peptide Sequence Number=SeqID_85792
atgccatgtataaagtaccttttcgagggacatatctttgtgttgcttaaccttcgaagaaccttcgtgccaccttgtgttaaggaaccgaagtgggtcaagattcgagtaccaataggaagcagcatatccattcccccaaattcccacacaagaacaacccaaggaggagggtcctcccctccaagattcaagcttctctcttggtttcctccgcagttgcgattctgcggagcgctgaatactacggtaatggattccaagaagatgtatgtttgctccctgcctttgatgccatacgtcgtcttcggattcgtcggctcccaactgccgtcagctcccaactggcagtcctataaagtggatgatccgaatgcgccgagaatgattcttctcgttattttgtacatctacgtcatcttgctggctaaaattaagaacgacaggatctacatcgagacggcaactgccgtggtgatatcttacgtgtcgctacttcaaatcagctggagctacatctggctcgttcccttccccattgtcgcgatcggcttcatcgttgctctgtgcaaggagctcagtcacgaggacgaggccggtggatcacattcacaggagcagagcaatgaaggtgaaggcgaagctactacgtcttcatgggaaaaggtagaggggctggcggcagtaacggtggtgccgtactgggcgcttctcatcatgggcctcttccatcctgacaagttcgccgtctcccagttcctcctcttcttcagtttcatgctgggggcactgaccatgatgatgactcggctggtggagacggggcgggccattgcccaccgcggcatcgtgccggcgtccgagctgctttggaaagcctcgctcgtggtgctgctggtggcggtgcacgcagtggcggcagagctgctgggagagaacgcgttactcctgtgcatgccggaaatcctgccggtgctgctgtggctcagcgttcgccttgacactgctgacgacaggatcaagctggtcctggacagtaatctgctccccgcagcactacctgcagtcctcgccatgctagcgaagggcgagcccctgctctactggtgcagaaaggcgttggtgtcttgtgttgtttcggcgcttcttaccttctacgtttatttcatgctgtgccagtggccgggaggacaacgcgatcgcacgctcacaggttcctctttgcagcacgcgctcatccatctcaagtcttgggcaaaggttttgctcaaagcggtggctgtgctgctaatatttgtatgcattctttccaactag

SEQ ID NO: 42418 - DNA, 279 bp, Zea mays
  Peptide Sequence Number=SeqID_85793
atgaagaatgccaaagaacaacgtgttgctgaggtgcccttgacaccttcgttagatgtgccagagacaagggtcgaagagtttgtttcaaaaatagaggctaccgcttctcaggccgaagccaactctgtgaatcggttcgaggatagtgacaatattgacattgaagaagatagcactaccatacgtccgacgaagctaagccatgtggacttcagcaaatcaaaaatcaaaggaggacattgttgggggcctgcttcatcgccgaaggtccgctaa

SEQ ID NO: 42419 - DNA, 405 bp, Zea mays
  Peptide Sequence Number=SeqID_85794
atgagaaagagcaagaagggtggtagttcttcgcatcactctggtgataagcggaagcgtgagccgactcctccctcggaggacttcggcgactcggagtactcggaggaggagttctcctccgagtcagagggctcaccggtccatgcctctcccccggcgtcgtctgatgactcagacgactcccaggggatcgtcgcagaggtgtggacctacatccgggccgtcgagcgcgccgggctcgagggctcggatgagtcggagtactcctcagactcgtccgaggagggcggcggcggtgatggcggtgacagcgacgacaacggaggcgatggtgacggcggcggtgacggcggcgaaggcagcaagggcagcagcaggggcagcaataaggccagtggctag

SEQ ID NO: 42420 - DNA, 834 bp, Zea mays
  Peptide Sequence Number=SeqID_85795
atgggatccactttagtaagcatttctgcaaaaacagagtctttgaatattgaaaagccttaccttgactcccatataaccagcataaccttgagagtcttttctttagtcgggtggttccaaaagaagaacaacaagactgaagtgcgggaggactcggtcctccacttaggatcttttgcttttgtcttctcgggaggagtttgtgcctccccgaatcttactaataacattttccccttagaaaagatgccaccacgtaccaggctaacggcacgcaagtccacgggaccaattggggtgcctcggcatcaattggctccccgacatgaaagcagcagcagtggaagtaacgaccctatcggagaccttgaagctcgtgtgagtcgacttcaggcagcgcttcaacataggactgatgcttgggtcgctgacggtgatagaatcaacgaactacgaagggacatccgacacttgcaggatcaactcgctgatcgagacttagcacttgactgggtcgtacagtctcgtttgctaatgtgtggtaaggaagcaagggctcaggcccgaattaaagaacttagctcgactgtcgatgacctgcaggtttactgcaatacgttgcacgaggaagtccatgtattatactcacaactacacccaagtgagcctgcaccacctgctgaggcagaagctggaccatctcacgttgcgggacgtgcgctgggtggggagttagacctttttgagcctcctccttccttgaggttggttgatgtctggactcccacacctgacgatgaagccgccaagactgatggcaagcaggaataa

SEQ ID NO: 42421 - DNA, 687 bp, Zea mays
  Peptide Sequence Number=SeqID_85796
atgttcgtcggccggccgacgaaaatacggcacttattttcgtcggccgctgaggccgacgaaaatacagcgaccctaatcccgcggacgctcgattcgaatccgttttgcccaaactcaccgcggacgctcgcccgctcctcaccgccgctcgccgcagcccgccgtctgccgccctcgccactcccgctcctcaccggctcgccgcgggcacgcccgcccgttcgccgctcctccccgcgcccgctcctcaccggctcgccgcgggcacgcccgccgtttgccgcccctcgccgcgcccgctcttcaccgccgcatgccgcacgcccacgcccgctcctcaccgctgcacgcccgccgtccaccgcccctcaccgtgggcacgcccgccgtccgccgctcctcgtcgcgcccgcttctcaccgctgcccgctcctaaccatgcgcccgctcctcgtcgccgcccactcctcaccgcgcgcccgctcctcaccgccgcccgcacgcccgccgtccgagatgccgattccaacctcccgcatccgtcgaattcgaacccgcctaggctccagacacgcgccgtcgacgtcctcccacgtcctttccgagttttattttttatcgttaaccgtagcgaaccgtatgcgtcacccgttcgtgaacgacgaacgtcacattggcttgtga

SEQ ID NO: 42422 - DNA, 609 bp, Zea mays
  Peptide Sequence Number=SeqID_85797
atgtcatttgatggggtgcctcctaggccttatatactcgaccgtggggcattacatgcggaaattaatgtttggttaccagcttatgctttagagatcagcatcttgcccttaagggttgaggattcattgaacgatatcgatctgcacgccaacgacatgaacttcgtggcgatcgccgaaaacggcaaactggtgggctttaacctgttggtgggcggtgggctttccatcgaacacggcaacaagaaaacctacgcccgcaccgcgagtgagtttggctatctgccgctggagcatacgctggcggtggccgaagccgtcgtgacaactcagcgtgactggggtaaccgaaccgatcgtaaaaatgccaaaaccaaatacacgctggagcgcgtgggggttgagacgtttaaagcggaagtggagcgtcgcgcggggatcaaatttgaaccgatccgtccatatgagttcaccggacgaggcgatcgtattggctgggttaagggcattgatgataactggcacctgacgctgtttatcgaaaatggtcgcatccttgattatccgggggcgtccgctgaaaaccggccctgctggaaatcctaa

SEQ ID NO: 42423 - DNA, 950 bp, Zea mays
  Peptide Sequence Number=SeqID_85798
aggcggagggcccattatggcatattatggcccaagccataccaaaaaaagatccggcccagcttctaaaccctaatcagtcagccgcccgagcgcttgagccgtctgccatcccgcacgtccaccgccgagtgccgaggcccgagccaacggtcccagcaccgcggcaccgtctgcgcctctgggctctggcgattgtccgccgtccgctcggcccgaggccccgagccgcgccggcgcgccgcggctacggttctccggccaccgtccgcccgtccggcgagcgcccgagggcccgagcagcggagcgggcgagcagctccgcgcctccgcccgccgtccgctcgggctcggaccgagcctctccaccgactccgcgcctccgctgctcactgctcaggcgctccgcccgccgtccgccgtccgctcgggcttggagcctcggaccgagccgctccgcgactctggcgcgccgtccgccgttcgcccgacggcccgagaaggcgagcaggagcagctccgcacctcagcccgccgtccgctcggccgaagcacgcgccgttgcccctgtgcctccgttcgccggtcgagccgctgtccgcctgtccctgtccctccgtccgccgagctgctgtgccttccggcttcaccgtccgccgagcagatccgtccgcgagcgcgacacgccgaccgccgagcttccgccgtccgccgagtcatacctaaatttttttcggtcctccgccactgtgtgtggcctcatcagctgggaactccgtgagcagagcggaggcgagcgttggagctccggctgtgtcgctcgaggtcatggccgatttggtctccaatctaatccacggctggcaacgggtggccctggccacattcttcttatggcggggttccttcgggaagaagatacaaccgtattgtgggacgtacaagtttag

SEQ ID NO: 42424 - DNA, 1278 bp, Zea mays
  Peptide Sequence Number=SeqID_85799
atgaaggttataccttcgtggatcttcggctatgaagcatacccccaacagctgacagcagtcgagtccagccccaggcgccacaggaagctctgcctcgctcgaccttgggcctcggcctcgggagaagtctccgccttgcccgaccccagggctcggccccctcctcggccttggaaggtgatctccgcctcgcccgaccccagggctcgacctcgacctcgacctcggaaggtggtctccgcctcgcccgaccccagggctcggcctcaacctcgacctcgggaggaatcgcgtcctcgcccgaccccggcctcggcctcaggaggagtcttcgcctcgcccgaccttgggctcgaaccgaccacgccacaggaggtacatcattaccctacccctagccagctcaggctaagggggaacaagaccggcgtcccatccaggctcgccccggtaacaagtaatgatggctccccgcgtgcgtccatgacgacggtggctctcagccccttacggaagcaaggagacgtcagcaaggtcccgacaaccccgacagctgtgcttctacagggctcaaacgctcctccgacggccacgacaccatggcgacatggtgaacacaaccgtgggcatcacgccggcgcgggagcaccagagggcgcagaccgcgacggaaaggtcccgcagcggcgcaaacttactccggtgagcaattgcgcgacgaccaggacaataaacggaaaaataaaggtgcgggtaggttgcttaccacaagcgcaaacccaggagcgcctggaggacggcggggaggcggtgaagtcccgggtcgacggcggcggactccggctgcatgggaaacactctggtgagtgtggactgggcaaaccagaggggctgggggcaaaccgaggggtgtcccgagttgctgacggcgaggcggaactcaccggggcaacggaggcgacgtggactcaacggcgatcacagaacggcggcggtctttgggggaagtgggcgagcgagacacgaggtctaaaggggcaagggcgtgaggaagtggccgaagaacgtgcagtcatgggcgcgtccacggtgggggaacgtgggcgagaggttagggatgtggagggggctgacgggtgggggtgttacaagtgcctcctagaacaggaaaccaaccaatcacgcgattctttgcccacgctctattcactgtccggtgcattcgcggacagaaggcaaccaaagcctaccaaatggagctccaacggctcctag

SEQ ID NO: 42425 - DNA, 675 bp, Zea mays
  Peptide Sequence Number=SeqID_85800
atggagtcttggttacctgcaaagagagaccctgcagcggcagatccattcagcaccaggattcaggaatctttctacaaagcacaattgttagctcagattgctctacgagcgcaccagcttttggatctccctgccttcctactagccgccggtgccgactctgaggttcacctctcctatctgcctggacttctcactcttttgactaccagcggcagatatgttgaggaatggctgattcggccccctcagttccagggtactcttgaggactctcgcctcatctttgggtcgtaccgtctagctccagaggatcctgtgccggcacctgctccagtgattgatactcaggccgaggataccacttttcaccagtttgagactcaggacgcagcagtccatgatgatgatgataatgatgatgatgatgatgatgatgatgactttggggttccacctcctcctccgcctcctatgcctccatgcactcatgatcatgaggctgggagttccagtgctgctgcccctcctgccattgaccctgctcttgcggcgatcctccagactctcactcagcagcaggctcacttggcagcggtccagcagcagatgtccgagagaatgctctcgatgtttcagaagattcgggacaggcaggatactttgcagtag

SEQ ID NO: 42426 - DNA, 213 bp, Zea mays
  Peptide Sequence Number=SeqID_85801
atgggaaagacagaaacaatattgaattacaaatgtaccttcggcttgatagaaggagaaatgtctcaagacaaggaggttgctgctgagacgaagctgactgaagaggagaagctttttaaggagaagaaggctgtgaatccttacattgctggatttatcgagtcaatggcaaaaacaaatacagagaagattactaaggagatactgtag

SEQ ID NO: 42427 - DNA, 642 bp, Zea mays
  Peptide Sequence Number=SeqID_85802
atggaaaaagagccacttgacatggttgagagctcagttcgagtcatcgagacacatgttgacatcattcgcagtctagtgactgatggggttgtggatactagtgaaccggaatcagtgtacacacttaagaccactttgtttcaaattggagatgtatgcgacatgcttgagaagtgtgctctgtccatcaaaaagtatgctgactccaagagggctaaaattattcaagatgaagccctgcaatatgctgaagatgatgaagctgcagatgatttggaggaactcccaagcccagatctccttactcaagccgacatattgggaaaatgttttggaattgaaatagcatgggctgaatgcttaaatcgggtcgggaagcacgaagcagatagaagtgcactttccaatgcagttagacagagaaggcatggttgtgatgttataatgctgaaggacaccaagaagagattatggtctgtcatccaccaccactgcccgttatttgtgggcttcaccgagggctggaaacatttggtgacagcaaacgaccttcgggctagggacgtctgcgagcttgttaaggggccagacgatggtgacccggtgtactatgtccggatgtgtggtcacaaaatttaa

SEQ ID NO: 42428 - DNA, 429 bp, Zea mays
  Peptide Sequence Number=SeqID_85803
atggcgagagtagcttgtaccatccatggcaagaggctggacggtggtgtatctgtgctctcgattggcgtgaaccctgtttgggttgtccaaggtccgctggaccaggacaactacgtcggacgatccaccgctcagcctgtgcgagcggcatggcggttcgccttcccccctgcagcactatataaacagacagaggggcctgttgccgaaggtactttgactgctgaggctgaacaaatcacagttggagggagtgagaacgaagatgaaggggattacactattttgagcccagcgaaacccagtcacattgaatttggtaaatctactgtgacaacagacgatacggttatgatgaagaaattgggctacttttgggaggctgagagtaaacttttcgttttgctggcgaggagtgattcctga

SEQ ID NO: 42429 - DNA, 177 bp, Zea mays
  Peptide Sequence Number=SeqID_85804
atggcgcctgggagtttggcttgctccaccgcttctgtgcctgaccggctggtgccggggcggccgaattacttcaatcgtgaagctggcggactgcaagggcgtggcgctttcgttagggtctgcgcggacggcgggtcatcgctcgacgtcgacggtgctcagctcaggagatag

SEQ ID NO: 42430 - DNA, 279 bp, Zea mays
  Peptide Sequence Number=SeqID_85805
atggagctcgcccgcgatgcccgccgttctgcatacttgtggtccctgctcgccctctcctgcattgctcacccaaatccgtggagcactggatgtccggccgttacatccctggttgcactctatacctgtcaagcgctcgacaaattacctgaatcggagaaccattaccgatctcgtgaattcgagtcagctattggaatgttagcacaatgtatcaatgagtttatgtcgactgtgattaaatgggttctaaaagtgcggagtgtggtgtattag

SEQ ID NO: 42431 - DNA, 228 bp, Zea mays
  Peptide Sequence Number=SeqID_85806
atggagatgggcagagacgagcgccatgagagaggtggagaagacgacctggcgaccggcaccatggcacagggcaaggccgagctgggaccggcgcgcgcagggagcaccgagattgaggaagcggctgccaggcgcgcggctaaagggcatgtaaccctgtccatatcagcgataattaaggcagttccaagcaaaggcgagtgtctcaggatggggtttctctag

SEQ ID NO: 42432 - DNA, 225 bp, Zea mays
  Peptide Sequence Number=SeqID_85807
atgggttccccaagagggcgcacgctccagggcgagcggctcacggccggcgtggtggagtccgaggcgagcaccggtatgaaagagagggcgcacgatccacggagagcgcgaatgtcggagcaaggcgcgactttggattggcgtcctgacatgagaagagagagggaggaggcgacgtgggagagacggttggggaagatgaacatggagaaggcggactag

SEQ ID NO: 42433 - DNA, 393 bp, Zea mays
  Peptide Sequence Number=SeqID_85808
atggtctcccattccggttatggtgggtacaagtgcggtcactgcacgacggcagtcggggtcagtgaggcattgtacgccaaggcgggtgaggatgaccttggagcctcatcccttgcagccaggctggcgttcgttggactccgagtctttcggataccgggcattgctctccacgagctgacgaccttttgtggctttcaccccttggagctgtccactcatcctattggcttgttccccgctgaaaaggaggacgatccaatgtggaaggatcgagtggagcatgccaaggatctgatgggcctggtggaggctaccaagatcaccttggataacagggaggacctggtggtagacctgtccactgagctggtggagaaagacctctag

SEQ ID NO: 42434 - DNA, 540 bp, Zea mays
  Peptide Sequence Number=SeqID_85809
atgaggatgatccgcaagattaatctaatgggtgtgcccctacaggtagaggatcttctatttaacattgacatgaaaaagggccacttcagggatagctgtccaactatggtcgaacccaaaaaggagaggagcaaaggcaaggcactaacaagtgtcaaaacttgggatgattcttcaagcgaagatgaacctccaaggacgcgcaaccaccgatcctcatcacgctcatcacgcaagtgccttatggcaaaacgtaaaatgagtattccatcctctagtgatgaaagcagtagtgatgacgaaggtgagggaaagccctccgtagatgagcttgcggaagccgtccaattttttcaagatgtgcaatgcaccttgccgccggcgacccccgcgcctgaattcacgctggcgatgcgattcgtgcccactggtgcccggataacgtcttggggtgaaaagatcttcaccgcggatgagcttgagacactgttccgccccgatcgctgtgtccgcttgactcacggccgattcagataa

SEQ ID NO: 42435 - DNA, 261 bp, Zea mays
  Peptide Sequence Number=SeqID_85810
atgggcgccaaatgttggaacctgccctccaagacaggtcgatccaacgggaaagtagggagagagtttgcaaagcataacatggtactcgaggggccgcttgcccctgtcaaagacattttgaccctcgagtacctggtttatcgccagaatattcccatgatggtgaagaagcaacaaacttctgttgcttctgttcaaaggtggtacccaaagataaacaccaagactagagctccgggagggaaggccctccgttaa

SEQ ID NO: 42436 - DNA, 591 bp, Zea mays
  Peptide Sequence Number=SeqID_85811
atggccgccaaaagagcaacttcgaaggctgttgtatccattaacgacgcggcgaaggtagcactactggcggaaaagaaaggcaaggccctcgcagacaccaccccccaagaggccttcgaagatgacacggtcaacagcaagagacagcgccaggaccatcccacccccaacggcaccgtacacacttgcagttctgagggtgcaccacaagcaccaccaccaggcttcgctccgccagagggcgaagacaccatagaggatggcaaaatcatcagcatctcagccgaagaccagttaaagttgcgcgcgctgcgcatcaaaaacaaccacctgcggaagcagaaagagatcctcgaagccaagcgccaacgagtcaccatgcaaaccaaggtgcatcagatgatacaagatgaggagcagagagctcgagagctagagcaagagatcacgctcatacaaggcgaaggccaatacaacctacagcgcgaacccctcgcaccgccagtgcctctccaacagtacattcaagccggagacccattccaaccacagcgcgaccccttcattccaccagccgtcgctttctag

SEQ ID NO: 42437 - DNA, 465 bp, Zea mays
  Peptide Sequence Number=SeqID_85812
atgtcgtctgcgtgtggagcactgcacaagtcaacgtcactggcatcgaaagtgagagaggatttgggtgatgcggaggcggcggtggtagaacctgcacctcttgatggcgctggtaagcatggttgggtggatgctggatttgttcattgtggtagggttgctggtgatgtcttcgccgtgaaacaagcaatagaatctgtgcggctgttgtgtccgtctgcggcctcttcctcttgcgccattgccacgaccttggggggtattcctgacgacgataggctctccggctgggtgctgattggctatggtgtgcacatgctgatggttgcaattgttccggccagagtctggttgcgccgacctagtcctggttctgctggactgcggagggtccttgggatttctctaagattcaaccttgcattgatggagctcctcagacctggcatacttctcaaataa

SEQ ID NO: 42438 - DNA, 1395 bp, Zea mays
  Peptide Sequence Number=SeqID_85813
atggagaaggatcgtcaagacgtggcacggaaacgtcgggcattcgccagggtgggggacccgaggcgtgaagtgaaaatggcgcgggcgagcgtgaagcctaccgctcccggcgccagcatgtctccgcctggcgcgcccggcgccaccatgccactgcctaccgcgcccacacatgagcgaaggcctccctcgccaccgcacgctgctgaggcagcggtggcgggcgccgaagtctccatggatatttctgtggacgactaccttgtgggcggagtcgcgatgttcgacgcccacacaggacggggtcctgctacggcggtgacggctggtccgatggccgtggcaaccatggttaagtggtcttcacaggacccatggttcaagttctgcgccagcgacaaaattgcctctactgccgctgcgaaggacgtggccacatcagttgcacagcagctgaaacatcgcttccgaacgcaacatacggaggctgtccgagacaaatcggcggcagaaaataggagccgcaatctgcttgaaaagctgtcggcggtggaggctgataaagaggacctcggccatcggcttatggcagaaagggaggacgtggaaaagtcctacgccgaggcccaagcagcccacgccgaggccagccttgccctcaagcgcgccaccgacgtggagtcagggcagagaaacctgcacggccatctagacaaaacagaggcctccacccgcgctggggttgatcgagtgcacgcgttgctcatggacgcgtaccaccagcttggtgcccgaaccgcccccttcgacacatccgacgaaggggtgggcctttgcttcctcaggcattttgaagtctttgatcgggcaaccgaggacttcgaccattgcatcttccaggtcgaagatgaggtgctaaagtggtcttctggggcgctttacgaccggatgtggggccctcatggccgtgacactgtccgggagaggtccggtcgggcgctggagcagatgatgaacgatgaagaagtcgaagacttcaatgccctggaaagctcggtgacccgggcagaagatgcaaggacgggggctgaagagcaaccggcgccacaagccgaccctagcgaagaccctgtagaggaggctatgccggctggcagagaccctgcaacggtagctgcgccgactggcgaagaccctccagtggcggctgctccttcgcaggtggtggggtcgttgcctgttagtggaaattcgtctggttttgaagctgagtcttggtcatcagatggggctaattttgggagcccgttatcatggattgaagagtcttcagataaatatttagattattttgctgtgttggatgtggccgcggtggagtccttgccgtag

SEQ ID NO: 42439 - DNA, 405 bp, Zea mays
  Peptide Sequence Number=SeqID_85814
atggtggcacttgtgaaatatgtctgggcagttacttcctacagcgggcagccatctgtggagttgaaccgtctgccgtatgccggctacccaggggacgatgatgccgatgttgctgtccgccaggggaaaaaggtgatgacaacggccgacaagggcccttcacggggaacaacgccgagcgcggtcgccaagaagaggaaattaggtacaacagttgaggggtcgagggctttcgatcgtattgttgtggatttgttggagacctacgcggttcccggggagacgatgtctttgcccgagcttcgggaatcttccgcgagaatgctgaaggttaccgggggtcgctggcctagcaatgttccgattccccgggtggccgacaagtacatgtttacatattga

SEQ ID NO: 42440 - DNA, 3029 bp, Zea mays
  Peptide Sequence Number=SeqID_85815
atgagtgctgaaaagaaaaatgaattgaagaagcgtcgtgagtcacgaaaaaagggaaatgttatgcaccatgagtattcagaagtttgcaacatccctgcaaacaaggacaacaataatcatcaaaacaatgaaattgaggatgttgatgatgattcttatcagttgcataagaataactcatttgaggacttaatcggcattgaggacccgaagtttacaccggagcttgtgtggagttcaacagatgctgaagcacctcatgggtctctatgtagctccgagggcatggctatccctaagttaagtccaacacctttcgttcctaatccatcacagactgaggatgtcgagaaagacagtatgacagagtctcctagacggcaaagacataaacgtcatgtgtcgtccggccaaagacagaccctggtgtctcgtcaaaatcagaaatttcatttagccattggaacaaacttcgctactgcaactagggatcgtgtaatggagaatgatgtggataatgaaattgatcatcagactgtttcagagatcgacaacaatgaggatgatgatgaagctgtactttttgaagatgacgaagacgaaggatacctattcgctgggcaagatggtgaatctggtgaggatatcgatattgatgaaacacaagatgcctttactgttatccctgacatacctgacccgtacgacaaggtgtatagtatcatacctgaagaaacatatttgttgaacactgttgctgattgcgactactgtaaggcaaagaagtttcaatatgaaccacctggattttgttgtcgtaatggacagattgatctagccccattcgagacaccatctcagcataggaggctgtgggagtgtgcagatgctgatgcgaggcacttctatgataacattcgattttttaacggccatttctcgttcacttctctatattgttgccttgacaatatgactactaatatggatcgtgggaagctggggggggaacagaagcaccttgagctttacttctacgatgatgatcccagcctcgagcatagatatcgtaaatgtcgtcaagagcaacttgataaagacaaggcagttattaaacatttagttgagatacttaagggaaacccatactctgagcaccttaggagtatggggcacgttgataacattgaagactaccatattgccttgaaccttgatcaaacattgaaccagaagttatataatgcaaccatcacttcggaggtcgctgcagtttggattgaggggagtgaacgtcgaggtcaattcaataatagtgttatgctgcatgggaaggataggtcaagccatggcatccgttcatatcatggatgctatgatgcactatcatacccattgttctttcccaaaggtgaacttggatggcatgcaaatattccgaagtccaatgtttccatggatgaagtagaggcgtatcgtgaccaacacaggacaagggatgcaaatgatgacgatacaggtatattcaatccaatacttcatgggaagcgtcttttccaacagttcgctgtcgacagctacatcaaggttgagagctctcgtttggatttcatacgtagaaaccaagacagattaagggcagatctatacaaggaccttgttgttcgcatattccgtgcgaaactagaggaattgaagaagagattgactaagcaacatattcttggaaagatccatgcttatgtctatgtcgtggagttccagaagcgaggtttgccccatgcccattttctactcatcatgcagagaaagtacaagctaacatgtcctgaccagtatgatctactgatctccgctgagatccctgataagaagaagtacccgcagctgtacaagatggttatcaagcatatgatgcatggaccgcgtcgtgatgatgggcgtaaggaaacggttcgatgttgtgaattggacaacagatgggtcatcccttacaacccttacctcctctggctcttcaactgtcacatcaatgttgaggcgtgcgagagcatcaaggttgtcaaatacttgttcaaatacatatacaaaggccatgatcgtgcgtttgtggctgtgacagatgcaaacaaggctgatggtgacgttgatgagatcaagcagtatagagatgctaggtgggtgacccctccagaagccctctggaggatattcagctttgatctaagtcaaaactctccaccagtgatgcaactgcagctccatcttgaaaacatgcacatggtgtcatgtcacgagcgtgctaaagtaaatcatgttgtccaacgtccaggtgccgataggtcaatgcttacggcatattttgaggcaaataggctgcacgaggaggctcggggcatcctttaccgggattttctgagtggtacactttgcaacagggaaaagtgtggcaaaggaaggaaacgaaacacgggtggacaggttggtagaatagtctctgctcatccagctgagggggagcgcttttatcttcgacttctcttaaaccatgtgacgggtgctacctcctatgcggatctaaggacagtagatggtgacacactaccatcttttcgtgaggcagcacaaaggaggggattgcttgaagcagacaacacaatagatgagtgtctcaacgaagccgctatttaccaaatgccatcagcactacgaaggttgtttgcaacaatactggtatactgtgagccgaacgatgtggcagaattatggcagagacaccttgactcaatgtcagaggactatcaccgtagtactcaaagcaaaacccatgtgcagcagatggtcttgattgacattagaaacattttgcagtcaatgggtaaagacataaatacattccctctccctgctatcatcgacatatatgacgattcacatggtactgatagagagatttacgaggaggaatgtatcgagccgacgatagaagatgttgctatgaaagaaaccctaaacgaggagcagag

SEQ ID NO: 42441 - DNA, 606 bp, Zea mays
  Peptide Sequence Number=SeqID_85816
atggaggcatcctccgcggggatgaattcatcattcaagcagggtacctctgccagccagcatacccttgagagtcttttctttagtcggccatctgaggtcattaaggcaaggattggtgcatgtgggcctgataacttgggagggctgtcacagaccccagggttcggcccccgtctcggcctcggaagatggacttcgcctcgcccgaccctagggctcggactcaaccacgacttagaagacgacgaactccgcctcgcccgaccccagggctcggactcagcctcggctccggaagatgatggactccgcctcgcccgaccccagggctcggactcagcctcggctccggaagatgatggattccgcctcgcccaaccccagggctcagactcagcctcggctccggaagacgatggactccgcctcgcccgaccccaaggctcagactcaacctcgacctcggaggaatcgcaaccttgcccaaactcgggtctggaccggccacgtcgccagggggccatcattaccctgcccctagctagctcaggctatggggaacaagaccgacatcccatctggctcgccccagtaaacaagtaa

SEQ ID NO: 42442 - DNA, 267 bp, Zea mays
  Peptide Sequence Number=SeqID_85817
atggtcagagtaggtcggtccacgtgcgcaggcgggcgagctcatccacggcgaggacaccagcctatccagggcggtatagttcaattgaatgggtcagagagcttcactagaggtcagggaagacataggcgcgaggaattggaaaatggctcaccagatatctcggttcacgggtggtggcgggtgatcgaagtccggcttatgggtttcgctgactggatcaagagatatggaggggtgaagttgggtttgactcactgctga

SEQ ID NO: 42443 - DNA, 858 bp, Zea mays
  Peptide Sequence Number=SeqID_85818
atggcgggcaaccaatttcaacagcatgggggaagagttcctcctcaaggactgcgtgacactacctatctggagttctcggagacccgcccaccgctcttcgtcaaggcggaggaacccttagaagccaatgaatggcaatccaacctggtggacatcaggttacctaggaagaatcaagttggcattctaggaacattatgttccggagggactactcgagatgaaactagaagagttcctccgactgaagcaaggggggatactgtgatgcagtatctcaataaattcaaccatctctcccagtacgccattaagcatgtggatacggatctaaaaaacaagaattgttttatgagggggtcaaatgacagacttcagcagaagatggcaacatgtttggacctcacctacagcagcgctgtcagtacaacactggcagtcgaagccataaatgcgggacatggaaagtcaaagggatatgcgggtgagaaatctactcaaggacctgaaaagagaacaaggttggtgatccgaccctttaatccaaaccattcttcacctcgtccaccttcatatccattcaaacagcccgtatttattcgtcccacatttgcccccgctcctaccaatcagccgagtgcccctggtactcgtttccctgcccttcccaattcctctagttgttgcttcaactgtggaaagtccggacatttcatcaaggactgcccatatccgaagcaaaataaatccaattttcagcaaacttctgggaactcaaatcaaggaaaggggaacacgaccaactcttctatgggcaaaaatttcaagaaaactggacgggtctattatacctag

SEQ ID NO: 42444 - DNA, 951 bp, Zea mays
  Peptide Sequence Number=SeqID_85819
atgagcgccactttcttcgcgcctcctggtgctgttgctgtgagtaggaggtcttctgtggagggcgtgggggacaaggcgaccccgcggatctgcatatgggagtcggagggcgaggctggagacattacctgcgacatcgtcgacgcgctcgaggcgtctatgcctatgctcttcaaggaagccgcggctatcgcgggtggagcaacttacatgcgatcagccagcggagtcccacgctgggcgtcggcggtggcaaccacgccgcagagtaaacgacccgggcggaccatatccaagcgacacaagaattacgagcttatgctgcagctgcaattaggcatcatgcattccgtggggaagtcttcggctgtgccgatgcgagaactggaacagggagattttgatccaagggaaaatgctttgtcctggacagagttcccaccagagggttcgaaggccacactgccgcattcaactgggtacttctgctggaaggactactgccccatggtgttcaggcatttgaggaagttgtttgctgtggatacaggggattacatgctttcgatctgtggcaatgatcctctgagggagctgtcttcgcctgggaaaagcgggagcttcttttaccttacccaagacgaccaattcatgattaagacagtgaagaaatcagaagtcaagctgctacttaagatgttaaatagctactgcaaacatgtcgatcgatacaagaactcattaatcacgaggttctatggtgtacactgtgtgaagcgccataatggacagaagattcatcgccgttttgatttgaaaggttcatcatatggacgaacagcagacaagtttgaagatgagattgatgagacaactacactcaaggacttggacctcaattttgtcttccggttgcagaaatcttggtacaccgatctccatgagtaa

SEQ ID NO: 42445 - DNA, 427 bp, Zea mays
  Peptide Sequence Number=SeqID_85820
gtgcaagctgaagggacagtggacagcagcagactacgccgagcaagaatcgtcagacgacgaagacacagctttcgacatagctgctcggcacaggtcccaaattgaggctgctccaatccttgatagagtgcaggacgttcagcctcccatgtgtgcagttggaccatctacagcaggactcagctcgtcgcgatcgacgcgggacacgtttgagaacgtggcccaggacgacgacgacgacgacgacgacgacgctggcgctggcgccgcaggtcaggtggagattggaccgtctcagttgcaggatgctcctacaactcagccatcacagctgacaccacgtagaaggcgtccacgagacccttacactccaggcaccgacgctcttggggccaagggcaaaggtaagactaggaggaaatga

SEQ ID NO: 42446 - DNA, 177 bp, Zea mays
  Peptide Sequence Number=SeqID_85821
atgacagcacggtctccacaatcgcatcgaggcggtgagtccatccgcctttctgttgctacctccttctccgcatccgtcattggtggaggattcgggggaggaggcattcgtagctcggcgccaagatctgtggcgccgagctacgaggccgcgccgccgccacgtcggagccag

SEQ ID NO: 42447 - DNA, 657 bp, Zea mays
  Peptide Sequence Number=SeqID_85822
atggctgaaaggtaccaactcctacggagttgcgttcctccaacgatgaggcgaaaagacggcggaccaacgggcgaaagaggcgggcagccatgcaggcggcatgcaaccgcgccaagtgggcacgcttctctgactcccgacacgccagcatggaggcccaggcccacgcgtcacgcaaccggcgcgccggatgctgcatgcaagcggctgcatcgccacttgcgccaccaccgcgcctcctcaattgcggaaccaataccgcggctcgaggcgaccaggcgcacgacccagcagcgccagcctgacgcggtggtcaatgcggccaaaggtgggccggcagtaatgacggtggcaggcgggcgggagcagcggacacgtcgtcagccaagctcacgtcccatccgggggcagcaagggaaccccctctcacggcgtgaagacaacgcgcctgtggtccgttcctcgaatggctcgtgcacgcgcaacggccgtcctgccaacaactcgccccgtcgcattaactccgcggagggacagacggcgcctctggcaggagaagcgggcgacgcttcgccttcgccggaccgggaaagggggataccccgaaagggatccttccccgtgaaggaaccaggctccgagcctccttactga

SEQ ID NO: 42448 - DNA, 550 bp, Zea mays
  Peptide Sequence Number=SeqID_85823
gagaagcgagcgacgcttcgccttcgccataatgaccgcgtcaaaaaagggaccgggaaagggggataccccgaaaaggatccttctccgtgaaggaaacaggccccgagcctccctactgatcagaggttcaaaggctggcccctcggaggggttcaacagccgcctcagagcgcttgggttccgcgcccactactggtcagaggttcgaaggccagcccctcggaagggttcaacagccgcctcaggccactcgggctccgcgcccactactgatcaggggttcgtaggctggccctcgaaggcctcgggcaagggcagccgaccccggaggaactacgtctcgcccgaggccccctccatcaacggacacaccttcggctcgcccaaggcccagtcttcaccaagaagcaacctttgccaaatcgccacgccaaccgaccaaatcgcaggggcatttaatgcaaagcgccgcctgcgccgctcggactgctgtgccactcggcagagtgaggctgacagcagccaagtccggcctcagacgccatag

SEQ ID NO: 42449 - DNA, 603 bp, Zea mays
  Peptide Sequence Number=SeqID_85824
atgatctgcgagagcggcacagcctacgccggccaaggggacacccgcatgggatcggacgccgacgcctcatgttggcgccgggatgatcgtggcctcgacctggtcgaggtagaatgcgccatgccgagcagtcggtcgacgtcgtcccaccactgcttcatggcccctgttgaggccgtggagcttggagggtggcagagcaactccctggctgctgacaatgctcacggagtcgccctcgacggagtccgggatgtctgcgcagctgcatgctgccgtgcagcgtgcacaacagcagtgcacgacactgggcagttgggaacctgtggtgtggaagaaacaacttattcctccacgaggaaatccattgatgtctcgacgcggaacacaatggatatagtactagagctactaatgtttgctactggagcaatcttcttgaaccatgacatccaagatctgcatagcatcggcgtgcaggggaagcttctcgatggccctgacaccgcctgtcagcggagtggacaggacgcattaaatgctgagggggcacatcgcctgtcagcagggtggacaggcggcgcgtcctcttcgcaataa

SEQ ID NO: 42450 - DNA, 411 bp, Zea mays
  Peptide Sequence Number=SeqID_85825
atggactactctgcaccagcagggtcgcgttggaagctagctccgggcagcctcaccagcgacggcgaccacctctactccgagcggctcgactcgaggcaccccgcgcatggcccaacaaagccattaagtgcggaggtcacggggaggactcagacccaacatagactctcagctctcaagcttcaacaacaatccaacacacagtggagtagggtattacgctccggcggtccgaaccactctaaactctcgcgtgtttatgtgctccgtgatcgtttagcaggacagacaaaacgcttaagcccattcctcatcttaggattaagtgcgggtgcactccgccacccggccggagaattccctctccgacagacacctataggtagtgagactttgatttctcaatag

SEQ ID NO: 42451 - DNA, 360 bp, Zea mays
  Peptide Sequence Number=SeqID_85826
atgcagagcacaacgaagctacaaaaagccattcctaagggagcgcagcccagacttcagaaaggcaacagctgtgccccgagaagctaccagggcacagaagtcaccatgtccggctataactttgtcaagatcatcaatttcaccttcaatatgctcgaaggcaccaggcaggtcttcagccgaaggagtaaatttctcgctactggctccaacaaaatagaacacctgcttcagccgttgaacgcatcaattgctgaactccagacatctattatgaaggcttgtcatgtcttcagctctgaactttttggactcggcctcaagttaacgaatcaagctgattcatcagaatactaa

SEQ ID NO: 42452 - DNA, 240 bp, Zea mays
  Peptide Sequence Number=SeqID_85827
atggcgaaacggcccaaaaaaaggattttcggccaagggccgcgaaaacggggcacgtggaagggcaacgggaaccctcccgtggtccccccgcgtgaaaacgtggaagttaaaggtgcacccgtctcctcggccgagccccgcaccccctcgcggcctagccgtggccggtcggcaccctaccgcgcccagctccggctggcgctgttggctgcctggccggccgtggttcggccgtga

SEQ ID NO: 42453 - DNA, 1560 bp, Zea mays
  Peptide Sequence Number=SeqID_85828
atggccggcgggtcttgggaccaggcgtccctcaccagcaacttcaacaccatgtcgctgacgctgccgaactccatcgagtggtatgccgactctggtgctgaagacgaagggtggacctcgccggtcgtcctgcttccgttggtccaacaagatagacgaaggctggagcgaagggtagcgtcttcgccttcgccccaatatttgccctccaacggaccagttcgacttagtcatctggtgccgaagacgtcgctagatggtggagacgctgccctcgctcgaagtggttccacgggggtttttgatgtgaccgttgacgaacgcggtactgttggactgcgggtttccccgaagcgtcgcatcctgtgtataaaagggggggtggggcggcgctggtcaggatctctttctacgcgccgcaaaaccctagcctccttttcaaccgctcgcccgctctcctgccctccttgctcctgctcgtcgaagatctggcccgcgtcaagcagaccgctcgccaacaccgacgcaacttggatattttggcagcggagtgggttgtgtcccgagggcagaggaggttcccgagctcgagggcgagttggtcgttttgaggcgtttttcaccgccggccttcgtctgcctgcacatcgctttgtggcggtggtcctgcagaggtttgaggtccaggtccaccaactgactccgaatgccgtggtggccctggcaaagtatgtctgggcggcgacctcgtatggtggtcggccttctatggaggtcttcgccaaacattactgcgaagtcgaagaccacccagggctccccatggccgtgatgtgctcccattattatgtggcgtacccgcaatttgaggtggcagaggatgatgaagacgaaggagctcttcggggcacggctcgcatgagtagggggcatgatttagttgaggaatttatcaggtttggggtgtggcccttggcacatggctgggcgctgggcgaagtatgccctcgcgagatgccctccctgggcgggcagcgggtgcgaagtccagccttcgcgttggatctgcacggccgggatcccaccgcattcgtgcgtgaagcggaagacagtgcaacgaggattgtgggggtcttcgaattgaactgcttgccatacggtggttatcccggggaggacactgccaaccgccgcgggaagaaaccggtggacgtgaccgaggtagggccttcgcaggaggctgccccggccactaagaagagaaaattaggtattgcagtgggggtgggggtctctaaaagttttgctatggatttgatggggacgtgcgcagcccttgggggaaggatgtcttcgcccgagctccgggagtcttcggcgcgaatgctggaggttaccgggggtcgatggcccaagaatgttccgatcccccgcgcggctggcaaagacttttctacgtctcgcatggctcgcgatttgaaggtttttccttacgggcggaatattgctgttcttgtgtcggaagtgatggagagggaccgtcaagacgctgcgtag

SEQ ID NO: 42454 - DNA, 387 bp, Zea mays
  Peptide Sequence Number=SeqID_85829
atgtctactccagtttcccagcaggatacgcagtttacagacacacagggtaaacatggtgacggtggcaagaacatgccgaccaacacaaatgtcactcctaaagcaacaccacatatggaacctgacgcgccgatatttgatgcgactccgcaaatcaagtctactggcggcgtccaacaagcggcagaaacagacctgctcgacagtggtccatgctttgatcagactccatctgaacatgtttctgtcgaaaccgatccagctacaaacactcctcaggttgaccaggtttcacttgattcggagatgcaaactgtgttagctctacgcgaatatttgtgtggtacacaatctgacaccagcagatcatggttcccatggtaa

SEQ ID NO: 42455 - DNA, 144 bp, Zea mays
  Peptide Sequence Number=SeqID_85830
atgtcaacccgttttcaaggcaatgtacgagtttttgtggtccggaaagggaggggagctggtggtgtggactgtggtgactggtccaagacgaccaaggcaatgtacgagtttttgtttgcagagaacacagacatgcgctaa

SEQ ID NO: 42456 - DNA, 750 bp, Zea mays
  Peptide Sequence Number=SeqID_85831
atggcggcctccatcctttcctccacgaggagatgcacagggcgagcccaccggtcgcccgtgagaagtggtggtggcaagacgactgccggtgtggaggaggtggcgcgccagggagatatggccgccggtgtggaggatgaggtgcgctgggggagcctgtcgacttggaggaggatgcacaatggggaaagtcgccccgccgatagcgaggttctaggcggtgatgtggaagaggtggcgagatcctcggcgatgggggcgaaaactgcaagggagtgtgtaaatagtagcaatacgggtaattaccctacaagctacaacaccaagaggaggtacaaaataatgattcctggggcaccccctttggagctccacaaaaaactgaagttgagacctaggtcctcattttttatggagccagagttgaaggcccaccgaataaatatccgccaagtaacccaggaggcgaggctgtcgagcaacctactcatcgagcaacccaatgaggtgaggctaccgaacgacctgcctaacaagcaacccagcgaggcagggttgccgaacaacctgcccgtcgagcaacccagccaaccaactggtcctccgagcaacccagcaaaacgacagtcgactcataggaagagtcggcctggtacaatcaagccacgacgacacgacgagacatcaccgagccagatccagaccgtgaaaacgacactgaggggtctctgtcaaacacgacaatag

SEQ ID NO: 42457 - DNA, 283 bp, Zea mays
  Peptide Sequence Number=SeqID_85832
ggaccgcgaccagaggctagagcaggtagagcagcgcccagcagaggcgcagagcagcgccggccagcccccaggcgagtacccagccaccgaggagcgacgagcgaggaccgagctgctctgctggctgctgctgcagcctgcagcgcggagcgccggagcgtgctgcggcggcgcggcgctgtgcgccgatggcctggactggatttgctccgctgctccgttgtggctgtgcgccgccgatggcactatggcaggtggcaacttcggcaagactgcatga

SEQ ID NO: 42458 - DNA, 681 bp, Zea mays
  Peptide Sequence Number=SeqID_85833
atggctccaggactacaacggtcgactgctccatttctggaaggaaatcgggcaccggacagtgtccggtggtgcaccggactgtccggtgtgacggaacctcccaagtcattaggcccacctacagttgtccttgtccaacagacatcagacaaccctgtagatgttcctgaattacttgacaagttcggtatctttcctcttacctttccaggaacgtttcacccgtctgacagacaggaaaataagaaggctaggaaaattggtctcatatttttaggatttttctgtaattttctacgtatttctaaagctggacagaaaaagaaaaaggaaaatgtggaacagtattgggctgattctggcccgaaccggcccaatcacaccggaaaccagggcgcgcccacgcccatgttgaccaaggtccacgacggcgttcacgtgtggccgaagtccggcgaactcctggaccggccaattggggctatgaccggcgctaatcttcggtttaccccggattctaccccagagaagtacttcccccaacataattgcactaataatcaaggggtgtgctctggccacggtggccgtgagcagagcggcaagatcgtcgtgttcccggcgataggtgatggtatagtgcaattaaaggggtcggaaagcttaaggaggacctag

SEQ ID NO: 42459 - DNA, 297 bp, Zea mays
  Peptide Sequence Number=SeqID_85834
atgcaggcggcatgcaaacgcgccaagtgggcgcacctctccgacttccaacgcgcccagcatggaagcctaggcccacgcgtcatgcaaccggggcgccggatgctgcgcgcgagcaactgcaccgccgcccgcgccactgtcacgcctcctcgactgcgggaccagtaccgcgactcgaggcaaccctacgcgcgacccagcagcgccagcctggcgcgacgggaccgagaaagggggataccccgaaaaggatccttctccgtgaaggaaccaggctccgagcctccctactga

SEQ ID NO: 42460 - DNA, 1380 bp, Zea mays
  Peptide Sequence Number=SeqID_85835
atggagagtcatgatctccgggcagaatgggaatcacggcttgtgggtggttatgagactgttgaatctggttatgattatggtgctgctagtccactacagccaaacaggatacttgctgagtatgttgatgtgtactcacccttgctctacacaccaaacccccccccccaggttgtcagcattgcaaccactgctcaggcgaagatgaagctgtggaaggagacttccaggagttccaagattacgacgagttctaggtgtgggttagcggcaacccccagtcggctgcctgtgaaggccgcgttatctacgtttcttttccgcactttgatttattgtaagaactatatggacgtctcagacatggctcgacttagacacactgcacgaaagtcagtcatccccttcttaccttcccgtcttgctgagcgtccgcttcgccgtcccgtggccggacagtccagccacttggagagactgcaccaccgcctgcgtgaggagcaggaacgtcgacgacaggagcagcggagctcttccctctcgctccaccaggagatagagtctgtgaggagctgctcccctgtgctttctctggagccgccccctgcaccaccactgggcgccccagcttctggagtagctgctggaggagacccagacgacggagatggcgacgacagctcgagccacgacaccgacttctctgctaatcctgagccggaaggatgggttgctcgacccatcactcgcgacgctgctcgcgggtgtcacttccatgatgcgctcgacaccctgctacgtcggacatttgaccggcatacttggtccgtcgagtatcgctgtgtggtctaccagcatagtcgcggggtctacccggaccgctgggaggcgacttgcttggtgcgctgcccggaggacagtctccagggtgcagaggcctgttcagagcactattctatctctgagcgggactcagctgaggcagccatgcaagatgctgcacggcgtgcgctttcgcactactgctcggttttcggtggggcagctgacggtcttgacctgaagtattacccccgccgttcatctggcagcacaggaggcgtgattgtctcacccgtcggtgagggcaatcctaggttgagcagcacagtcaacctagccgccgtgctaaacacggagctggaccatgcattagacgagctgagtagggctcgtgctgagatcgccctgctgcgggctgagcgcgcggaacgtcgttttctggacggtggatcccccgctcccgttgggactcagcacccgtaccgctcacctcagcgtggacaccagtcttatggcaatcccgcctgcaagaccaagatcaacctagaaccatag

SEQ ID NO: 42461 - DNA, 699 bp, Zea mays
  Peptide Sequence Number=SeqID_85836
atgaccggcgctaatcttcggtttaccccggattctaccccagagaagtacttcccccaacataattgcactaataatcaaggggtgtgctctggccatggtggccgtgagcagagcggcaagatcgtcgtgttcccggcgataggtgatgatccccggggcggtggcgctgaatttgagcggacagtgtgggcggccgaagatgaggaagaaccttggcgcggtgaatacgtgtccagtggcgtggcagctgctccggcgatcaaccgggagccgctaaggcttacgacgatgcggtggaaagatattcttaagacaggaacttcaattccgcggcaacctactcgaagggttcttcactccactgcgatccttcttcgagtagaaattaaagtaaaatattttgtggcaaattgtactgctcctactctctatattgcttgtgatgctaacctttcaaagggagaagaaaagaattggccaccaaatgatgaatccacctcatcaacaggtttgtcttccactagtaataaatgtcttattgctaacaatgatggtggagacaaaagcgatgatgatgaggaatatgaggatgaggaatctacatcatcacaagggaaaatgagaccgacgatgtggaagaagaggagattcgatgtttctacacctatctcaacaaagaagacacagcgctcttga

SEQ ID NO: 42462 - DNA, 216 bp, Zea mays
  Peptide Sequence Number=SeqID_85837
atgggtggtgaaaaacgaggacaatcaagaatgaagctgctggaggaccgagtcctccttaaaaacttttatgtaaagaacttatgggaggagtttttgcctcccagtttatgtaatcacttccgcatttccgcatctccgatgaacatactgtctgtcagacgggtgaaacgttcctggaaaggtaagaggaaagataccgaacttgtcaagtaa

SEQ ID NO: 42463 - DNA, 348 bp, Zea mays
  Peptide Sequence Number=SeqID_85838
atggcaggaatgtactgcaacgcccgcgactgcctcagcaagagaatgcagccgccggcccgcaccgctgcacggatcctcctctcccccgtcgacaaggcgaaaggctcggcgaggaagaaggaccgggaaaaggggaaaccccgaaagggatccttctccgcgaaggaaccgggctccgagccccccactactgatcaggggttcgaaggctggccccccgagggttcaacagtcgcctcagatcgcgtgggcccgacacccactactggtcaggggttcgaaggccagccccccgaagggctccatggccgcctcaggctactcgggctccgcgcccattactga

SEQ ID NO: 42464 - DNA, 1494 bp, Zea mays
  Peptide Sequence Number=SeqID_85839
atgttgctcttccatcacgcggggaagacgtcgtcgattccgccgccggcgggcgggttgtcggccgccattgtcgtagtcgcgcggcggtggaagaagtgtcatgtcgtagctgccgtcgaaggacatgaactcaagagtcccgaaacgaagcaccgtcccgggccggagaggttgctggagactacccatctggagcttgacggggagctgttcgtcagcacgcagcaggcccctacctggtgcgccaactgtcggcgtttcgagacaggggggtccctaagccgacgacccgagtccgagccctggggtcgggcggagcggagtttcgtcgtcttccgggtcttagcccgagtccgagccctggggtcgggcggagcggagtttcgtcgtcttccgggtcttagcccgagtccgagccctggggtcgggcggagcggagttcgccgtcttccgggtcttagcccgagtccgagccctagggtcgggcggagcggagttcgccgtcttccgggtcttagcccgagtccgagccctggggtcgggcggagcggagttcgccgtcttccgggtcttagcccgagtccgagccctggggtcgggcggagcggagttcgccgtggcgcctttggcaaggctcgattgcctgacagactcactctgtcgagtggcactgcagtcggagcggcgcaggcggcgctgtccttccgtcagactggccagtggagcggtggagtgacggcggtcacctcggctctgccgggggcgcgtgtcaggatagaggtgtcaggccacctttgcgttaaatgcccctgcaatttgcccccggatgggggaggcccgcagtccttccgccttgtcgttggaggaacgcaactccgtgggagttggtacctttcagccatcgttcggcttcaaggattttcatcatgcagcccggctgcacccctccgccggtggtcacccaaggcggtgaccaccggcccctggatggggagaggcaagccgggctgtgatcttggtcccgccctcagcttcaaggatgttcatcatccttgctggggcggagagcgaggcgagccggggctctacctcccgcgcgggccggctggccacctcctcttccagcttctggtggtggaaaccatcctccagctctgcggaggaggcgtcctccagccatgccggggaaggcgaactgttgctgcccagctaggatgcaacattccgccctcttcctcgctttcgtggcgaggacgggagcgaggacccgccggtgcggtttggagcagcccgctctttggctttgatggctggttcgcgtcccttgagcgggaacgcgaacgagagccttccggtggctgcgtccgtcctgggaccatggctgctgctgcagaggtcgctgacgagtcgcccggaactcgtcgccccgccgactccccggtgtggaggttgttcatacccacggggacggaaccggagttccgtttgtaa

SEQ ID NO: 42465 - DNA, 960 bp, Zea mays
  Peptide Sequence Number=SeqID_85840
gaaaaattaagttggaaaagagatggctttgttcagccaaagtctgctcagtctgggtgcaccggacagtgtccggtgcaccaggctggctctggcgaacttgctgctctcgggacttcgacggcggtgtacggctataaatcaccggactgtccggtggtgcacaggactgtccgttgctcatccctccattactccgtgcttctttgtgaacatctttgtaagggcgagagactccaagttgtggagattcctcgcaagcgggatatagtaaagctaagcaaaacaccgtggtattcaagtgggtctttggaccgcttgagaggggttgattgcaaccctcgtccgttgggacgccacaacgtggagggaacattagacatgaagaacgtagaccgacctccttctaatccaaaacggattacaatccagtctactcaagagtgctttagtgttgacataccccgtgttccggcggagactgttagacacgaaacaaggcaggctgatgatgaggacgatgaatttatgccaatatccaagaagcgtaacttcgacgacagtccttggaaagtcttgaagaagaggcttaacgtgagatgcaacccccaagatgttttagtaagcatccagatattaaatgacagacagcgccaagcaattacacggaggggattttccagtattcttgatatgagacttgacgcactcggcagcagatcacatttagcttggctgatggaaaagctcgaccataatgacatgacaattcgagccggcccagggaaggagctgaaaattacaaaggatacggtgcaccttttttttggggttaccaaatgctggtgggaggaactgcattggggcatcgatgaagctgttgctgccaacaattttaagagcttgaacttgggttatcgaaagaaagattttggggttgcagctcttccaagatcctaa

SEQ ID NO: 42466 - DNA, 492 bp, Zea mays
  Peptide Sequence Number=SeqID_85841
atggcgctccacaagctctgtgacgacggcggccccccagctctcttacggaagcagggcgacgtcagcaaggactcgaccgctccaacagctgtccctccgccaggctccgtcgcacctccgacagccacgacatcacgccagcaaggtgccaagacctctccggctgccacattggcatggaggaccagggccttcttagaggaggttggccgcgcgggaccgaggacgggacaggcgctctcttggggccgctcgcttccctcacccacgtggacgcttgtaacccccctactgcaagcgcacccgacctgggcgcgggacgaacacgaaggccgtgggacttccacctctctcacgctcgactccggccacctcgcctctccccccttcgcgcttgcccacgcgctcgacccatctgggctggggcacgcagcacactcactcgtcggctttgggacccccctgtctcgaaacgccgacaactactaa

SEQ ID NO: 42467 - DNA, 543 bp, Zea mays
  Peptide Sequence Number=SeqID_85842
atgccgtcctcttcctcttctgttgctgatacaccgccgaccggcgcgtcgtccgaggagacgctaagcaatgtggtgggggaggagttgcgtgccgaggacatagtggagttcggcgtgtcgcggatgtccttggtccgtgtgcaagacatgcaacagcttgggtatttcggcggcggagtggcacgtgtcccggggacagaggaggtccccgagccggaaggcgagttggtcgtcttcgaggcctttttcgccgctggccttcgtctgcccgcacatcgatttgtgggagaagttctgcgtagattcgacgtccagaaaaggaaaatcagaaataagattgcacaatttggatcttgcacatttacgccgaagaccggcaagacttcgatggaagtcgttgagttggttccctgcgcccgcaataaatggggcaactggtgggaattttggttctacgttgccgaaggcacagtcgaacaccatccggggctccccgtggccattgtgttcgcattattactcagcgtacccgcagtttga

SEQ ID NO: 42468 - DNA, 264 bp, Zea mays
  Peptide Sequence Number=SeqID_85843
atgagacatgctgaggagggggtcagcggtatggtcgatgactttatcaacccggtcaggtcgagagctcgatcggcagacaagaagcgaatgacccctgtgtcagtactctcagctcagccgcagcgattcaggattgtgtccaacactcagagcaggggaccccaacagcagcaagggaggtgggtgatccgaccacaacagcagcagcaggcacccaaccgtacccagtttccagctcaaaggaacaaccagcagcagtag

SEQ ID NO: 42469 - DNA, 495 bp, Zea mays
  Peptide Sequence Number=SeqID_85844
atgctattgctacaacttcaaatttatgcagtcactcctatttatgatactgatgttccaaatgatcctggcacacatatgctatgcacccggctctgccccttagaaacgggtgtgacaactgcgaaggctaccgcccccgacggtagccagccgacgctggcggcgaagccggccgcccctgggtccagcaaggtgccggagggcgtgaaggcggccggcgccggcggaaccaagtctgcctcggtcggagccacgaaggcccgagaattgccttcgccgggaaaacgcgttgccgacttcggcaccgatattagtgtggacgattatctcgttggatcgggcgaggggcaacttgttgttgttccgcctgcggtggcgaccacggtgtttgccgtggtgcctagggtgaagggtagcgctctcagcgctggcggtgagatttcggcgctcactgccgtcagggacgaagcggcactgtgtcccgccggctga

SEQ ID NO: 42470 - DNA, 738 bp, Zea mays
  Peptide Sequence Number=SeqID_85845
atgaagccgctccccccgctccccttcgccccccaacggtcgagcgcagatctgcctccgccgccgtcgtacaccatgcaagcccccaccctcaaccatctccccaccaccctagctgcctcgtcgttggatccatctcgattcctctcgctccgaccgctcccgcagacatcaaacgcagatgggttagcttggcgtcaacccctccgcctcgtcggcctgccaaccaccagagacgcgacggccattactccccacatccctctctctctgtacatcgagatccgacagtactgcgaccacacccgatgcattgaagctgcggggccactctatgggcaaccatccctccaggcgcggtggcaggccatgggctacaggcgggggccgtccatcgtctctgtgggcagatccaggtttccaatcccctcccagaacacttatggcgaagctccttcccaagacaccgacaagactactcgtctggagacagacgacgctggctggatctccgtatcttataggcacaggaagcgggagaccctccgggcgcggattaattcgccaacctccaggcgtgcccctcgccccgtcttcaatgcctccttccaagcgcgacatctcctcacatcagccacagccttcacattccgtctagcttctgtcgtggctccgagcccacctcgcctcgacgacacatccgtcttccccaggctaccgataggcaggatgtcatag

SEQ ID NO: 42471 - DNA, 567 bp, Zea mays
  Peptide Sequence Number=SeqID_85846
atggtcggtccgagccctgggtcgggcgaggtggaggctcctccgaggttgaggtcgagtctgtcttccgaggtcgaggtcgagtctgagccccgggtcgggcgaggcggagaccatcatctaaggccaaggctgagtccgagccccgggggtcgggcgaggcagagttctttcgtcttccggagccgaggccgagtccgagccctggggtcgggcgaggcggagtttgtcatcttctggagccgaggtcgagccctggggtcgggcgaggcggagttcgtcgtcttccggagccgaggccgagacgggggccgagccctggggtcgggcgaggcggagcttcctatggcgcccgaggccggacttggctgctgtcagcctcactctgtcgagtggcacagcagtcggagcgacgcaggcggcgctgtcttcttgtcaggccggtcagtggagcggcaaattagtgtggcgatctggccaaggttgcttctcggcgaagactgggcctcgggcgagccgaagctttgtgctgatgggggttaccagctgagattaggagtcttgggg

SEQ ID NO: 42472 - DNA, 267 bp, Zea mays
  Peptide Sequence Number=SeqID_85847
atggggatcggggcgatcggctttggccttcttctgccaccagaagcggcgacgcccgcgtttgcggcggagaactcaccgaagacgaagagagcgcaggttccaagggtcttagggcaatcggggtggcctcaagaggttagggagggtgtagggactcgctggcgagggccaaaccatggtggaagcaccgaaggtcggagatccacgacgaggtggcatggtggcgacgctagcaactccgacgagcaattgcgctttgcgtga

SEQ ID NO: 42473 - DNA, 687 bp, Zea mays
  Peptide Sequence Number=SeqID_85848
atggcggagaacatgaactcggagctaaacgtgataggctccttgctcccgttgttcccctgcatcaccttcgacgtcgagtacgcgggcacactgcaccgctcgtccgctgcgacgcgaatcgccccgagcaagcagtacgccctcgtgaagaaaaacgttgatgcggtgcccatcgtgatgctcggcatcacgctctccaacgagtacgggaacctcccgctcacagcggacggagaaggacgtctgttccagctcgcgtgggaggtgacgttctcggacttcgacccccggcgcgaccgccacgccccggagtccgtcacgttcctgcgctcacagggcgtctgcttggacaaggcccgagcgcgcggcattctcacgggcggccagccgctgccggagacatggcacgagttcatggcccagacccatgctcttctcggcggcggccgggtgttcgacgccaaatacatggcggagcactgcgagcgaacggacttaggtggtctaggtctgaggcgcatggccgccacccttggcatgcggtgggacttcccggagttgcccttccttgccgggcggaagagccacatcgcttgcttcatctgcaccattatgaggagacgcatcctgtatcgcgacggtggtgatatacttgtaggtctactcgatggtatacactggtag

SEQ ID NO: 42474 - DNA, 231 bp, Zea mays
  Peptide Sequence Number=SeqID_85849
atggaccgcactcgccgtggacgatcgtctctgcggtcaccttcacctcggtcgaagggagattggggaactatggcgctgggtcgtgggctccggccatggcgccgccgcggaggccgatctccgctgcggatcgagttccagaaaagggggaaagggggatcgctcgggcagtgcgcatggaccgttgatctactcagcaataaccgcgatggtgaggaagccacctga

SEQ ID NO: 42475 - DNA, 612 bp, Zea mays
  Peptide Sequence Number=SeqID_85850
atggcgaatgaggtggtgacaactgaggcgaggaccatcattatcgtgtggaggtctagccgaaacaagccggagattgatccgccacatgcccacatcggactaggaccagccgaacaaccattcccaatttctccgccgccaaggcacgaagccggagcacgatggcagccaccacgaatcggtttcccccacgccatgtcctccccctgcatctcgcaccagtgcaccaccagcagaacaaagcagtttgatgaatttacctcaaggctgctagaaattcatgataagatgatgtctataaatacgaaagaggatgcacataacatggaagtgtctacaccagtacccacaataaatccggaaggaaatgatgaggacgagactccaaagaacactgtctctagaaatggtggtttcctgcagaatgcagttggccaagacctagtccatcttggcgttgcaagaacagcaagtggtgacccttcggctgtcgcttccggtgttagcactggacaccagcacaacagaatggatcttgatccagcatccagcaacgtggataatttcaaaacatcagaatttacaaaaaaaaacgatctccaggagtag

SEQ ID NO: 42476 - DNA, 915 bp, Zea mays
  Peptide Sequence Number=SeqID_85851
atgccccaatttcctgtaactagatcaggaacggtccctgcggttggcctggttcacgctccattctcgctgcttccagcgcgttttccggcatcgttcttcaatcaagcatgcgagctggctcctatcttcaatgagctcgtggatcgtgtcagcttggatggggagttcttgcaagctgctttgtctaggcaagttctaaattctatccactggattcttttggttaacagcagattatcattttctaatttcagaacaaagcaggttgatgaatttacttcaaggctgctagaaattcatgataagatgatgtctataaataagaaagaggttgtacaaaatgatattccaccagaaagcatggatgccatgcgcccggtgcagcagcacttgccaacacggacaagcactccaccctccaaaatgaataaccttccaaaggatgcacagaacatggaagtgtctacaccagtacccccaataaatccggaaggaaatgatgaggacgagactccaaagaacactgtctctagaaatggtggtttcctgcagaatgcagttgggcaagacctagtccatcttggcgttgcaagaacagcaagtggttgcccttcggctgtcgcttccggtgttagcaccagacaccagcacaacagaatggatcttgatccagcatccagcagcgtggataatttcaaaacaccagaacttacaaaagaaaacggtctcgaggaggatgggaaaggagagagtagtatgtatgatgagaggcaacctaagagaaggaagcgtacccttatgaataatgagcaaatagatgaattagagaaggctctagtagatgagcctgagatgcacaaaaaaccctgttctattgcagagttggtcagagaagttaagtctgcaggttga

SEQ ID NO: 42477 - DNA, 711 bp, Zea mays
  Peptide Sequence Number=SeqID_85852
atggcggagaacatgaactcggagctaaacatgataggctccttgctcccgttgttcccctgcatcaccttcgacgtcgagtacgcgggcacactgcaccgctcgtccgctgcgacgcgaatcgccccgagcaagcagtacgccctcgtgaagaaaaacgttgatgcggtgcccatcgtgatgctcggcatcacgctctccaacgagtacgggaacctcccgctcacagcgggactgagaaatgacggcgtctgcttggacaaggcccgagcgcgcggcgtgagctccgcggcgttcgcggccaagctggccgccatactgtcggcgacgccgcggcccaacgagctcacctgggcggcgtttggtggagcatacgacttcgcatatatgctgaagattctcacgggcggccagccgctgccggagacatggcacgagttcatggcccagacccatgctcttctcggcggcggccgggtgttcgacgccaaatacatggcggagcactgcgagcgaacggacttaggtggtctaggtctgaggcgcatggccgccaccgttggcatgcggtgggacttcccggagttgcccttccttgccgggcggaagagtcacatcgcttgcttcatctgcaccattatgaggagacgcatcctgtatcgcgacggtggtgatatacttgtaggtctactcgatggtatacactggtag

SEQ ID NO: 42478 - DNA, 276 bp, Zea mays
  Peptide Sequence Number=SeqID_85853
atggggagagaagctgggccgcagccagggaaacggcccattgagtttatttactccgagaagagccttcagtattcttactcctatgatttgggattttacatgcgtatgttgcttggtggtggaatttatgaatgtgggggcagggtgcacttgcagcaaattttacaagttattctctgttcactggcacttgacacaataaagaaatctgcatccagtttgtccaaggctggtgtaaagaggattggcgtttcagaactatttttcttttag

SEQ ID NO: 42479 - DNA, 261 bp, Zea mays
  Peptide Sequence Number=SeqID_85854
atgtcggcgccgatcatgaccgcgaaatactgggccgtgaaggagggaatatggagatgggccgaaatgggaggtgatcatgcagcaattaaggagttctgcggagaggcgagagcttactcacgaaaaatggagaaacatcttggccttgtatttgcagtagtgatgacagtgctctggcaggagcctgagctcctccgcgatgtcggcgatagggagtggctcgacggtcacatgactgatacgatacaaatagaatga

SEQ ID NO: 42480 - DNA, 174 bp, Zea mays
  Peptide Sequence Number=SeqID_85855
atggagagtcatgatctccgggcagaatgggaatcacggcttgtgggtggttatgagattgatggttttggttatgactatgatgctggttgtcagcattgcaaccactgctcaggcgaagatgaagccgtggaaggagacttccaggagttccaagattacgacgagttctag

SEQ ID NO: 42481 - DNA, 444 bp, Zea mays
  Peptide Sequence Number=SeqID_85856
atggaggaccagcctccaatggatccatggcttgaaggtgtcattagctctcgaggatccaagatgatgtaccgaacagccttatgcgacacatcattcttgagaacaatgacaataaacctgtcacaaatagcagtgacacctaggagatgtactagggcgagaagatctgcctcaacatgcacttctagctgttgtgggtcaagaactgttcgaggtgcggcctcacgcacatgttgtgccttggcctcacgcagtggctggcgtaggaggtccgattctggtggacttgggcatggagaaacacaactacacaaggatgaagaggtgacttcgaccgaggcttttgcctctactgctcctgatttgtatgactctgttatggatgcagcagttgctattaagaaatcagatgaagtgaccaagggcaatttgactatataa

SEQ ID NO: 42482 - DNA, 1449 bp, Zea mays
  Peptide Sequence Number=SeqID_85857
atgtcctccccctgcgtctcgcaccaacagcaggtccgtctccgtctccgcgctgccagccgccttcccgccccagacacggcctcgttcgcgccgcccgcgccccggcagcttcggatggcgcacgcggcgatgagcgccaaggcgcccctcggcgtggcgccgacggaggagggggccgggacgccggggcagcaggccgtgctgggaaaagaagaagaagaagaagcaaacagcatgccccaatttcctgtaactagatcgggaacgatccctgcggttggcctggttcacgctccattctcgctgcttccagcgcgttttccggcatcgttcttcaatcaagcatgcgagctggctcctatcttcaatgagctcgtggatcgtgtcagcttggatggggagttcttccaagctgctttgtctaggcaagttctgaattctatccactggattcttttggttaacagcggattatcattttctaatttcagaacaaagcaggttgatgaatttacttcaaggctgctagaaattcatgataagatgatgtctataaataagaaagaggttgtacaaaatgatattccaccagaaagcatggatgccatgcgcccggtgcagcagcacttgccaacacggacaagcactccagcctccaaaatgaataaccttccaaaggatgcacagaacatggaagtgtctacaccagtacccccaataaatccggaaggaaatgatgaggacgagactccaaagaacactgtctctagaaatggtggtttcctgcagaatgcagttgggcaagacctagtccatcttggcgttgcaagaacagcaagtggttgcccttcggatgtcgcttccggtgttagcaccagacaccagcacaacagaatggatcttgatccagcatccagcagcgtggataatttcaaaacaccagaacttacaaaagaaaacggtctcgaggaggatgggaaaggagagagtagtatgtatgatgagaggcaacctaagagaaggaagcgtacccttatgaataatgagcaaatagatgaattagagaaggctctagtagatgagcctgagatgcacaaaaaccctgttctattgcagagttggtcagagaagttaagtctgcagtgtataccatcgagtagacctacaagtatatcaccaccgtcgcgatacagaatgcgtctcctcataatggtgcagatgaagcaagcgatgtggctcttccgcccggcaaggaagggcaactccgggaagtcccaccgcatgccaagggtggcggccatgcgcctcagacctagaccacctaagtccgttcgctcgcagtgctccgccatgtatttggcgtcgaacacccggccgccgccgagaaaaagcatgggtctgggccatgaactcgtgccatgtctccggcagttctgcctcccgtga

SEQ ID NO: 42483 - DNA, 291 bp, Zea mays
  Peptide Sequence Number=SeqID_85858
atggctgggagcagagggtcaaggggcgctggccatagtgctccctgcgcgcaggggaacagtaggggaacaaagaaatggagcagggagggcatcgaggcggaggggaaaactgcagggggtggcgccatggggaggagtggagctcgagcgccggccatggaggagagtagggcgtcggcggccatgggaggagctcctgccatgaagaagaaggggcgctgggtggcctggaagctcctgctccctgctgcagccgctcgccaggaggagcagggagggcgccgctga

SEQ ID NO: 42484 - DNA, 804 bp, Zea mays
  Peptide Sequence Number=SeqID_85859
atggcggagaacatgaactcggagctaaacatgataggctccttgctcccgttgttcccctgcatcaccttcgacgtcgagtacgcgggcacactgcaccgctcgtccgctgcgacgcgaatcgccccgagcaagcagtacgccctcgtgaagaaaaacgttgatgcggtgcccatcgtgatgctcggcatcacgctctccaacgagtacgggaacctcccgctcacagcggacggagaaggacgtctgttccagctcgcgtgggaggtgacgttctcggacttcgacccccggcgcgaccgccacgccccggagtccgtcacgttcctgcgctcacagggcgtctgcttggacaaggcccgagcgcgcggcgtgagctccgcggcgttcgcggccaagctggccgccatactgtcggcgacgccgcggcccaacgagctcacctgggcggcgtttggtggagcatacgacttcgcatatatgctgaagattctcacgggcggccagccgctgccggagacatggcacgagttcatggcccagacccatgctcttctcggcggcggccgggtgttcgacgccaaatacatggcggagcactgcgagcgaacggacttaggtggtctaggtctgaggcgcatggccgccacccttggcatgcggtgggacttcccggagttgcccttccttgccgggcggaagagccacatcgcttgcttcatctgcaccattatgaggagacgcatcctgtatcgcgacggtggtgatatacttgtaggtctactcgatggtatacactggtag

SEQ ID NO: 42485 - DNA, 1236 bp, Zea mays
  Peptide Sequence Number=SeqID_85860
atgagcgccaaggcgcccctcggcgtggcgccgacggaggagggggccgggacgccggggcagcaggccgtgctgggagatcaggaacggtccctggggttggcctggttcacgctccattctcgctgcttccagcacgttttccgaacaaagcaggttgatgaatttacttcaaggctgctagaaattcatgataagatgatgtctataaataagaaagaggttgtacaaaatgatattccaccagaaagcatggatgccatgcgcccggtgcagcagcacttgccaacacagacaagcactccagcctccaaaatgaataaccttccaaaggatgcacataacatggaagtgtctacaccagtacccccaataaattcggaaggaaatgatgaggacgagactccaaagaacactgtctctagaaatggtggtttcctgcagaatgcagttggccaagacctagtccatcttggcgttgcaagaacagcaagtggtggcccttcggttgtcgcttccggtgttagcactggacaccagcacaacataatggatcttgatgagaggcaacctaagagaaggaagcgggcccttatgaataatgagaaaatagatgaattagagaaggctctagtagatgagcctgagatgcacaaaaattggtcagagaagttaagtctgtcgctatttgtaacagtgttttctcgtgcaatttccaggttgaacatccggaaagctaagcttgctcgcattgcaaaagaaagggcggagaatgctgataaaccatctattccccatcccggtgagtcttcagaaagtgccggggaggacaactatctaccccctgcaggtgtgatgactgctctatccaaaggtggtagcctgttgagcccggacagcactgagcaaacgtcgcaggcagagctatccccgaacacgacgatgatggtacgtccattcacgagatccttctcgctggagcccggccgccttgtatcattagtcgacagcgatgggaaggaggttggcaggggcaagatcttccaagcgccagggaagagcacaacgaagagctgcgtttgcgtggttgatgtcactgagctcaggaccgagaagtggagggagctcccccacccttcggaggcatttgggtggacgttccaggaggcggaggtgaggaatggtggcatcataagggtctcttgggacgccgtcaggttgttccctgtagcgtag

SEQ ID NO: 42486 - DNA, 396 bp, Zea mays
  Peptide Sequence Number=SeqID_85861
atggacaccgatcgcatcccatggagggccagcctccaatggatccatggcttgaaggtgtcattagctctcgaggatccaagatgtgaggcaccaaatcggtggagagatgtaccagggcgagaatatctgcctcaacatgcactttctatctgttgtgggtcaagaactgtccgaggtgagacctcacgcacacgttgtgccttggcctcacgcagtgactggcgtaggaggcccgattctggtggacttgggcatggagaaacacaactgcacaaggatgaagaggtggctccgaccgaggcttctgcctctactgctcctgatttgtatgatataccaagaacctgcgctttttgcaaccacaatcctcgattaaactacatggaaagctag

SEQ ID NO: 42487 - DNA, 318 bp, Zea mays
  Peptide Sequence Number=SeqID_85862
atgacaataaacctgtcacaaatagcagtgacacctaggagatgtactagggcgagaagatctgcctcaacatgcacttctagctgttgtgggtcaagaactgttcgaggtgcggcctcacgcacatgttgtgccttggcctcacgcagtggctggcgtaggaggtccgattctggtggacttgggcatggagaaacacaactacacaaggatgaagaggtgacttcgaccgaggcttttgcctctactgctcctgatttgtatgcagttgctattaagaaatcagatgaagtgaccaagggcaatttgactatataa

SEQ ID NO: 42488 - DNA, 556 bp, Zea mays
  Peptide Sequence Number=SeqID_85863
atgccggagatcccgaccacctcccagctgcagccaccgctcataaccatctccttcaccttttccttggccaccttgacgccgccgccaaccatcccctccgcgtcttcgtgtccgtcggctttggcgggcaccgccttcgctctgttttctggtttgggggacccttctgttggttccggtggctttggacaaccagggagccttatgtctgcccctttgagcggcatgatgcaacctagcttcatgaaccccttcggcagcatggtgcaacctagcttgcttggaccaagtatgtttgcgccccatggcaatctcaatggaggcatgtttggaagccagacacatctcagtcaaggtatcagcaatggcagtggttttattcagcaggcccctgaaccaagcaggcctaaagggccaattatcaaggagttatcttcagatgatgaggatgatgtagatgatgatgaagaaggcgagaagaagaatggtaactttaggaagcatcaaagggaaagcaaagagccatatgtggaggacccagttgatgtagaag

SEQ ID NO: 42489 - DNA, 678 bp, Zea mays
  Peptide Sequence Number=SeqID_85864
atgagtgccaaggcacccctcggcgtggcgccggtggaggagggggccgggacgccggggcagcaggccgtgctggggcagatggtggaggatgccgccgtgtggtgcgccgtccatgggctcgtcgttggagatcgcgccaaccagagatcaggaacggttcctggggttgggcctggtgcacgcctcccattctcgctgcttctagcacgtttttcggcatcgttcttcaatcaagcatgcgagctggctcctatcttcaatgagctcgtggatcgtgtcagcttggatggggagttcttgcaagctgctttgtctaggcaagttctgaattctatccactggattcttttggttaacaacggattatcattttctaatttcagaacaaagcaggttgatgaatttacttcaaggctgctagaaattcatgataagatgatgtctataaataagaaagaggttgtacaaaattatattcaccagaaagcatggatgccatgcgcccgtgaattggattctaatcggaagctgatgcaacaggatgcacataacatggaagtgtctacaccagtacccccaataaatgcggaaggaaatgatgaggacgagactccaaagaacacattgtctctagaaatgttggtttcctgcagaatgcagttggccaagacctag

SEQ ID NO: 42490 - DNA, 249 bp, Zea mays
  Peptide Sequence Number=SeqID_85865
atggacatgatccaggtcaaagcttcgtccactcaagggatgcgatctcacctcgcccgagcccagcctctggcaggaacagtactcctagacgaatccacgcctcgcccgaggacctcttcaagcaacgggcgcactctcgactcgcccgaggcccagctcgggcaggctttgcagtggagcaaccttggccagatcgcctcgccaaccgaccgtatcgcaggagcattcaatgcgaggatcgcctga

SEQ ID NO: 42491 - DNA, 828 bp, Zea mays
  Peptide Sequence Number=SeqID_85866
atggagcggctgcagcggatctttggcgcctccggcatggggcagccgccgacggactcgccgctgctcgactcctccgagcaggtctacatctcctccctcgcgcttctcaagatgctcaagcacgggagggccggcgtgcccatggaggtcatgggtctcatgctcggcgagttcgtcgatgactacaccgtcagggtcgtcgacgtcttcgccatgccgcagagcgggactggggtcagcgtcgaggccgtcgaccacgtcttccagacaaacatgcttgacatgctcaagcagaccggcaggttccatgtctccctgaaagttatcggtgaacttatcttgttggtagttcagttaacctgcatgttttgttcatataaaagaaaaatggaagagagttttgaagctttgaaccccagggcagttgctgttgtgatagaccccatccagagtgtgaaggggaaggctcttatccatgggctgaacagacactactactcgattgcaatcaattaccgaaaaaatgaacttgaggagaaaatgttgctgaacttgcacaaaaagaaatggacagatgggctaattttgaagaggtttgacactcattcaaaaaccaacgagcagactgtccaggaaatgctaaacctagccatcaagtacaacaaggcggtgcaggaggaggacgaactgccacctgagaaacttgcgatagcaaatgtaggtcggcaagatgcaaaaaagcatttggaagagcatgtgtccaatttgatgtcatcaaacatagttcagaccctaggaaccatgctcgacacggttgtattttag

SEQ ID NO: 42492 - DNA, 276 bp, Zea mays
  Peptide Sequence Number=SeqID_85867
atggaaattaaggaaaggaaaatgaataatggaaatttatgtcatcttaagacctttgtaaattgtccactaaaatctataaaggcaataccaatccactataataatctaaaagaaaacctaatcttaaaagactgtaatcttgctgacggagagtacatcctcgtgccggagcaaggagctgctcaggaggtagccccggacccagcacccgagcctgcaccagaggacctgcctgccactgctttggaaggcaagccccggttttatgcataa

SEQ ID NO: 42493 - DNA, 369 bp, Zea mays
  Peptide Sequence Number=SeqID_85868
atgtcgtgcacgttcgacgactactatatcaaggactatggcgtcatcttggcaccagaggtgacgcagaggaggaccgacggcaatgaccactcgtcatcgtcggggagccaacaacagaggtggatgagagtgggcttttgctcacttgcaatggagtccgcaagctcgatctcccaaggtcgggttctgaagcacttttttcctgacaaggttctttttgtggttgattttgtcctggatgagtatccaaatgaaggtcttgacctttgggagagagtaggagctccacacaaattgggggttgttgttatgaccgagcagacttacaagagaagggataaggctggcaaacaccagaccgcgtga

SEQ ID NO: 42494 - DNA, 840 bp, Zea mays
  Peptide Sequence Number=SeqID_85869
atgtggagacttggagacgtgcgctatccgggcgagtcgtcgggctcgcgcgggggtgaaaaatccgagcgcgctgtagtcccgtcgctggcgacttcgattcatctcggcgagggggcctcgcggcgcggctcgtcagcggagccgagcaagctgggctcaaagcggccgtgctcgagcgggtccggcggcggaccgctctcggtggttggaggcaaggaggtggcccgcgaggagactgagatccaagggtccggtgcaaccgtcggtgttcgtcgccgtcgaaccgccatcgcgaagaagctgagaagatccacggcgccgacgaaggaaggtgcgcagaaacgcaagcgcatctcgtcgccgccatcttcatcggcttccactagctccggtgctccacatccgaagagaaaaagatctagggtttatggttacgccaacacacattccatgcttgtagggttcattgaccagttgaccatggattcggagaacgcaaagctccgaagagcactcgctcatttaatcagagtagtggaggagcgttgtgccgacatcgtcgatgtcgtccacggtgccttccaaccagttagcggaccagtcttgaatgaaatgaatcgtgcattagttcagatcgaggacctcgccaacgaccttgatcagcttgcactggaaaaagactgggagatggagcacatgacccctacaccaattgctgaatcatcacaaacagaggatgagcttctgattgattatgattcagagttaaacaatgacgatatcgtcggctacgacgacggccgtgactactccaccgacgacacctatccctactag

SEQ ID NO: 42495 - DNA, 150 bp, Zea mays
  Peptide Sequence Number=SeqID_85870
atgggaaccaatgggcatctcgacctcgacacgggaggtaaatccatagatcaaaaggtgcataagttcatctacaactcttctaagtcgactgtccggaataccgtagattattatggacaggagaagctttttggaaaaacagactaa

SEQ ID NO: 42496 - DNA, 624 bp, Zea mays
  Peptide Sequence Number=SeqID_85871
atgcacggcggtgcgctcccgggttcggaccgcgcggatccggctgcgcctggcggtgtacccctcgggcagctcggcggcaacgtggcaaggagagcggcggagacgacggcggcgaggtgtagtggccgtgctgctacatcccttctttcccaaagcagaaatcaggtgcctgcatcagacaatgcaagagaaaacagcgccgcctgcgctgctccgactgctgtgccacccgctagggtgaggctgacagcagccaagtccaacctcgggcgccataggaaagctctgcctcgcccgaccctagggctcggcccctgcctcgacctcggaagacggtctccgcctcgccccaccccagggctcagactcaacctcgacctcggacgacgatcttcgcctcgcccgacccccgggctcggactcaacctcgacctcggacgacgatctctgcctcgcccgacccccgggctcggactcaacctcgacctcagacgacggtctccgcctcacccgaccctcgggctcggactcagccccgacctcggaggagtctctgcctcgcccgaccttgggctcggaccgaccacgtcgcaggggggtacatcattaccctacccctag

SEQ ID NO: 42497 - DNA, 450 bp, Zea mays
  Peptide Sequence Number=SeqID_85872
atgactaccggtgatcccttgctcctgtcatcatcgggaagtgcagattcaccttcaaagcatcaggctccagctcggccttcggtaggctcattaggctgtctctgcgcaactgattcattctcttcttcactgtacgaggattgtgaaacgtcttctgtcacagtcacggatgaaagggaggctcaaccaagacatttacatgagttgtctgatgtgagtagggtggcagagcgcttccagtctgctgattcacaattcttccatcgtctctcagtggaatgctctcagaaggagaggcaacggaaggtttcttggggtggcgcaatggagaggcaacattctccatcatccctagagattggaatggtatcttcttcgcatgagaagccaaatcgctcccagagaatcaggaacaagagctcacagtttgaagatccatctgagtaa

SEQ ID NO: 42498 - DNA, 1044 bp, Zea mays
  Peptide Sequence Number=SeqID_85873
atggctttccaccaccgtgatgagaagtggtggctcccggtgcatcgtgtgcctcccggtggccttcacaacaaaacaaggaagcagctccaacacaagcgtgattgtgcaaaccaaatcctgaaggctgccatggccatcaacagcaatactttagcagagatggaggtccctgaaccttatcttgactcccttccaaagaatggacggtcaaccttaggtgatatcatataccactacataacctctgatcagttctcccctgagtgccttcttgattgcctggatttgtccacggagtaccaggccctggaagtcacaaaccgtgttgaggcgtcagtgtatgtgtggcgccggagggttgctgccaaaccagtaaatggattgggccgaagcagcagtgctagatcatcgtggggcatggtaaaggacatgatggtagactcagagaagagagagctgctgctagctgaacaatcagagggcctgctaatatgcttgaagcaaaggttttctagattgacacagacaagcctggacatgagcaaaattcagtacaacaaggtttttttatctcttatctggttctcccagtattccatccataaccaaattacagatgcagagtttcggaatactgggctggagagatcagaggcgctgaaaaatgatctggaatggttcaggcaacagggccacacaattccaaaaccatcggcccctggcaccacatacgcttctctactggaagatctgtctgaggaggacccccaggcctttatctgccatttctataacgtgtactttgctcatactgctggaggccgaatgattggcaaaaaggtttccgagaagattctgaacaacaaagagctggagttctacaagtgggagggcaatctctcccagctgctgcagaacgtccacaacaagcttaaccaagtcgcttcgaactggtctcgggaggagaaggaccactgcctggaggagacggagaagtcgttctcttactcaggaggccccttccgccatatattcacctga

SEQ ID NO: 42499 - DNA, 163 bp, Zea mays
  Peptide Sequence Number=SeqID_85874
ccaaagccagtacttcaacggcatgaagctggccatcgacgtcgcggagaaagccgcggccctggccccggccccggcttcgtcgtcggcgcccgtcagctacacggttggcgccgctgcggcggccgccgtggtcgcggcggcggctgtgctcgcgttctag

SEQ ID NO: 42500 - DNA, 435 bp, Zea mays
  Peptide Sequence Number=SeqID_85875
atgggcaagaacaacaagcgcaagcgcgagccgactcctccatcggaggatttcggtgactcggaatactcggaggaggagttctcctccgagtccgaggggtctccggctcccgtctctcccccggcgtcgtccgatgactcggacgactcccaggggatagccgcggaggtctggacgtacatccgggccgtcgagcgctccgggctcgagggctcggatgagtcggagtgctcctcggatgaggaggactcggacggcagcgacgaggatgaggacgacggcgacgacgacgatgacgacgacgacggcgacggtgacggcagcggcagtggcaggggcggcggcgacggcagcaggggcagcaccaagggcgacagcagcgaaggcagcaccaagggcggcggcagcggcaggggcagggccagtggctag

SEQ ID NO: 42501 - DNA, 348 bp, Zea mays
  Peptide Sequence Number=SeqID_85876
atggccttactagactcggcaaggtcgactgagccgaggaactcctacgcctccgggatacggacacctcactcatcacctaccgcgaaaaataactcctacttcgaatcaagcattgcccgggggaggagcggcaccctcggcttcgtctccaacctcggcttcatttccaccctcggcgagatccgccacagcctcggacggcggcgcaagcggaaggatttccactttgaaggaggacgccagcaccgtgcttgggcccgcggcggccgcgtcaagcctctgaacttcggccagggcagcttcatcttcgtcgggaaggcagtacccctcgctgacccgctctag

SEQ ID NO: 42502 - DNA, 413 bp, Zea mays
  Peptide Sequence Number=SeqID_85877
atggagaaggctccggttgcagccgctcgaaagaggaaattaggtatgggggatgatgagactgggccgagggccattgttagttttgttgaggagttaatggagacgtgtgctgttctcgaggaattgatgtcttcgcccgagctccgggaaacttcttcgcgcatgctgaaggagttgtcagtagatgactacttggtgggaggcgttaccatgtttgatgcccagactgggttgccgcctactgcggctgctggccggatgggtacgacgaagggcgacgcagggacctcggaggaccaacaatcgagattttgggccgtcgctggaggcggaggcggacttgcctcggcaccaccgctgctggtgactgccttcgccgagcaagtcgccttggggtcgctgacctcgta

SEQ ID NO: 42503 - DNA, 201 bp, Zea mays
  Peptide Sequence Number=SeqID_85878
atggcgaaaatgctgcccttgctcgaagtggtcccatggggttttttgaaatgccgcatgctagagatgcagcggctaggctactttggaagcggagttggacgggctccaggggctaaagatttccctgagccagagggggagttggttgtgtcctcatatggtggggaaccatctgttgaattcttcgcgaaaaattaa

SEQ ID NO: 42504 - DNA, 870 bp, Zea mays
  Peptide Sequence Number=SeqID_85879
atggagatgatgaagttgcaagttaatgtatttgagtacttcgactcacgtcagcttattgtttgtggcaaccatttccgcagaattcgagaagtggagttgaagcgtgactatgcattcattgaattcagtgacccccgtgatgctgatgatgcacagtacaacctagatggcagggacgtcgatggaagccgcattattgttgaatttgctaaaggggttcctcgtggttctggtggttcacgtgattacaacggaagaggacctccaccaggaacaggccgttgttttaactgtggagttgatggtcactgggcaagagactgtcaggctggtgactggaagaacaaatgctaccgttgtggcgaaaggggccatatagaaagaaattgccagaacagtccaaggaacctcagccgatccagatccccgtctggatctcctaggggtggacgccgagaccgtgatgagaggagatcaaggagtcttagctacagcaggagcgcaagccctaggcgttctgtgtcacctgtaaaggaaaaggagcgcagccgcacacctgatggcagtaggagccccagcccaagggacaaggtgagcccaccaccaaaggataatggtgcccacaatggctcggaccgtgaagacagccctgggggcagggagatgagcaagaggagtcggagcccgtctgatggctaccgtagccctgtgggcaatgggcgcagcccgagccgtagcccaagccccaaggtcaacaatggtgatgacccaagccccaagggcaacaatggtgacgacccaagccccaagggcaacaatggtgatgacgagcaccgcggttcaccaagaggaagtcagtccccctga

SEQ ID NO: 42505 - DNA, 474 bp, Zea mays
  Peptide Sequence Number=SeqID_85880
atgaaggagtgcaacattcaggattttgacttggagaaagcccagcttgacctagggcatggctacaacagggctgagatgaagttcaatgtgaatcgtgttgataacatggtgattcaggcaatctttctattggatatgcttaacaaggacatcaattccttctccatgagagtcagcccctcaaatcaactttggaacccaaatggtcaagcctttggatggaaagttcagcaaagcgtccccgccgtttgccagccttcaccgcgcggtagggcggtcgatctcccacaggcggacagtctacactccaccgccccatcggtcgtgcctctcccgctggtggccttccccattcgtgtggtttccaccgtccccactccccgcatagttcatgcaaccgactcccccgtcctcagtacccacgacgtccactcctgcatgcttcctccccatgacctccacttcgcctag

SEQ ID NO: 42506 - DNA, 585 bp, Zea mays
  Peptide Sequence Number=SeqID_85881
atggatagttggcacaccggactgtccggtgtgcaccgaacagtgtccgggcattttgagacaggatcttctattccgctgcaacctactcgaaggatctttcattccactgcaatctggtctttgagtagaaaatggctgtatttatgggtattaactcgatctgggggtagggattgggatggcggcatcgtaccttgcaccgagttagcagaaacagaagctgtacagggagctgcgctacaaattaaaagcaataccttgccggagaatgagagacgtgcacaagaggagcaggattgggatggcggcatcgtaccttgcaccaagttagcagaaatagaagctgtacaagaggctgcactacaaattaaaagcaataccttgccggagatgagagacgtgcacaagaggagcagcgaagtggaggtcatggggaggaagcatgcaggagtggacgtcgtgggtactgaggacgggggagtcggttgcatgaactatgcggggagtggggacggtggaaaccacacgaatggggaaggccaccagcgggagaggcacgaccgatggggcggtggagtgtag

SEQ ID NO: 42507 - DNA, 237 bp, Zea mays
  Peptide Sequence Number=SeqID_85882
atgaggaacaggatcgcgccggtctcccacagtgaaggacgtgatccccacgacttcattaaggcctactccccaccacaagcgctcaggcaaggtatccctctcattccccaccttggagatattggtgtgctgtgtagatatcattctgtgctgaaactgactactcatttactcaatggagttaccaatgtctcaaagatagctatctatgaattttggatcaatgtattgtag

SEQ ID NO: 42508 - DNA, 720 bp, Zea mays
  Peptide Sequence Number=SeqID_85883
atggaagaatccaggggcatcttgagggagatgtttcagtgcaaagaagtcacggagttaataaacagtgttggagataagattcaggcagagtcccttgttgatctcctatcttctgcatgtgatcaggggaggattgatgagattctcttgtttgaagacctaaatgttaataatggtgtgtctgtctgtctactgcttgtgtatgtctgctactcatgttggatctcttgtttcatattttgggatgtggagataatcttcgtgtcgctggaccgcgacgaggccagcttccgggaccacttccagggcatgccgtggctcgcggtaccgttcgacgctgctggcctactacggcagaagctgtgcgcgcgcttcgccatcgagcgtatccctgcactgatccctctgtcagcgtcagtgacgtcgtccagcgggctgggatgtggagaggacgcggtgaggctggttggcgagtatggagtagatgcgtacccgttcagtgcgcagaggagggagctggagagcatggacgatgccaggagagaaggaggccggcttcaggagcttcttggctgcgaggagagagactttgtcatcagtgcagatgacataaaggtgaacaaaaaattcgtgaaatttctcattaatcaaaactacttccataagtgcatccccctttgcatttttcattttgaccatttagtcaacctggtttag

SEQ ID NO: 42509 - DNA, 378 bp, Zea mays
  Peptide Sequence Number=SeqID_85884
gttgaagctgttacagtacatgtgactcagaagtattttgttggcgaggcttcaggacaagagggatatacatctgcgtctttccatccagatggtcttatccttggaacgggaactactgatgctgttgttaaaatttgggacgtgaaggctcagtcaaatgtcgcaaagtttgagggtcatgtcggaccagtcactgctatgtctttctctgaaaatggttacttcctagcgactgctgctcatgatggtgttaagctttgggatcttcgtaaattaagaaattttaggactttctcttcctatgatttggacacgccaaccaatactgtggaatttgattttagtggaaactatcttgccattggtctgatatga

SEQ ID NO: 42510 - DNA, 285 bp, Zea mays
  Peptide Sequence Number=SeqID_85885
atggaacgaggggctgaaaaactctattctgaggacgacgtctcggccccattttacacacacgacgcggcaaaacaggcaagtaaacagtcgtgtagtcacaacactaacgtgatttactcgcaatcaatcacaattaatgcgagaataatttcttatcaaaacaggaaaactatatcactattcatgaagcaaagagaatggaacacttccataactgcttccacctccctctatctgaagaagcttacgtccagttgcttgttctccttagagataccttga

SEQ ID NO: 42511 - DNA, 570 bp, Zea mays
  Peptide Sequence Number=SeqID_85886
atgttgcccggaaagccctccgacaactatgccagagctacaacaagcaacaaaaatacacccgcctggaggaaaagacttcaggccctgtcaggaggagaccctatcgaagatgaccccaccatcgtttacatggctggatacctccacaccctcgataaccaatatgatgaccttgcctcccactgcactcacctaaactcccgggtggaaagcctggagcaaaaagtcagggaacttacaaaggaaaaggcgtcccttcaagagagcctcgagatagcagaaggcgaggaaaccaacacccgtgaggcctaccgcacactaaagatggattacgacaagaagctgaagaagctcgcccctgcaagaaaaatccgcaagaagaccaaaagtcaaggatgtcaggctgagcagaaggaagaagcccctccagccctacctcctaccaggataagaaactcgtccgacaccgaggaaatgtccctagccagccttgatgaccttctcaaggaatttggggacactttagagaaggagttcggaagtaccctcgatagcactcgcgtgtaa

SEQ ID NO: 42512 - DNA, 183 bp, Zea mays
  Peptide Sequence Number=SeqID_85887
atgtcttcaccaaacagctcaaggagctgtcgatcttgtcatgtggatgaacaagaagatctcatgctcggtactttctggtgccactgccatctggctcctattcgatgttatggagtagcatctcttcgccttggtttctggttcctacagttcttgggagctgttgcaactattatgtga

SEQ ID NO: 42513 - DNA, 360 bp, Zea mays
  Peptide Sequence Number=SeqID_85888
atggcgcctcctgttgacgtggcaggtctgcgccctaggttgggcgatgtggaagctcctccgaagcctaggtcgagtccgtcttccgtggccgagcccgagtccgagccctgggtcgggcggagcggagttcgccgtcttccgggacttagcccgagtccgagccctgggtcgggcggagcggagttcgccgtcttccgagacttagcccgagtccgagccctgggtcgggcggagcggagttcgtcgtcttctggggctgagcccaagtccgagccctgggtcaggcgaagcggagcttcctatggccggtcagtggagcggcgaagtgacggcggtcacttcggctctgtcggctga

SEQ ID NO: 42514 - DNA, 546 bp, Zea mays
  Peptide Sequence Number=SeqID_85889
atgaggcggaaagacggcgggtatcccccatccgggggcttggaaggtggaaagacacgatgcataagggagagcgaagacatggtcgccttccgaagggggcccacgcgtcacgcaaccggcgcaccggatgcttcgtgcaagcaactgcaccgccactcgcgccactaccgcgcctcctcgactgcggaaccaataccgcgattcgaggcgacccagcgcacgacccagcagcgccagcctggcgcgacggtcaatacggccaaaaatgggccggccgtaatggcggtagcaggcgggcaggagcagcagtcacgtcgtcagccaagctcacgtcccatccgggggcagcgagagaaccctctctcacggcgtgaagacaacgcgcccgtgttccgctcctcgaacggctcgcgcttgcgcaacggtcgccccgccaaccactcgccccgtcgcattaactccgctgcgggacaggcggcgcctcaggcaggagaagcggggaccgggaaagggggataccccgaaaaggatccttccccgtga

SEQ ID NO: 42515 - DNA, 132 bp, Zea mays
  Peptide Sequence Number=SeqID_85890
atgagctcctccatgactcgcaccggcctcggccactcttccccccccccctccctcgagctccaccgcaccggctccgccgcccctcccttcgcgccgaagaagtggggaccatcaatccggaacccgtag

SEQ ID NO: 42516 - DNA, 126 bp, Zea mays
  Peptide Sequence Number=SeqID_85891
atggcgcaccagacactgtatggtgcaccaccggacagtccgtggttggctgatccagttgctttggccttaatttctccccctttggcattaagcaccaaaacaggatcatttttggccctttaa

SEQ ID NO: 42517 - DNA, 174 bp, Zea mays
  Peptide Sequence Number=SeqID_85892
atgtctgacccggagctgaggctggtgctcgagcttgctactgacgaggaactgatggaggtcgaggagatcctctacggcaccagattcagtgcctattgcagtttgtatttggtgctagctaatagtaacttccatgtctcaaagttcagcattagtgacaaagatgtttga

SEQ ID NO: 42518 - DNA, 354 bp, Zea mays
  Peptide Sequence Number=SeqID_85893
atggagaacggcaagggcagtgacgtggggacgccgggcttggagcggtggagggggctgcagcttggggacgccggccttggaccggtggagggggccgcggcttggcgcgacggcggaggcgcccgcggcgtggggcgctggcgcggcggcggaggaggccgcggcggccgcggcattgggcgtgcggctcataggggcgacgagcggctgggaggagcgcgcagagtggggcggcggttgtgcggcggctcggcgagacggcgacacggcgtgagaaacagaatgagcgagaggagaatgacgcggttcgaaacccctagctcggcgccaagatctatggcgccgagctag

SEQ ID NO: 42519 - DNA, 564 bp, Zea mays
  Peptide Sequence Number=SeqID_85894
atggccattgccggtgatgtcttacacggggaatcccgactccaaatcccgatccaacaggtgcaacacataatagatgtgaagacggaactaggtatagtcatcttaccgagggtggcgcgcgatggtgaccggcccgcggtggagtgcggatccgcgacaatgcttgcctccgaggtaggtgacggcgcaaggctttgggtcgaaacggaagagaacgagcgcgggcggccccttgttattgccacgacggcgaggtgggccctcaagaatcagcctcgctgcccggaattctgcatcggtagtttcggtcagcgccatgggcgcgcggaggtggagttcgcgctgaccagcgggtcccacgcgggagtgacagagtgggccgcgcggcgctcgtgtcaatcggctggtttcctgggcccacgtgtcaaccagagcacgggcgaggaggaactgggcttgggtcatgcggctgacaaggcggtcctgcctgtcggcgccgcggtgaaggctaggctggagtgggctaggtgggctgccaggagcagattcgacccaagctag

SEQ ID NO: 42520 - DNA, 276 bp, Zea mays
  Peptide Sequence Number=SeqID_85895
atgatcaagtctcaggccctggtcgacttcgtcgtggaatggacggaagcacaggagccatcgctggtggaggacccagagtattggacgatgtactttgatggttcctatctgaagaccggatgcggcgcggtgaaggctaccagtactatgtccgacaaaactcatatgctggctcaagccctacagaccatccctgtcaccgggccatttgcggtttgggggttggacttggtcgggcccttcaagaaagcgtctggggctgcgcccacctga

SEQ ID NO: 42521 - DNA, 669 bp, Zea mays
  Peptide Sequence Number=SeqID_85896
atggaaggaaaggagctcacacccagcggtcgagtacacgacctgatcaatacgcgggagaggaaaggggtccttgtggcatgccttattgagcctagtgtagtcgacgcacatcctctagctctcgttcttgttcttgacaaacacgggatttgtgacccacactgggtggtttattgctcttatgaacctcaccgccaggagtcttgctacctcttcgcttatggccttgcgtttttctttaccaaagcggcgaagccgctggtaacaggcctgaccgtcggttggatattcagggagctaagcaaattcccttgggattcccggcatctatgcgggtttccaagcaaaggcatcgcgattggtttggaggaagttgatgagggtgccctcttgcctgtcggagatcgtggccccgattcgaacatgcttggaagggtcagtgtcatcgatctgaacgtcttttctgtcctcggtggatttgaacatgccggaggcaaccttgggcccctaggaagtccatcacttcgaactacagaacataaccagcagaataatttgtccaagcgggtggacagtgtggccgggcgtgatgccgtggatcgacgcgacgctgaggggcagcgcagagcgtgcgatcccagggcatcaaaattcttgcgtacatga

SEQ ID NO: 42522 - DNA, 489 bp, Zea mays
  Peptide Sequence Number=SeqID_85897
atgcgctcttatgaagcacagagagatcctccaattctcatcaaaggcaccttcaggcagctctttatacatgatggacctgtcttgtgtcgactcagacaattgagcctaagccttcgacatctggacgtcttttatattttacttatgatgaagctcaagtataataaaactggcagagagaatgactgcttgcctagagttgggcattggaatatgatgaacaagggaccgacgaggagggacgcggcagcgctggacccggagctgctgcagctggtggagcttgccccaggcgcgcttcgtgagaactccatcgctgatgtgttgtattcacagtggctcgtgctacccgatacgaccaagctgttgggatccacagcaattgggttgaagatgaaggatggtgttgttctcgccattgagaaacgtgtgacctcaccacttctggtactgagtcacttcttatctggtcatagtgttaaatga

SEQ ID NO: 42523 - DNA, 540 bp, Zea mays
  Peptide Sequence Number=SeqID_85898
atggggtcgggcgaggcggagttcatcgtcttccggggccgagcccgagtccaagccctgggtcgggcgaggcggagttcgtcgtcttccggggccgagcccgagaccgagccctgggccgggcgaggcggagttcgtcgtcttccggggccgagcccgagtccgagccctgggtcgggcgaggcggagttcgtcgtctttcggggccgagcccgagtccgagccctgggtcaggcgaggcggagtttcctatggcgcccgaggccggacttggccgctgccacctttgcattaaatgctcctgcgatacggtcagttggcgtggcgatctggtcaaggttgcttattggtgaagactgggcctcgggcgagccgaagctttgtgctgatgggggttaccagctgagatttaggagtcttggggacccgccgggtgtagcccccgaggcctcggaggagtggtttgactccttcgaggtcttaatgcgtttcgcaatgcttcagccggtctggttgttccctcatgcgagctggccgtag

SEQ ID NO: 42524 - DNA, 583 bp, Zea mays
  Peptide Sequence Number=SeqID_85899
atgcaggcggcatgcaaccgcaccaagtgggcgcagcctttcgactccaacgcgtccagcatgggggcccaggcccacacgtcatgtgtaaaaggttcacacttagccaataaaaagatcaagtattggattcaacaaaggagcaaaggggcaaccgaagaggactccaacttgaactcgccaccttcgggaatttccagaggcactccgctaaaattcaccggactgtccggtgtacaccggacagtgtccggtgctccaaggaagagccgcctccggaactcgccagcctcgggaaaacgtagcggctgctccgctataattcaccggacatgtccggtgtacaccggactgtccggtgaaccagcagagcaacgactacttcgcgccaacggtcacctgcaggcgcattcaatgcgcgccagaagcgtgcagaagtcaggcacgcccatactggcgcaccggacattgaacagtacatgtccggtgtgcaccggacatccaggcaggcccagaagacagaagatccaacggtcagaatccaacaactttggtgacgtggctggcgcaccagacatgtccg

SEQ ID NO: 42525 - DNA, 201 bp, Zea mays
  Peptide Sequence Number=SeqID_85900
atggttcagaaaaaccacaacaatggtaaagggaagcaaaaggccatcaagcccaataagactacaaccttcaagaagaggaataacaaggttgagctgcctccttcacatgcactgaacttcggtacttttgtaaggattgtcctaagaaagcagattatcgtgcgaaaaggccaatatcacagagactacccacgagag

SEQ ID NO: 42526 - DNA, 780 bp, Zea mays
  Peptide Sequence Number=SeqID_85901
atggcgccgcccccgcaccgcgcgttcagctcctccgcgcccacctcactcgcccccaccacggtcgccgctgcacgccataaatgcccgaccccgtcaccccgcccctcacccaagactaccgtcgtctccccctcgtgcgatgaccaggttgccccaagcccgagactaccgccgattcgccaccccacccactcagcccaccaccccctgcgcactccgttcaagccatgcaggagcttcaccccgactctactccaggcctacacggcgctccggagcgccggcaagagcgtcgagataatcttcgtgtcgctggaccgcgacgaggccagcttccgggaccacttccagggcatgtcgtggctcgcggtaccgttcgacgctgctggcctactacggcagaagctgtgcgtgcgcttcgccatcgagcgtatcccgacactgatccctctgtcagtgtcagcgacgccgtccagtgggctgggatgtggagaggacgcggtgaggctggttggcgagtatggagtagatgcgtacccgttcagtgcgcagaggaggagggagctggagagcatggacgatgccaggagaggaggaggccggcttcaggagcttcttggctgcgaggagagagactatgtcatcagtgcagatgacataaagattcctatagctgaccttgctggcaagacagtcggcctgtactttggagcacactggtgcccaccttgccatgtcttcaccaaacaactcaaggagttgttggttaagatgtga

SEQ ID NO: 42527 - DNA, 564 bp, Zea mays
  Peptide Sequence Number=SeqID_85902
atgaggctgtggactccggggactagggcgatgggtaagagcagcatttgggttcggggaggtagcatggggtgcgagagcggggaagggagtgatggtggtgcatggtatcttcctctagaatgctttgacctcagcaaaacatcatttgtttcatctaaggccgatgacgctgccgccgacacgagcgcgagcgcggcgccggctgctcggaagctggggctctgggacgcgctggcgttcagcgggcccgcgccggagcggatcaacgggcggctggcgatggtgggcttcgtgtccgcgctcgccgtcgaggccacccgcggcgacggcatcctctcgcaggccggcaacggcgccggcctcgcgtggttcgcgtacaccgccgctgtcctgtccgccgcgtccctggtgccgctgctccagggggagagcgccgagggcaggagcggccggttcatgaccgccgacgccgagctctggaacggccgcctcgccatgctcggcctcgtcgcgctcgccgtcaccgagtaccttaccggcgcgcccttcgtcaacgtgtaa

SEQ ID NO: 42528 - DNA, 672 bp, Zea mays
  Peptide Sequence Number=SeqID_85903
atgcagcccggctgcacccctccgccggcggtcatccgagatggtgacctccagcttgatggtgggggaaagcgagccgggctgcggcctctgcccctccctcagcctcaaggatcaccagggctgggaggggacagctgcaccgtgcctgggtctcggacgcgagtggcttcggagccgctcgcggcgccggcgtctgccacggcagctagaagaggttcttccaccggcgagatagccagggtcggccacggaccgacctccaactctacggccttctgcccgtccttgcctcacgagtttgggcatgggcgggggcctcttggcagcatcatccgccctgaggtcagtgctgccgctgttcagccccccggggcagaagtcgtcgtcgtcgctgctgctggagcgggtgacggcgtgccgttcgtcggtcttctgttgctccgcaggccctcccccatggagtcgggttacttgcctgttggttgtctgaaccgcttcaccaagcgtgagtcgccccgtgtcaaggtgacgagtgagagcggagatccttggaccgtgtcgccgtccgaggctaggtcggacctcgccgaaggtgtcgtcgatgccgagggtgctgctgcccccttccagtgtcaagacccgagcctgcaggatcagattgtcttgtag

SEQ ID NO: 42529 - DNA, 654 bp, Zea mays
  Peptide Sequence Number=SeqID_85904
atgagacagcagtggggagattacagcgacgcggtggaaaggttaagccacgcggcgcacgggccgggaggcggcggtcaccggcgagtctatggttccattcgcaaagcggaaagggaggccacggggtgttacaagcgcgccaaggaattggaggagcggttcaacgctctgcagacccgtgtggagagggccgaggcttcgacgcgctcggaggctgagcggacacgcaaacagcttaaggactcataccacgagctgggcgcacggaccgttgacttcgaagtgccagaccgagagctcggacttcgctgcctcgagtggctgcaggaggagttgctggcgctccccgccatcgtggaggggtttatgtcctatgcctccctggtcacctgcgaaggggcgatgaacgcgctgtcccgcgaagggtgccgacactatgaggtcttcgaccaagctgatgaggatttcgagcgcgatatttacaaggttgaggaccctgtggtgaaggaatccgcgggagccctcttcgaccggatgtggagccctcacggtcgagaggtggtcagggagcggtccgagacggcgaggggtcaggcggcgcgtaacgagaaaggtggaggacttcggggctttgaacagcgcgcagcctga

SEQ ID NO: 42530 - DNA, 441 bp, Zea mays
  Peptide Sequence Number=SeqID_85905
atgactggaagactgaaggaagttgagcgggtgcaacaacaattgttgatgcagtctgagttggcggctgtggttgctgaacaagctgcaaccgagaggaatgatttgtaccgcaaattggaagagactggtcgggaggatcatggtgctaatgatcgtggtccacaacatgatcaacagatgcccgggggtggccatcaacggggattgagaaatgatcctcgtcaacttgtggattcaggtaatcaagctattcctaaactgccatttccaaaattctcagagggagatcctgttgtttggttagatcagtgcaaggaatatttcactgtttaccggatacctgaatctatttgggtttctgtggcctcgttgaatttggagaatattgcatcacagtggtggaagactcataaactaagacatgggattggcatatga

SEQ ID NO: 42531 - DNA, 462 bp, Zea mays
  Peptide Sequence Number=SeqID_85906
atggcgctcatcatgctcatcggcgatggtagcactacgtgccacgccgtgcggcatcttgctcacgccctgcccctcgtcgctcctatcgctgtctcgagaatttatgtcgtgccgaagccgtcgatcgtgcccgtgggcacccttccactgatgctcgccatatcgacgattcctgtggtgggcgccatgccacggatccatgtggtgccgaacaccgccgcactgccccctatgttagctgcagtaccacccatcatgccaaaattgacgctgccgctaatgcccgtcgtcaggccgaaggttggcgactcgccaccaatgcccgtcgtcatgcctaaggcctgtgaagatgcccgtggagttagtgagccagaaaatcagatgtacatgtgtgcgtaccttggaggacgtaggcgagtcagagtagctggagagtgtcaggccacctgcgacgagtag

SEQ ID NO: 42532 - DNA, 1383 bp, Zea mays
  Peptide Sequence Number=SeqID_85907
atggacccattcctggagaaattcttcccggtagtgttccaccggaagaactccggcgggaagaacaactactgtaagtacgacaaccagggactagcggcgttcacatcgtcactctacctcgccggcctcgttgcctccctcgtcgcgtcccccgtgacgaggaactacggccgcaaagctagcattgtctgcggcggcgtgagcttcctcatcggcgcggccctcaacgtggccgccgtgaatctggctatgctcatcctcgggcgcatcatgctcggcgtcggcatcggttttggcaaccaggctgtgccgctgtacctgtcggagatggcgccggcgcacctccgcggcggcctgaacatgatgttccagctcgcgacgacgctgggcatcttcacggcgaacctgatcaactatggcacgcagaacatcaagccgtgggggtggcggctgtcgctgggcctcgcggcggtgccggcgctgctgatgacgttgggcgggctctttcttccggagactcccaacagcctcattgagcgcgggcgcgtggaggagggtcggcgcgtgctggagcgcatccggggcacggccgacgtggacgccgagttcacggacatggtggaggcgagcgagctggccaacaccgtcgagcacccgttccggaacatcctgcagccgcgcaaccggccgcagctgatcctgacgggcatcaactccatcctcttctacgcgccggtcctgttccagagcatgggtttcggcgggaacgcgtccctctactcctccgtgctcaccggcgccgtgctcttctcctcgacgctcatctccatcggcatcgtcgaccgcctcggccgccggaagctcctcatcagcggcgggatccagatgatcgtctgccaggtgatcgtggcggtgatcctgggcgtgaagttcggggcggagaagcaactggcgcggagctactcggtcgcggtggtggtggtgatctgcctgttcgttctggcgttcgggtggtcgtggggcccgctgggatggacggtgccgagcgagatcttcccgctggagacgcggtcggcggggcagagcatcacggtggccgtgaacctgctcttcaccttcgccatcgcgcaggcgttcctgtcgctgctgtgcgccttcaagttcggcatcttcctctttttcgcggggtggatcaccgtcatgaccgtgttcgtctacgtcttcctgccggagaccaagggcgtgcccatcgaagagatggtgctgctatggcggaagcactggttctggaagaaggtcatgccggacatgccgctcgaggatggctggggcgcggctgagggtcatgcggcacctgccagcaacaatcacaagggatga

SEQ ID NO: 42533 - DNA, 246 bp, Zea mays
  Peptide Sequence Number=SeqID_85908
atggctctgattaacacagttgctaatagaattcgcatacctctgtggagattatttggaggagcatcagatagtgtgacaactaacatcattaaatgggactggcccctgtgctcttcgagcaaccagttcacagagatgattgggaaggtcttcgagatgtcagcgatgtggccatggagaaaaacaaagtcgttgttgctgctgatgagagctatcggagtttgcttgatgctcagaaaataa

SEQ ID NO: 42534 - DNA, 198 bp, Zea mays
  Peptide Sequence Number=SeqID_85909
atgcggagttcgtcgtcttccggggctgagcccgagtccgagccctggggtcgggcgaagcggagttcgtcgtcttccggggctgagcccgagtccgagcccctggggtcaggttgtccccactgtattcagtgctcaggaggagatgctggcaacatggaggactttgaggagttccaggactacgacgagttctag

SEQ ID NO: 42535 - DNA, 336 bp, Zea mays
  Peptide Sequence Number=SeqID_85910
atggagcgtaggggtatgagcataataaaggatggagctaaagcaatgattgtaaccgacaagggagagaatgcaaccaaggtcaggataggtaaaacacccttctcaaatcgagatgggaaagatgataattcaaaaggtaggcataagataagcatcatggaaagatctagtgattacaaaggaagctttaaaatgcaggtgcaagataagcatcatggtaaagatcaagggatgacaagggttaaggtgataacagacaaacacaaccaaggaggtattttagacaaaacgtgcgaggtatcaaagaatgggaagcaatcaatggtgaagtag

SEQ ID NO: 42536 - DNA, 216 bp, Zea mays
  Peptide Sequence Number=SeqID_85911
atgaaaaccgatggctctgagaaacgacagtacaaatgtgtttacaaccaggggcggagcgctcggtatggcgagatgtggcgctcaccatacctagctccgacgcctcgacgcagcccgagtacctcccttccgacatatctgacgctgagcggagcatttcgagcaacaaccggcaacatgtggtgcggcatacggatggtaggaaaaggctga

SEQ ID NO: 42537 - DNA, 612 bp, Zea mays
  Peptide Sequence Number=SeqID_85912
atgtccggcgccctccaaggacagcatggcgcttctcccccctcctccttgcggaaaggcgacgcaggggcgggctcgggggctgctctcgcaaacctggctccggccaaaccgttgacagcgtcaacataccagcccgaggacttgggacccgaccccaagtccggcctcgagcgccataggaagctccgcctcgcccgaccccagggctcggactcgggctcagccccagaagacgacgaactccgcctcgcccgaccccagggctcggactcgggctcagccccggaagacgacgaactccgcctcgtccgaccccagggctcggactcgagctcagccccggaagacgaagaactccgcctcgcccgaccccagggctcagactcgggctcagccccggaagacgacgaactccgcctcgcccgaccccagggctcggactcagccctagcctcagccggtctccgcctcgcccgacccaggggctcggactcgacctcggcctcagaagacagactcgacctcgacctcggaggagcctccgcctcgcccaacccatggctcggaccgaccacgtcacagggagggccatcattaccctacccctag

SEQ ID NO: 42538 - DNA, 387 bp, Zea mays
  Peptide Sequence Number=SeqID_85913
atgccgcctccctccagatccaccgcttccctgcccctgctcgtcgattcggctctactacccaccacgccgtccctgtgtcagtctaggtttacccctcctgctcctgtgtcagtctcagttcctagctctgcatctcaaggcagcaacattttcaagaccaggattgacaacgttgatgcagatatctatctgattgatgaaccaagtgcttatcttgatttggagcagcgtattgtggcctcaaaggttatcaagagatttggtatatgcccattcagcagtcagtcacgcacaaagccagaatctctggagcatttaaatcaatgcataagaactttcaccaaacacattgatttaaatgctcaagtgttccttgacttgtga

SEQ ID NO: 42539 - DNA, 987 bp, Zea mays
  Peptide Sequence Number=SeqID_85914
atgcagacggaggcgcgcgtgggcgtcgtcgtcgacggcggcgccgccgtgggccggtgccaggagcagcgccacatcggcacggcggcgcacctcgccgccggaggcttcgcgggcgccgtcagcaagacgtgcaccgcccccctcgcgcggctcaccatcctcttccaggtagctggtatgcattcagatgttgcgactctaaggaagtgtagcatatggcatgaggcttcacgaatttttcgagaagaagggattgaagccttttggaaaggaaatctagtgacaattgtacatcgcttgccttattctgccatcagcttctattcgtatgagcgctacaaaaatcttctccaaacggttcctggcctggatagagactcaaataatgttggtgttgtacgtttgcttggtggtggtttggcgggaataactgctgcatctttaacttacccgttggatgttgttcgtactcgcttggcgacgcagaaaaccactaggtattacaagggcatcttccatgcggtgtccacaatttgtagagacgagggtgtcaaaggattgtataaaggccttggggccacgttattgaaattacagggagttggacctagtatagcaatcagcttttctgtctatgaatcactaaggtcttattggcaaatggaaaggccccatgattcaactgcagttgttagcttgttttctgggagtctatctggtattgcatcatctacagccacatttccccttgatcttgtaaagcgacggatgcaacttcaaggagcagctgggacagcgtccgtccagaaatcaaccatatctggaactgtccgtgatatcttgcagagagaaggtctccgtggcttctacagaggtatcgcccctgagtacctcaaggtcgttcctagtgttggaatcgccttcatgacatacgagacactgaagggcttgctctccagcattgacatagacgatgagagctga

SEQ ID NO: 42540 - DNA, 504 bp, Zea mays
  Peptide Sequence Number=SeqID_85915
atggggtgcacgacctcccatgacgtcgtcgccgccgctgtcacctcctccaattcccggccccgtgcgcgccgctcgtccgcgtccgagccctcaccgcggcgcggagaccccgccgcgctgtgccgcaagcgtgtggcgctcatccgcgccgcggccgaccgccggtacgcgctcgccacgcccgggtcctcgccggtgctcacgcttccgccttcccccgccaagctggtcgctgccgcgtccaccagcctcccgtcgtggccgtcgtccaccgtctcgccgctctcgcactccctcgcagagaagcggtggatctttagggaggcggcgttgaagggaagcgcaggagagaggacacggtcacggactcaggccaccgctgctcacagctgcattagaatccgatttcgggtccgcgctcacacgtgtcaacgccggatacgggacgctcccgtgaagtgcggacggggcttcaaaaggagtgaagttttaataacttag

SEQ ID NO: 42541 - DNA, 240 bp, Zea mays
  Peptide Sequence Number=SeqID_85916
atggcgtcccactggttctggtccgccgatgggtgggacgccactcgccgcacgtccggcccgctgctcttcgggtccggcaccatcgactttgctggctacggcgtggtccacatggtcggcggcatcgcggggttctggggcgcgctcgttgagggcccccgcaccgggcgtttcgaccatgtcggctgtgaaccactcgccctggatcatgttctaattagtacttgtttaacgtaa

SEQ ID NO: 42542 - DNA, 282 bp, Zea mays
  Peptide Sequence Number=SeqID_85917
atggatgtggataatatttgtgatattgacaacaatgtgtctaatgaagatgagatacatgttgcacaagatgcaagtgcgagtgcaagtgaaaatgcaagcatagctgcaagtgtccaaataagcactgaagatgattgtgatgaagaattagatgtcaagaaaaagaagctcacttcatgggtttgggagcattttacaaggtatgatgtagaagtggagcaaaatgatggttccattgttaagcaaaagtgggcaaaatgcaaaaaatgtcccacataa

SEQ ID NO: 42543 - DNA, 303 bp, Zea mays
  Peptide Sequence Number=SeqID_85918
atgcaggcggcatgcaactgcaccacgggaatgcaccctttcgacttcgatgcatccagcatggaggcccaggcccacacgtcatccgcctcagagcactcgggctccgcgcccactactgatcaggggttcgaaggctggccccccgaagggttcgacagccaccccagaacacgcagagcgagggatgactctgggtacgtccgatacatggccgaggctcgggctacgctcccgagaggctcgggggctgctctcgcaaacccggctccggccaaaccgttgacagcgtcaacatactag

SEQ ID NO: 42544 - DNA, 306 bp, Zea mays
  Peptide Sequence Number=SeqID_85919
atgggtgtcttccagaaagacgacgcacaatcgacacgggtagagagaagaagcgtcatggtctccgtcggcgagagcgacgttgcagtgcgtgttctcaacgcattcgatggcctgcggtgtgtatgctcttctcccaatgcggccattcctcatcgcgcttcgattgacgcagacagccaaaatggggaagagcatatgtcaaacacaagaactacctttgtgaggaagctctggtggattggccaaagggctttatcaactaaggaacaatactgccacaaccacctaatcggactaatttga

SEQ ID NO: 42545 - DNA, 294 bp, Zea mays
  Peptide Sequence Number=SeqID_85920
atggagggcctgctgccgttcctgtaccgggccatcctccacctcgccagcggcggccagtcgcccaccggcaaccccttcttccgcaacgactcgccgccggagtcgccgctggcggcgcactactacgtccgcctcgccgccggcgccgacgtgccggccttcctctcctccgcggcgcgcggctactacgaccgcgggttctcagacacgggcgaatatgataccgatttgcaatatatcgccgaaaaaaaatgccaaggctttgagaggttcttgtcctcctgtgcatga

SEQ ID NO: 42546 - DNA, 513 bp, Zea mays
  Peptide Sequence Number=SeqID_85921
atgaccttcgtctctgcgaccgcctccgccaccctcttcctctccatcctgtcccaagcacgtagccccggcgcgtgcatctgccggcagccgttgtcatctactcatctccgctgcacgcaacgggtagatatgcttagcgaggaaaaagttctaacgtccggtggtcagaggggccctctgttttttggggtccggtgcgaccgtaccctctgcaccgcttcagggccggccgtggaatctgttccggacaacttcccatttgaaataattgacgaagagggtattagcgtggttagtttgagaagagactacaagtacgagaagatcgaggttactgtcagcatggctaatttagtaggaggccctgagtttggtgatgaggatggtgaggccgatggtgagagcgctgccaaggatgacgaagaagcagaagatagcaagcatttctcaaggcctggcccaaagcttgagttcacgatacacaacctttcgtcaggagatcaccattga

SEQ ID NO: 42547 - DNA, 505 bp, Zea mays
  Peptide Sequence Number=SeqID_85922
gcgcggctcgcccctgcctgcccctgcgcggcggcgccagtcccggcccctccccggcgcggcacggcggccctgcccctccccttccccgtgcggcagtgcgcacgtcccggcccccctgcccgcgcggcgcggccccgcccctcccctgtccgcgcggcgcggccccaccccgcccctccccttctcggcggcacgacggctcgcccctgcccctcccgtggcggcgcggcccaccccgcctctgctccctcccttgcggcggctcggccaccggcgtggccccgacgcggccccggcgcggcccccgacgcggttcggcctcggcgcggccccaggcgtggtcctctgccccgacgcgacggctcggcccctgcgcgcggccctcggccccctgcacgcggcatcccggccccggcgcgactcccgtagccccgtttaccccctaacgcgttcccgcgtgcgcaaacccatgcgcgcggtgattatttttggttgtagctaa

SEQ ID NO: 42548 - DNA, 195 bp, Zea mays
  Peptide Sequence Number=SeqID_85923
atgacgaaggacttcaccatgactactgagttaccaccatatgattatatgcggggaagcttcgtcgcagaggaaatcttgaacgttgaattcttcatgacaaaggttgtcatgattgtgaccatcatgatcttggtctctgcaggatcgatggatgcaaggatagagctagttgtcgttgctttcttcgactag

SEQ ID NO: 42549 - DNA, 495 bp, Zea mays
  Peptide Sequence Number=SeqID_85924
atggacggcgccagtcgtgaaaccgtctgctcagactcgtttcgtgatggaagcaatgacgtctgcataatagaaaggagaatagaagtgggagcagatgatggaccgagtggtgaggaagttggagacggtggagtctgggcatcatcgcttggaaggacaggcggaagtctccgccatggtagcgaagaatgcagaagaagaacgtaccattctggccaggcaaatggaagagacgagcaaggtggtggcgtgtcaatgtttggaggtgatggccagagaactggaaggtttcaggggaaggagcctggaatttgttggcaaagtgccatctaccaagttcccaaggcgttgtgggcgatttccgcatccatgcacatggaaggaaacaatgctaggtggttgcaagtgtacaagatgaagcaaggctttggaaactggatgcaatttggtagggctgtccgggacaaatttggagtagaagagtatccataa

SEQ ID NO: 42550 - DNA, 549 bp, Zea mays
  Peptide Sequence Number=SeqID_85925
atgcacccccgcatcgcatcgggcgccaccggtaagtcgaccgcgccgtacggttcctgggagtcgccgatcagcgccgctgtcgtctccgccgccgggaggaccgccgaggggtttgcaatcgctggcgacggccggctcgtctgggtggagacgcgccccgaggatggagggcgcgcggtcctcgtgaaggaagcggcaggaccaggcggtaaggctcttgatgtgacgccgcagggtttcgcggtgcggtccctggcgcaggagtacggtggtggggcattcgccgtgcaaggggacaccgttgtgttctctaattacactgaccagcgtctgtacaggcagacaataggagcttctcttagtgacaaaaccccatacgtaagcctcatcttcttcctctggcctctgggtggatccccggttgaggttgtgctccctcgcgacggcggatccacgctcgcctgtatagcggtcgaggtcatgctcgcccgcggtggccaggccaaggctatgctcgaggtggtgacctcgctgcggggaggctag

SEQ ID NO: 42551 - DNA, 81 bp, Zea mays
  Peptide Sequence Number=SeqID_85926
atggcggcccaggcccaagttgcagtctgggcacgctccgcccccgccccacatgccataagaaaaatctatgaggactaa

SEQ ID NO: 42552 - DNA, 180 bp, Zea mays
  Peptide Sequence Number=SeqID_85927
atgggtgggcgtgccgccgttggtcgggtattgtcggtggttgtggcctccatggtcggtgagcgaagacccgactccttatcctcctccacctccttaagtgtgacgaggatattggttctcgtcgttgatcaacggtggatccgctcctctaatggcacctgcatgggggaggcttag

SEQ ID NO: 42553 - DNA, 336 bp, Zea mays
  Peptide Sequence Number=SeqID_85928
atgggaagctccgcctcgcccgacccagggctcggactcagcctcgaccccggaagacggtctctgcctcgcccgaccaagggctcggactccgcctcgccctaccccagggctcgaactcagccttggccttggaagacgcctcggcctcggaagacggtctgtgcctcgcccgacccagggctcggaatcagcctcgacatcggaagacgaactccgcctcgcccgaccccagggcccagactcgacctcgacctcggaggagcctccgcctcgcctgacctcgggctcggacccgccacgtcacagggaaggccatcattaccctacccctag

SEQ ID NO: 42554 - DNA, 681 bp, Zea mays
  Peptide Sequence Number=SeqID_85929
atggcggcgcaaggggcaggaagggcgatttcctcttctctggctaagtctctcgggttgcgaaaacctaagagggaggcaggaagcggagcaaagaaccgtcaacaggccctctcccaggagaagcgggcgacgcttcgccttcgccataataaccgcaccaaaaagaggctcgggggctgctctcgcaaacctagctccggccgaaccgttgacagcgtcaacataccagcccgagaacttgggacccgaccgtacacccgggctacggccagctcgcatgagggaacaaccagactagccgaagcattacgcgaggcattaagacctcgaaggagtgaaaccactcctccgaggcctcgggggctacacccggcgggtgcgctcgcgcgcacccaccggaacaaaatgcaaccgagaaaggctggtccccttgcaaaaaagtgcgacaaaagcctccaagcgagtgctaacaatcccttcgaggctcgggggctactgtcggggacgataattaggggtaccctcaaggctcctaattctcagctgaaggacagcgccgcctgcgccgcgccgactgcagtgccacttgacagagtgaggctgataggcagtcaggtcctgcagaaggcaccacaggaaactccgctctgcgcgacccagggctcggactcgggctaa

SEQ ID NO: 42555 - DNA, 309 bp, Zea mays
  Peptide Sequence Number=SeqID_85930
atggagatcgccgtggtcgtgcacgccgtgtggacgaagctcgacatccacctcagcaccagtcccccctgcgccatccacgtcctccactactccacgcgagaagacgaccaaaccagccagcactgccccacccacagtgtccaacacaagtgcctaagtgtaaaaaggtggacaaagtacaaatcaaggataaaggaaaaatccaattgtaaatgtcttggttcgagcagccaagactctgctgagtctgggagcaccggactgtctggtggtgcaccggacagtgtccggtggtgcaccggatag

SEQ ID NO: 42556 - DNA, 999 bp, Zea mays
  Peptide Sequence Number=SeqID_85931
atggattttacaaacctcacttatatgtgtgcccaactgaccatgaaaggggttttgggttctgctggcgttataggaaatcctatgggttttgctaggaatgttgggtttggtttaaaggacttcatatctgcttcaagaaaagggaaattgcagagcccagttgaactattaaacggtatagcacaaggttcaaagactcttattggaagtacggtttatgcagtcagcagtgccacttctcacttcagtaaaactgcttataagggtctgactgggctccttcaatcaccgattaggggagctgagaaacatggtcttcccggggtcatctcaggtttagcaatgggaacagctgggcttgtggcacggcctatggctagcattcttgaagccacaggcagaactgcccagagcattagaaaccgaagcaaccctcacgaatccaactacttgcgagtacgtttccccaggcctgttgccagagatcgccctttgtttccctactcctgggaagaagccatcggtgaatcgttgcttgcccaagctgacagtggcagactaaaggaggagacatttgtcatgtgcaagacactcaagggggctgggaagttccttgtgctaactgagaagctgcttctgctagtctcaagcccatacttggtggatctaggatcgcctcggttcatcggtgttcctcctgacccgcagtggtcgatcgacacggagatgcacctcaagagcgttgttcatctggacaggtctcaggaggtagtgaacattgttgggagcaacggacagacctcacctagggacaaaagaggtggcacgagaaacagggtcatgagctcggccttcgtccccctgtttcacctcagcatagagctgccaaatgaggaggatgcagaagggacggtgcaggtcctacaggcactcatcgagaagggcaaggcacggaggtgggacaagaacatcctacaccggagcaacatcagttga

SEQ ID NO: 42557 - DNA, 711 bp, Zea mays
  Peptide Sequence Number=SeqID_85932
atgctggctggatcggtcatgacggccatggtggcaatggcaccagagggagggagtgctgcgacaccaaaggtcgacacaacaacgcctgagggagtaggcccgatgttggtggcgctagggagtgatggggtagaggccatgacaccacaggggatggaggagacgcacccaccgacgacaaggacagaggccaagacagcatcccaaggatcaaaggtgggcgatagggcagggggaagcagcagccaacagaaccttgtcagggcttgccatgtcatcggcagcgaggacaggggctgggacagccgcccaaggcccagcagcggccgtctaggcagggacgggccgagcaaaagaggggagagggagaaaggccgcaccagggtggtgcgacggcaggcggccggccatggctggcggcaaccgagaagagaggtgggaagagagccgacggctaggggcagggggaggcgtctgatagcatattggaggagatttttttttcgtgaacacgcaggagagctgcgcatcattaaattaagaggagaaacagtcccaaatggaccaaagtacaatggcacaaaaggccaaacacaagaccaccaaaccctgaccaaacacaagaccaccaaatctgctacgcacaggaatgcagcttccttttgcgcgtggaaacagcagcacacaatctggaggagaatagaatag

SEQ ID NO: 42558 - DNA, 1221 bp, Zea mays
  Peptide Sequence Number=SeqID_85933
atgctccgaattcgaaggaactcgcggtcccaagtgcgaatgaaccgaagcacggaccaaagaagactggggctgggagctgaaacgacatttctgccggcttccggagccgcgatcacgaccattggctggccagagacggcggagaaggcgggggagggggctccaccgacgaacggtccgagcgagacaccaggaccgaacagggtagaccaccttgcgcgtggacgaaggcacatcccccacatgaaccggcgactcttccacatggaggtccacggccgagggcagtccctcaggaccagcacaccaaactctcatcttgaacacagacaggtccacgtcttcttcagtgacaggcatgactttcaggtttctgtcaagtgtcaagaactcaagactgtgcagcgagtaggtttctgtcaagtgtcaagactgcatcgagtagcgagtagcgacaacataatttcttctccaaatgaagctccatcttttgtggctggtgagtatgacccgaagagcgatcctacccggaagccacggaagtctactgatccagggtggaagtatggatttcggctagatcttcaaaataaaaataaggtggaatgcaccctatgtggtcaggttgttagtggagggataaagaggttaaagcaacatttggcaggggcatacggagatgcaaagttatgtcccaaggctagcagtggattaaggaaggagatgacaagttatttggaggcaaacaagagaaaaagaccaatgtttctggatgaagatgaagaagatgatgaagtggtggaggtggcagcagaagatgaggcgaacgatacatctgttgtggagtctcaagcatccaaggtgcagcccaagcctagttctggtacagcagccaaaaaaagacaatcaaccttgcaatttaaggcaagtagtgaagcacagccaaagacagccaagtccgtagttgagatgttgtggagaacaccagaggaggtggtggatgagagactttcaggctcttatcagcccacaatcttggctagtgcaaaaagtaaggaggacaaacactatgtggacatgcagtgggctttgttcttctatgagtgcggtgttcatcaagaagttgttccgccatacggatcttccagagatgatatggaagcccatgaagctcgacatccagcaaccgaggcaaagcaccaccaccggacgccatga

SEQ ID NO: 42559 - DNA, 273 bp, Zea mays
  Peptide Sequence Number=SeqID_85934
atgttttctgggcttggtatggaatgtaaaatatgggatgatgcagcaactattcttgcttggcttgattctcttcggtgtagcaccggtgatggtcttggggcacctgttgtcagtatccaagtcgactttcccaagtcaaatgaaagatcagaagcttcaacaagggtcgttgtccaggaattcaacgccatctatgaaaccagaaattcttttgttaatgtcctgtactccacatggggtttcccgccttcccattttcagcatgatagg

SEQ ID NO: 42560 - DNA, 603 bp, Zea mays
  Peptide Sequence Number=SeqID_85935
atggggatccgcaagaagcccgaatatgtctggaaggagtaccgtgaaaatggaatagaaaagtgctctatggcgcaacaaaaacacccccacctggaggaaaagactcctggctctgtcaggaggagatccacagaagatgaccccactatcgtctacatggccggatacctccacaccctcgacaaccactacgatgagctctcctcccaatgcacccacctaaactcccgagtggaaagcctagagcagcaattcaaagagcttaagcaagagaaggcatccctccaggagagtctcgacatagcagaaggcgaggaagccaacacccgtgaggcctatcgaaccttgaagatggactatgacaagaagctaaagaagctcgcccccaaaaagaaaatccagaagaagaccaccgaccaaggatgccaaacagagaagaagaagaagaagaaggcccctctagccctacctccccccagaatagatgattggtccgacgacgaggatatatccctagcaagccttgatgatcttctcaaggcatttggggacaccttagagaaggagttcgttagtacctcggggaacgctctcgtgtag

SEQ ID NO: 42561 - DNA, 339 bp, Zea mays
  Peptide Sequence Number=SeqID_85936
atgttttcgggaattggctgctgggcgttgactcaaaaactagaaagcttattattacaggtgtttcgtatctgtaccaaggtgctcttcaggggaacacattggctcagattttgggccatgatgcagaaaagtgaagacgaaggagacaaaataaaggccgcttgtcgacgaaggttgaagcagcaccttgttggtgttcatggtgatgttgataagtgcccgaagacaacatcggcaatcagcaaagagatgagtgattatttaaagaagaatgctagacagaagccgattgagttggatgatgataaagagggtgataaagacgatgaagttgag

SEQ ID NO: 42562 - DNA, 573 bp, Zea mays
  Peptide Sequence Number=SeqID_85937
atggcccaaaatctgagccaatgtgttcccctgaagagcacctataaagaagggagctgcctatcattatatcaaaaggagaaagaagcaaggtccaacggggtacaagtgacgccttacggcggtctaaatgctcttctcagacttaaccagatgattacagattctcttgatccgagtaatggtagtggtatttgggaagatcctggaatcttgagattaaaccatgatgatgttcgtaccagaagatacgcaccatactttctctcgaatgacacatcattgccctttaggttcaaggtgtaccgaggtgctgttaattcagatgatattggcagtttctctgtaatagatgaaaactctgtgccggcggggtatgctgtcccaatttacgtcgaagaaactcctgatgaatttttcttccaacacagagaagcacgatcatcagaccatctcatcgagaaacgaatgagtgctctatcacactacatgatctccattgagtttgatggaacatcagggcccttcaaaaccaatgtcaatggacctttgtggggcatttacttctttgaa

SEQ ID NO: 42563 - DNA, 3303 bp, Zea mays
  Peptide Sequence Number=SeqID_85938
atgatcgtgcggaagcgggcaatcgggtcaagggattgcaacgtgtggaaatgcgtagaggtactttcttctctaaatcggttcaataatttgggaacaagacttgtctccaaactgaagtacatgtctgctaatcgtaaaaaacttatttgggatttgaggatttatcatttcgtcattaggataccatcacagaattgtgaaaggaaagaacttgccatggttattgatgctggggatgtattcattcagtctaaagatacaattgacgatatttctcgaacacaagaaagcaattcctttcttgatcacatatcaaaaagtcttcctagttatttttctgatgatctgttactcggtatccagttggatgagctttataaccagtttgagcttggccttactgggtttcaggtgaaggtattgttgcctgacagacataatgtttcctctacactgattaagcttgatgcttccattgcacttcgattgtgtgtattcctagatgaaccagtgctaaaacaattggaggtcggttttattgtgtcatctattgatgcatacctctctcagacaatgtacagtaccattgttaatttgcctagaatgaaagaaactaaccttttcaagaacagcgtatttgataataccaagacacatgtacccaagaaattggccttgaatgtgtctgtgtctctgaagctcgccaagttaggtttacatgttgaccttgatggtaattttgaggaaagttctggtctcattgttggcattgaagacattgatatcaggtatgctatctgtgaattgtcagatctttctcttgccatgaagacggtcaatgttactttcagatattggaaggataaatcagattcacatgtgctatgcttatctgggaacttaacacgatgtcctgaaaattctgttgaaacttgtttggatctgcattatagaactcacaagcatgacgatcaaatacatcatgtataccggctgattttatgtgatgttgatctgcatgttaacccatctgttattggtcagataaggatgtttttaagaaaacttgattcaggaccttcaattggcagtgatgttgaatccacaatgattggtcagagttccatgaaatccggggcagctaatggcatacttcccatgttctttttgtcaaatttatgtggtgcagatggcactgtattcgcaggagtttctgttgaccacttcccatttttagttgcagatcacagttgtggatataattttgggtgcttaggaactcaaaatgttgaagcacaagaaagtttatactcaaagaatgagcactgtcatgacacttcaggtttgaatggttatcatgcatcagatctcaccagcaatacatacggtaaaacccagcgttcagattgttcatctggctcatcaaatgaccccaagaatgccagcagaactgttctggatctatcacttatttctgttagaatacattttcctgaatcatgtggtactttagtaacaataaccattcctgaatcgatatcaacactcacttattttgatgcaagctcatgggacttactattgtctgctaacaatttgactcttgcttcaccatggactccaccaaatgtcaacgagctggtctggggcacagcttcacatcgcaatgctagtgtactcaacgttcgagttaaaaaggacttacctgcactgtcaaccgaagtatgtgttggaattcaaaacgtttgttgtgtattaccatccaagttactggctatgtttgttggattctttttgttggatgattggaatcgtattgcagaacaggaattccttgtggcagataacaaccttgaaggcttgagagaatcacatgactgtgtaacatataaatttgatatcagtgattgtgttgtattttttcctgtggaagagcaaggtttatcgtgtctaaagctggaggttccacattttttctgtgagttcattgcgaacggaagctctgtagaatttgcaaagcgtatccccaaagaattcttcagttcagagtgcatagtttccagaagagttgatgtcatctgcatatatgcaagaaatgcatccatatcacttctaattcttgatgagaacgttcctaagagaatccattctcttattgaaaagcttgatgccgacgtatggattcaggttccttgcaaagatataccatactcgcagcagcctacttcacctacctccgttatgagcaaaatatcacgatgcaacttgattgctgaagatttatattttataaatgggatggagacagttattggtgttgttgaccagttgatttcgatcggcaatgaaagtaaaatgtacaaaggcaatgcctcacagtttttagatcatagaagtttctgtgagggcaaccctgatcctaatgagtgtaccaatctcactatttcgatcaaggatctgatgattctcttgggccagtctaaagctaaaggtctggcactggagaggattgccactgcaaacatggagtttgatgtttctgctgtactagttggtgaaaaaccagagcgcatagactttgacgttgtttctttaacactgcagtcacctggtggttacacactcatctccattgtttcggatgggccactatctcctgtttttttcaagtttacaaagcaccatactggacaagatgagatattactaagtgtacccctttttgagatctggttatatttacaggattggaatacaattatcaatcattcccattcatacataaagacagaagtaaacagtatgcctgtggagcatgcagctgctttgtctcagtttccagaaatggtatcgtcaccacttattgcatcagaatttggttcaccagatgacttcaacttagtggtaacatgtgaaactatttctggtgtactccatatacctatctgggggaaagaagaaaatcacacaagcaatcacatgggtgtgactcctgcttcttttccaatggaagtgggcactcatgagacagatgatattcaatattgtgaaccaaaaggttgcaagtttgtcaccttaacttttgatactaaacattttgtggtgatgtcaggtgatagctgcataaattttagatgtgatttagagagattgaaggtattgctggaaatgattcaagagaataagggtacctctgttccatttgtgcatatatctaaggttaaatcttctggttatgttcgtcaatcagaaaggaatttggaacatctttctgttgatctacaagctgaatacatggat

SEQ ID NO: 42564 - DNA, 90 bp, Zea mays
  Peptide Sequence Number=SeqID_85939
atggtcattaaggcatcgcaaaagcaacgcttaagcgtcgctttagcgataaagcgccccaagatggtaaggcgtccaagtcgcattgaa

SEQ ID NO: 42565 - DNA, 462 bp, Zea mays
  Peptide Sequence Number=SeqID_85940
atgagcaagaacacaagatacacaagatttatcccgaggttcggtcacaccaccaaggtgccctacttcctcgttgaggcgcccacaaagagccgggtctctttcaaccctaatcctccgtttgctgaccacaaagaccggttgaaccgccccctagggcggttgaaccgcccctggcaggcctggcagactgtctgccagtctgactggcagactgacgcgcagaatgacctgcagactgactgcagatcagaggtcagaggggttagagaccagctgaactaccccttaggaccagttcaaccggtcttgaccagtgagtttaggagagaaaaccccagctcaactgcccggaggcaagttcagctgctgaagaagctcaactcagctgaagtcaagttcagctggaaagctcagctgcagttgaagaagttcagctgcttttcagcaagaacactctag

SEQ ID NO: 42566 - DNA, 420 bp, Zea mays
  Peptide Sequence Number=SeqID_85941
atggccgccctgatcctgtggcctcgtcgtgcgtataaaaatcggtcgcgctgcattccctgtgaccgattcaatcgcttagactaccagagcctacccattatcgcgaggaaggagggagcagggggtgatcgggcggccaccgtggagagtcaccgccaccgtcgtcacgctccctgcgaatttgccttgagtgttagtcatggtctgtggcacctgggcaaaggatcttcaagcgataggaaccctgataccccgggtaatttttcatcggagggcaccagcaccttgagccccgtgctgcgccgtaattcgcgcgtccgtcgccccaactccgacgggcaggcaaatgaggacctaggtgctcaggaggtggaaaatactgagcaggaggtcattgaaggcaagttgtgcccttga

SEQ ID NO: 42567 - DNA, 198 bp, Zea mays
  Peptide Sequence Number=SeqID_85942
atggtgggcggcaggaggcgaggcgcagtggtggaggagatgaagctcaacaccggcaacgtgttcacggcgctcgagtccctcaagaagaagaagaagggctacaagggcaaggcggtcggtttttctccaatgggggaagttctaattttttacactctatctagatatggaactattcttgagaaagagatgtag

SEQ ID NO: 42568 - DNA, 1191 bp, Zea mays
  Peptide Sequence Number=SeqID_85943
atgcctatgctatccgcagtattgtatgaacgacaaagcaatgatgacctaatattatcagatgaagaaattcatggcagcagcaaacctactgctaattggccatctcatgctagacgtcataggaaaagagatcctgatgttattggtatatatgtagataacgatggagtctttaaaaaggaggggcgtggtacccttaagggtatagcagcagccaccaagcgaatcaagaacggtgatcacaaacttaagattgaattttcatctaagcttggaggtcctgtaggaccaaacgctcgcacttttgtggatgaaatcgtattgtttacaaagaaaaaggcaccactcattggagtgaaaaagtggaaagatatagagctcaatgttagatcttctatagcctctaacgtactgcgaaggtgggagtttctaaccaatgaggacgtgcatgaaaagatctggtctattgctaaggagagatacaaaggatggcgatcaacgttaagctcaacatacaaggcatacaatagttatgctgaaaggatgaaaaacaagcctgaagatgtagacatcgtcgagtggcattacatgatgttgtattttggatctgagaaattccagaaaataagctgccggaactcggaaaaccgtcagaaacaaagaacgaagcatataatgggttctagaactttttcccaaataagctttcaacagagagatccagaaactggtatagaaccaaccgatctatccctttggatgattactcattgtaaaaatgatgaatggtcggaagaggcttcacgtggcatttatgagaaggcagctgagaaaattgttgagaaaatatatcaaacagaaagatttaagctaacaagagaagaggaaaatgctattttccaaacaacattcaaggaaacaacaggatgtaaggcaaacagacttcatggtcatgggtacctatcaagatatccaacaagaagtcaagtgatggaatcaaagttcctcgaacaagctcgtgccacggttgcaaccaaccaaaagaacattgaactcgaaagtcaggtccagttgttaaatgaaaaacttgcgtgtgaggttgcagaacgagaagaatactacaggaaaaaatgcaagcactgcaagaagaagaagaaagaaaaagacaagtgcttagagaagaaatga

SEQ ID NO: 42569 - DNA, 264 bp, Zea mays
  Peptide Sequence Number=SeqID_85944
atgaacatgacattagacggggcagggccgagggcgtgctgccgggacttggacatgacgagttggctctaccgggctagcttggggaggggcagcagtgtgcggcgcatcaacgtgttggaggtaccttcaaactcggatcagaaccacagtgtgagaagcacgaacaatacgaaggttgacgccgcgccgaagctacgcgcaaggaagcttcggcttgacagcaggaaagggaaccgacttaaaggggaaaaggctatttag

SEQ ID NO: 42570 - DNA, 294 bp, Zea mays
  Peptide Sequence Number=SeqID_85945
atgacagaggaagtcaacaacagaggccacagtattcctcgcaagcttcggggcagcaacaaagctcttttcggccgccagctccaagaggcagaggcgccaggggcttcggaggaagactcacgaagtccaaaaattgctgaagcacaaaaagttgttcctaagggaatgcggggctataaatcacattgcaagtatcgccaaagctaccaaaagtcgttcctaaggaacgcaattgggtcgaatggctctgggggaggagatagttcagctgcggtagaaggtataaattag

SEQ ID NO: 42571 - DNA, 1739 bp, Zea mays
  Peptide Sequence Number=SeqID_85946
gtgaaggatggggcggtgtgattttggccggaacatgtgaagacgaaggtcagcgtagctgggatatacgcgggtccaacgatcgcttgaacagggtcttcgagttgaaccgtttgccgtatggcggatatcccgggcaagacgatgtggatcgttgcgggaagaagccggcggcagaggctggagacgaccccgcgccggcggccgccccatcctctaagaagaggaagctaggtactgctacgggaggactgggggtttccgatggttttgctagggaattgatgaggacatgcgcggcccccgggggaaggatgtcttcgccagagctctgggagtcttcggcgcggatgctgaaggttaccgggggttggtggcctaagaatgttcctatcccccgcgcggccggcgaagacttttttacatctcacatggttcgtgactggagagtgtttccttatgttcggaatattgttgctgttgtgtcggtagtgatggacaaggatcatcagggagctgcgcagaagcgccaggcggtcgtccggctgcctgaggctaggtcgaagaggtcgcgggggactgcgaaggctgctgccccggcggcagccagccgacgatggcgacgaagtcggccgcccctgggtccagcaggggtcgggcgaggggcggctgccgccgtgcctggggcgaggggcggcgctctcagcgccggtggtgagattccggcactcactgccgtcaaggacgaggcgggcgctgtgtcccgccggcggaaggaggcattaagtcaggcggctgacttcgctgaccgcgtggcgtcgggggcccttacggcggttgtgtctgccgaagtcgagagacttcgggcgcaacatgctgacgccgtccgggaaaagtcggccgccgacagcaagtgccgcaagctggcggagaaggtggccgcgctggagggcgagaggactgacctccggcgccaactggcggaggagagaagggaggctaatgaggccttcaccaaggcgcagtctgcgcaggcggaggccaatttggcacgggtggagacccgtgtggagagggtcgaggcttcgacgcgcacggaggctgagcggacgcacaaacagcttatggactcgtaccacgagctaggcgcgcggaccgctgacttcgaagtgccagatcaagagcccgaactttgctgcctcgagtggctgcaggaggagttggtggcgctccccaccattgtggagggctttatgtcctatgcctccctggtcacctgtgaaggggcgatgaacgtgctgtcccgcgaagggtgccggcactatgaggtcttcgaccaatctgatgaggatttcgagcgtgagatttacaaggttgaggaccctgtggtgaaggaatccgcgggagccctcttcgaccggatgtggggtccccacggtcgggaggtggtcagggagcggtccgacacggcgaggggtcaggcggcgcgtaacgagaaggtggaggacttcggggctttgaacagcgcgcaacctgattcagagtcgaacccggtggcggcgttgtccgaggtcgccccagcgccggccccagaaaccgccgaaggcgcccctaatgcccccgcagccactgcggccggtggtggctcgtcgccaactgctgcgccgagggctgaggatcctgtgaatatggcggcggagtcggcagcggaggatcccgcgacggctgggtcttcgcag

SEQ ID NO: 42572 - DNA, 720 bp, Zea mays
  Peptide Sequence Number=SeqID_85947
ccaaagtatgaaggtcatgaattcgtcgagcatggcacagagaagtgtgtcgtgactgtatacattggatccagtccgcaccatgtggaatggagtgtcactgctgctgggcacagattcaaagacacctgccaagtcgtcgcccacaaggcattgagggccctgtgtcagatctatgaagaagaagtgaccgacacactgctcagattctttccgccctttcagagagaccgtccagtttggatggccaggatgcgtgcattggaagggaagcagctgcttgaggatgaccccacagtcgtgtacctcactgcatacgtgctcaccctggatgcacagtatgatttcttggctcggcaccaccctcaagcccgtgcaactgccttggaaagtcgtgaagtcattgttgttgaagccctgaagcaagctaaggatgagcacgtccagaagttgatggaggcctatttggtaacccataaccaacgtagagccctacggatccaagagcccactccgtccaacccagttcaacccatgagagctgaagatccccagatttttgaaggtcacccggctatgaataagcaagagcaccccgagtcctcccaagatcccccgccagagttgtttgagcccctcaccatgaagaagattccagcaccgtcccgtgagatcaaaagaagaagctgcaagcaccccaccagcaccgccgccctctga

SEQ ID NO: 42573 - DNA, 117 bp, Zea mays
  Peptide Sequence Number=SeqID_85948
atggcagctattcacctgggcgagaaggcgagcaccgtgttcctccgtattcgagacaagcttgtttggactgggcttgagaggcacgtggggaaggccgggaagcatatttgttaa

SEQ ID NO: 42574 - DNA, 687 bp, Zea mays
  Peptide Sequence Number=SeqID_85949
atggcggtggtgggggcgaagggtgccgcgcgggacccgtgggccactttctgcgcgagcggcgagattctgtcggccgctgccgctaaggacatggcgggctccatgtctcagcgactgagggaagcatcgcagcagctgtcacagcagctgaagcaagaggagctgctggtgctcccgaccattgtgataggtttcatgtccttctcctccctcgtcacctgcgagggggccatgaattttttgtcccgcgaggggtgcaggcattacgaggtcttcgaccaagtggacgaaaactttgaatgtgaaatcttcaaggtcgaagaccctgtggtgaagcagtcagcgggggcactctttgataggctgtggggtctgcacggccgagaggcggccagggagcggtccgaccgggcaatagagcagatggctcatgccaaagacgtcgaggaccttgttggtctggacggcgcgctgcccgaggccgtgaaggtcgatccggtgctgccctcggatgctggtgaaggcccctcagcgacccctgcgcccgttgcggctggagaggaccccgcaccggcccctgcgccgacgggcgaagacgccctgaaggtggcggccgagccggctgccgagccagcagccgaggaccccacagccgcggtcaggccttcacaggtggctgaatag

SEQ ID NO: 42575 - DNA, 1017 bp, Zea mays
  Peptide Sequence Number=SeqID_85950
atgtccgccgcggacgcagccggcggcaaggaggcggcgccggcgtgcgactcctgcacgggcatgccggcggtggtgtactgccgggccgactccgcgaggctgtgcctgccgtgcgaccgccacccgctgccgctgcggcccgccacgcgcggcggcttcctctgcgccagctgccgcttgggggaggagaaggatgagcgggacggcggtggcgccgccgacagtagtagcgacgacggtggcgcggtggaagggtacgccgggtgcccctcggtcgccgatctcgcgaccatcctgggcgccggctccgcgtgggaggagccccagacgctccgcttggagagccggagctccggcggcgagctggctgacgaggtcatccgccagctggtggagctcgccaggtcggaggcggcggctcgcgctgagatggagcagcttactccatggccgtcgccggagcttgctgccattactggacagtacgccgacttcggggctctcgacgctgacaccgcctggcatgatgatgcagcagccatcgcggcagcagtagtgccttccactgaggaggagcagcaagcgtggatcgcggccggctgcgacgtcggcgcgtgccggacggaggagaaggcgcgcgagaacgacgctgctctggccgagccgtgtctgtcctcgttcgtggagatgtcagagatctgccccgccagcgtcgtcgtcaccctcagccacggcggggacgagggcgtcgacagcagcggcaagacagccccgcggccgcagctggccgcgccgacgccggcgaagggcggctacgacgtggcctaccccgaccgcggcacggtgatctcgcgctacaaggagaagcggaagaacaggaggttcgacaagcagatccggtacgagtcgcgcaaggcccgcgccgacggccggatgcggatcaaggggcggttcgccaagtccggcgagctcgctgctcgcacgtgtcgatgcgtactagtctacgttgattag

SEQ ID NO: 42576 - DNA, 243 bp, Zea mays
  Peptide Sequence Number=SeqID_85951
atgtcctctcctcagccgtggaggcacaaccgaccgccggccgtggaggcacagcagacctgcgccaccgctggccgcctaccccacagcagatctgcacccaagaccagcagccagccagccatcctctgcggctccactctgccaacgcccaagaccagcactagcagccagccatcctccacctccactgctctccatttgatcatttggcgtcgcctcgcctcacgctttatcgcttaa

SEQ ID NO: 42577 - DNA, 519 bp, Zea mays
  Peptide Sequence Number=SeqID_85952
atggcgaatatagattttctgtgcagctctgcagttttaagtatggttgacagtgagcaagcaccgacttctacagctactgggcgattggtaaacagcatgcaacctctttcaaggagaactagatcaattaaaggtgacaaccacattggtgggccagtagatgggtttccaaaagttagttctgttgatggaggctcttcgtttgatggcccagatgataatagcttagatatgagtgaaagtgatggacacactcgaaaggattcgaaaagtttttctcatgaaatcccaatttttctttcctatgctacaccagatgagtttcttgaatcaatgataaaggcagatgctccccttaatgtgaagtacctgagaacattggtacaatgcttatccatgcttggaaaggttgcagctgcaggagctgtgatatggtacttctcatcctatctgtttttcaattttcttacagaagaatttattggagagggaaagggagaggtcagctgcggctga

SEQ ID NO: 42578 - DNA, 303 bp, Zea mays
  Peptide Sequence Number=SeqID_85953
atgtgctatgaatttgacctctggaagcagtcctacgtggccgcatgtgccgctgtgtacggcaagctccggcacagccgccgcttggacgcggtccagagcggctacaccgcgttgtccatcatcaaacagggggatgttgggggcctttgtcttccgaaggtaccttcggacttggatcagaaccacagtgtgagaagcacgaacaatacgaaggtggacgcagtgccgaagctacgcgcaagggagcttcggcatgacagcaggaaagggaaccgacttaaaggggaaaaggccatttag

SEQ ID NO: 42579 - DNA, 555 bp, Zea mays
  Peptide Sequence Number=SeqID_85954
atggagtgcggcagttcctggcggctcctggcggtggtcgtcggcatccttttctgcgcggctctcttctcgccgcccgccgccacgctcaacatcggcatccagtccgccggcgacggggtggttgatggcatgttgggaaggcgggagaaccctggagaacatgaagccatgcggaagatgaaaaatgagtttatggtgaactgggatggtctgagaacaagggagaaagaacgtgtattagtacttgctgcaactaacaggccatttgatcttgatgaggctgttgttaggcggcttccaaggaggatctgtgtgttactgctgcacaccatcctctacggcctcgggtcacgcggtcggcctgggcgcgtcggcgtcggtgtgcgctgggcgcgtgcggcagcgcggcctgggcggctcggccgcggggcaggggctgctgcgcggggtgcggggctcgcctgcgcgctagagagagaggatttcttttttaaaagaattactacaaaacattcgatactcaatcatgcgcatacaaagaaaaatgattaa

SEQ ID NO: 42580 - DNA, 2085 bp, Zea mays
  Peptide Sequence Number=SeqID_85955
atggacaaggatcgccaagctgcggcgcaaaaacgccaggcgactgtcaggctgcatgaagctaggccgaagaggcagcggggggctccgaaggctgcggcctccggcggaggcaagccgccgctggcggcgaaggcgggcgcctctgcacctagcaaggcgccggaggcaacggcgggcgctggaggctccaagtcaacgaatgtggtgccgccggccagcggagtggcggaggcctcgaaggcggcccgagcgttgccgttgtcgggcaagcgcgttgccgacttcggcaccgatattactgtagatgactatcttggtgatgcgttgcagggtcggacgagggggcagcttgctatggttgcgcctggcgcggagaccgcgacggcggccatagtgccgagggcgaggggcgaggcccttggcgccggaggcgaggtgtcggccctcgcggtggttagggacgaggcgagcgcagcgacccgccggctgaagggagtgacggaggcgctgagtcaggcgacggaggcgctgagtcaggtggctgacttcgccagccgtactgcatcgggggccctcacggcagctgtgtccgccgaagtcgagagacttcggacacaacatgctgatgctgtccgtgagaaatcggcctccgacagcaagtgtcgtaagctgacggacagggtggccgccctggagagggagaaggccgacctctggcgccaactggcggcggagaggagggaggcaaacgaggccatcgccaaggagcaggctgcgcaggcggaggccaaactggcgcgggcggagggcaatcttgccaaggagctcgccgaacatctgcaggagcggcttaccgccctggagagccgcgcgaagggggccgaagccgcgatgcgtgcggaggctgaacggacgcgcgctcagcttacggatacatatcgcgagctgggcgcgcggaccggcgacttcgaggtgtcggaccgagagcccgggctccgctgtctgcaatgggtgcaggaggagctgcaggaactccccactgttgtgggggggttgatgtcgtacgcctccctggtcacctgcgagggggcgatgaacgcactctcccgcgaagggtgccggcacttcgaggtcttcgaccaggcagatgaagattttgagcgagatgtctataaggtcgaagaccctgttgtgaaggaatctgccggggccctctacgaccggatgtggggtctgcatggttgtgaggtggtcagggagcgggccgagactgcgagggctcaggcggagcgcggcgagcgggtggacgacttcggggctctgaacagcgcgctgccagacccggagccgacccttgcgaaggctgtgactggggtcgccctggagccaaccccggagaccgcagcgatcacgacggctgcctccacatccgctgcggccggcgaagacctgcccccgaaggtggccgaaggcgcccctgatgcccccgcagctgctgtgccgagtgctgaagatcccgcggcggtggcggcggaaacaacggcggaggcagcggcgggaccaacggcggagccaacggcggaggctcccgcagcgtcagggccttcgcaggttcaagattttgggcctgcgcacgcaaccgctactactgagtttttggcggcttcgaccgcggaaggtgggaatgaatatggtgggtttacatctgagttttttgattttaccgactctgggagctcggttgagtggactgaggagtcgtcggaggaggacttggattattttgcggccttggacgtggctgcggcggaggcttcgccacacgccgcggacgcgccagacgtgccaggccctagcaccgggcgccgccgacgaagggcggttgcaaaacgtagggttagcgcggaggagggggctcggcttcgtgtgagtagggctggtcgtcaggaactgttgtctttgccggccgcagcgagtacaggggaaagggaactgcgaagtctttttgcgggtgaggagcttaggataatgttatttaattatagagagatgggaattattcctaaggttgagccgatgtag

SEQ ID NO: 42581 - DNA, 270 bp, Zea mays
  Peptide Sequence Number=SeqID_85956
atgggtgacccatacccacatgggtatgggtatgggggggatcccttcaacttgctggcggactccccggatggagccttcccatggcttgtggcggacttctcgtcggtcccgatttccctcttggcggatgctcctgacatcacttcgagcgaccagcgactgcagagaaaggtgacgagcgaagggtggcgtctttgccttcgccccaacatttgccctccgagggaccagttcgacaaagtcacctggtgccgaagacgtcgctag

SEQ ID NO: 42582 - DNA, 165 bp, Zea mays
  Peptide Sequence Number=SeqID_85957
atggggctcggtgtatgcggctcgctctgccaagtttgggttcgccccttggggaggagtgcggtggatatgagaattgatggttttgattatgattatggtgctggcgaagatgaagctgtggaaggagacttccaggagttccaagattacgacgagttctag

SEQ ID NO: 42583 - DNA, 252 bp, Zea mays
  Peptide Sequence Number=SeqID_85958
atgatggtccaggacatggcgtcccgattgagcattttggcgaacacgacacgggcgtcagggaggcggccggacttcgcgcacatcgatagcagcgagttccaagtgaacgtgttccaccgcgcgtacgaggtagatgctgacgaggaggcccgccttgatggctatggttttgcgctacgggagcggggcggggcgcttggctcgcatggaggcggaggcaaagctgtcgttgtttgcactggactggtt

SEQ ID NO: 42584 - DNA, 621 bp, Zea mays
  Peptide Sequence Number=SeqID_85959
atggccaacttcgtgctctacatgtatggcaagtgtggggatgctgagacagcgagggctgtgtttgagaggatgcagatgcggagtgtgtcacgctggaatgtcatggtgtcgttgtacatccaccaagggaggatggaccttgttgtgtccatgttcgagaacatggtagagcaaaccattgtcacttggaaaaccatcatagcagggtataaccagaatgggcttgatggcatggcattgaatttcttctcacgaacgctgagtgcttcttccatggagccagatgcattcacagtggttagtgtcctatcagcttacactaaccttcgcatgctgaagattggaaaacagatgcactcttatatcttgagaactggaatgtcgtgcaggagtcagatcatgaatgctctcatctcaacttatacaaaatccagaagtattaagactgcaaggaggatcatggaccaggcagtggttgctgatctgaatgttatctccttcacggctctcctagaaggctatgccaagcttggagacacaaagcaggcaagggaactcttcgacgttatgaataatcgagatgtcattgcctggactcctatgattgttggctattag

SEQ ID NO: 42585 - DNA, 1011 bp, Zea mays
  Peptide Sequence Number=SeqID_85960
atggccggtggccacccggcgccgctgcggccggtggtggttgcgatgaaaggccacccagggtctggcaagtccacggcggcgcgcgccatcgcgaccgcgctttgctgtccgctcctggacaaggacgatgtgagggactgcatgttgcccctagagggcttggctgctgctgggatgctcaacgacctctcctacgccgtgctgtggcggatggctgagcgccaggtaaggctcggactgtctgtcgtcatcgattcaccgctgtcacgccgctctcacctcgacatgctgacacgcctagccggtgtgcttgtggtcgtcgtggagtgtcgccctggtgataacgaggaatggcgccggaggctggagagccgtgggtcggctgttgccaatggtggcggtggtgatggatggcataagccaaagacatgggctgagctggagaggcttctggaagggtaccaaggttgcacagactatgaaattggggatgtaccgaggattgtagtggatacaactgatccgacagttgatgcacaggtggcagctgaaaagccaaccatcttgtgggagacaggattcacctgtttgccattagaaaccaaaatgtacactagcttaagcattagaacaacactctgtgttggtgtcaagatctatagagcaggcatttctaatggcatctgctggcctaaagccaggggtgcctgttattctacgggagctggagccatcctcagagatgttcaagcaaggagcgtcccttcgagtcacaggaaggagttttactctgcttttaagaaagcaaatattcaagggtacaggcaaagctgggacaccatctcacaagcaagtcagatcatccaagttagccctgcaaacataaacatacctagccacttaaaggcaccaagttttgtttccacccagttctcaacaaaatcagccaaagaagatgggaaccccacccaaccaaaggcatctatgataatgcaccatgcaagatga

SEQ ID NO: 42586 - DNA, 585 bp, Zea mays
  Peptide Sequence Number=SeqID_85961
atggtgagtaactgcacgacccacgtatcgtggactgagcacgccgcctgtcagtggaatggacaggcgcacgtcttatccgtaatgaatgcgaaggcgcgcgtagcccagaggcgtcatgctaggttccgcccgttggcttatgacgcgcgcagtatgccacatggcagcgtcgggtctccgcctgagcggggagcaggagtgtatgcggataggtacggatcacaccagaccaggtccgacacttcccatgggggtccggactcactgttgatgccttggatatatcactttctctggacacgtggcggccccggagctgcccacgtggtggggtcaggtgttgttgctggccagagtagtcgcccgaggctggggcgagtcatggcctggtcccacatacagctcctttaccacgcgactaaagatagccacgtgggtactgcgtcttcacacagcagtaaggggtaccctagtttcagggtaccgacagtggcccccgggctcacctcaggggaggatgtgagcctgcaggtggggccaaagctttgtactttgcttcaacatgacctgatcggtgattag

SEQ ID NO: 42587 - DNA, 279 bp, Zea mays
  Peptide Sequence Number=SeqID_85962
atggaccaagcagtggttgctgaactgaatgttatctccttcacggctctcctggaaggctatgccaagcttggggacacaaagcaggcaaaggaaatcttcgacgttatgaacaatcgagatgtcattgcctggactgctatgattgttggctatcaacagaatggtcaaaatgatgaggccatggaactcttcatgttaatgatcaaaagtggcccaaaaccaaacagtcatacgcttgctgttgttctcagcctatgcaagcttgacatatcttga

SEQ ID NO: 42588 - DNA, 552 bp, Zea mays
  Peptide Sequence Number=SeqID_85963
atggcgagcagtaatggtcctgaaggagtgccagtagtgacttctgctgatgaccctccgacccgtgccgatattccatttctctgcaattcagttgatgaaacctgtgaagccacaggggacgacagtgctcccttgaatgctcagatatgtacgggtttctctaagttgatcagcttggaggtgaagaaaggcctccagaagtgcgcgacgttcccaccctcgtctggtcagcctcagcaggaggattgttcatgctcccatgtaggtgatggcctcacgggtgctcctgctttctggcgatttgtgtccttacctgaatttatcgaggaggttatggctctggtaaagcttgatcagctgagatatgcattagtagggaagcagggttctactgggttatcaacagagcaaaggaagcgccttactattttttcaaattatgttgcttattgtagcagattgccagagttaccttacttttttcttgtaaaagaactattttgtttgttactgaatctcaatttagggggggaatacgtccgcaactaa

SEQ ID NO: 42589 - DNA, 906 bp, Zea mays
  Peptide Sequence Number=SeqID_85964
atgcaggaggtgcagcatgccggcgccacgggcgagcaggatcagcaccacgtggcgcaacacgcccagaacgagcactgcgtcgcccttgggcacggcgacccgtacgggatatcccaggacatcctgcagctgcagttgttgttgatggggcagtgcggcgcggcgccggcgacggagcaggacgtgacggcgatgatgcagcagatggcggccgctgcgtctggttggcagcagcaagaccaccccgccccgcagccgcagtatgctgagatgcgtgacaacacccttggacacgggcatggccacccggacgggctatcgtccgaggagatcctgcagccgcaggagttgtcgatggagcagtgcgacgcggcggtggagggcacggcgccggcagagcaggacgtgatggcgatgatgcagcagatggcggccgctgcgtctggttggcagcagcaagaccaccttgccccgcagccgcagtatgttgagatgcgtgacaacacccttggacacgggcatggccacccggacgggctatcgtccgagaagatcctgcagctgcaggagttgttgatggggcagtgcgatgccgcggaggagggcgcggcgccgacagagcaggaggtgatggtgatgatgcagcagatggcggccgctgcgtggccgcagcaagaccccgccccgcagtatgctgagactgacatcaccattgggcatggccacccggacatgcagaagttgttggacacgacagagctcgcaagaaaccagctgatgacgaacaactacgtgacgacgatggtgcagcagaactcgtcctctgtccttgcacctagctcgcctcgaggacggacgtcgcctcggccgggcctccttccacctcgtgattggccatggtaa

SEQ ID NO: 42590 - DNA, 261 bp, Zea mays
  Peptide Sequence Number=SeqID_85965
atggggctcggtgtatgcggcttgctctgccaagagtgttatgaaattgatatatcagccgtgctcgcggttatgagcggccaagggagctccattgattatagatacttgatcagagatgtatggtttacaggtggtgacgaggatgatggttttggttatgactatggtactggttgtccgcgttgctaccactgctcaggtgaagatgaagccgtggaggaggacttccaggagttccaagagtacgatgagttctag

SEQ ID NO: 42591 - DNA, 294 bp, Zea mays
  Peptide Sequence Number=SeqID_85966
atgggtgatcaaggaagaaaaagaaaaaggaaagccatgaatagtgctgggctgattctagcccaggcggcccaaacccaggcagaaacgcgcgcgcgcccgcatccgcggaggcaggtgtgtgcagtagctgctggaatacatggcgaagccgaaggggctcaatttatagatcccatcgacggtggtgtccaatttcgcaaggtcgtgctggcggccggagggaaacagggatactggagcaggggatgggtggctttcaccgtggcgctttctccggtgatcaccggttga

SEQ ID NO: 42592 - DNA, 90 bp, Zea mays
  Peptide Sequence Number=SeqID_85967
atgacgtcaaccggaaatcgtcatcgtgcttccgactatcgcgtcgaattagttagggttaaccgggaaattagtagcaagaagaattaa

SEQ ID NO: 42593 - DNA, 399 bp, Zea mays
  Peptide Sequence Number=SeqID_85968
atggggatggattcggtgtggggagctcgacgcgtgcagggaaacttcacgacgcaaagtcacagcaaggatgacggaacacacacgacgcagggaaaagctccggccatgtgcgcggcgagcgcgaaccgatggagtagcatcggccatccatggagaagcaccgagtgtcgaactaaggagtgcgcgatgaaatccgagctgggcgagcgccagggaacttcagggccgagcgaacgcagggaaaacgacgccgtggggaagaaccgcgcagcgggtcaaacaggagctgagcaccgacaggaaccgagtagggagattgggcgaccgcgaagctgtatgcctgccatgggaaatcagctggagatatttctaactctagattttagcgaaaaatga

SEQ ID NO: 42594 - DNA, 90 bp, Zea mays
  Peptide Sequence Number=SeqID_85969
atgacgtcaaccggaaaccgtcatcgtgcttccgactatcgcgtcgaattagtcagggttaaccgggaaattagtagcgagaagaattaa

SEQ ID NO: 42595 - DNA, 234 bp, Zea mays
  Peptide Sequence Number=SeqID_85970
atgcaggggaggcgcgctgagggagagagagaggcagctgggcacgacgttgggagcagggaggcgggcgctgccatggctgggaagcccctgcgcgcagagagcttcgacggctgggagctgaaggaggagcgggcagggaacttggcggcggcgcggcaaggaactgagctggaaaaagctgcgcgcggggaggagataagcatcgcgagaaatatccaaggagagggatag

SEQ ID NO: 42596 - DNA, 192 bp, Zea mays
  Peptide Sequence Number=SeqID_85971
atgtccgaaaaaggagatcggcctcctgggactagtaattgtatcacatttgagtcccagaggatcgggacgcttcaaaatcttttctcaaatctgctcacaagagcgggtgatacaaacttcttggggtcgttcacaactttggagactcccaagcaacctcaatccatcaaggaactcgaaggttcctag

SEQ ID NO: 42597 - DNA, 258 bp, Zea mays
  Peptide Sequence Number=SeqID_85972
atggcgcctccgctgcgcgagcacatcatcgacgccgagcgccccgacgcgatgctccccaccatgggcggccagaccgtgctcaacctagcggtctcgctcgccggttcgggcactgctcgtcaggatggatcgccgagcgccgccacctgggtgctcacgccgccacggtggattctctggtcgtcgtgcttgagggtcgggggaaggaagatgccttgggcaccgtttgatctccggccgacggtggggatttga

SEQ ID NO: 42598 - DNA, 300 bp, Zea mays
  Peptide Sequence Number=SeqID_85973
atggaccacctggcggggctctctgcggaggcgtggacggtccgcgacatagggcggatggaccgcaacttggcgcaggagcggctcctcctctgcatacgtccggatggtccacgtctggggctcggacggttcgcgatggcgcagagggtcttcttcttcgcagcagacctagatcttgcctcccgggagggacctcgccgggggaggagagatcctagggtgtgtcttggcgtcggcaggccacccaagacacctctagtcgacgtagaaccgaagaaaggtgaagatttgaggtag

SEQ ID NO: 42599 - DNA, 195 bp, Zea mays
  Peptide Sequence Number=SeqID_85974
atgagtgttccagtccagactgacctgaatgaaaggggcataaagaagtctgatgtcaatacagtagcatttgctgatgaaaccggccatctcatatattctggaagtgacgacactttatgcaaggtagtgttatgctatgttatgaaaattttcatgactattagtataggttggaggctttggagcacttga

SEQ ID NO: 42600 - DNA, 285 bp, Zea mays
  Peptide Sequence Number=SeqID_85975
atggagcccggcggagggacagctgtcggagctgttgagtccttgctgacgtccttccgcttccccgaggtcgagtccgagcccttgggtcgggcgaggtggaggctgtcggctgaggctagggcggagtccgagccctggggtcgagcgaagcggagttcgtcgtcttctggggctgagcccaagtccgagccctgggtcgggcgaagcggagttcgtcgtcttctggggctaagcccaagtccgagccctgggtcgggcggagcggagttcgtcgtcttctga

SEQ ID NO: 42601 - DNA, 864 bp, Zea mays
  Peptide Sequence Number=SeqID_85976
atggcttgggagaacaagagcgaagagcttgcccttgttgaatttcgagaggccatggagagggccaacattgagaagattactgataaaatgctaggttatcagatgattctgaagaaagcgaggactttgattttgaagaggatgctaacgatgtcgaagagcgaccttggaagccaagtcatgtcatttttgacaagtctgcttggtcggtcacaccctcgcgtccacgcggtccctctttcgctgctctgcaagacccacgcgccagctccaccattgattgcatcgcattccctcgtgtccctaaccgtggtccccacatgtcagatttctccccaacagactcggccgcacttcttgcacgaccgccgcggtgcggaatcctcggccgatgatctcggggtagctcgttcgtgcgcgtggaccggctcgcgggtacttaagtaccgagtcatcggagcccagtcatatcccctccttccatcgcacctccacgtccacggcgcatgcctaatttcagggacgacggaagtaatcgtgccgccgtcgccgcacttcaccttctcgccgtcaaggagccctggggaccagccggagcgaatcgcctgggtatcggcgttgtgtgtgtaccctctgcgggcagtagcgcgactcgggtacccaccaattgctcaccgtcgtcgtcgcattgccgttgttccgccctacaccgtggccagaatcatcctgacaacgattatcgatatggatcgtacaattgagttcacatttatctccgcgttcttgggatcttgggcgcgctctggttggaacagtggatcgctgggagagagtactgatagtcgcctagagggggggtga

SEQ ID NO: 42602 - DNA, 426 bp, Zea mays
  Peptide Sequence Number=SeqID_85977
atggccggttcaagggatagctctgatatttctccaagcaacatcatagagccgacttgggaaaccttgccggctgacgagcagctccagttcgaggagcacaaggagcggatgatccaggaggcgaaagcaaagttcttggccaacttcaaagtggacaggaacaacaagatcgtccgacatcgggcgacggatccggcttcgctccaacccacgccagatatccccaatgttgtcacgaccagtcacaacccctttatgggatgccgatggacacataccctaagcaaccgcaaatcggcagcaaaccagccgatctgcacatgcccggaccatccgcacgtgagcgcggaccgtccgggccagcaacagtcgggcctatttttaatgagttacctaggtatgcgcccgagccaccacacatag

SEQ ID NO: 42603 - DNA, 240 bp, Zea mays
  Peptide Sequence Number=SeqID_85978
atgtgggcggtgtggggcacggcggggacgagcgagggcgggcacagcggtggcgaacgggcgggcgcgcggcggggacgggcgggcggccgcgcggcggcgccgacgggcacgcgacagcgaggacgggcggcggcggggctgcgcccggcgtggacggacgggcgcggccgggatggcacggcggccgggacgggcggcggcgcggcggtggtggcggttagaggcggcggtggctag

SEQ ID NO: 42604 - DNA, 321 bp, Zea mays
  Peptide Sequence Number=SeqID_85979
atggcgccgagtttctcccttctcccacagccgagttgtccctccctctctcactttgttactcgctatcgatcgccgtcaccggaactagtccgcgcagcaccccgccacccgcagcaacgccacgtgcccgtcgtcgagcccctgctcgcgttgtgcccagctcgccatcgtgaagctcgttgcctgaccgtccgcatccgcacgtcgtcgccggagttcgtgctcaccatccgcgttccccgccggagcttcgtcgcccacgcagcaccccgtgaccgtacccacgctgttcgccgtcgtccgttcacccaaggttga

SEQ ID NO: 42605 - DNA, 381 bp, Zea mays
  Peptide Sequence Number=SeqID_85980
atggagggtaatgatgtatcctccgtggcgcggtcggtccgagcccaaggtcgggcgaggcggagactcctcctgaggccgaggtcgggcgaggacgcgattccgcccgaggtcgaggttgaggccgagccctggggtcgggtgaggcggagaccaccttccgaggccgagggtgaggccgagccctggggtcgggcgaggcggaggccacctttcgaggctaagggtgaggccgagccctggggtcgggcgaggcggagacctcctcctgaggtcgaggcccaaggtcggggcgaggcggagcttcccgtcggtcagtggaagggcgaagtgactgcggtcgcttcgaccttgccgactgaggcgcgtgtgtcaggataa

SEQ ID NO: 42606 - DNA, 135 bp, Zea mays
  Peptide Sequence Number=SeqID_85981
atgcaggtggcgtgcaactgcaccacggggacgcaccccttcgacttcgacgcatccagcatggaggcccaggcccacacatcatgtaatgatgttgcaaccctaataaaaaccctaagtaagccctatgtgtaa

SEQ ID NO: 42607 - DNA, 573 bp, Zea mays
  Peptide Sequence Number=SeqID_85982
atgggtgtgggcaagggacggcttgtgaccgcggttggaggtgagtggttgccttccccttctataaataacgctgttgtctctctggccttttcacatctctcgctgttctctgttgcttccctttcttctcttccttgtgcttccaccattggcaagaacaacaagcgcaagcgtgagccaactcctccatcggaggagttcggtgactcggagtactcagaggaggagttctcctctgagtccgaggggtctccggctcccatccccctgcgtgagtcgtttgacgactcagacgactcccaggggcttgcggcggaggtctggacgtacatccgggccgtcgagcgtttcgggctcgagggctcggatgagtcggagtactcctcggatgaggaggactcggacggcggcggtgaggacgaggatgacgacgacgacgacgacgacgacgacggtggcgacggtgacggcgatggcagcggcaggggcggcggcggcggcagcaaggacgatgacggcggcggcagcaggggcagcgaccagggcggcagcagcagggccagtggctag

SEQ ID NO: 42608 - DNA, 508 bp, Zea mays
  Peptide Sequence Number=SeqID_85983
atgctccgaaggtatagtaaggcaaagatatgtagtgagaagtattacttcgaaggcattgagcgtccctcgaccaacgaatgcattcagaaggtgaccggcatggttatcttgccgagtgccacaatctgtcttcctccgaaacccataaagagggatattgtggaccagaaatcccttgatgacacaagatatgaccattgcatcattgtggggatagtccttgagctgaagatcctcctggagaaggtgattgaacttgagccgcctgtgattgggagcaccagcttcgtggctgaagccgaaggtgaccggcatggttatcttgccgagtgccacaatctgtcttcctccaaaaccacaaagagggatattgtggaccagaaatcccttgatgacacaagatatgaccattgcatcattgtggggatagtccttgagctgaagatcctcctgggagaagaacttgagccgcctgtgattgggagcaccagcttcgtggctgaag

SEQ ID NO: 42609 - DNA, 372 bp, Zea mays
  Peptide Sequence Number=SeqID_85984
atgggtccatgctccgaagccgaaggtgaccggcatggttatcttgtcgagtgccacaatctgtcttcctccgaaaccacaaagagggacattgtggaccagaaatcccttgatgacacaagatatgaccattgcatcattgtggggatagtccttgagctgaagatcctcctgggagaaggttcagaacttgggccgcctgtgattgggagcatcagcttcgtggccgatggtgccatagtttggttgctttacgaagccatcatcacagttgtggaaacgaaggtcatgaaggtcacaccttcattttatcatgtaaacatgaatataaacaagaaagtaaaggaattccagaagaatacaaaggaataa

SEQ ID NO: 42610 - DNA, 800 bp, Zea mays
  Peptide Sequence Number=SeqID_85985
agccggattatccgggatatcaacaaccaaacccaatctccagagatgggatcgcaacgaacccagctgataatgcggtggctccagttcggtatggcgcggaggggataagcctgacatccggtcccacggacgcagcgacccaggtggttgtgtacgcaagggagccacagcacacggtgtccaccagacagaagctggcccacaagtcagtcactggatgctacatgcgcggcagggaagaaactgaccgggtgggcccgcacgtgtcatccacaagcgcacagaccgcgcattggaaacctgtccagtggggaccaccaggcagccgcagagaggaaaagaagcgcaggagctatgtgggccacgcatgtgaaatgaagttgggccaggtggattcggcccacaagcagggttccggcgaagggttgggcgaggaaggggagtctctgatagtcacatcgaggtacgggtcgtcgtctctagtgctcggagttggtctagccacgaatcccagcgacggagctcggaagttggtcgaggagctggattgggtggagttgggctggagcgaccgagctacagtggttgtcgcgtcagtgagcttgtgggatgccgtgctcggttttgaggcgattatcggcgctcagtcgccggtggaaggatatgggcatgcgggagggcaaggccgagggtcggggcatcttataggcgaggattcaggcacggccacggggtggagcgcgcggccgagccaaccgacgctcgtggcgtgccctgcgcggtcagagcgcgcctag

SEQ ID NO: 42611 - DNA, 1385 bp, Zea mays
  Peptide Sequence Number=SeqID_85986
atggctgaaaggtaccgcctcccacggagttgcgccccaccaacgacgaggtggaaagacggcggatctcccccatccgggggcttggaaggtggaaagacacgatgcataagggagcgcgaagacatggtcgccttccaaggggggaaacccccttttaagggcggttctccctactcgcgtccccagccgtcacgggctgagtcttctccaacacgctccaaaaccctcccctgcggcgcgggggctgggtcccgcatgtcatgcagaccggctccgagcagaagaagccaaaccgctgcgcgtggtgcacgcaaccgcccggcggttacaagcggccctccacttttgcccagaccaactggcgaaagaggcgggcagccttgcaggcggcatgcaaccgcgccaggtggacgcgcttctccgactctcgacactccagcatggaggcccaggcccacgcgtcgcgcaaccggcgcgccggatgctgcatgcaagcaactgcaccgccacttgtgccaccaccgcgtctcctcgatcgcgaaaccaacaccgcgactcgaggcgactcagcgcgcgacccagcagcgccagcctgacgcggcggtcaacgcggccgaaagtgggtcggcagtaatgacggtggcaggcgcgcgggagcagcggtcacgtcgtcaaccaagctcacgtcccatccgggagcagcgagagaaccccctctcacggcgtgaagacaacgcgcccatgatccgttcctcgaacggctcgcgcacgcgcaacggctgctccgccaactactcgcctcgtcgcattaactccgcggctggacaggcggcgcttctggcgggagcagcgagcgacgcttcgccttcgccgaaacaaccgcgccaaaaaaggtacgccgcgtcgttcggttccgtatctttttccttttttcctctttctctatctcttgcgacagggaccgggaaagggggataccccgaaagggatccttccacgagaaggaaccaggctccgagcctccttactgatcaagggttcgaaggctggccccccgaagggttcaacagccgcctcagatcgcgtgggccctacacccactactggtcagaggttcgaaggccggccccccgaagggttccacggccgcctcaggctactcgggctccgcgcccattactgatcaggggttcgaaggctggcccccgaagggttcacagtcgcctcagacgccgagcgagggatgaccaggggtacattcgatacataaccaaggctcgggctgcgctcccgagctcaccggagacaccatgttcggtgcccatcgagggtaacatgggccctctccccccctcctccttgcggaaaggcgacgtaggggc

SEQ ID NO: 42612 - DNA, 510 bp, Zea mays
  Peptide Sequence Number=SeqID_85987
atggtgacctccagcttgatggtgggggaaagcgagctgggctgcggcctctgcccctccctcagcctcaaggattttcatcaccagggctggggaggagaggaagggcggccgtcgtccgtggcgctggcatctgtagcgtgcctggctttcggacgcgagtggcttcggagccactcgcggcgccggcgtctgccacggcagctggaagaggttcttccgccggcgctaatagccaaggccggccacgggctgacctccaactctacggccttctgcccgtccttgcctcacgagtttgggcatgggcgggggcctcctggcagcagcatccgccctgaggtcagtgctgccgctgttcggccccccggagcagaagtcgtcgtcgtcgccactgctggagcgggtgacggcgcgccgttcgtcggtcttctgttgctccgcaggcccacccctatcgagtggggctgttcgtacctgcgaaggggggaactggagttccgtttgtaa

SEQ ID NO: 42613 - DNA, 132 bp, Zea mays
  Peptide Sequence Number=SeqID_85988
atggcttcacagagcaatcaagatgtggcatcttcggccatgaagctggtgctcccaatcacaggcggctcaagttttgaaccagccaacaagaggcagaagaaagaagcacagagaaggagatattattga

SEQ ID NO: 42614 - DNA, 282 bp, Zea mays
  Peptide Sequence Number=SeqID_85989
atggcggtagggttcaatcaaagtgcacggggagctccacggggtgatgtagaggctatgcacgcaaggaatcgagaaatggttcagtggtttacccggtccatgtgctccggtgggttcacgaactccggcgagcgtgattgcactgttccggtggggctggtcctcggctcaagctcgagcaagcttcacggcctcttgaggaagctatctgagggctcggatcgagcgaaggtgggcgggaatggtttggtcacagtgggcgccctcgggcggctctag

SEQ ID NO: 42615 - DNA, 192 bp, Zea mays
  Peptide Sequence Number=SeqID_85990
atgagacacccgtcgtcgaagacgagtagacgacgcgccctgcagcttgcgtatgaccacctgccggccccagcttcgagagctgcagaagctgtaccaaaaagaatccttgagctgatgaatgtggagaaactcaccaggaaaatgtcacgggccatcttcagaaatacaggctctatctcaaacgattaa

SEQ ID NO: 42616 - DNA, 993 bp, Zea mays
  Peptide Sequence Number=SeqID_85991
atgctcttcttctccgcgcccgtcggcgacgccgccggcgtggtctcggcagcgatcgccgtccacgatgtattcgaggccgccgccgcccgcatcggcgtccaggacggcctgaacgtgtactacgcggtcggcgacaaggtggcgtcagcggcgaccaccaactacaaacctctgtcgcttggctaccagtacggcacagccgaagacacggcggaggagaagctctcgttctctaggctgacgtgcgccgcctccgccattgacgatgccacgcccgagctcggccagctcgtcccagggggccccaagtaccggcggtacaaagccgcgtgcaccacgttcgacgtctccggagtacaagtggcactccggctggtactccgcccctcgatccagggccacatgctccaggcgttgtgcgtgtctgtggtcttcttagcgtgcgtcctggtgctggcggctgccgtgtcgtgcgccctcgcggtgcgggcgctgcggtgggcggcggcacgggagatggcgctgaacgtcgacctagcccgacagaaggaggcactgcggcaggcggagttcaagagcaatgccttcgccagtgccagccatgacatccggtccgcgctgtccgccatcgccggcctcgtggacatgtcccgtccggaggtgcagtcggtccccggcatcatggaaaaccttgatcagatgggtgtctgcaccaacaaactgttcgatattctaaactcggttctagacacaagcaaggtgggggcggggaagatgcagttagaggaagccgagttcaccatggcggacgtcctgcaggagtcggaggacatggtcaacgtgacaggcgtccagcgaggggtccagggggtctgggacccctgcaacttctcggtcttgagatgcacagtcatcatctcatacagcgagcgccacaagcagatcctggacgacctgcttggcaacgtcatcgagttcaccgatgaatga

SEQ ID NO: 42617 - DNA, 402 bp, Zea mays
  Peptide Sequence Number=SeqID_85992
atgtcgctgagcgagaagctggaggccgcgcgtgtcgtcctcggcaagcgcaaggagcgcgagcgcgagctgctgcaggcccagccgctcccggtggcggctagagccgagccgtggaatccggctccggctcgcgcggccccctccgccgccgccgccgccgccggcgacaacaagctcctggccgggcacctggcccacgagttcctcgcccacggcacgctcctgggtcggcggatcgagccgagccgcggagccccggctccggcaccggcgcgggccgagccggaccccaggaagaggtacgcggaggtgtcgtggctgctggtggcgcgcggggcccacgtccccggcgtcgtgaacccgacgcagctcggccgctggctgcagataaaggactga

SEQ ID NO: 42618 - DNA, 729 bp, Zea mays
  Peptide Sequence Number=SeqID_85993
atggggtggtggtttcgcggcggcggcgatttttctgctagttccgcgctcggtgctcacgagaacggtggggttttgaggggaggaataggatccagcgtggaggagatgagtttgccctttatgcgcgcggaagatttcgccccccgtgaaggtgtcatcaaactttggcaacaagaaaaaacggttttgctgatagtggaaagtcacaccattctggtgcatgccatttataagctgtaccaggtagatcccgcaaaatctgaagaaacgcttccatttgcaaaaaatagcacaggaggaaaaaacagtgatataggaaaggaacaacaccaggtgagagagagagaggggagggatgctgcccgcccgcacctggtcccgaagcggcgaagcaaggtgaagccggagccgtcatcggtgagctcgacgacaaggccgaccggccgccacgagaatcgcgagtgctgcagcgaggtgtgccgaggccacgagcgccacacggcctgcgaagaggaagaccatgaggcgctcgccggtgagcaacgctgctgttggcgatggagacgtggaggcgatggcatgcgcgaacccgactcaacactggtgacggtatcgaggtcgggagggggaggcagcggcgtggagggagggacggcgcgggaatctggatgggagatcgtcgtgggtccgagtcgcacagggaagggcagaccgcggacacgatga

SEQ ID NO: 42619 - DNA, 882 bp, Zea mays
  Peptide Sequence Number=SeqID_85994
agagctgctttagcaagatatcctggtgctttgcacattcaaccaaacattgacttaaatgactatgatgcactgcttgctctggatgaaaataaccaccagcacactggtgcttcagaaagccagatcaataatttgccacagtcagtagttcaggccgtgtggcgctcgtggcctcggcacacctcgctgcagcactcgcgattctcgtggcggccggtcggccttgtcgtcgagctcaccgatgacggctccggcttcaccttgcttcgccgcttcgggaccaggctctgggaaatttcgaagattccaaaaggtgttgcaatgtcaagaagtgtttggtcctttgcagtgaagacgtttgttttatggccatatgagaatcaatctgatagtagctatatacctgtgtggtggtcgtccaagctcgtcctctggctcgtcctcaacgccttcagctttcctcgtgccgtcgccgctcgcccagatctacgatgcaatggcgcacgacacctgctccctcccacaccgcgccagcaccagaatagcggcgtcgcgtcggcgagcacagcgcagcccactcggcccaactgcgtgcgacagccgagtccaccggagtccgttcgattcggtgagtccgtgatgggggggattgaccggggggcgaaatcttccgcgcgcataaagggcaaactcatctcctccacgctggatcctattcctcccctcaaaaccccaccgttctccgcgcggggagcaccgattggcgacctcgccggagttcggctgggcgtggagcaggggggcggcgccgccgtgcgtgtgggcgctgttggggcgtcggttgtgcgccgttggatgaccagcaacggctgtgattag

SEQ ID NO: 42620 - DNA, 462 bp, Zea mays
  Peptide Sequence Number=SeqID_85995
atgggagggaagggggtggtgccctgcgcgctgtggaggtgcagggggttcgcgcgcttcgtgaacgtgcgggacgacaccggagcgacgccgctgcacctcgcggcgaggcagggctggcggcgctgcgtccacgtcctactcgagaacggcgccatcgtgtctgcctccagtggcgccttcgggagaattccgtatgaggtcgccgcgaagcgagggcacgtcgcgtgcgcggcgctgctgaacccgtcatccgcggagccccttgtctggccgtccgctctcaagttcatcagcgagctggaacccgatgccaaatctttgctcgaagcagccctgatggaggccaacagagagagggagaggaggatcctgaaaggcgccaagaatgcattgccctcaccatcgcaccccgatgatggcgctcatgacaccgccatagctgaggccagcgacgcgtag

SEQ ID NO: 42621 - DNA, 621 bp, Zea mays
  Peptide Sequence Number=SeqID_85996
atggccgacgacgagtggtgctacgcgatcaaccgcctggaggatgacgagcgcggctataccggcgataaccgcagggcttggccacagtggccatcgggcccgaactccgcgtctgcccaccgtggcgatgatagtcttcgtccctccggctcgcgtccgccgaagagacgccggcacagagcaggtgatctccccaagcctgtacattttgtctcagcggccgtctcgtcgcccgatgagcatgggggttctcgtgatctcgaatcctcgtctgaggatccgcctcggcaggccacgccgccggagccggggagcctggcgtccaacgcggtggtggcgcagatgatgaagcggatgaattacaaggaaggcgccggcctcgggaggcacggacaggggatcatcgctcccatcgaggtggccgtccgtcccaagaacgccggcctcggcaccgtcgagagatccatccgtggagcggaccagccgccgccacccagcgacgaaaactggcccacgtgggacgaagctggaggagcgaggaaacggaagcgcgatcgggaactcgacgacgacaagatcctagccggacgtctggaggagagcgccgccgaggctgtc

SEQ ID NO: 42622 - DNA, 630 bp, Zea mays
  Peptide Sequence Number=SeqID_85997
atgtccggtgcacaccggacagtccggtgcccccttctagccgttggctcggccacgtgtcccgcgcagatcgcgcggccgaccgttggcccggccgaccgttggctcaccggacagtccggtgcacaccggacagtccgaaatggcccaagggcacatttccctttcacgtcggctgtggccagggctgagtccgagccctggggtcgggcgaagcggagtttgccgtcttctggggctgagcctaagtctgagccctgggtcgggcggagcggagttcgtcgtcttccggggcttagcccgagtccgagccctgggtcgggcggagcggagttcgccgtcttccggggcttagcccgagtccgagccctgggtcgggtggagcggagttcgccgtcttccggagctgagcccgagtccgagccctgggtcgggcggagcggagttcgccgtcttccggggcttagcccaagtccgagccctgggtcgagcggagcggagttcgctgtcttccagggcttagcccgagtccgagccctgggtcgggcagagcggagttcaccgtcttccggggctgagcccgagtccgagccctgggtcgggcggagcggagcttcctatggcgcctga

SEQ ID NO: 42623 - DNA, 444 bp, Zea mays
  Peptide Sequence Number=SeqID_85998
atgccgctagtcaggttcgaggtgcggaatgaggtggggctgggggaccccggcctctacggcggcggagcttccgctgccgccgctaccgcgggggaggaggaggagcccaatgcgctgctcgagggcgtcaccgtcgcgggcctcgtcgggatcctgcgccagctcggagatctcgcggagcgaggcaggttcatatccagacaagaagccacgatggaatctggatttcccctctatccgatggaatctggatttggtgtcagtccgttttcctgtgattttgggataccagccccattccccttcatggagggtatgcgttgctgttggtcggcacactggaatggaacagatatagacagaaccttcaagttcataagcaaggagttgcgcttgaccgatctatggatctctctagatgcactgactaaggtgaattga

SEQ ID NO: 42624 - DNA, 285 bp, Zea mays
  Peptide Sequence Number=SeqID_85999
atggatccacgggagcaggcgggcaaggtggtggtgatgggcgtcgccccagcggcactgctggtggaccctgcctccgcgaccaaaaaggcacggtcgcggatggagcagcagttccgcacccctccacaggaagtgctgagcctcggctcatgccgtgacctccccgggttcctcgtctccatgccacagtgtgacaaatcattggttgctccattccaattcaacgaacctcaaacaccaagtagtcaattgcgccaatatgggtttcagaaacgaacctaa

SEQ ID NO: 42625 - DNA, 537 bp, Zea mays
  Peptide Sequence Number=SeqID_86000
atggggttgttttcagcaccgcatgatataaatagtaggcttgcccccgtcctcccaccctcctttctttttgaatcagatttctcccctgcttcctccatcctctcccgtctctcgcgaagcgcagccgtcgatatgtcgctgagcgagaagctggaggccgcgcgtgtcgtcctcggcaagcgcaaggagcgcgagcgcgagctgctgcaggcccagccgctcccggtggcggctagagccgagccgtggaatccggctccggctcgcgcggccccctccgccgccgccgccgccgccggcgacaacaagctcctggccgggcacctggcccacgagttcctcgcccacggcacgctcctgggtcggcggatcgagccgagccgcggagccccggctccggcaccggcgcgggccgagccggaccccaggaagaggtacgcggaggtgtcgtggctgctggtggcgcgcggggcccacgtccccggcgtcgtgaacccgacgcagctcggccgctggctgcagataaaggactga

SEQ ID NO: 42626 - DNA, 1689 bp, Zea mays
  Peptide Sequence Number=SeqID_86001
atgactgacatgaattctgatgagattcttgaggttcctgacactcctgaccgattacagcagtcaaaataccatgtttccagctctattgttgggagggatggtacaatggcagctgctaatccatcaccacagcgcaaatttagaattagattcaagaacaattccgtgcaaggttcatcaagtcaaaataatggttgtagcatactgcctgcagctttagatactgatcatattttcaaacaagctgaagcagcacagattctggaactgtctaaagactataaggcaaaattttccctacagaaacctgacagcacaaggatatctgttgacagtgaaaagagggctggaaaacatggctttgatcagagcagaagcatttcgaacaatataagttgtagtgtgactggaggaaggaaccctaccttccaagttaaagatggagaggttggtcagcaagatgcaggtcatcagagtgcaaactttctagacataggaccaggttttcctactattcaagtgggaaaaccaggatacagattatgcactcgcactactgataagctgaaaggtgtaacaggtgctgatgtttgtccaggatcaagttctggggaggtcaaaggggacttgatcactaacaaggtcattgcaggacctacaagccctctgcgtgtttttcctcgaaggcatgtgggccaaaaaaggctggtacgcaatggatgtatttccccctctaacatagccaagacagatgcaaaagttaatgaaaaacaggaaatgtgctctttaagtgaacatttggaccatccgcatcagcctgatgcatttgacggaggtgatgtgattgacctcacggagaattcaccaataatgacaaggcagagatctgaagtgaacaataaattgatgtctggacacaatatggacacaagggccgcaaaaaagctgagaacagacagatttggcaggactttggttcggcagtccaaatgtcatgcaaacaacagcagttgttctgaagttagcttatcaggcctcaacaacaatggaaaaggaattgactgtgatatcttggatagtgatcaaactggagaagctaatttgaggggggttgatcttagtactgctggaacttatctaaacaaaaacttttctgatataagcacggagcaaggttggagaacaacacacaaccacacaagtaaattacccatttcgtttatgggtaatataactagcagttccggatgggaatctggatcttctaccacacgatctaatcaaaaccatggatttgctggaggcaagcatagctctgttaggggagcaaacataataggtcctgataagatagggaataaaacaataatgcttggtagagaaaggagaaaacaaacctcaacttcttcccatattggtgaaagctctagtgctgctgacgaacctagaggtgatcttcaatcgtcaaaaatatcagctggcccaaatcatagcagtcatcagcataatattcctgtaataaacattgatgacgtatcccctgaagctagacctagttcgagtggattcactaatagaactcttgatcctaccatagaagcacaattggagtcggatgagttattggctcgccaactccaggagcagctctacaatgaatctgctcgttttgccccaacagaagag

SEQ ID NO: 42627 - DNA, 414 bp, Zea mays
  Peptide Sequence Number=SeqID_86002
atggatagaatagcaggtgacagcagagggggaaaaaggaaggttgggacgtggaagcagctgaagtttactatcagtgacaactccagtgctggccagaaggccctattacccctactggtccacaataacttttgccaccaccatacctgcggcgtacaaaagtacggttgtcatatgaaaaaatggcggcttcgcctcacctgcttatcccctctagagatagctccacgagacagcgctaccaggccggtgcagacctgccttcagcgcgttagggttgagattcgtctacgccgcgacagaatggagaagaacaacagcggtcccatcgcatcgtatcggacggagatggaaaggagcgcaaaagccgcggagaaggaccgcggcgtggaggaagaggaaacgctgtga

SEQ ID NO: 42628 - DNA, 486 bp, Zea mays
  Peptide Sequence Number=SeqID_86003
atgaagaagaccctgaaaatgcacgatgaatcaaataagcgacagaaggttgatgatgatgtccaagagggtgctcttcctccttatctactcgattgtgatcagacacagcgtgccaagctgttgtatgcctgtatctacatgaattttctcctgactactattggttcatggaggataaataaaaatagctggaaagagcccattgcatttctgtctactcttttggaagcagatgatcgtgctgttcgaatggctgctggtgaagcattggctttgtgctttgagttaaatctgcttgatgtttcttctcgtgaggatgatggtgttaacacaggaggaacaactggttctaagaacaagcttttcttggatatgcaagcattaaaaaccaaaatatcaggtttggccactaatctctctactgaggctggggtgcaaggtgtagaaccagagaagatcatcatgttaaagtacataaaataa

SEQ ID NO: 42629 - DNA, 759 bp, Zea mays
  Peptide Sequence Number=SeqID_86004
atgcaccctgggtcagggcgcatcaagggctgggagaaggcgctggtgtccgtttttcccaacgcgacggccacccgcccgtggagaacgtcgaagggaagaggatccgaggacatccgcgagccctccaagtcagcctccggcgtcatctcccaaagcggcaaccgtcgctccgccaagggaagcaccctccggcggtggatggcggcaatcactcccgcggcgtggtgcaggatcgcccacataaagcggctcgccggcacaccgaatccccgctcatggaaggagacgaagctcacgatgtaccccggcggtggtgacggagcggctccgctcacggggggaatccattccggccgcttctcatcagagagagggcgaagtaaaccctcagcaacaagatcctccagatcacccaccgtcactgtggagaaaggccatgggtcgcgcggcgagatgatggtcacccggtcagccatcaccgagcagaaggggtggcggcgtaaaggacagggtgggcggtttccttttctctggctaagtctctcaggttgtgaaaacctaagagggaggcaagaagcggagcaaagaaccatcgccagaccctcccccgagtatataaagaccaaggcgagacccgttcaacgttccgcccggaccggccgcaggattcaaaaactcgaagcaaaacagtcgttcctcgaacggctcgcgcacgcgcaacggccgccccgcgaaccgcacgccccgtcgctttaa

SEQ ID NO: 42630 - DNA, 432 bp, Zea mays
  Peptide Sequence Number=SeqID_86005
atgcagccgaactctagctactgcgcatgcgaggaagtggccggcgatgaggaggaagaccgcgggctggcgtcagtgatgttgcgcgcggcgacggtggacgatcggacggtgaatccgctgaagcacgtgacggcgtacgcagacatgagtgtctccagcaatgccgtcttcggcgacgacccggacgacatggacaacttccccaacaggccaacacgggcttcttccaacgtcacgcccaacagccgcacgatcgccatgaccaaggcgtggcaccgggccagggagaggttcctggggaaaaaccagcatccggtcttcgacgccatcaagaaaggggcttgtcaccgtctcaccgacctcggccttgcagtacatggacccgaccttcgtcgcaggattctgcagctacgacaggacctcggcaag

SEQ ID NO: 42631 - DNA, 369 bp, Zea mays
  Peptide Sequence Number=SeqID_86006
atggcgattccaaaggcaacctccatcgttctggctatggtgctaacccttgcgatggtgtccctggtcgcggagactacaggatacgcaactttctacaccccaagctacacaccgtcggcttgctacgggtaccagtacatgggcacgatgatcgcggcggcgagcgatgtcttctggaacggcggcgcggcctgcggcgaccggtacgcggtcagttgcaagggcggcaccaacgagggcgtgccgcacccgtgcaccggccggagcgtcaccgtccagatcgtggacctctgccccgccggctgccagggcaccatccagggccgttcctggctttttaggggcccagtgcgaaattcgatatag

SEQ ID NO: 42632 - DNA, 915 bp, Zea mays
  Peptide Sequence Number=SeqID_86007
atgggccctttgatgcgccacacgattgtagattccacaactaggacttacatggtgaattcaactgttactactagatcatggttcgccatcaatgctatgaaccggccacgctggatttctatgcttgtggacgtgaacgtgctttcgctcccttcaagtgacagttgtggaaccttcgtgggcactgttgttcagctgaaggctttcgataggtttgagaacacatctgatgctcaatctgcggcaacccttattattgatagcaggcctagcaagggtctgcacaggttcttgcacaaacattgtgagggtgaaagagttaaagactgtactatttgtggcatttcacttatagacattggcagaaacttgatggcgaagcaagacatgtcagagcttgggttcagaactatggacgaagcagtatttgcttcgtcgaaaggttaccatgtgaatgttgattacctgtttgttctaactctcactgctggattggaaggttaccatgtgaatgttgatggacagcatgtgacatcatttccataccgcactggatttgttcttgaggattctactggcttatcattgaatgaggacctggatgtgcaatcagtgttcgcggggactctgccaactacacatcctagcttttctccacagaaacatctagagttgttacccagttggcaggcccatccccttccagacgaaccagttgagattttcatcggtatcctgtcagcaggcaaccattttgctgagcgtatgtctgctgctcagaagtcgtcgaatgttgtggcccgtttttttgttgccctgcatggcagaaatgaggttaatgtggagctgaaaaaggaggctgagttttttggtgacattgttattgtcccattcatggataatgatatctaa

SEQ ID NO: 42633 - DNA, 1599 bp, Zea mays
  Peptide Sequence Number=SeqID_86008
atggcggcgcccgccaagcgcgagcgcgcggaggagacgctgcgggagatggggctggaggccgcggcggacacgcgcatcggcgggtggatgcacaagggcatcagcggcgggcagcgccgccgcgtgagcatctgcatggagatcctcacccgccccgcgctgctgttcctggacgagcccaccagcggcctcgacagcgccgcgtcctaccacgtggtcagccgcatcgcgcgcctggcgaggcgcgagggcatgaccgtggtcgccgccgtgcaccagcccagcaccgaggtgtacggcctcttccacggcctctgcctcctcgcctacggcaggaccgtcttcttcggcgccgccgccgagaccaaccaggtaaacaactgccaaagagaagtccgcatacaacaacgttctggtacgttctttgctctgagtggattcccctgtccatcactgatgaacccttcggaccacttcctgaggaccatcaacaaggacttcgacaaggatatcgaagaaggcctgaacggagagaccaaaatgaccactgccgaagcaatcgacacgctggtgaactcgtacaaagcctcggcctacatggagaaagtgacgaggcagatagccgacacgcgggaagctggaggggcggtggtgaagaaggaatggcaggcaagtttcctgacgcagtccttggtgctcaccaagaggtccttcgtgaacatgtacagggacctgggctactactggctgcgcttcgccatttacatcatgctgtgcctctgcgtcggcaccgttttctacgacgtcggccacagctacggatccatcctggcccgtggctccctgctcaatttcgtcgccgctttcctcaccttcatggccatcggcggcttcccgtcgttcgtcgaggacatgaagatcttcgggcgggagaggctgaacgggcactacggcgcggcgccgttcacgatcgccaacacggtgtccgcggcgccgtacctggcgctcatctccgtggtgccgggcgccatagcctactacctggtcggcctccagagcagcttcggccacttcgcctacttcgcgctggtgctcttcacgaccatgatggtcgtcgaggggctcatgatgatcgtggccagcgccgtgcccgacttcctcatgggcatcatcaccggcggcggcatccagggcgtcatgatgctcaacggcggcttcttccgcctctccgacgacctgcccaagcccgtctggcgctaccccatgtactacatcgcgttccacaagtacgccaaccagggcctgtacaagaacgagttcctgggcctcaccttccccagcaaccaggcgggcggcagtgccactgccgccaccctctccggcggccagatcttgacggacttctggcaggtggagatggggtacagcaagtgggtcgacctcgccatcctgtgcgggatggtcgtgctctacaggatgctcttcttggctatagtcaagctcactgagaaggtgaagcccatgatcaagggattcaggttcaggaacaccgcgcagtccgtgcacgtagtcgacagaggctccggcagtccatga

SEQ ID NO: 42634 - DNA, 2985 bp, Zea mays
  Peptide Sequence Number=SeqID_86009
atgtcgtcttcctcgtctgctgcaaacacgccaccggccgacgcatcgtccgaggatactttgagcaacattgcggcggaggagctacatccgggtgatatggtggagttcggcgtttcgcggattttctcggtccgcgtgcaggatatgcagcagctcgggtattttggcagcagagtgggtcgtgtcccgggggcggaggaggttctcgagcccgagggcgagttggtcgtgtttgaggtccaccagctgacgccgaatgccgtggtggccctgacaaagtatgtctgggcgaaaaggaaaattggacacaagattgcacagtttggatcgtgcaagtttacgccgaggattggaaagacttcgatggaagtcgtggagttagttccttgtgcccgcaataagtggggcaactggtgggatttctggttttatgtttccgaaggcgaagtcgaagaccacccagggctccccgtggccgtgatgtgctcccattattacgtggcgtacccgcaatttgaggtggcagaggatgatgaagacgaaggagcccttcggtgtgctgcccgcatgagtagcgggtgcgatttagttgaggaattcatcgggtatggggtatggcccttggcacatggctgggcgttgggcgaagtatgccctcgcgagatgccctccctaagcgggcagcagggtctgcggagctgggatatccgtgggtccaacgttagattgaatcgggtcttcgaattaaactgcttgtcatacagtggctatcccggggatgacgctgtcgaccgccgcgggaagaaaccggtggacgtgaccgaggaagggccttcgcaggaggctgccccggccactaagaagagaaaattagccctcgggggaaggatgtcttcgcccaagctccaggagtcttcagcgcgaatgctggaggttaccgggagtcgatggcccaagaatgttccgatcccccgtgcagctggcgaagacttctttacgtctcgcatggctcgcgatttgaaggtttttccttacgggcggaatattgctgttgttgtatcggcagtgatggagagggaccgtcaagacgctgcgcagaaatgttgggcggtcgtctggatcgcagatcctatgcgcgaggcaaaaaaggcgcgggggagcacgagggctgcagcctctggtggtagcaagccggtgccggctgcgaaaccggccacccccgggcacagcaaggcgtcggcgagtgcgaaggctgccgcccctagcgggagcaagccacccccgggcgggctcgtgaaagggcgaaggtcgccttcgccggcgcgacgtattgccgacttcggcacggacatctgtgtcgaggattatcttgttggttcgggtgaggggcaactggatgttgtcccgcctccggtggcgaccacttcgccaacgacggtggtgggggcgaagggtgccacgcgggacccgtgggccactttctgcgcgagcggcaagattctgtcggccgctgccgctaaggacgtggcaggctccatgtctcagcgactgagggaggcgtcgcagcagctgtcacagcagctgaagcaagcggccgacttcaccgacctcgtcgcatcgggtgccttgactgcggacgttgctgccgaggtcgagcgtctccgggcacaacatgcggatgctgtgcgggagaagtcggctgcggaaagcaaaaaccgcaggctgttggagaaggtggccgccatggaggccgagaagacggatctctggcgccagctggcggaggagaggagggaggcgaataaggccatcgctgatgcgcaggctgcgcaggccgaagccaaggtggcgcgggcggagggcagtctcgcccgccaacgcgccgaggagctggaggcgaggttcaacgccctgcgcagtcgcatggataaggccaagtcctcgacgcgcgcggaggtcgagcggatgcatgtgcagttcgtggacgcgtaccgcgagctgggtgcgcggactgctgacttcgaagtgccggccaagaagcgggccttcgtttccttgaatggttgcaggaggagctactggcattatgaggtcttcgaccaagcggatgaaaactttgaacgtgaaatcttcaaggttgaagaccctgtggtgaagcagtcagccgggacactctttgataggatgtggggtccgcacggccgagaggcggttagggagcggtccgaccaggcaatagagcagatggcgcatgccgaggacgtcgaggaccttggtggtctggacggcgcgctgcctgaggccgcggtggtcgatccggtgccgtcctcggatgccggtgaaggcccctcgacgacccccgcgccgactacggctggcgaagaccccgcacctgcccctgcgccgacgtgtgaggacgcctcaaaggcggtggctgagcctgctaccgaagaccccgtgacagcggctgagccttcgcaggttccgatgtttgggcctgcacaagcaatcactactatcaatactgattttgcggctgaggcttcaatttcagtgcccgccgatgatgaagtgcctggctctgtgtctgaatgctttgagtctaaaggtgagtctgggagttcattttgttggacggaggagtccttggacgaaggcttaaattattttgttgcgttggatgtggctgcgacggagacttcgccgcgtgtggtggatgctgaggatcttccgggtgcgagtgctgggtataggcggcgaagggcggtggcaaaacagagagtgagtaggcgtcatcgtagtgagatggagagtggtcgtctccgcgtggatgagacaggtaaacgggaattgttgtcctcgccagttggggcgagtgtgggtgaaggggagttgcaaaatctttttgagggtgaggaattgaggataatgttgttcaactacagggagatgggtatcatcccgaagattgagccaatgtaa

SEQ ID NO: 42635 - DNA, 175 bp, Zea mays
  Peptide Sequence Number=SeqID_86010
ccgtgctcgcggttatgagcggccaagggagctccagagattagtgatacttgatcagagacattgtggtacaggtggttatgagattgatggttctggttatgactatggtgctggagaagatgaagccgtggaaggagacttccaggagttccaagattacgacgagttctag

SEQ ID NO: 42636 - DNA, 1069 bp, Zea mays
  Peptide Sequence Number=SeqID_86011
ccgtgctcgcggttatgagcggccaagggagctccagagattagtgatacttgatcagagacattgtggtacaggtggttatgagattgatggttctggttatgactatggtgctggtaagtggtattctttccgtttggaaaggatggctcgacttagacacactgcacgaaagtcagtcatccccttcttaccttcccgccttgctgagcgtccgcttcgccgtcccgtggccggacagtccagccacttggagagactacaccaccgcctgcgtgaggagcaggaacgtcgacgacaggagcagcatagctcttccctctcgctccaccaggagatagagtctgtgaggagctgctcccctgtgcttcctctggagccgccccctgcaccaccactgggcgccccagcttctggagtagctgctggaggagacccagacgacggaggaggcgacgacagctcgagccacgacaccgacttctctgctaaccctgagccggaagggatgggttgctcgacccatcactcgcgacgctgctcgcggcatagtcgcggggtctacccggaccgctgggaggcaacttgcttggtgcgctgcccggaggacagtctccagggtgcagaggcctgttcagagcactattctatctctgagcgggactcagctgaggcagccatgcaagatgctgcacggcgtgcgctttcgcactactgctcggttttcggtggggcagctgacggtcttgacctgaagtattacccccgccgttcatctggcagcacaggaggcgtgattgtctcacctgtcggtgagggcaatcctaggttgagcagcacagtcaacctagccgccgtgctaaacacggagctggaccatgcattagacgagctgagtagggctcgtgctgagatcgccctgctgcgggctgagcgcgcggaacgtcgttttctggacggtggttcccccgctcccgttgggactcagcacccgtaccgctcacctcagcatggacaccagtcttatggcaatcccgcctgcaagaccaagataaacctagaaccatag

SEQ ID NO: 42637 - DNA, 78 bp, Zea mays
  Peptide Sequence Number=SeqID_86012
atgggaactaatgggcatctcgacctcaacacgggaggttccaagtcgatcctaaggaagttcaccttagggccgtga

SEQ ID NO: 42638 - DNA, 531 bp, Zea mays
  Peptide Sequence Number=SeqID_86013
atgccaaccacaggacgtgtcgggcaaccggcacaccacgtcgggccgtgccgggagcaccgcgcaccacggcgggtcacaccaggcgagcagaccgcgtgccacaccggacgagccagccgctggcatggggccgcgctggggcaggggctgcgcaggggccgcgctagggccgcgggcggacaggccgcacatcgcgcaccgcgccggaagccgcgccgaggctgcgcagagggccggccacgccgcgccagaccggccgaggccgcaccgcagacgccacggctacacgctcgcgtcgaagccgcacgctcgcgccggggctgccacgttgccgcggagggccgcgcgcccgagccggggccgcgtccgcgccgcggccgtgccagggccgccacggagggccgcacgcccgagacggggccatgccggggccgccacgccgccgtggagggtcgcgcgcctgagccacgcgcacaaggcacgatggagaaggtgagagtgggagaaggggagagagaggctgactag

SEQ ID NO: 42639 - DNA, 471 bp, Zea mays
  Peptide Sequence Number=SeqID_86014
atgcgcagcaccgacgaagcatcgttacccttcggcagcggccgcgcgcgctcgttcccgttcccgctgactcagccctcgctggagatcagcgtggtggcggcggcgaacgggacagccggtagcggcggcggcggcgccgatggccccgtggcccgcgagaagtcgctgcgccgggccgacgaaggcgtggtggtatcctgggaggacctgtgggtgtcggcggccggcggtaataagggcggccgcgtgcccatcctctgcggcctcaacgggtacgcgcgccccggcgaggtgctcgccatcatgggcccgtccggctgcggcaagtccacgcttctagatgctttggcagggaggctgggttctaacgtgagccagaagggagacattctgatcaacggcctgaggcagaagctagcctacgggacatcttatagtattcatggctttgcgcgatcaaagaactaa

SEQ ID NO: 42640 - DNA, 455 bp, Zea mays
  Peptide Sequence Number=SeqID_86015
tggcccccgggcccacctcaggggaggaaacgagcctgcaggtggggccaaagctcgactggcgattaacatgctgcttctgtgcgcttgatggtgaaccggcgcccaaggaggatgactcgtgggcccgggcccccgtgctagagactgggttgttggtttcggtggaggtgaagaggtgcactaccgcggacggtggcgtgctcctcacgcggcggttcgccttctccgcacacggaggccgacgcccgaagagtatgactcgtgggcccgggccccgtgttagagactggtccgctactttcggcggaggtgaagaggcgcactaccgcaggtggtggcgtgctcctcacgcggcggttcaccttctccacacacggaggccgatgcccaaggagtatgactcgtgggcccgggcccccgtgctagagactggtccgctgctttcggcatag

SEQ ID NO: 42641 - DNA, 372 bp, Zea mays
  Peptide Sequence Number=SeqID_86016
atggccttgttagatcctcccgagcgcctccagcctgaggtggtacttaacttggtgcgcaacctgctcggatggggtgtatcgacattcaccggaaagatcagtgtcagtggctctcctcacggcaatctcgccaccggagagtttgtgttcttcgtctccaacctccccagcgggttggcgctgccgatctcgtctttcttcgtgctgctgctgctggaggagcttggcctccaacctcagcacttcatgccctgcttcatccttcaggcggccatcatcgcctacctccgcaagatgtccatgggggcgacgctccttcccacttcttcctccagcattcagagggaaggatgttcaccagctttgtga

SEQ ID NO: 42642 - DNA, 219 bp, Zea mays
  Peptide Sequence Number=SeqID_86017
atggaatcagatgttcagaccgcagtgggctatttctccacatttcaattccgtgctgcttgccccgtgtgcgctcgctccagactcgatctcgtcgtcattccgtgtgtcatcaagaaatcccaagaatcgggcggattcgtgtcagttgttggaacggtagtatgtagtgggtgcatatgtcgaataggtttaaattggctctttgctgagaagtga

SEQ ID NO: 42643 - DNA, 264 bp, Zea mays
  Peptide Sequence Number=SeqID_86018
atggcatacccgcggcggagcttcgcctgcggacacgcaatccgacacccggatgccccaaacctaaaattgtctagtgctaaacctagaggggaagatggagaacatgcggagaggggtctcacctcggtcagagatgtggagttcgctgtccacgaagaggcgcagtccatagcagagggtgtgcactggcgagcaattgctgccactccgagaatgacagattcgatagtttctgttcatgccagttttccatggtcttag

SEQ ID NO: 42644 - DNA, 570 bp, Zea mays
  Peptide Sequence Number=SeqID_86019
atggcagaaaaaggaaccgacttaaaggggaaaaggctatcaagtcctcgttgggttgtccataagtcaatagtaaatatgaagggcatgaatcaatgctcaactttaaccatcctctttggtaagccttacacatcacatgagctcccacctttgggcatcccagctactggaggagttgctggaggagctacagtaggagatcctgacagagacgatgacggtggtagctcaggccacaataccgagctttccgaggaacaggagctggaaggatgggtcgctcgacccatcacccatgatgccgcttgcggttatcactttcatgatgcgctcgacaccctgttatgccaggcttttgaccggcacacctggtcgatcgagtatcgttgtgtagtcaatcagcatagtcacaggaagtacccggaccgctgggaggctacctgtctggtgcgctgtccagaggatgatctctggggtacagaggcctgcttagagcactatgctatccctgagagggacaatgctgaggtggccatgcaggatgcttcacggcatgcactctcataa

SEQ ID NO: 42645 - DNA, 1392 bp, Zea mays
  Peptide Sequence Number=SeqID_86020
atggaggtagtcgagttagtcccttgcgcccgcaacaagtggggcaattggaatgagttttggttttacgtcgcggagggtaccgtcgaagaccatgaggggctcccagtatctgagatgtgttcacatttttactcagcatacccgccctttgaggtggcggaggaggatgcggacgaaggggcccttcggtgcgccgccggcctgagcagtgggcgcgatttggttgaagaatttgtggcgtacggggtatggcccttggcgcatggctgggcgttgggcgaagtgtgccctcgccagatgccttcccatggtgggaagctggtgcgaagtcctgccttcgcgctggatctgcaaagccgcgatccggccgcctttgtacgtgaggcggaggatggggcggtgcggatcgttggtcggtacgtgccgaggacagagggccagcgtagctgggatatccgcgggtcgaatgaccgtttgaacagggtttttgaattgaatcgactgtcgtataacggctatcccggccaagacgatgtggaccgccgcgggaagaagccggtggtagagtctggagacgaccctgcgccggcggtcgccccatcctctaagaagaggaaactaggtactgctatgggaagacttggggtttccgatggttttgctagagaattgatgaggacatgcgcggccccgaggggaaggatgtcttcgcccgagctccgggagtctttggcgcggatgctgagggttacctggggttggttgcctacgaatgttcctatcccccacgcggccggcgaagacttttttacatctcgcatggttcgtgaatggagagtgtttccttacgagcggaatattgctgctgttgtgtcggcagtgatggacaaggatcgccagggagctgcacagaagcgccaggcggttgtcaggcttcatgaagccaggccgaagaggcagcgaggggctgcgaaggctgctgcccccgacggaggcaagccaccgctggcggcgaagtcggccgtctctgcgtctagcaaggcggtggaggctgcggctggcgccggtggttccaagtctgtgaagactgtgccgccgtccagcagggcgccgaaggtcgcgaaggcggcccgagggttgccgtcgccgggcaagcgcgtcgccgacttcgccaccgatattagcgtggacgactatcttggtgggtcggacgaaggccaacttgttattgttgcggctgccgcggcgaccacggcggcggtcgtagtgccgaaggcgaagggcggtgctcttagtgccggaggcgagatgccggcactcgctgcggtcagggacgaggcgggcgctgtgtcccgccggctgaaggagatgaaggaggcgctaagtcag

SEQ ID NO: 42646 - DNA, 420 bp, Zea mays
  Peptide Sequence Number=SeqID_86021
atgggggtatttccgaggtcttcttcgcaaagcccgataccccgcacgacttcaatcactgggatcacgagcaccctccaccgacgacccacccaatcaacagagagggcagtcaccagagaagctgacggcgatgtgcagcccgtactccggtccagtgagctaacgtttgcgaccgtcaatgactccagctggtgttacaaggcggtcgtgggggtgggttcagagggtaggcacgagagagtattcccccctcttatccagagatcccagggaatcgggcgcagattgtcctgtgcactaggaacaggggccctaaccgctagttccaggtggcactatgaagagaagagcatcggactgtccggtgtgaaaagcctacgcgccaacggtcacctgcggtgtcaacccaacggctag

SEQ ID NO: 42647 - DNA, 267 bp, Zea mays
  Peptide Sequence Number=SeqID_86022
cgcccgcagactcgcaaccctactctttctcccctcctccacgccgttcgccgctacaatggtgaacggaacgttgaggtcggcgtaatcgattacgtgttgtggatggaggacgaggacaaggtgttcgtccgcgtggacgaggtcggcaccgagctcgcggccaacttgcgcgcgctcgcggccaacttgcgcgcgttgccggagcccgccgtcatcatcgtcattgccatgggcgtgttcctcttcttcaccaatatatgctag

SEQ ID NO: 42648 - DNA, 357 bp, Zea mays
  Peptide Sequence Number=SeqID_86023
atgggcccggctgtggctgacccggacggtccgcgctcgcgagcggacggtccggacatgtgtagatcggctggtttactaccgatttgcgtttgctcaggctttaagagattggagttcgttggtgctacttacatttggggtaatcgtagtaggtcggagcgaagccagatctgtcgcccgttgccgaacgactttgttgttcctgtccactttgaagtcagccaggaatttcgcctttgcttcttggatcagctgctcctggcgctcctcgaacaggagctgttcttcagccggcaaggcttcccatgtcggtgtgatgatattgctggtggaaacctcagagctatcctttga

SEQ ID NO: 42649 - DNA, 837 bp, Zea mays
  Peptide Sequence Number=SeqID_86024
atggcagtggcggcggcggccggtgacgcgggcaagatcggcatctgccacggccgcgttggcagtaacctcccgccgccgtcggccgccgcggcactgctcaagcggaacgggatcaccaaggcgcggctcttcctgccggacccggccgtgctcccggccttcgccgcggcgggcatcgacctcatggtgggcgtgcccaacgagaacctcaccttcctggccgcggcggggcccgagggcgcggcgcagtggctgcggtccgcggtcctggcccacgcccccgccgagcgcgtccggtgcctcgccgtcggcaacgaggtgctgtacaacaaccagttctatgcgcctcacctcgtgccggccatgcggaacctgcacgccgcgctcgccacccctggggctggacggcaggggtcaagccacgtgaacgacccggcgaacgtgcagctcgcgtacgcgctcttcggagcgggcgcggcgccggtgcaggacggcgcgctggtgtacacgaacctgttcgacgccacggtagacgcgctggtggccgcgctggagaaggaggggttcgacggcgtgccggtcgcggtgaccgagaccgggtggccaaccgcggggcacccggccgccaccccgcagaacgccgcagcgtacaacgccaagattgtggagagggcggcgcgcggcgtcggcacgccgaagcggcccggcgtgcccgtggaggtgttcctgttcgacttgtacgacgaggacggcaagcccggccccgagttcgagcgccactttggcatcttcagggcggacggcagtaaggcgtatgacatcaactttgcctag

SEQ ID NO: 42650 - DNA, 708 bp, Zea mays
  Peptide Sequence Number=SeqID_86025
atgaagtatgttggactcattaagtacatgtacaacatggttgtgattagtattcgaacaagtgacggagacacaaatgacttcccgattagaataggactacatcaagggttagctttgagcctttaccttcttgccttggtgatggatgaggacacgaggatcaatgttatagagatacgaggtattgatgaaaatgttagccatagaatcgaagcaaggtggatgaagtggtgtcaagcatatggcgttctatatgacaagagggtagttcttgttgcaaattcgttgccggctttgaatgatgttaccgctaatgaacttccagaagttatagctgaagcctcaaagcactgtggtatccttcggaaagctgcagaagctggtggattgatagtcgatgcaatggctggcatccaagatgatctcaaggatgagacagtgtcagtgccactaatggttgttgagaatggatgcggcagtccatgtattgatttccggcaggttagctcagagcttgctgctgctgcaaaggatgcagatttgttaattttagaaggcatggggcgatcactgcataccaacctcaatgcccgttttaagtgtgatgctctaaagcttgctatggtcaagaatcagcgattggcagaaaaactcttcaatgggagtctatacgactgcatctgtaaatttgaaccagttccttaa

SEQ ID NO: 42651 - DNA, 117 bp, Zea mays
  Peptide Sequence Number=SeqID_86026
atgagtcgagtgaacggaacggagcgtgactgcgagagcgggatgggaacggagcggctccgtccggttgattttttggagcggaatggttccggatttgaggagaatattccctaa

SEQ ID NO: 42652 - DNA, 1563 bp, Zea mays
  Peptide Sequence Number=SeqID_86027
atgtcggactcgccggtggagctgccgagccggctcgccgtactgcccttccgcaacaaggtgctgctccccggtgccatcgtgcggattcgctgcaccaaccccagtagtgtgaagctggtggagcaagaactctggcagaaggaagagaaaggcctgatcggggtacttcctgtgcgggactcggaggcaacagctgttggctctttgctgtctcctgttgttaccgctcttgtaggtgtgggcagtgattcaggtgaaggaggcagtaaggttggcggttctgcagtagagtcatcaaagcaggacacaaaaaatgggaaggagcccattcactggcacagcaagggagttgctgccagagctttacacctttccagaggggtggagaagccaagtggaagggttacatacattgttgttcttgaaggtctttgtaggttcagcgttcaggaactaagtgcaagaggaccataccatgtcgcccgtgtttcacgccttgacatgacaaagactgaattggagcaggcagagcaagacccagatcttatcgctctttctaggcagtttaaagctactgccatggaactaatttctgttctagaacagaagcagaagacggttggtagaacaaaggtgcttcttgatacagttcctgtttacaggctagctgatatttttgttgctagctttgagataagttttgaggagcagctttcgatgctggattcagttcacttgaaagttagactctcaaaggcaactgaacttgtagacagacacctgcagtccattcttgtagctgagaaaataacacaaaaggttgaggggcagctatcaaagtcgcaaaaagaatttctactgcgccagcagatgagggccataaaagaagaacttggtgataacgatgatgacgaagatgatgttgctgctctggaaagaaagatgcagaatgcaggaatgcctgctaatatttggaagcatgctcaaagggaaatgaggcgcctacgaaagatgcaacctcagcaacctggttatagtagctctcgagcctacttggaacttcttgctgaccttccttggcaaaaggtcagtgaagaaagggagcttgaccttagagttgcgaaagagagccttgaccaggatcattatggactaacaaaagttaagcaaaggattattgagtatttggctgttcgtaagcttaaacctgatgccaggggtccagtgctgtgttttgttggaccacctggtgttgggaagacatctttggcctcctccatagcaaaggccctgaacagaaaattcataagaatctctcttggtggtgtaaaggatgaagctgatattaggggccaccgaaggacatacattggaagcatgccagggagacttattgatggactaaagagggtatctgtgagcaatccagtgatgcttctagatgaaattgacaagactggttctgatgtacgtggtgatcctgcatcagcactactagaagttcttgaccctgagcagaacaaagcattcaacgatcagtatcctttcatttatcattaa

SEQ ID NO: 42653 - DNA, 1380 bp, Zea mays
  Peptide Sequence Number=SeqID_86028
atggagagtcatgatctccgggcagaatgggaatcacggcttgtgggtggttatgagactgttgaatctggttatgattatggtgctgctagtccactacagccaaacaggatacttgctgagtatgttgatgtgtactcacccttgctctacacaccaaacccccccccccaggttgtcagcattgcaaccactgctcaggcgaagatgaagctgtggaaggagacttccaggagttccaagattacgacgagttctaggtgtgggttagcggcaacccccagtcggctgcctgtgaaggccgcgttatctacgtttcttttccgcactttgattcattgtaagaactatatggacgtctcagacatggctcgacttagacacactgcacgaaagtcagtcatccccttcttaccctcccgtcttgctgagcgtccgcttcgccgtcccgtggccggacagtccagccacttggagagactgcaccaccgcctgcgtgaggagcaggaacgtcgacgacaggagcagcggagctcttccctctcgctccaccaggagatagagtctgtgaggagctgctcccctgtgctttctctggagccgccccctgcaccaccactgggcgccccagcttctggagtagctgctgggggagacccagacgacggaggaggcgacgacagctcgagccacgacaccgacttctctgctaatcctgagccggaaggatgggttgctcgacccatcactcgcgacgctgctcgcgggtgtcacttccatgatgcgctcgacaccctgctacgtcgggcatttgaccggcatacttggtccgtcgagtatcgctgtgtggtctaccagcatagtcgcggggtctacccggaccgctgggaggcgacttgcttggtgcgctgcccggaggacagtctccagggtgcagaggcctgttcagagcactattctatctctgagcgggactcagctgaggcagccatgcaagatgctgcacggcgtgcgctttcgcactactgctcggttttcggtggggcagctgacggtcttgacctgaagtattacccccgccgttcatctggcagcacaggaggcgtgattgtctcacccgtcggtgagggcaatcctaggttgagcagcacagtcaacctagccgccgtgctaaacacggagctggaccatgcattagacgagctgagtagggctcgtgctgagatcgccctgctgcgggctgagcgcgcggaacgtcgttttctggacggtggatcccccgctcccgttgggactcagcacccgtaccgctcacctcagcgtggacaccagtcttatggcaatcccgcctgcaagaccaagatcaacccagaaccatag

SEQ ID NO: 42654 - DNA, 1248 bp, Zea mays
  Peptide Sequence Number=SeqID_86029
atgggcggctgcggcctcggacgcggccgccgcaccgcctgcctgctgctgctcctcccgccgcttctcctgttcgccgtggccgatgccgccgcctcggggaaggagaagcagggggtgtccggtaagctgcggttccggcgggagagcgggacgttcaaggtggtgcaggtggcggacatgcactacgcggacggccggagcacggcctgcgaggacgtgctcccttcccaggtggccggctgcaccgacctcaacaccaccgccttcctctaccgcgtcttccgcgccgaggaccccgacctcgtcgtcttcacaggtgataacatctatggtgctgattcaactgatgcagccaagtctatggatgcagcaattgctccagccattgacatgaaactgccttgggctgctgtgatcgggaaccatgaccaagagggtacgctatcgcgtgagggtgtgatgcgtcaccttgtgggcatgaaaaacacccttgcaagcttcaatccggaaggaattgaaattgatggttacggaaattacaatttggaagtttccggggttgaagggacatccatggatgaaaaatcagtgctcaacctgtatttcctggacagcggtgactattccactgtgccgtcaatcaatggttatggttggatcaaggcttcacagcaagtctggttccaacaaacatcttcaagtctacaggcaaagtatatgaataagaacccgaaacagaaggaaccagcacctggccttgtatttttccacattccactaccagagttcagcagttttacggcatccaatttcacaggagtaaagcaggagggtatcagctcagcatcaattaactctgggttctttgcctccatggtggaggctggagatgtgagagctgcctttgtgggacatgatcacattaatgacttctgtgggaagctcagtggtattcagctctgctatgctggtggatttggttaccatgcctatgggaaagctgggtggtcaagaagagcgagggtactgtctgtgcaacttgagaaaacagacagcggtgaatggcgaggagtcaagtccatcaagacatggaagaggcttgatgataaacatctgagcacaattgactctgaggttctctggaacagaggctctaatggtaaaacactctcctatgcctggatacgatacttaactcaaacctgccatagtaactgtagagtaggaggtggcttcggtgaatga

SEQ ID NO: 42655 - DNA, 537 bp, Zea mays
  Peptide Sequence Number=SeqID_86030
atgcttgatgaaggcggatctacaggggatagtccataccatgaatctggtgacagcctgtcctgggcgcggtggagattggttcacagcggagttcatcgtcgatgggggtatttccgaggtcttcttcgcaaagcccgataccccgcacggcttcaatcactgggatcgcgagcaccctccaccgacgacccacccaatcaacagagagggcagtcaccagagaagctgacgacgatgtgcagcccgtactccggtccaccaataaaaagaccaagtgttgggttcaacacaagagcaaaggagcaacagaaggctcctctggtctggcgcaccggactgtccggtgtgccaccggacatgtccggtgcaccaggggactccaactccgaactactcgccttcgggaatttccggagaccactccgctataattcaccggactgtccggtgcacaccggacatgtccggtgctccaaggaagggcggcctcctgaactcgccagcctcgggttttcacttcagctgctccgctaa

SEQ ID NO: 42656 - DNA, 513 bp, Zea mays
  Peptide Sequence Number=SeqID_86031
gtgagagcaagagctgctgacctcaatttgtcacctacttctgatatcaacttattggagagccgtgatatccacatacattttcctgctggtgctgtgccaaaggatggcccttctgcaggtgtgacattggtaacggcactggtgtcgctttttagtaacagaaaagtcagagcagatactgctatgactggcgagatgactctaaggggccttgtattgccagttggtggtgttaaggacaaggtgcttggtcattgcctaaccccgttctcttttttatccttctactttgaaaatgtggaaggtttaatcatttttgagccggtacttgcggcacatcgttatggaatcaagagagtaattttacctgaaaggaacttgaaggacttatcagaggttccattaccaattctctccgacatggagattctgcttgtgaagcgcatcgaggaagtactcgaccatgctttcgaaggccgatgcccacttagatcacgctccaagttgtag

SEQ ID NO: 42657 - DNA, 78 bp, Zea mays
  Peptide Sequence Number=SeqID_86032
atgggcatgaaatactcctctgaatgcaagcaggtacaaggcatcactatggactggaacttgccaaggataaagtaa

SEQ ID NO: 42658 - DNA, 258 bp, Zea mays
  Peptide Sequence Number=SeqID_86033
atggctcaccggagttactccggcccgcccgagaccttctcaccgtcgttctcccttctctgcccgtggattcatggccccttccccgccattaagttcgtcatggcgccctcttcctctctgcccaactcaggtgaccccagaacccccgtagctcacgcctgcctcaaccccggcgacctcaccgccgcggagaggagcagcaccgcccgcagccgttcacccctctccggtctgatccccttcgttcgatcctga

SEQ ID NO: 42659 - DNA, 690 bp, Zea mays
  Peptide Sequence Number=SeqID_86034
atggccgccccgcgaaccactcgctccgtcgcattaactccgcggcgggacaggcggcgcctctggcaggagaagcaggcgacgcttcgccttcgccataataaccgcgccaaaaaaggaaccaggctccgagcctccctactgatcagaggttcgaaagctggccccccggaagggttcgacagccgcctcagatcgcgtgggccctacacccactactggtcagaggttcgaaggccggcccctcggaagggttccacggccgcctcaggctactcgggctccgtgcccattactgatcagggcgggagcgatcttgtaacggaatcccatcagagggaggcatcgagccctcggaccccgccgccaggggaccgggtccggcagatcacccgcagctcaccggagacaccatgttcggcgcccatcgagggcaacatggcgctttcccccctcctccttgcggaaaggcgacgcatgggcgtatgtaaaaaagccgagtcggtccctgatcgccctctcgccctgtgtagaggctcgggggctgctctcgcaaacccggctccggtcgaaccgttgacagcgtcaacataccagcccgagaacttgggacccgaccgtacacctaggctacgaccagctcgcatgagggaacaaccagaccagccgaagcattacgtgaggcattaa

SEQ ID NO: 42660 - DNA, 387 bp, Zea mays
  Peptide Sequence Number=SeqID_86035
atggattggaatcagcagagggcttggacgacggagatattgttcgtcgacgtctggcccagtcgcatgggggcaggggcttcgcctcgctggcctagtgcacagaggcgctcgcgcagggggctaaaaaggaaaagtgcaccgaaagcttctcctgatgcgccgaagcaaaagaaagcaaagattctaacccactggctaaagtcgttctacttagagagggctgcaaagttgcctactgtggagacctcgaagacagaacccgccgaagcagttgaagagaacccttcagctccggagatgatcgaggcatctgttgtagtggttgaagcacctagtatcttgttggaaacaacaaaaacagaaagctctaggatggaacaataa

SEQ ID NO: 42661 - DNA, 531 bp, Zea mays
  Peptide Sequence Number=SeqID_86036
atggcggatgggggccggatgaagggcgtacagagcgctggcggtggcgccggtgacgacgaagaggggaatgaggaggtgcgagaggagccggaactcgcgctgtcgctggggcggcgagtctggcacctcccgccgcggcaggaggccgctccccgctcacttaactggactccggttctgccggagtggaaccccgacgccgctgggagctcgcagggtgtggaaagggccttgggcggacaatccatctcttctcttgggttccatgacatgtttggtggtatcctagacgatccccaagcgggtggcagtatggaggttgggtggggcaagctgaacgaagaggatgaagacagagacctgcagaataaacggctcagagtacgacactttggcgatggtgagagccctttgactgagccaggggtaaggctccccttggttattccttcccagaccctattcttgtgggagccaccaatattgggcctgtccttttccagatacatagctcttgctagcacctag

SEQ ID NO: 42662 - DNA, 567 bp, Zea mays
  Peptide Sequence Number=SeqID_86037
atgacgacgacaaagaagatgacgaggagaacgtcaacgaagaggccaatgacgttcagcaggactacttcatgggatttgggcctgtcacagaacattacacatcaatgtttgagacagggcacttcccaacctgctgcaagacgtgctgcacgtgttgggaacctatgtctgacccttgtacgagacaaggcgagggatagggggtccaggactgtatcggctaatgagtccctaacaccgctatccacctacgctgcttcggtcagcgatgctgctagacggactctgtggtctctcaaccacacctactggcagcagttgcaagacacgaagttcaggcatcttcctctgcgtctgagtggagggagccagactagcaatattccaggtggagctagagaagatcgcctcaaccccctagttggtgtagtggcaggtcttaacatagacctggacagtgccaccctgaatctcactagggtgcacttggagctggaggatgcccatgccaggattgcagcccaggaaactcagcttcaaggatgggatccgcctgaagcctag

SEQ ID NO: 42663 - DNA, 183 bp, Zea mays
  Peptide Sequence Number=SeqID_86038
gagaaggacaagctggtggcggacgtgatgccatacgtgctcttcaggacgcaccagaactttgaatgtcccatcaagcaagaggagctcaccgggatagtccacaagaattaccgccagcgtgtgctacccacacttgtcatcaaggaggccaaggacatgctcgccgccaccttcggctaa

SEQ ID NO: 42664 - DNA, 174 bp, Zea mays
  Peptide Sequence Number=SeqID_86039
atggagagtcatgatctccgggcagaatgggaatcacggcttgtgggtggttatgagattgatggttctggttatggttatgatgctggttgtcagcattgcaaccactgctcaggcgaagatgaagctgtggaaggagacttccaggagttccaagattacgacgagttctag

SEQ ID NO: 42665 - DNA, 554 bp, Zea mays
  Peptide Sequence Number=SeqID_86040
gtggaacgaggagggcgcggaagcgggacggcacccccgccagcgacagcggcaactgccgcaggccggcctctcccggcgcgcggctcgccagtttgctcagcgcaatcttctccggcaagcggcagcacccggctccggcggacgacgagccggcgtgctcgacggctccatccagcgtgcgcccctgcctcgctaagacactgccgtcggcgcgggcgcgggtgacccggaggcagagccggagcaggaccgtgcgtttcttggacatcgaaggcgatgttgctgtggccgcagcagccgccggttgcatgagattcccggtggtcgaagtgaaggacagcggtggcagcgaggagagcagcgacgcaagctccgacctgttcgaactggagagcctcgcagccctcgctccggtgaacggcatctccggttgccgtagaactttcgaaaacgagcttccggtgtacggcgacgattggaactgggcttgggcacgacattgcagtcgtccgtcgccgccgtttggggcttctaaattgccccggaaataa

SEQ ID NO: 42666 - DNA, 339 bp, Zea mays
  Peptide Sequence Number=SeqID_86041
atggggtccaggcacagtgcttgctctgccgaggctgagtgccgaggttctttcgttttgcttttgttagtcactctcctgcggggagagtcggacgactcggaggaggtggaggactcctctgactctgagaaggggagcggcagcaagggcgacagcgacaagggcgacaacagcggtggcggcggcgatgacggcggcgagggcagcgacgacgacgacggtggcgaaggcggtagcagggggcgacgacggccagagcaacgacaaaggcgggcaatggcgacggcaagtaccggtggcgacggcaaggctggtggcatagtgctatcggcttaa

SEQ ID NO: 42667 - DNA, 1357 bp, Zea mays
  Peptide Sequence Number=SeqID_86042
gcaaagccttgtggtcttcgcgacctcggtcgttcggtccttgaagtctttgatggtcttcgcctcggctcatcggagcgaagggggcgctcggaccttcgcatggacgacgtccgtggccaggatggcagagcctgctgtcgcgaccttcaatctgtggaccgttgatgtagaaatcctcgagcgagggggtggcgtgttcatcttcgccccaatatttgccatccgaggggccagtttgaccaagtcaactggtgtcgaagactaccgtgagatggtgaaaacgctgccctcgctcgaaatggtcccacggcgacaatgttattttgggaatggtgtcgggcgagctccaggggtagaagagaagtttgaggtacaagttcatcagttgacaccgaatgcagtggtggcgcttgcgaagtatgtctgggccgtctcctcatacggcgggcaaccatctatggaagtcttcactaagaattattgcttgcactggcagaagagaaaaatatgtgacaagctcccgaggaatatcgaagggttgccgagtttgccccctgccatcctgtgttcacattgttatgtggcattatcacaatttgaggtggcagaagaagatgaagatgaagatgaaggggcccttcgatatgcagcccgcctgagtagcggacgcgacctggtcaaggaattcattgcctacagaatgtggcccctagcgcatggttggacattgggtgaggttaccccccgcgggatgccgacactggggggccagctggtgcgaagtcctgccttcggcgtggatctgcgcggtcaagacacggccgcgtttgtgcgtgaggtcgaggccgaggccgtcaagcttgttgggaactcccggggaaacaatgtcttcacccgagctccgagaaacctctacatgaatgctgaagctcgtgacttaaagattttcccttatggaaggaacgttggtgctgttgtatccgcagttatggagaaagatcgccaggacgcgcagcggaagaaacattgggcccccgccaggttggtggacccgaggcaggaggtgaaggtggcgcggcccagcgcgaagtccgccgcctcaggcgccggtatgcccccgcccgtcgcacctgccagtgagggaaggcccccctcgccaccatgcattgctgagatggtagtggcgggggccaaaggagtctccacggagctatctgtcgacggctacttggtgggcggggtcaccatgttcgacgcccagacggggctgccgcctgctggcgaccgccttcgcggaacgtattgctttgggggcactgacctcggagtttgccaccgaaaggcggcgacttga

SEQ ID NO: 42668 - DNA, 333 bp, Zea mays
  Peptide Sequence Number=SeqID_86043
atgagtgagcacacctcggtgaagctctccgagcgaggaatcgaagcctgcttcgccggagaggccagtccacggtcgccggagttcacaaccccgccggagtgcgtggaccgggttaagaaaaatagaaaaggtgatataaataatgaaccagagggcacccctatttttgttagagtacttatccaatactgcaaccttgctgacggagagtacgtcctcgtgccggagcaaggagcttctcaggaggtagccccagatccagcaccagagcctgcaccagaggacctgcctgccactgctttggaaggcaagccccggttttatgcataa

SEQ ID NO: 42669 - DNA, 291 bp, Zea mays
  Peptide Sequence Number=SeqID_86044
atggcgctttccctcaccctcgcggcccaagcggacccatcgccgcgctccgcactcccctcccctctgccgctgccagcccgagccatcccaagcgccctccggccaattggccctaccaccgtgatcccctacccccgcccgtgccttgccaccactccaccgtcacagaacccgggaccccggcggagaacccgccgcggacctcactggcggtcgggctccgaccggatgaagggtattcaccctcatcaccttgtgagtgggatgatcagggactccctggtttag

SEQ ID NO: 42670 - DNA, 171 bp, Zea mays
  Peptide Sequence Number=SeqID_86045
atgggcgcggatggcggttgcagcgaggaagggggagctgacaggcgggacccactagtcagcggacccaaggccgtggacgcgtgttgtccctattgtaatcagtgctcgggaggagatgaaggcaacatggaggactttgagaagtttcaggacttcgatgagttttag

SEQ ID NO: 42671 - DNA, 717 bp, Zea mays
  Peptide Sequence Number=SeqID_86046
atgccccctgcaccaccacagggcatcccggctgttgaaggagaccctaacagagatagagacaacgacgacgacggtggtggtagtttgatccacagcatggagctctcggatgagcaggagccgaagggatggatcgcccgaaccatcactcgtgacgccactcacgactatcatttccacgacgctctcgacaccttgttgtgtcgggcctttgaccgacacacttgttccattgagtatcgttgtgtggtctaccagcatcggcgcgggttatacccagaccagtgggaggctacttgcttggtatctgagtgcccaacgccttgtgtcaaggacgcatgtgccctcagacacctagtttatccccagaatattcccataaacggggtagctgatggccttgacctgaagtactaccctcaccgtttgaccggcagtgccggaggtgtgattgtctcacccgttggtgagggaaatcttaggctgagcagcatggtcaacctggtcgctgtgctcaacaccgagctggaccacgcccttgacgagttgggcaaggctcgagcggagattgcggaactgcatgcagcgcggcgccatcaggaggatgggtcctcggctcttgtcgggattccgcacccttatcgcttgatgccccatggtcattatgcttatggcacccctgactatagaacccagatagacttggagccatag

SEQ ID NO: 42672 - DNA, 231 bp, Zea mays
  Peptide Sequence Number=SeqID_86047
atggtggagctcgaccgagtagctcaacggaagggcagcggtgtttcgggcacggcaagcgcacagacgtcggctatggtggccctgaggcttgacgaacgtgcggacgacggtgctcctcgacgaacttcggcgaggcacgatgagcacaggggagaagtattggttgggtgctttggagaaatgaggcgagcagggggaggggtgaccgtcaggggggttatgccctga

SEQ ID NO: 42673 - DNA, 879 bp, Zea mays
  Peptide Sequence Number=SeqID_86048
atggctcatgtatcactgaactgtcctcagttgcttgagttggacttccaatcctgccataagctttctgacaatgcgattcgccaagctgctacagcttgcccattgttggcaaaactagacatgtcatcttgttcttgtgttactgatgagacattgcgtgacatagctagctcatgtccgagtctttctgttcttgatgcatcaaactgccccaacatttcatttgagtccgtgaggcttccaatgttaatagacttgagacttctaagttgtgaaggaatcacatctgcttcgatggctgcaatagcttatagccgtctgcttgaggcactacagcttgataattgcagcctgttgacatcagtgtctttggacttacctacatctaagaatataagttctcgtgcactacgcaaatttgctgatttgaatttgcgaagccctgtgctttcttacatcaaagtttccagatgttcggcactccatcgagttagcataacatcgactacacttcagaaattggttcttcaaaaacaagagagcttatccagtttgtcattgcaatgccacaacttgattgatgtggatcttactgagtgcgagtcattaacaaatgcggtttgtgaagtatttagtgatggaggtggttgccctatgctaagatcattgatccttgacaattgcgagaatttgagcattgtagaactgaacagcagttctttgtcctgcctctctcttgctggttgccgctcgatgacattgttaagactctcatgcccaaatctgcaacatgtcaatcttgatggctgtgatcaccttcaaagtgcagcattctgtccagtaggtattgtctctactacctcaatagaaatatga

SEQ ID NO: 42674 - DNA, 219 bp, Zea mays
  Peptide Sequence Number=SeqID_86049
gcgccgaggtataaggcgtgcccagcaagagcagcaggcaccacaggaggaggcacctcagtagcagttgccaccaccacccccaatgacaatcgagcagatgtttttgatgcaggacctaggcagtccaagcaattgggccagactctagcagatatgcaacaggtgcagcaacaacaacctccacctcaacctcaactgcaagtgcagatgccatag

SEQ ID NO: 42675 - DNA, 342 bp, Zea mays
  Peptide Sequence Number=SeqID_86050
atggcgagcaaggctcggggctcatgtggccgagggcgaggtggggcgagccccacgcgcgacgtgggcgcggagaccgcggcacgctcggcgggtggttacgcgaagacagataagttgactttccgggcccgcggcgcacagagagagaagaaagcgggtgcgggcgcgagggaagcggggctgacgggtggggccgggcgagcagagagagagggaggcgggtgcgcggaaggcggccgcgccgacaagccgggcccgctgcgcagacacaggaggggcgagaggcgcgcgcgaggttcaacatggaagcttgaatttccgactccccccatgggttaa

SEQ ID NO: 42676 - DNA, 324 bp, Zea mays
  Peptide Sequence Number=SeqID_86051
atggggtccaggcatagtgcttgctctgccgaggctgagtgccgaggaagaggtctccgcctcgcccgaccccagggctcgtcccccgcttcggcctcggaaggtggtctccgcctcgcccgaccccagggctcggcatcaatctcgacctcagaaggtggtctccgcctcgcccgaccccagggctcggcctcaacctcgacctcgggaggaatcgcgtcctcgcccgaccccggcctcggcctaaggaggagtctccgcctcgcccgaccttgggctcggaccgaccgcaccacggaggatgcatcattaccctacccctag

SEQ ID NO: 42677 - DNA, 237 bp, Zea mays
  Peptide Sequence Number=SeqID_86052
atgcggaagaccccctgcctttcctcgcaggtggatgtggatctcctcccgaagctgctattgctgctcttccgcttcttgctgccgcggttgctgctcatgctgctccacctcccgagcttggccgccttccggtcactgctgccccaaggggccacgacgtccctgtccggctccggcaccactggtggcgccacgcaccggatgatcaatatgtacaaacggaaacaacaatag

SEQ ID NO: 42678 - DNA, 459 bp, Zea mays
  Peptide Sequence Number=SeqID_86053
atgtggcagcacgccaagaaaagcttcgcacaaatgaatgtaaatggaaatttgcagaatggaattgggattcagatgggtcaggttaaggcgatagaaatcaaggaggccgcggaaaaagggagaaatgggaagaccgagaccgcggagaagaaaaggaacgtaaattatggattcatgggtatcctctgtcgggacagtgacgccatgacaaatccgccaagaacacagctccctcgggggaaggaccccgatggacacgaggtggagaaggtcgggctcggagacaacagacatgtggttacctgcgaaaggcaactgactgttggggtcgattgggggaatcaccgcggcggacgaactcgaggctttcctcttgggagccatctcaattctatcggcgaacagagtgaaagacgaattgcagagaggatttggaggcaggaaagcaagaactag

SEQ ID NO: 42679 - DNA, 387 bp, Zea mays
  Peptide Sequence Number=SeqID_86054
atgggcaagaacaacaagcgcaagcgtgagccgactcctccatcagaggacttcggtgattcggagtactcagaggaggagttctcctctgagtctaaggggtctccggctcccatccctcagacgactcccaggggcttgcggcggaggctcgagggctcgaatgagtcggagtactcctcggacgaggaggactcgtccgaggaggacggtggcggcgatggcgaggacgacgacgacgacagcggcggcggcagggcggcagcagcggcaataaggatggcgacggcggcagcagcaggggcggcagcggcggcggcagcagcaaggccagcaacaaggccagtggctaaatgccactggtttttagatattagtatagattag

SEQ ID NO: 42680 - DNA, 543 bp, Zea mays
  Peptide Sequence Number=SeqID_86055
atggccccccttgtgacgtggttggcccgagccctgggtcgggcgaggcgaaggctcctccgagagccgaggctgagtccgagccctgggtcaggcgaggcggagttcgtcgtcttccggggccgaggccgagtccgagccctagggtcgggcgaggcggagttcgtcgtcttccggagccgaggccgagtccgagccctggggtcgggcgaggcggagttcgtcgtcttccggagccgaggccgggggccgagccctggggtcggaaagggagaggttgacacccgcaaaccactgcacgaggcaggggatgccgccatcgaggttggcaaaggtgatgggttggctcaggcatcgtgggcatgtatacagtatgtaggagagcgtgatctgggtggtgatgatagaggggtcgaacgcctgctaaacctctgctcccatggcagtcaatgtcgcacaggggagggcgcgaggccgatagaggtggaaatgatgggcaccagcagcaccgacgcgcaagggggaggcagggccaaggcctag

SEQ ID NO: 42681 - DNA, 429 bp, Zea mays
  Peptide Sequence Number=SeqID_86056
atggagggccaaccgagaagcggcggcgcttcgtggggcccgcctgcggaggccaccaggccgggcgggcggcggccgacgacgacgacgcagaaccaacagcagcagcagcagcaggtgaaggtgaagcacatcgtcacgagggaggtgagcacggaccaggccaacttcaaggacgtcgtgcaatggctcaccgggaaggactccgcggccgcgcgcgccgcggtggtggctgctggcgccgacggcacgagcagcagctggagcgccggtggtggcgcggtcgccgcccgcggggctactagtactgctactggagttgcttcgggttcagtagttgtgtttgaggacaacgtagccggagccggagccggggcgacgacggtgttcccggcggatgaggaggcggatatgaagcggtggtggtga

SEQ ID NO: 42682 - DNA, 204 bp, Zea mays
  Peptide Sequence Number=SeqID_86057
atggagggggcaccgcggtcaggcaacaccgtgcacctcctccccacgctgtcaatagaatctccttccaccatcagcagaaggtgtcgaggagcatctgtcgggcggctgggatggcatggcggcaccgagagcgaggagcctagatccaggagtgggcgggagggggccaatcgtggattctttcctctcagaggaggatga

SEQ ID NO: 42683 - DNA, 288 bp, Zea mays
  Peptide Sequence Number=SeqID_86058
atgagggctgaaaagaggagcaggaaggcttggcttgctgcaattcctgtgctgtttggcgccacaaaaggagcagagatagcccactggagacaaggtcacaaagatgaatgccatccaccaagtgttaatactaagcatgatgatgaagaagaaaaggttgaagtgggaagagctgccaaagagaatgtatcagttggtgttaaacaggttgctgaaatgaacaaaccagttgttggatctgaaacttctgatgcacaccatgatttgaagagttcaatggtaaaa

SEQ ID NO: 42684 - DNA, 234 bp, Zea mays
  Peptide Sequence Number=SeqID_86059
atggcttggcttttgcctggccaagcactggtaagcacaggggcaagaaccgaaggagcgagcaggatcacagtgagctatgggaagggtccggacctcaagggcttgcagcagcacgggccgctgacggtcctccacactgacatggacgaggaagggagcttcgacgccgttgtcgtccgctgcgactacgccttcctcaatgggcttgcagcacattcttccttcggttag

SEQ ID NO: 42685 - DNA, 174 bp, Zea mays
  Peptide Sequence Number=SeqID_86060
atggcggttgcgattgcgacgaaacccatggcagccgtcgtggtggccgcggtcgaccctgagaatgcaaaggcggcggcggacctctcatcaaaccgccggcttcacctgtccgagcaggagcaggaggaggaagtagggctcgaatctcctacgaatcaagctgaatcatcc

SEQ ID NO: 42686 - DNA, 2133 bp, Zea mays
  Peptide Sequence Number=SeqID_86061
atgctgtcctcttcctcttatactgccgatacaccgccggccggcgcgtcgtccgaggagacgatgagcaatgtggcggtggaggagttgcgcaccggcgacacagtggaattcggcgtgtcgcggatgtcctcggtccgtgtgcaagacatgcaacagcttgggtattttggcggcggagtggcacgtgtcccgggggcagaggaggtcctcgagccggaaggcgagttggtcgtcttcgaggcttttttcgtcgctggccttcgtctgcccgcgcatcgatttgtgggagaagttctacgtagattcgacgtccagaaaaggaaaatcggaaataagattgctcaatttggatcttgcacatttacgccgaagaccggcaagacttcgatggaagtcgttgagttggttccctgcgcccacaataaatggggcaactggtgggaattttggttctacgttgccgaaggcacagtcgaagaccatccagggctccccgtggccgtcatgtgttcgcattattactcagcgtacccgcagtttgaggtagcggaggaggatgaagacgaaggggcccttcggtgcgcggcccgcatgagtagcggacgcgatctggttgaggagtttgtggggtatggggtatggcccttggcgcgtggctgggcgctgggcgaagtatgccctcgccagatgccttcccgcgacgggatgctggtgcggagtcctgccttcgcactggatttgcatggccgagatcctgccgcattcgtgcgtgaggcggaggatggggcggtgcgaattgttggtcgctacgtgccaaagacggaggcccagcggagttgggatatacgtggatccaacgaccgcctgaatagggtcttcgagttgaattgtttgccgtatggcggttatcccgggcaagacgttgtcgaccaccgcgggaaaaaaccggcggctgagactgaagacgaccccgcgccggaggccgccccatccactaagaagaggaagctaggtactgcgatgggggaactgggggtctctgatagttttgctatggagttgttggggacatgcgcggcccccgggggaaggatgtcttcgcccgagctccgggagtcttcggcgcggatgctggaggttaccgggggtcgatggcctaagaacgttcatatcccctgtgcagccggcgaagacttctttacgtctcgcatggctcgtgacttgagagtgtttccttacggacggaatattgctgctgttgtgtcggcagtgatgaacaaggatcaccaagaagttgcgcagaagcgtcgggcggtcatcaggctccccgaagctaggccgaagagggcgcgggggactgtgaaggctaccgtccccggcggtaaccagccgacgctggcgacgaagtcggccgcccctgggtccagcaaggtgtcggagagcatgaaggcggccggtgccggcggaaccaagtctgccccggacggggctgcgaaggtccgggaattgccttcgccggggaaacgcgttgccgacttcagcacaaatattagcgtggatgactacctcgttggatcgggcgaggggcaacttgctgttgttccgcctgcggtggcgaccacggtgtctgccgcggtgcctggggtgaagggtagcgctctcagcgctggcggtgagatttcgacggtcgctgccgtcaaggacgaagcgggtactgtgtcccgccggcgaagggaggtgtcgcagcggctgagtcaagcggccgacttcgccgaccgcgtggcgtcgggggcccttactgcagatgtgtctgccgaagtcgagagactttgggcgcagcatgctgacatcgtccgggaaaagtcggttgcggatagcaagtgccgcaagctggcgaagaaggtggccgccctggagggcgagaggacggacctccggcgccagctggtggaggagaggagggaggccaaccaggccatcgccaaggcgcaggcggcgcaggcggaggccaatttggcgcaggtggaggggagtctcgccagccagcgcgccgaggaatgggaggtgcggttccacgctctgcaggcccgcatggagaggcccagaggcctctacgcgctcggaagttga

SEQ ID NO: 42687 - DNA, 153 bp, Zea mays
  Peptide Sequence Number=SeqID_86062
atgctggacgaggccgcgagatgggacgacctcgtcacaggccttcgtccggtgacacgtgggacgaaggcgaggctggcgaaggcatcgagcgaagggtggcgtcttcgccttcgccccaacatttgccctctgagggaccagttcgactaa

SEQ ID NO: 42688 - DNA, 2994 bp, Zea mays
  Peptide Sequence Number=SeqID_86063
atgccgtcctcttcttcttccgctgccgctacgccgccggccgccgcctcgtctgaggagacgctgagtagtttgatggcggaggagttgcgcgccggcgattctgttgattttggcgtgtcgcggatgacgtcagcccgcgttcaagatatgcagcggttgggttactttggcagcggagttgctcgtgctccggggacggaggaagtccccgagccggaggaagaggatgattgggacgaagttgctcagtttgggtcatgcacattcacgccgaagaccggcaagaccacaatgcaagtagtggagttggttccatgcgcccgcaacaagtggggcaactggaatgaattttggttttacgttgctgagggtaccgtcaaaggccatgagggactctccgtgtccgatatgtgctctcattattactcagcgtatccgccctttgaagtggcagaggaggatgcggacgaaggggcccttcgatgcgccgccggtcagagcagtgggcgcgatttagttgaagagttcgtggcgtacggggtgtggcccttggcgcatggctgggcgttcggcgaagtgtgccctcgccagatgccttttcacggaggaagggtggtgcgaagtcctgcctttgcactgaatctgcgaaaccgcgacccggccgcctttgtgcgtgatgcggaggatggggcggtgcggctcgtgggacgttacgtgccgaggacggaaggccagcgcagctttgatatccgcgggtcaaatgaccgtttgaacagggttttcgagttaaatcaattgccgtacgacggctatcctggtcaagacgacgcggaccgccgtggaaagaagccggcggtggagactggagacgaccctgcgccggcggccgccccctcctccaaaaagagaaaattaggtactgctatgggaggacttggggtgtctgatagttttgctagagagttgatgaggacgtgcgcggccccggggggaaggatgtcttcgcccgagctccgggagtcttcggctcggatgctgagggttaccgggggttgctggcctaggaatgttcctatcccctacgcggctggcgaggactgttttacatctcgcatggttcgtgaatggagagtttttccttacgggcggaatattgttgttgttgtgtcggcagtgatggacaaggatcgccaaggggcagcgcaaaaacgccaggcggctgtcaggcttcatgaagctaggccgaaaaggcagcggggggctgcgaaggctgcggcctccggcggaggcaagccgccgctggcggcgaagtcgggcgcctctgcatctagcaaggcgccggaggcaacggcaggcgccggaggctccaaatcgacgaaggtggtgccgccggtcagcggagtggcggaggtcgcgaaggcggcccgagcgctgccgttgtcgggcaaacgtgttgccgacttcggcaccgatattaatgtggacgactatcttggtgggtcggacgaaggccagcttgctatagttgcgcctgccgcggcgatcgcgacggctgccatagtgccgaaggcgaggggcgaggctcttggcgccggaggcgaggtgtcggccctcgcggttgtcagggacgaggcgggcgcagcgacccgccggctgaaggaggtgacggaggcgctgagtcaggtggctgacttcgccagccgtactacgtcgggggccctcacggcagctgtgtctgccgaagtcgagagacttcggacgcaacatgctgacgctgtccgtgaaaaatcggcctccgacagcaagtgccgtaagctgacggacaaggtggccgcactggagagggagaaggctgacctccggcgccaactggcggaggagaggagggaagccaacgaggatgtcgccaaggagcaggctgcgcaggcggaggccagactggcgcgggcggaaggcaatcttgccagggagcgcgccgaacatctgcaggagcggctcaccgccctggggagccatgtgaagggggccgaggccgcgatgcgtgcggaggccgaacggacgcgcacacagcttatggatacatatcgtgagctgggaggagctgcaggaactccccactgtcgtggggggtttatgtcgtacgcctccctggtcacctgcgagggggcgatgaacgcactctcccgcgaagggtgccggcacttcgaggtcttcgaccaggcagatgaagattttgagcgagatgtctataaggtcgaagaccccgtagtgaaggaattcgccggggccctctatgaccggatgtggggtccgcacggtcgtgaggtggtcagggagcgggccgagactgcgagggctcaggcggcgcgtggcgagcgggtggacgacttcggggcgttgaacagcacgctgcctgacccgaagccgacccctgcggaggccgtgtctggggtcgccctggagccaaccccggagaccgcggaagacgcaccagatgcccccacatctgctgcggccggcgaagacctgcccccaaaggtggccgaagtcgcacctgatgcccccgcagctgttgtgccgagtgttgaagatcccgcggcggtggcggcggaaacaacggcggaagcagcggcggagccaacgacggaggctcccgcagcgtcagggccttcgcaggttcaagattttgggcctgcgcacgcaaccgctactactgaatttttggcggcttcgaccgcggaaggtggtaatgaatatggtggatctgcatctgagttttttgattttactgactctgggagctcggttgagtggactgaggagtcgtcggaggaggacttggactattttgcggccttggacgtggctgcggcggaggcttcgccacacgccgcggacgcgcaagatgtgccaggtcctagcaccgggcgccgacgacgaagggcggttgcaaagcgtagggttagtacggaggaaagggctcggcttcgt

SEQ ID NO: 42689 - DNA, 691 bp, Zea mays
  Peptide Sequence Number=SeqID_86064
agatgccccttgcaccaccatagggcatctcggctgctggaggagaccctggggatatggagacgacaacaacgccggtggcagttcgagccacggcacggagcactcagaggagccggagctagaggggtggatcgctagacccatcactcgcggtgccgctcgcgggtgtcactttcatgacgctctcgacaccttgctgtgtcgggccttcgaccgacacacttggtctatcgagtaccgttgtgtagtctaccaacaccatcgcgggttatacctggaccagtgggaggctacttgcttggtacgccatccggacgatgatcttctgggtgcagaggccttctcagacggggtagctaacggccttgacctaaagtactaccctcgccgttcgaccggtagtgctggaggtgtgactgtctcgctagttggtgaaggcaatcccaggctgaacagcatggtcaacctggccgcagtgctcaacacagagctggaccacgcccatgaccagttgggcaaggttcgggcggaggttgcggaattgcatgctgagtgtgcagcacgccactatctggatggtggttctcccgcccctgtcgggattcagcacccttatcgttcaccgccccatggtcgctttgactatgataccccagactgcaggacccggatagatttggatccatag

SEQ ID NO: 42690 - DNA, 585 bp, Zea mays
  Peptide Sequence Number=SeqID_86065
atgaagcagctgaagaaatgcgccacatcgcacagaacaatcaaggacaagtgcctcaacacagagagcttcgtcaagaaactccaatcaatgatgatggatggctaccccataaccaccttcatacaagccgccacatctccccatgatgcaagaattacttggactaaggaattgaggaaagcaacacctcaaaagaagacattaagaagatcaagaaaagtccaagaaaggaggcgtgtgctgcctgcggactgtctgtgcgtggagcaccggactgtccggtggcacaccggactgtccggtgcccacacgccggactgtccggtgcacctgggaactgcagcccaacggctagttccaggtggcacccggagcctgcggcgccaacggtcacctgctctgacaggagttagacaggcaacggctaggcgcaccggacaggctacagtgcgctgtccggtgtgccgcagagagcagcagcttttctccaacggctacaattgtgttgggggctataaatacacccccaaccggccattctcaagtgtgggagcccaagcaacataccaagcaatattgtag

SEQ ID NO: 42691 - DNA, 321 bp, Zea mays
  Peptide Sequence Number=SeqID_86066
atgacgatgtctatccttgaagtgaatctcttcgatttacctgccctttacattgagacctatggagtctggatcataactgaatttgacgtttacaggatttttcagattctcctgcagccactggatggtggcggccttcgcgcgacagcgtggctcaaggagtaccacgagaaggtgttggtggagatctacagattacgttatgcatgtgttgatcccaagtcaatagtgtgtgagtccttcaaggctggccagtgccagaagtgttttaagtgcaaattctctcatgacctgaatgaatgtccagaagaagggtga

SEQ ID NO: 42692 - DNA, 276 bp, Zea mays
  Peptide Sequence Number=SeqID_86067
atgtggtgccaggggacttcgctcgtcgaggggtggcccatgctgcaggccaaggtggccttcgcgagtgtcttcgagttgtgcacgctgttgcaggggtggcccatgctgcaggccaaggtggccttcgcgcgtgtcttccagttgtgcgcgctgttgcaggggtggcccatgctgcaggccaaggtggccttcgcgctgcatcagcgcgatctcccgctcgaggtcctgggccttctgctcttcgtcgcgtatcatttgccgcaccttggctag

SEQ ID NO: 42693 - DNA, 300 bp, Zea mays
  Peptide Sequence Number=SeqID_86068
atggcctgttacaatgggccggatcacacgtgggcctccatgctggacgaggccgcgagatgggacgacctcgtcacaggccttcgtccagtgacacgtgggacaaaggcgaggctggcgaaggcatcgagcgaagggtggcgtcttcgccttcgccccaacatcgggcgaggtccgggggtctctggtggtcgcgtcgaggtgcggatcaccggcggtggtgaccggaggagggctggccgcgtgcgcaggcagtcgggctcgtcggcggcgcattctccggcctgctcacgacgatag

SEQ ID NO: 42694 - DNA, 941 bp, Zea mays
  Peptide Sequence Number=SeqID_86069
atggcttcgcttggtcattctgaccgctttcagtctgaggaggcgctcaacctggctagagcgagggcgtccaccaccctcaccgtgcccccgctccagcccccgcccgcgccgtcttcctccctgcaatctcgtccccgcccacaccgtcccttccctgcatcccgcccccgccagcgccgtcccttccctgcaatcccgcccccgcccgctccgtcccttccctacatcccacccccacccgtgccgttccttccctgcatcccgcgccgcccccgcgctcccatccgctacctctacgacccgctgggacggcgaatggcaaaacgggtctggcggcgggagcgtgacctgacggggtggatgtcgctgtcgcgtaaaccggaggtgacgtggtatggctgggacggagacaggctgacgacggtgcagactgacaccacacgtatccagacggtatacgagccgggaagcttcacgccgctcatccgggtcgagacagagaacggcgagcgggaaaaagcgcagcggcgcagcctggcagagacgctccagcaggaagggagtgagaacggccacggcgtggtgttcccggctgaactggtgcggctgctggacaggctggaggaagaaatccgggcagaccgcgtgagcagtgaaagccgggcgtggcttgcgcagtgcgggctgacggtggagcaactggccagacaggtggagccggaatacacaccggcgcgaaaagctcatctttatcactgcgaccaccggggactgccgctggcgcttatcagcgaagacggcaatacggcgtggagcgcggaatatgatgaatggggcaaccagcttaatgaggagaacccgcatcatgtgtatcagccgtaccgtctgccagggcagcagcatgatgaggaatcagggctgtactctttccgtcaccg

SEQ ID NO: 42695 - DNA, 354 bp, Zea mays
  Peptide Sequence Number=SeqID_86070
atggatctcacctttcgggaagaaatgctcacccgacaaggcaagttgctggccgagcatgagctcgaagccgaggagaaggagaggaggctggaggagcagatctgccagttcaatgcggcgcaggcggcgccgggtgtgacagaacctcccaagtcattaggcccacctacagttgtccttgtccaacggacctcagacaacccttcaggtgcacctgatcacttgacaagttcggtatctgaattccttaccttcccaagagcattttacccgtcacgcagacattacaattcatcggagatacggaaatgcggaagcagttacaataacttacttttattgaaaagttaa

SEQ ID NO: 42696 - DNA, 2022 bp, Zea mays
  Peptide Sequence Number=SeqID_86071
atggcctcctccctcctggtcagcttcttctccctccgagacgcctccagctccctggcgcacaccctctggaggtccctcttgtactccttgcagtcccgctcgagttgggaccgctcggagatgaattgttgggacgtcgtcctggtgcgctcctccagttgggtgcgccagtcactgaggcgctggtcctcatcctcaagcgcctcccactctcgcaagattgctgccccagtgtcactaaggatctggtgggcacgggacagcatgcgagggagggggactggcgctgcttcttgttcgacacttgaccggagtcgctgcccaaacaccacctctatctcctccggagcaggcgggggttggagctggacgcgcctcctatgtcacccccagtgtcgtgagtgggcacggatcccccagctgggacctcctccgccgctgcgacgccacccaacactggtgccgctgccgccggatccccagctggggcatgggaagccgctgccgctgtcttggcagcagccggggacagactgccagcaccaccctcagcagattcttgctgctgagagccagacccgtcggtgggcctggctcaaagaaaaagggactacacttacttggggccctggaccttcaagtgaccctggaagtgaggcgatcactgctcctgctgttgctgctgttgcggctgctgctgctgctgtagctattgctgctgctggtgtccctggggtcctttggcgcttctggggggctccgaaacgagtgacccgtcaacgcgacgtagcctgcgttgcctctcctcctccgaccccccaaagctacctgggcggaggcaccgcttgcagcccctttgcccttatccaaggggctaggggccacggcgggattggcgctgcgagccacaccggcgggctagggacgtccaactggtgcatcggagatctggatcccgtggtgggggtcccggcgtccagtctggcaaaccgccacgccgctgtcgttaagggtcgacagcgtggccaagatcgccgtcctcaggcccgggtcatcgcagagcacagggatgttctggggagtatcagggacttagggacaaaagtttcccaagtaatccctcctactaggactgccagctcgtcccaggacagatcggtgcccgacccgcgctggatcctgccgatgtcgttcgggtcagtgaaccagcagcacaggcgcggtctcctctgcagcggcacgatccggcgcttcaggagatcgccgaccacgtgcaccgatgttaggccgctcgtagccaagcccttgatcctgtccaatacggaggagaacgacaggctcaacggcgaacgacgcgacgacgggctcaacggcgaacgacacgacgaccagctggaataccagggagccgagcgcgaggaagctggaggttcggcgagcaaatcaccagggaattatggcgagacccgagctgcgaaggacgcagtccggcacgcgcagctaaggcgtacggagcaggggtgccgggcacgtgtgcgcggcaacgcacggcccaacgagcaaagacggcgcgacggccatgggaggcagaaaaggagcgcgcgcagggagcaaggacagccagctcggaccggcgtatcgagctcgaggaagacgacggaaccaccacctgcgcacggcggccatggacgagcgcgccagggagcagcaggagggcggccaagcgccatgggtgagggcagagagaaactcggcgagctggagggcataggtgagctggaggccgagcgccggccagggagttggcgagctggaagatggagcactcggctgtccggcgagcagaaccaggcacacgcggcaggaaaagaatatcagcgagagagggagagcgatgggaattgggaaggatgccgagggagatggaaacgacttgctgtggatgacgctgggagacttcagaaaaatcaacgaccggatagaatccaaggctcgtggcctggtgtccacgtacggtga

SEQ ID NO: 42697 - DNA, 312 bp, Zea mays
  Peptide Sequence Number=SeqID_86072
atgctggacttggctgatgtcagcctcaccctggcgggtggcacagcagtcggagcaaggcaggcggcgctgtcctgtcaggttatagacaaaggagttatgttaccagctgggatcagaagcatgatggcattggagcagttagaaggtgttgatgtcttcaagaaaataaatgtctttgcccaagaacttggccatcttacatatcttaggagaataagcttctttttatgtcataaggatcccaaggaatttgatacagtgggaagcgaagatttgaggtttccatatgatcacaaagacagaacctaa

SEQ ID NO: 42698 - DNA, 273 bp, Zea mays
  Peptide Sequence Number=SeqID_86073
atggccatcctcgtccctcgctctagcctcaaatctcaccctgtcggcgacaagcaatggtttcctacatcaacgtcggatgctactactttcatcggcatacccctcgggcgtgctcctcagattcaagttcggtattgggatcaagtttatatgttctttttttcttggcatctgaatgatttggggttcgacgggaaggagaagggggaggttgtggaggcctcagccttgcctgctcgcgcaggagaattcacagtcactggctgttga

SEQ ID NO: 42699 - DNA, 249 bp, Zea mays
  Peptide Sequence Number=SeqID_86074
atggagcatcgtctcgggttggagaggttgatggagactacccatttggagcttgatgggaagctgttcgtcaacacgcagcaggcccctacctggcgcgccaactatcggcgtttcgaccccggggggtccctggaccgacgagtaaattatcgctgcgtgtcccagcccagatgggtcagcgcgagacagaacacaagggggaaaacagcaaggggaaactgcggcctcgtgttgtcctacgcctag

SEQ ID NO: 42700 - DNA, 1128 bp, Zea mays
  Peptide Sequence Number=SeqID_86075
atggaggctcgggcccacatgtcatgtaaccggcgcaccacttactacgtgcaaagaaaccgcaccgcgacttacgccaatgccgcgtcttcttgggactacagaacctgtgcaacgactcgaggcagccctgcgcatgacccaacagtgcaaattaagtgcgacggtcatgggtcagtcagccgtggggatagacatgacagttgggatcgggaaaggggacatttcgaaggagcccttcgcagcaaaagaaacgggtcccgagccctcctactgatcaggggttcgaaggttgcgccctgcggggttcggcgaccgccccagagcactcgggctccaagccctttactgatcaggggttcaaaggctggcccctcgaagggattcgacagccgccccagaacatgcagagtcagggatgaccctgggtacgtccgttacatggccaaggctcgggctacgctcttgaggtaccctaagacatttccgagaccagcgggaacggtttgtaatggaatcccaccgaagggaggcaccgagccctcagaccctatcgaacgggtccgggtccagcaaatcacctgcaggccgcatgagggaacaacaaggccgaccgagggatcacaagaagaattaagacctcataggagtcaaaccactcctccaaggcctcgggggctacacccgacaggaaaacaacactattcaccatgttccgactactgtgccaaccaccagggtaagactaacaacagtaagtcacggcctcccccgagttcagcctcgggcgcaacaggaaactccgcctcgcccgaccccaggcctcgacatcagcctcggcctcgggagaaggtctccgcctcgcccgactccaggcctcagtctcggcctcaggagaagtcaccgcctcacccgaccttggcctcggaccgaccacgctacaggggatacatcattaccctacctctagctagcctcctcaggctacgaaggaacaagaccggtgtcacatctagattactccggcaacagctctctacgaaggcaaagaaacgtcagcaggacccagggccgcaccgccagctacgcttctacagggctcaagcacttctccgccggccacgttag

SEQ ID NO: 42701 - DNA, 504 bp, Zea mays
  Peptide Sequence Number=SeqID_86076
atggcggcattgtacctggtgcgcatgctcctcatcttgtctctctactatgtgcacggagctgaccacttgggtggttgccgcaatgtagagcaagagaggtcccttgtcacccgaggtactaggatggaggcgctggataggaggagacatgaggcctctggcttgcttggttttgaccacagtgtcatcgacatatccctccatgaccgcttcgatgaggtcaccaaaacacttaatcatacaccgctggtaagtgagaccagcatttttaagccgaagggcatggtcatgaagaagtatgaaccggacagggtgataaaggaagtagcaggagcttcctgtgatatcctggccctagtggatggtgatatcctggcccaaggcttaatagaattaatagagtactcataccaacaaggtgggtattctttttcaaaaacctatcttgaaaggacctccaggttaattgtgcttcgcttgaagcaatttggggatgggtga

SEQ ID NO: 42702 - DNA, 267 bp, Zea mays
  Peptide Sequence Number=SeqID_86077
atgaagctgtggaaggagacttccaggagttccaagactacgacgagttctaggagtgggttagcggcaacccccagtcggctgcctgtgaaggccgcggttatctacgtttcttttccgcactttgatttattgtctggacacgtgtcggcactagcccccgcctgggccctgattaaggcccgggtgtgttctgtccgggaaccttgggaccctattgtgggtggtccggaccccatacgcgggggggttcggatcccattctag

SEQ ID NO: 42703 - DNA, 267 bp, Zea mays
  Peptide Sequence Number=SeqID_86078
atgggaagctcggctgcatggtcgttcaggtcacgtgtggtggtcggatatcttcttcggagcacgctggagaaaagggtgtccccggcggtcacgattgatggactacgggaaaggaattccttaccggagctactctgcatggtccggtatcggagtgagtgcatgaataaaaccatttccaagtatgacaacatcaaacagatccaacgattacctgataatgccttttggaaacttaacctaacccgtaatgcctcagaatag

SEQ ID NO: 42704 - DNA, 339 bp, Zea mays
  Peptide Sequence Number=SeqID_86079
atggctgttggaccgctgatttgcttcgctgcgtatatcggactgcttcagccccactctgatgatatgtcccgagttgtggaccaactcttaaagttgatcgccacctttatagatatcgaggtcagagccctgctcgggcaaggcggaagtcttcccgaggcgatggttgagctttccctgacgtgcgccacagttggcggagtggtcgcctatgggattcgcggtggagcaggtttgcgcattgaatgcgagtgtcccccactggcctttggttgtgcattgtcctcttcgcctgggacgggctcaggtgagacggttagggcaattatagaatga

SEQ ID NO: 42705 - DNA, 381 bp, Zea mays
  Peptide Sequence Number=SeqID_86080
atgagagctgaagatccccagattcttgaaggtcacccggtctctatcaaaggagagaagaaggcttgggaacttccggaaggtgccatagtcttggaaggaattccagtcttccctcaggctatggataagcaagagcaccatgaatcctcccaagatcccccgccggagttgtttgagcccctcaccatgaagaagattccagcaccatcccttgaagtcaaggaagaagctacaagcaccccgctagcaccgccgccctctgaggagctacaggagccagtagagatggcaatgggtacccgaaacccgaaacccgatgggtttttaccccattatggtacgggtttgggtcaattttcgtacccatgggtttgttaa

SEQ ID NO: 42706 - DNA, 678 bp, Zea mays
  Peptide Sequence Number=SeqID_86081
atgaggtttcgtcctacagtcaacatttcctctgataccgcttctgtcacacccggctttaaggaacaaagccagtttataggaagttccaatgcagggttcttggctgaccgccatcgcagcaaaatcaaccaaggacctccctacactgaccactcccctactgcccttgcccctttcgggattgcagatctacggcccgggttccttcctaaccgaaggggtagcgtggttagatcagggccgcccgcttatgatcctatggctaacgatcccttcccagctttccccctcccagcttgggccatacggcggcgccacccaacggccaccgtagggagcacgccggcgcgactccgactgacgcccagggtgccccaatacccaaattgttccgagctacgcgatgcgggagacaagacgatcactggagataggtttcttaccgaggggatgaagcacaggggcctggccacggagagctttgcccggcggcgaagtcctcacgccgatgagcaatttccccgtgtcagtttgaattcccacacgaagacaccccggatacacacagggggcactggcgaagtcctttggctacacgctagggcagaatcgagtctagaagtcgccaatgcccatggcagcggagttctcactcggttttttttgtttctctga

SEQ ID NO: 42707 - DNA, 432 bp, Zea mays
  Peptide Sequence Number=SeqID_86082
atgggcaagaaacgcaagcgcgagccaactcctccgtctgaggattttggtgactcggagtattcagaggaggagttctcctctgaatccgaggggtctccggctcccatccctctgcgtgagtcgtctgacgactcagacgactcccaggggcttgcggcggaggtctggacgtacatccgggccgtcgagcgctctgggctcgagggctcggatgagtcggagtactcctcagatgaggaggactcggacggtggcggcgaggatgaggacggcgacgacgatgacgacgaaggcggtggcggcggcgacggtgacggtgacggcagtggcaggggcggcaccagctgcggcaaggacggtgacggcggcggcagcaagggcagcaacaggggcggcagcaggggcggcatcaacagggccagtggctag

SEQ ID NO: 42708 - DNA, 636 bp, Zea mays
  Peptide Sequence Number=SeqID_86083
atgtcgcaggtgaacaggagcgacaagactgtggtcccatcggccttcaccaactacgatgacatgggacacacatacgaaataagtgtgggcttgtccttgggcgcaaactccgcctcggtcgaagccggcctcagcctcaaaacaaactccacctcgcccaagcccggccttgactacctgctccccgcgaatctcgcaggaggccactccttcaactgtgtcacgcatgtctacgaatcctggagcgggctcggtcacggcctcgggcggacttccgcttcacccgagcccgcctttagcctcgatattagcaacgaaagggcacccaacgtcaccagaaacaatggaaggggctattcgccatactcagcactgcaccaaccactacggcatgggaaacttcctcatcaggtggataagttcatctacaactactctaagtcgactgtccggaatgccgtagattattctggacaggagaagccttttgaaaaaacacctatgcgcggaccgtccgggcccttgcggcggaccgtgcgtgacaccagggggcggaccatccagaccaggggcacagaccatccgcggtcggccgaaaaggagcaacggctaggaagtggttggaggctataa

SEQ ID NO: 42709 - DNA, 274 bp, Zea mays
  Peptide Sequence Number=SeqID_86084
atggcgaccgagacgcggcggcagcccgagtcgacggtggcagacctcggcggctgtgcagagaacggcggtgagcgcgggcagagggattcggggagggagaggggaaattggggcgcgtcccgggttgcggaagccggggcgaagctcagcgtggcagagggcacggcggggctccaacggcgatggagaaacgagctcgggcggcggtggatcaatggcggcggcgctttggcgtgcgagcagcgtggcgaggtggaatgggggcctgcag

SEQ ID NO: 42710 - DNA, 309 bp, Zea mays
  Peptide Sequence Number=SeqID_86085
atgacgacgactaagaccacagcgtggagtcctctaagccgcaggaggcggaaggatgggtcgcccgacccatcacctgtgacgccgctcgcggctttcgaccagcacacctggtcgatcgagtaccgttgtgtagtctaccagcacagtcgcgggaggtacccggaccgctgggaggctacctgcctagttcgccgtccggaggatgacctccggggtgcagaggccgtttcggagcactactccatctccgagagggacactgcagaggcagctatgcaggacgcagcacggcgtgcactatcctag

SEQ ID NO: 42711 - DNA, 1207 bp, Zea mays
  Peptide Sequence Number=SeqID_86086
gagagatcctcccaagggggtaggcctgattgtctggatgacacctggaatgatgccgagctgggcaccagcgttaagcaagcgactcccaaaccatcaaagggctggatgtacatgatgttgagcccgcttcccccgtctatcagcaccttggtgaggcgctttgatccccatgatcggctcgatgatgagggcgtaggtgcagggatgcgggattacatcggaatggtcatggtggtcgaagacgattgggaattccagccactagaggtaccgcgggacggtgggctccacgtcgaacacctctcgtcgggccaccttgcggcggcgtctgtcactgtatgcatctgcctcgctgaacatcatgagacatcccatggtttcagggaagtcttcagtaggggtttcttgttctttggctttgttggctcttcctgcttcgcctttttggccggtggcttagagatgaaacactttagaagttcacactcttggagtttgtggcggacggagaaaccgcggccaatctatggcagcgaattctccttccttggtgcacgtggggcggtagttccttcggcgtctatcggggtgctgtcgtcgatccctccttttgccgctgggttcaccggcgtcacgtgggttttttctcttgcggaaaatcacccccaccgtgtcttcctcgtcagcaaacttggtcacaatgtcgaagaggtcgagcctttcgacgagtgtgtccaactccttttgctgctgtcggaggatggctttgcgggcaaggatgcacgcctaacgctggtgctggtattccttctcttggatgggggatcccaagtcccccccttcgttgttgccttgtggtggcgtggccacgaagtaggctctttcttgcgtctcatcgaagtccaagacaggttctatcgaggcactgctcgagtcatcctcaaggagatcatggatggacgcaggttggcagccgacgacagccaccatggttggtggtgggactgcttccacccgctgtttagcggcaacggtggacgcattgaggcatcgcttgagtgtggcggcacatcttttgaggcatcatttctccgccttggtctaggtagaatgcctaggccccaggcctatgtcattggcctcgttgtgggtaacaaggcggagttcgccggtctcctaggcgaggaagtcaagggagccaaag

SEQ ID NO: 42712 - DNA, 745 bp, Zea mays
  Peptide Sequence Number=SeqID_86087
gaaacagattcctgactcgtcctggtcctcagcgccaccgcaccgcctcctgactcgtctcctccccgagcgccgcgccgtcgcctcctcctccccgagatctgctgtggtaatgtcgcttgctccccaccccttctcctcttctctgatattcccgtttggtgcctcagttgtgttcttcacccccacgccttccttcgagtgccgacgccgcgggttcgactgtagcactggtacacctttcgcttcagtcgctcaaggtctcggccgagccgtccgcctcgccctgcagcagctggtcgagccagtcgctcgtcaccttgagctacgacagccgggccacgatcctcctgctaggggagttgagaaagatcatgcaaccggtgaagcagcaaagaccccggctggtggtgcgagagatatgagtaaggaagagggaaccggtaaagagcttacttcatcaacaacctcagaaagcttgaagaggcaacggtccagtgattccttcacctcaatgatcgcggagaaattagacaagttcactgaagctattagggatgaagcaccaaaaggcccgacatcaaaagaaatttttagcagattggaggagatagatgggttagatgaagacacatttttagacttgtttgatatcttaacaggtgatgcgcgcaagtacgagtccttattggcacttccattgattctgaggaagagatggttgttgaagcaacataaaaagtga

SEQ ID NO: 42713 - DNA, 1980 bp, Zea mays
  Peptide Sequence Number=SeqID_86088
aatcataccaaggggatgggtccgcgcgtctcctcggtgcccggcccgcgcgtctcctcgcctcccgcgcgcgatccctcatcccatgcgcgcgacccctccactttccatggcgccgcgccccccaccaacggtccggcgacccacctgcctacgccggccaccgcccacaccatatacggcggcgccgcggcttccccccgtccatcgtcctctgcccgttcctccccttccctggtttcgtccacctccgccacccaaggacggaccaagttccagcggtggagcgggagtgctcgagatcccctgttgacggtcttcctcctcggtcctgggccggccggcccctgttccgcgacgtgttgcttctccagcgcgcgccacctgctccagcaccgtgtgcctcgtctccgagggagccctccccactttgagaccgtgacgtcgtctcctcaccacaaaggaacgacccccttcggtttcgtggccctggagagagcgctggagacaacgctcggcggtgggtggaccagagtagaatcaagaaaatacgaagaaggcgccgcctacgcgcactgcggggcacgccgtccagtgcccaggagacctcgccgggtcgttgttttcaactgcctcgcggaggaccaccttgctgcatcctgccgccttgggccaagatgtttccgctgcaaggctcttggtcatcgctcctacgtctgccctgggccagtgaatggtgacaagatttttcctgtccttcgacgacggttgaagggggcggtctggagtatgctttcgacagtcgcgccagcaaacgtcgaccgtggggcgacggtgcctgtgtcgcagcaccagctagctcgggcctcggtctgggagcgacttgtgccaccaacacctcgtccttgtgagaagacgcgtgtcagtgtctggcgtcgaatctcccctccaggcgttgagaagggccaggcccattttgagaggatgaatggggcagtggatgcgcgcgcaattgttactccttccagcgacgttggagctgctgctgcttctgcctcgcaggtctccctcccgccccgcccgcgacgcagacgccatcgaaagcgcaagtcatcccctaggggtggttctgatccgggttgtggacaatctgatcaacctggaaatgaagagacccctcaggatgttcccagccctgtgcatcttcagcacccttgtgtgataggctggaatagtttgatggacaaagcagaagaagatttgaacgcagtctctatctttgtggtcagtgatgtgcttgtgccggtcgccgatatcgcagatgcagttgctcaaaagcttgaagcgctttctccctgcactgtaaaagatggtccaggttttttggatcctcagaaggtacatgaggagactcttgagctcaagaatttggaggcctttcgctgttatggttggtgttatgatttggcctcaatccctcattctagagatctctggattactgaaccgctgggaataggaccatgcgctgaaaggctatctcttgcctatcgtgttcagattaaggtgttggatggaccacgtgttgtccctgaccccatccaaatcccaacagatatgaatggttccacacgtcagaggcggcgtttccgttcgcgttcgccaccaggggaccgtgatggccgaaggggttctacggaagacagcgtacttttgggcagacgttctgctcttgaacgtctaggcccacggtccgaagttcagcctaggaaggaaggcgatgccagtcagtgtgtccagacagctggaaactatgagatattggaggagtcctcggcagtggagatcactgctggtatacctgcagatcttgttgctgtcccgaatttagctgctgtctggggtaccatggcttcggcctctgagcatatccagggtcccttggcccctgttgatgtactcgagaccgtggagcagctg

SEQ ID NO: 42714 - DNA, 306 bp, Zea mays
  Peptide Sequence Number=SeqID_86089
atggctgccaagcattcacccgacgggattcaagccaccttgacccatgatcctgacatcggtcagcatgacctggatactgggtttgggctggcacaacctggacccatgtcccggtggttccatccatcttgtgtggctatgaccattgaacaggccaaaaagctagatcactttgtttgctcagactgtttcaaagaaaatggttcaaagagactttcaaatgcatatgccacttcaccaaattttgagcctaagttttgcgatttagttctaaagctcatggacgtgtttgtttctgattaa

SEQ ID NO: 42715 - DNA, 2364 bp, Zea mays
  Peptide Sequence Number=SeqID_86090
atgtccggccgccacgcgccgcacctccggctggccgtgccgccgcggctctccgcgcacccctctttccgcttcccctccacgccgctcccgaccccgtcgaaagcccgcggactcccttcctccgccgccccgccgtcctcccgctacgccgacgggctcctccgcctaatcgtgctgcacgcgctcttcctcctcgcgcccgccgtgcgcgcgctcccctccctggcccacgcgctcgcgttttccccgcccctcgcgctgctctcggccgccgccctcctcctccaccacttcgccgccgcttcccggaagacccaccagcctcaccgcccgttccccgggttccccgctctcgtccgcccggccttcctcctcgcgctttctatcctcctccggctcgtggccctccgcatcctccccgccccgggcctcctcgtcctcgcggactccgcgggctccctgctcgcccgcgccctgcgccggccctcccgccgccgagtcatctccaccgccgtcgccgccttatcccttgtctgcatctccccttccccttccgtgatcctcgcgatccccttcgccgctggcttcctttcctcgaccgaacaatcggccgcggcgcggcatgccacacgcactcggctcgcccgggcggcggcatttgctctcgctgctgcctttctctctgtgccagcgcttgtgggtctctcctttttcggtgccagcgatgcgggcgatggtcctcctgatggagcagtgccgatcggcccggtctggtggctgctgcttaactctgccttctttggcatggctttggagcgacggcaggagcatggcagcggcggcggtaggccgagtgtggattttgcactgacgttcttatgcactcttgttctggagctgctgtactacccaaagctgtctttaccaggattcttgatttgtgggttcctcttgtggatcgccagcagggagctgatccctgcaggatatgtggagcatggaactgaagatatctcagagtcagtttttgaagcaatcatgggtccagttaggcatatcttgagtgagcggaagtcgagaaagattgctgtgtttctattgatcaatacagcctacatgtttgtggaatttggctgtgggtttgtgagtgatagtcttgggctgatctctgatgcttgccatatgttgtttgattgtgctgcactggcaattggtctctatgcgtcctacattgcgagattgcctgcaaatgggatgtacaactttggaaggggcaggtttgaggttctgtcagggtatgtcaatgcagtgttcttggttcttgttggtgtgctgattgtgttggagtcgtttgagaggattcttgagcctagggaaatatcaactagtagtcttttgtcagtttcgataggtggacttgttgtaaacataatcggattggtgttctttcatgaggagcaccaccatgctcatggtggtacctgttctcactcacattctcattcacatcatggtcatgaacatcatcaacaccatggccatgaagagcacaaacatcataatcatgatcatcacggtgcgaataatgtgaaggcatgttgtgatcatcatggagatgacaaccatcgccatgatcaccatgggaatagtaaaagtgagggcattcataacaatatcatggataacacctgcaaggagaagcatggccatgagcatcatcaccatgaacattcggaacattgccatcagagcagagatcattctcatcaaaattgcaacaatattactgttgagcaacagcttcttgacattcctcttagcaatatatcttctcatgacacagaaagtcactcttcaaaagaaggattgagaccatcagattctggaaacagtaataagccaggacaccggcaccacattgatcacaacatggaaggaatcttcttgcatgtcctagctgacacaatgggaagcgttggtgttgtaatatcgaccttactgatcaagtacaagggatggcttatagctgatccgatatgctcagtattcatttctgtaatgatcgtatcttctgttattccattgttaaggaattctgcggaaattctgttgcagagagtcccaagaaatcatgaaaaggatttggctgtagcattggatgatgttatgaagatcgaggacgtccttggagtcaacaatgttcatgtatggaacttaactaacactgacactgtaggtacttttcagttacatgtatcagcagaagctgacaagtcttccataagaaataaagcttcacggatatttcaagaagctggggttcaagatctgattatcgagattgagtgtgttaaaaggtag

SEQ ID NO: 42716 - DNA, 526 bp, Zea mays
  Peptide Sequence Number=SeqID_86091
atgccccctacaccaccacagggcatcctggctgctggaggagaccccgatggagacggagacgacgacgacgccggtggtagttcaagccatggcacggagctctcggaggagccggagccggagggatggatcgctagacccatcactcatgacgccactcgtgagtgtcacttccacgacgctctcgataccctgctacgtcaggccttcgaccgacacacatgcggggtagctgatggccttgacctgaagtcctaccctcgctgttcgatcggcagtgctggaggtatgattgtctcgccagttggtgagggcaatcccaggctgagcagcatggtcaacttggtcgtcgtgctcaacacagagttggaccactcccttgacgagttgggcaaggttcgggtggaggttgtggaattgcatgctgaatgcgcggcacgccactatcttgatggtggttctctggcccctgttgggattcagcacccttaccgttcgtcgccccgtggtcgcttcgactatg

SEQ ID NO: 42717 - DNA, 456 bp, Zea mays
  Peptide Sequence Number=SeqID_86092
atggatgctaatcttgaagtgagttgcctaatgcttgcttgcatggagcctgagctacagatgcagtttgagacaaaccatgaggttcatgatatgatcgtggcgctcaaggatatattccagactcaatgtgtccaaagcctttctcgaatgcaagctagcagaaggcgcagcagttgggccacacgtaatcaaaatggttggttacaaaacttcatcacgaactaccatatgcatggggcggagaggggcctcaatgaactatgtggcatgctgaaaacagcagagggggacataaagaaaagcgctggcagcagcggccatgtgatggcggtccaaaacaaacccaactttaagaagaaggttaaatctcaaaagaagaagggcaaggcaaaggatacagtatccaagccaaatcaaaagcccaaggctggaccagctgcagatgcagagtga

SEQ ID NO: 42718 - DNA, 261 bp, Zea mays
  Peptide Sequence Number=SeqID_86093
atggatgctaatcttgaagtgagttgcctaatgcttgcttgcatggagcctgagctacagatgcagtttgagacaaaccatgaggttcatgatatgatcgtggcgctcaaggatatattccagactcaatgtgtccaaagcctttctcgaatgcaagctagcagaaggcgcagcagttgggccacacgtaatcaaaatggttggttacagtctgaggttggagaagctaggcttcccaataagccaagagttggccactga

SEQ ID NO: 42719 - DNA, 204 bp, Zea mays
  Peptide Sequence Number=SeqID_86094
atgctgctccagctcctgtcattgaagctcctgctcctcgtgcaggcggtggtgcagcctctccaaatggctagactgaccagtcattggacggcgaagcggacgctcagcgagacgagagggcaagaaggggatgacggacttccgtgcggtgtgtctaagacgagccatctacaaaagacaccggctcacacctatgactaa

SEQ ID NO: 42720 - DNA, 171 bp, Zea mays
  Peptide Sequence Number=SeqID_86095
atgcctccgcctgttcttcgcctgttcgcggcagctccgccccgcgctctcggtggccgcgccagggcgcatcgtggcgatggcgggttcgcgcgcctgcgcctgcgcgtcagagcagcggctggggaggccgcgccggcgccttccagaacccaggggaaaaggctgtag

SEQ ID NO: 42721 - DNA, 360 bp, Zea mays
  Peptide Sequence Number=SeqID_86096
atggatctggaacacaacttccatactcctttatctccccaggctgctcaggaatatcatgtttttcgtgagctttacaaactgctggagttatgtggttttcattggaatcatgatcttgacttcttctcgatgattcaagagaccaagggcgtctttggccacagttttttcatgaagcgcgcgcagtcggcagttcacctgggttctggaaggcgccggcgcggcctccccagccgctgctctgacgcgcaggcgcaggcgcgcgaacccgccatcgccacgatgcgccctggcgcggccaccgagagcgcggggcggagctgccgcgaacaggcgaagaacaggcggaggcatagg

SEQ ID NO: 42722 - DNA, 159 bp, Zea mays
  Peptide Sequence Number=SeqID_86097
atggagaatgaatgcaaaataccttttaaacacaagaactccctctatgaagccttcatgacgatgaggttcgttggccaggagtttggtgatcaacttgatgactatgttgaggagagaaatgggtatgtagtcactaatggtaaccggggttgctga

SEQ ID NO: 42723 - DNA, 666 bp, Zea mays
  Peptide Sequence Number=SeqID_86098
atgaggttgatggttcttggttttgactctggtaatgcctctggagtagctgctggaggaggcccagacaacggaggtggcgacgacagctcgagccacgacaccgacttttctgctgatcaggagccggaaggatgggttgctcgacccatcactcgcgatgctgctcgcgggtgtcacttccacgatgcgctcgacaccctgctacgtcgggcacttgaccggcgtacttggtctatcgagtatcgttgtgtggtctaccagcatagtcgcggggtctacccggaccgctgggaggcgacctgcttggtgcgccgtccggagaacagtctccagggtgcggaggcctgctcagagcactattctatctctgagcgggactcagccgaggcggccatgcaagatgccgcacggcgtgcgctttcgcactactgctcagtgctcggtggggtagctgacggtctcaacatgaagtatacccccgccgtccatctggcagcacaggagatgtcagagaacaggcgcagaggaggaaggcgtgctcagcaggagcggccagctcaacaggatgaggcaccccagcaacagcaactgccgccctcgcccccgatgtacatcgagcagatgttcctgatgcagactcaggcagtccaagccatcggttag

SEQ ID NO: 42724 - DNA, 890 bp, Zea mays
  Peptide Sequence Number=SeqID_86099
ctcgccagagaccgctccaagcctccccgagcttcgcccggaggtgagacacccattctcgtgcccaatttcccttattgcgccctgtgttcgtccaattttgccttcgccggtgctcgaccgcggtggtccaccacactccgccttaagtcccctccccgcggccggaatcgctcaccgaagtttctccgacccgcctgaggccttcccaccgccgttctcccctctctgcccgtggattcgtggcctcttccccgccattgagttcgtcgtggcgccctcttcccctctacccaactccggtgacctcggagccaacctagctcgcacctgcctcaactccggcgacttcaccgccgcggagaggagcggcgccgcccgcagcgacatcgagcagtccgagtttcctgagtgtgttgttggagacctccctgggcaacaacctgaaggtgaagttggcaacatggatgacttcgaggagttccaggaatacgatgagttctactcgccagagaccgctccaagcctccccgagcttcgcccggaggtgagacacccattctcgtgcccaatttcccttattgcgccctttgttcgtccaattttgccttcgtcggtgctcgaccgcggtggtccaccacactccgccttaagtcccctccccgcggccggaatcgctcaccgaagtttctccgacccgcctgaggccttcccaccgccgttctcccctctctgcccgtggattcgtggcctcttcccctccattgagttcgtcgtggcgccctcttcccctctgcccaactccggtgacctcggagccaacccagctcgcacctgcctcaactccggcgacttcaccgccgcggagaggagcggcgccgcccgcagcg

SEQ ID NO: 42725 - DNA, 216 bp, Zea mays
  Peptide Sequence Number=SeqID_86100
atggttcagcttgcacaacttatcacacagggtggtaactcttgcatccatgctcatacaattgcactgggcctttctgctcaaggcatctgccacaacgttggctttgccaggatgatctgcctgagtgaaaatgtatttgagactcttatgatcagtgtaaatgttacagaacgtttcacccgtcttgcagacattatagaacatcagagataa

SEQ ID NO: 42726 - DNA, 291 bp, Zea mays
  Peptide Sequence Number=SeqID_86101
atggggaggctagaaccccgggcagaatgggaatcacggcttgtgggtaaaatggtccgtatcaggtgcactgcatgtaagtctgtgatcccctttttgccttctcgcctggcggagcgtcccctgcgtcgcacggtgccaggtcagtccatccagctggagagactgcatcgtcgcatgcacgaggagcaggagcgtcgacgccaggagcaagagcaggagcagcaggactcctccccctcgcctcagtgggaggtggagtctgagaggccgccttcgcctgcaccttag

SEQ ID NO: 42727 - DNA, 785 bp, Zea mays
  Peptide Sequence Number=SeqID_86102
gcgaaccgcgtatcgacggtcgtgaaaaagatatgatccgtggtctggatgtgcgtactggcgtgctgccgcgtactcacggttctgcgctgttcacccgtggtgaaacgcaggcgctggttaccgcaacgctgggtactgctcgtgacgcgcaggttcttgatgaactgatgggcgaacgtaccgataccttcctgttccactacaacttccctccgtactccgtaggcgaaaccggcatggtcggttctccgaagcgtcgtgaaattggtcacggtcgtctggcgaagcgcggcgtgctggcagtcatgccggatatggacaaattcccgtacaccgtacgtgttgtgtctgaaatcactgaatccaacggttcctcttctatggcttccgtgtgcggcgcgtctctggcgctgatggacgcaggtgtgccgatcaaagctgccgttgcgggtatcgcaatgggtctggtgaaagaaggcgacaactacgttgtactgtctgacattttgggcgacgaagatcacctgggcgatatggacttcaaagttgcaggttcccgcgacggtatctctgcactgcagatggatatcaaaattgaaggtatcaccaaagagatcatgcaggttgcgctgaaccaggctaaagagcgcgcattaaatgcgcggcagagagccgttggcgcggagatagccgttgctccggagtcgcaccggacagtccggtgcacaccggacagtccggtgaattttagcggactagccgttggagtttcccgaagctga

SEQ ID NO: 42728 - DNA, 174 bp, Zea mays
  Peptide Sequence Number=SeqID_86103
atgcaggcggcatgcaaccgcgccaagtgggcgcaccccttcaactccaacgcgcccggcatggaggcccaggcccacacgtcatgcgaccggcgcgccggttgctacgtgacaggtggcacctttggcaagagaagcgggcgatgcttcgccttcgccataatgaccgcataa

SEQ ID NO: 42729 - DNA, 1611 bp, Zea mays
  Peptide Sequence Number=SeqID_86104
atgtgtcaacgtctaaagggaccaacagagaaggcctcgatgacggttgcggtgcagaacaacgaggaaggagttacatcgagttcctatggtatccgcactgagcacatagagctttatgatattgtcattgatggttcaaagaagttttccctgcgttattattcttatgttgtgacttggaatggggaaatggcacaattatcggctaacattaatggtgctgtgctaatctgtgtaattgatccagtggagcggcttacagttgaagaatttgtgcaccacccatttctttctgaacatgctccagagaagactttgagccttacacaatctgacataagagatggctttccaagaaataatagcagtccaacaaggcattcaaaccatagttcacaagaagattgtatgccttttcctttagatgatgagtcaagtggacaggacgagggtccagttcctgacagtaagagtctgatgaaatcttatggatttcccatgggtaaaagattggataaaacttcaggccagaagagtccaccgaaacataacagtttgttctccaggtatgtcttgggcaataatcatgcacctagtagccaacaccatggccattctggtaaagtgaccaaggaaagcaagattcatgaagtacaaggtcaaaaggttgtttatccagaagattcccctatcattgattcattagagtttgtagatcaggaatacgtcttcgtgtctggaccacacctggagggatcatcatcttcaacaaatgcctctcagcagcttaatgtaccagcaaaatatgataattcgtctgtttcaccaccaaagttaactttcatgagtgcaccaatgccgataaatggtttgccgattaatagacaacaacttgctgggactggtagctttgacagccactgttctcctgcatctggcacttcacagggatctgcagatataagtgatgccatggatcagcccccatctgattatctgacgaggattagattgttggagcaatatgcatcagccatagcagggttggtcagagatgagatcaaaggtggcagacacttggaagcgttctctattcagctaattgttcttgcaacctggaagcaagcaattcatataggaaatacctttgtagcttcacctgcaagggagagtccctcacaggatatccctatgaaggggcatattgctggtgcttcccatttgcctgcgaactcaaagctagctgatgatgcctgcatgcagatagagaaacagtttctctctgaagttgaatatgctgaagaactagccagcattgtgggacagatagctgatggtacagagatgccagatgcaattgaaatgatatttcagtcggctttactcataggaaggcgaggcggtgttgatgaaatgtttgggaaagccgcggatgccatgactgggtatatgagggcggtatccatgctgcggtttctcctggtcgaggcaccatcactcgccctcaacccccctttgactctaacgagatccgatcggaatcgactgcgcacatacattgacgctctcaacaccaggctctgtcagatgcagagccagaggcattga

SEQ ID NO: 42730 - DNA, 459 bp, Zea mays
  Peptide Sequence Number=SeqID_86105
atggtgagagaacgaagaacacaagtaagcacaatgaacaagaacacaagagacacaagatttatcccgaggttcggtcacaccaccaaggtgccctacttcctcgttgaggcgcccacaaagagccgggtctctttcaaccctaatcctccctttgccgaccacaaagctgaggctttacagactactgacatgacatctaaagtgacgccacacaattcaactacgctggaggagatggatcctaagcaggaaaataacaagttagtaaaagaaagtatcttctatactgtagaaacacttggtgtagtgctggcatacatggggtctctggaatctcttttaacgtatcataaggatgttgatgagacgctcctctatgaaacattcagtgtatttggagtgattgtaactaatcctaaggtgaccgttgacatacagtaccttttatcttcatga

SEQ ID NO: 42731 - DNA, 1497 bp, Zea mays
  Peptide Sequence Number=SeqID_86106
atgtccgtaccgggcttgtgggcagcggtagccgccgtggccgtcgtgatcatcgacgctctcgtgcgtagggcccaccggtgggcttgggaggcttcgctcggcggcagcaggcgggcacggctgcctccgggtgacatggggtggcccgtcgtcggcgcgatgtgggcattcctctgggcattcaagtccggcaacccggactctttcatcggctccttcatccgacggttcgggcgcacgggcgtgtacatgaccttcatgttcagcaagccgacggtcctggtggccaccccggaagcgtgcaagcgggtgctgatggacgacgacagcttcttggaagggtggcccagggccaccgtggcgcttatcgggcgcaagtccttcctcaccttgccctgcgaggagcaccggcggctgcggaagctcacagccgcgcccatcaacggcttcgacgcgctcaccacgtacctgggcttcatcgaccggactgtcgtggccacgctgcgcgggtggtcggacgccggcgagatcgagttcctcacggagctgcggcggatgacgttcaagatcatcgtgcagatattcctgaccgccgccgatgacgccacgacgctggcgctggagagcagctacaccgacctcaactacgggatgagggccatggccattaaccttcccggtttcgccttccacagggctttcaaggcatgcccgatcttgcaagcaaaatataatcaatggagattattacttgatttaaaaaaagtggacacggcacggggtgtcctgaacgagaggagggcgaggaaacggctcccccggtcgagcgtagacatgatggaccgcctgattgatgcggaggacgagcacgggaggcggctggatgacgaggagattatcgacatcctcgtcatgtacctgaacgcggggcatgagtcgtccgggcacatctgcatgtgggctaccgtgtatctacagaaacacccagagatatttgcaaaagcgaaggccgagcaagaggagatcatgagaagcattccgtcttctcagatggggctaagcctgagggatttcaggaggatggagtacctctcacaggcacgcggcttctcaaatgctcaacgtattttaaccatatattttaacctgtggtacagaagtgtgcacatggatcctgaagtttatcgtgactccaaagagtttaacccatcaagatgggagggttatacaccgagagccggcacattccttccttttggacttggtaccagattctgccctgggaacgatcttgcaaagctggagatctccgtcttcctccaccatttcctccttggttacaagctcacgaggacaaatcctaactgccggatacgattctggtcatcagatacgtctgatgggttttcgaacacgttcagtggatcaccagatacaccatcgaataagaagcgtgatacacaagacaactatggagtgcccaagccggtctga

SEQ ID NO: 42732 - DNA, 1965 bp, Zea mays
  Peptide Sequence Number=SeqID_86107
atgccggccaggacatggctcgccgacctgcggtcgaggctccgcgtcggccccaggaagaacgacgggcttggcatcctggccttcgaggcagcagccaacatgtcgcggctggtatccctccaccggacggtgtccgacgtcgaggtcaggaggctccgcgccgacgtcttgcgcgccgagggcgtcgcgcggctaacgtctacggaccagtctctcctgctccgcttcgcgtgcggcgagctcctcgcggacctcgaccgcgccgccggcagcgtggcgtgcctcggcgcgcggtgctgcgccggcgacgcgccgctactgagggacttcgatcgggtctacgccgaggcgaagcgtggccggctcgcgcagctggacgccacggtcgggttctccaggggcgccacgaggcggttcaaggagatggagcgccatgtggtcgtggcggcgaagctgtacgcggagatggacgcgctcagcgagctggaggcgtcagagcggcggatggagcggtggaagcagcacagcgggccaatcccggcgcagacgacggggacgggcaaggggtcagcggccgatcccggagagaagctgatgagtaagctcagggagcagcggcagaaggtgcgacgggtcatggagggatcgctgtggaacgtcgccgccagcaaggcggcgaggctcatggccaagtcggtcctcgccgtgctcgcgcgcatctccctcgcctttgccgcgttcgttccaggccttcccccttggacggtaggacgcgcgtgggcgctcggtcactcatccggatccggcccgttacaccggtcggcgacgcccgcggcgctccagcattcggctcccatcttcggccagagagactccgcctccctactgtcggcgtcgtcgatcaagccgtcagtgagcacggtcggcggctcgagcatggagctgcgatacgcgaacgtgatcttagccgccaagacgttgctcgcggcgctgaggccgccggcaggtgacaacgaggaggcgcacgaagggatgatcgacctgtcgaagagagacgcgctgtacaagatgctacccgtcggcatccgcaaggccatgaacgctaagctgagagagatctggaagaaagcgcaaccggtggacgaggtgtctgccgcggcatcgaaggatgcggtggagtgtctgctgcggtggttgagcccgatggcgcacgacactgtgcggtggaacgacgagcagagtatggagcgggcgcagcggttcagcatgcagcctcgcgcgctgatggtgcagacgttgcacttcgccgaccgcaagaagacggatgctgctattgttgatgtgctcatcggcctcacctgcgtatgctgccaacataatcaagatgatcccacttccatcgcagttcttatcaatgaaccactcctagtcggtcagccatccgcgcacaagcagggggactgctctgatgcgcagcttcaagaatttgttgcacatattgctttaccaaaagatcagccgctaatccattcacctcctattgatatcccagacagctttagtgcattattggggcaatccactgaatctgctgctgttttgtctaatcagactactaccttcaaaaagaggtccagtattagactagctgccaagaaaaagactatgatggggcgttccagggatgccatatccaaagcccaggacatcctgatagctaagctcaataatactgcaacaaatcagaaacaaaaccaaaactctattgcttcatgttcctctaaccaagataattcttttgaacagattgctcgccttttctcaaggccgctaaccaaagagcagatggaggcaatcatggaattggtcaaccaaggggtagagaagacagggcataagaggaggggacgcaaggtgactcccattgcttccccaaccatcagggctgtgggggatgcctga

SEQ ID NO: 42733 - DNA, 195 bp, Zea mays
  Peptide Sequence Number=SeqID_86108
atgggcgtgcctgacttctgcgcgcgttggcgcgcattcaatgcgctgcaggacaggcggcacctttggcaggagaagcgggcgacgcttcgccttcgccataatgaccgcgtcaaaaaaagggaccgggaaagggggataccccgaaagggatccttctccgtgaaggaaacgggccccgagcccccctactga

SEQ ID NO: 42734 - DNA, 207 bp, Zea mays
  Peptide Sequence Number=SeqID_86109
atggcctgcggcttcctggagatggggaccgtggtctgctccttcctggggatggggaccgtggcctgcgccttcgtggagatggggaccttggcctgcgccttcgtggagatggggaccttggcctacgccttcttggtgatggggaccttggcctgcgccttgctggagatggagatggacgtctacctgagcgggaacgcctag

SEQ ID NO: 42735 - DNA, 225 bp, Zea mays
  Peptide Sequence Number=SeqID_86110
atgccgtcctattcttcttccgctgccgataagccgccggccgatccctcgccgtcggccgccgcctcgtacgaggagccgatgggtagtttgatggcggaggatttgcgctccggcgattcagttgattttggcgtgtcgcggacgtcgtcggtccgcgcgcaggatatgcagcggttgggttacatcggcggcggagttgctcgagtcccggggacggaggaa

SEQ ID NO: 42736 - DNA, 1200 bp, Zea mays
  Peptide Sequence Number=SeqID_86111
atggcgcgcagatccgtgttcccgctagtaccagacttgagatctgagacccgagggaaccaaagagccggagctgagcttcttgctcgagttcaagaacttgaaaatgggaacacggaattggtgagggaaaacaaaatgctcttgtccaagattgatgagaagggagttgagaaggatgcccttgtaaaccgtttgaatgatctcgagcggaatgtagttccctctttgcaaaaaaacttgaatgacatttctttggagaaagatgctgctgtagttgctaaggaggatgctctagctcaactcaggagcatgaagaaacggctcaaggaagcagaagaagaacagtataaggcagaagaagactcagcctccttgagagcacagctaaacaccctgcagcagcaagtaatgggacactcttacagtggatatacaatgggaatatcgactgaggaatctgttgccatggaaaaggagatacaagatttacaggcacagctaaagcaagagtcactgctaagacaacaggagcaacaaaaattagctgaagagtcgcagctgaggcaacaagagcaagaaaaactagccaaagaacaaatccatattgcttctctggaggctgaaaagcaacagctggaagaccaaattactatgttgacaaagaaagctacaggaaaaacaacagtccatgctagtaaacatcaagatagggaaaaacttgaaaaccagttgcatgacatggctttgatgattgagaggctagaggggagtcgtcaaaaactgctaatggagattgattctcaatcgtcagaaatagagaaactgtttgaggagaattcggccttatctacttcttatcaagaagccatagctattacagtacaatgggaaaaccaggttagagattgtctgaagcaaaatgaagagctccgttctcacttggagaaactaagacttgaacaagctagcctgttggaaggtcagcttataaaagaacagagcagatctgagagtttgttggcagagataatgaaactttcagctgagcttaggaaagcagtccaagcacagaataaccttgtacgcttacgcaaccaacaagcccttgctcaagatgctggtgaatgtattggtctcatgccattttcaagatgctggtggaaagcagttctttcggtggctaccattcataagtag

SEQ ID NO: 42737 - DNA, 500 bp, Zea mays
  Peptide Sequence Number=SeqID_86112
atgggggacggcgccagcggccgcggcggcggaggcggggccgggcggcgggtgggggagtacgagctgctgcgaccgatcgggtcgggggcgtactcgcaggtgtggctggggaggcaccgggcgcggggcacggaggtggcggtgaaggagatcgccatggagcgtctcagcaacaagctccgcgagagcctcctctccgaggtcgacatcctccgtcgcatcagacacgataacgtcattgcactccacgaatccatcaaggtaccccgccgcgccttgccgccccatttgatgtcgctcgtgatctcccgtgctatcgatgtggatctgcaaggtgttggtgctgttggggggtctgattataggctaggatcatctggtctgcaaatgcttcgcgataataacgtggttcaccgagacctaaaacctcagaacattcttcttgttgaaaataatgaaaattctctgttgaagatcgctgactttggatttgcaaa

SEQ ID NO: 42738 - DNA, 396 bp, Zea mays
  Peptide Sequence Number=SeqID_86113
atgacgacggcggctctcagcccccttacggaagcaaggagacgtcagcaaggactcgacagccccgacagctgtccttccgccaggctccagtgctcctccgacggccacgacaccacacgaaccgggtgccaaaacctctccggctgccacgacggcatggccctcttacagagggttggccgcgcggggaaggacgggacggcgctcgctcccagtccaaagcggatgcctaccctagtcacccgcgccccctccactccgcccccgtttcctccctcggaggcggctgcggcatcggcgtcagcgaagatgtcgggcggccttttccgggggacgtgcgctgaccaggacacacgcttctccaacaagcaagccaagctatttaagacgtag

SEQ ID NO: 42739 - DNA, 468 bp, Zea mays
  Peptide Sequence Number=SeqID_86114
atggggatgccggtcttgttcttccgtgacccgagtcgattttggggtaggatgatgatggcgcttcctgttgacgtggcggcccgagtccgagccctggggtcgggcggagcggagttcgccgtcttccgggtcttagcccgagtccgagccctagggtcgggcggagcggagttcgccgtcttccgggtcttagcccgagtccgagccctggggtcgggcggagcggagttagccgtcttccgggtcttagcccgagtccgagccctggggtcgggcggagcggagttcgccgtggcgcctttggcaaggcctgactgcctgtcagactcactctgtcgagtggcaccgcagtcggagtggcgcaggcggcgctgtccttctgtcagactgctttatgctgatgggggttaccagctgagaattaggcgtcttgagggtacccctaattatggtccccgacagtag

SEQ ID NO: 42740 - DNA, 384 bp, Zea mays
  Peptide Sequence Number=SeqID_86115
atgggcaagaggggcggcagtggtttggtgatggttcgtacaatccaaaccaccgggaccaacaccaactacatccctctgccacgacaagttcctgtctacccagtggtagtcgaggaaatctctatgaatctcccttgcattcgtgtggagaatggagttattcttgaggacagctcggaggagtttctacctacgcccaccccattggtagaatcactagccttcgcagctggatcgtcatctttgacaccaccagcaccagcagtccaagcccctgctctcggaggcgacgacccatacgactctagtgacgatgatgaagacaacgaagaagaaagagaggaggaggagaacatctacaaggaagccaacggtgaatag

SEQ ID NO: 42741 - DNA, 309 bp, Zea mays
  Peptide Sequence Number=SeqID_86116
atggcggacggcgtgaccaaaggcgagttggcagcgactatacgtcagcaaatgcccggaagcagcgtgccaatctctagtgagactttggccccacccacaggctcgtaccctcccctgaggcagtgtccaggccaccctgcaggcggcgtgcctgtctattccattaccgaacagtacgcccgtgctgcggggtgcactgtgcccatcatcactggtacgttgccagggaagcttcccctgcacgccagtactatgcagatcgcggatatcagggcgcaaggagattgctccagcaacgaacattag

SEQ ID NO: 42742 - DNA, 249 bp, Zea mays
  Peptide Sequence Number=SeqID_86117
atgggctggtgggcggtggccgaccggctgcggctggtcactggtggcgcacggtggccgctaggcgcccaggcgggtggcctggacgccgtctaccagcggagtggacaggacacattaaatgctgaggccagggtattccctgcccggtaccttgctgtgagcggacctgacctcactcggagggatccagatcccatccaaggggtccggcttgcttgctttgggagcctcaggccgtacccggag

SEQ ID NO: 42743 - DNA, 1335 bp, Zea mays
  Peptide Sequence Number=SeqID_86118
atggcggttcgccagaccagtggccgggacccccaccgcgggatccagataaccggtgtaccggccgggggttcccaacccaccgatgcccagggcgcgcagaggcgcgtcagtcctctgccagcaccaccatcagacccgccgccgccgccaccaccatctggctcgccaccaccaccccaggggcaacagcagcaccaacagcagcaacagcagcaagggcagcagacgtcccgcttccagggtcgctggaaggttcagggccccaaggcctcctccccctctgcttccaaggtcgctcccaccggtgaatccggcccccagcagcaggcgtctactgggagtggtgccggtgacctgcctctgcctgccactgccgaggcaccaccgtcgggcccccaggttccatctgctactgccgaggcagcgccatcgggcccccaggttccagctgggtccgaaggcagcagcgccgccgacgtctactgcaaacccaacggcggcgatgttgtcgaatacaccgtcggcaacggcgggagacgcggggggcgcgtccagctccatcccgacgcccactctggaggagccagaggttattcttgggcggcggctccgaaggtgtttgaccgggagcgggaggtgacccggaaggagaagaggctggccaagaaggaggagcacttggaccagagggaggaggtcatcacggcgctccaggaaaagctgaaagcctataatgtgatgttggagaagcagcgggacgagcagaccgcggctgtggcgactctgcaaaagctgcagcggaagctcgatgacagggccagcaacatcgctatggccgaggagaatctaaaggcgaaggatgcttccctggaggagcgggcgacagatctcgcctggcgggagaaggacctcgccttcaaggaggtgatgtgggaaaggcgggacaagttgttggccgaccatgagctcgatgcagaggagaaggagaagaaactagaggagaaggagcggacacagcggacactggaggagcgggttcgccggttccaggagacacaggtagcgcaggtagcccaggcggcgcaggcggctccgggctcccaagcggtggaggcgatgaagaagacacttgaagatctccaggcggagcatcgcaccggggtccagcgtatcgccgcatgggccgacgaggcgagctcggctctggtgccgttaggggtgagccccatcccagtgttgaagcagtcggtgtccatctccgatgcgctcccgatgctagattccgccgccgaccgcctccgacacctggaccagatccttggagacgcctag

SEQ ID NO: 42744 - DNA, 720 bp, Zea mays
  Peptide Sequence Number=SeqID_86119
atggaagactctctggtcattaggacatcctactgctcagaggtggagggattcccacatctgttgcgaagttgtgcgcttcgcatggggatccgcaagaagccagaatatgtctggaaggagtatctcgataatggaatggagaagcgctctatgtcactttcaccggacaccgcttcccagatatttgctaaaatgttgcccgaaaagccctccgacaactatgccagaactacagcagggtggtctttgaaacccccctttgctactttccacccagcaaaaaaaacccccgcctggaggaaaagacttcaggccctgtcaggaagtgaccctaccgaggatgaccccaccatcgtctacatggctggatacctccacactctcgataaccaatatgatgaccttgcctcccactgcactcacctaaactcccgggtggaaagcctggagcaacaagtcaaggaacttacaagggaaaaggtgtccctccaagagagtctcgagatagcggaaggcgaggaaaccaacacccgtgaagcctaccgaaccctgaagatggattacgacaagaagctaaagaagctcgcccccgcgaagaaaatccgaaagaaaactagaagccaaggatgccagactgagcagaaggaagaagccccctccagccctacctcctaccaggatagagaaactcgttcgacactgaggaaatgtccctag

SEQ ID NO: 42745 - DNA, 447 bp, Zea mays
  Peptide Sequence Number=SeqID_86120
atggcggcggctctctggctgcgcgaggaaagctccggtgagcgcggaccaggcgaaccagagggggaggggcgaaccgaagggcgtcccagattgcgggggatatggcggagcttaccgaggcaacagacacgacgagggttcaacggtgatcgcagaacgggcgtgagaccacggcgagcggcggcggaactccgtgatcgcgcgcacagagcgagagagagagagagagggcgagggtgctcgacagagggcgcaatgagcgaggaagggcgagtgaacgagggcgaggtccagaaaaggctcgggcgcatgggtcgtggtcgggaaacgtgcaaatgtgggtgcgtcaacagcgaggagcacgggcggtttggaggggaaaggtccgacaaacaggacccaccggtcagcgagagcgggcgagtaaacaggcggtcgggctga

SEQ ID NO: 42746 - DNA, 912 bp, Zea mays
  Peptide Sequence Number=SeqID_86121
atgaccctgggtacgtccgttacatggccaaggctcgggttacgctcccgaggtaccctaggaaatttccgagaccagcgggaacgatttgtaatggaatcccaccggagggaggcaccgagccctcggaccctatcaaatgggtccgggtccagcaaatcacctgcagaggctcggaggctgctctcgaaccagactacggccaaattgttgaccacgtcgacaaaacagctcgaaaactcggagcctgaccatgcacccgggctgcggctaggcccgcatgagggaacaacaaggccgaccgaggaatcacaagaagaattaagacctcagaggagtcaaaccactcctccgaggcctcgggggctacacccgacggaaaacagcactattcaccctattccgacaactgtgccaaccaccagggtgaaactaacgacaggagctccacctcgcccgacctcaggcctcggcctcggcctcggcctcgagagaaggtctccgcctcgcccaaccccaggcctcagcctcagcctcagcctcggcctggggagaaggtctccgcctcgcccgacctcaggcctcgacctcatccttggcctcaggaggagtcacaacctcgcccgacctcagcctcggcctcaggagaagtctccgcctcgcccgaccttggcctcgaaccgactacaccacaggggatacatcattaccctacccctagctagctgcctcaggctacgaaggaacaagactggtgtcccatctagattactccagcaacaggggatgtccaaggccttcctaggggggagggcggaggcgaaggaggccaactcagacggctcactccaaggccaaaccctctctcgcgaagcttgtaacccctactacgagcaccccggtgcaagataa

SEQ ID NO: 42747 - DNA, 204 bp, Zea mays
  Peptide Sequence Number=SeqID_86122
atgcgtagttcaaccgaactggaagtagccctgggggacgaggatccttcaccggagtgggacttcggcgccgtgctgcgatggggcgaggacgctcttcctggcgccatccttaactctgaaaagcccgtgaccgaggatcctggtgagcagcaagttgaagtagctgagcaggagctcattgaaggcaagttgtgcccttga

SEQ ID NO: 42748 - DNA, 495 bp, Zea mays
  Peptide Sequence Number=SeqID_86123
atggaacccggttgcacattagcatcatgtattgctgctgaattagcaaaaggtgcaacaatgctgcacgctgttcaggttgcaaagcaatttgtggagtctgctctttatcacagcaaagatcttgtgattggaaatggacctcagggaccttttgaccacctcttcgaactcaagtctccattatacaagacgggatcactgcaaaagttcaatccaggtgacctcttcctgtatgcagtgacagactctgggatgaacaagaagtggggtcgttcgataaaagacgccgtgaaagctgccattgaaggtggcgctaccattgtccaattgaggttatcattcttgaaaaacggccaaagttctcttgtgatccagtctcttcaaatgatttcactgaccgttcttcgaatttctaatgtccagagaaaaagacgcagagacacgggagttcttggaagctgccaaggcttgtgtggaaatctgcaagtctag

SEQ ID NO: 42749 - DNA, 1887 bp, Zea mays
  Peptide Sequence Number=SeqID_86124
atgtcggctgcgaaactggccgcgcccggatccggcaagtcgtcggcgagcgagaagacagccgccactagcgggaccaagcctcccccggtcgaggctgtgaaagtacgggagctgccctcaccgggaaaacatgttgccgacttcggcacgaacatcagcgtggaggactattttgttgggccgggagagggacaaatggttgttgtcccgcctttggtggcgaccacttcgacatcggtggtggtgagggcgaagggaaccgcgcaggacccgtgggccgccttctgcgcaagtggcgagattctaacagccgctgccgctaaggacgtggcgggcaccatgtcccagcggctgagggatgcatcgcagtgggctgtcgcagcagctgagtcaagtaagttgagctggacttcggcggccgacttcgccgaccgtgttgcgtctggtgtcctgactgcggacgtggctgccgaagttgagagacttcgggcacagcacgcggacgccgtccgggagaagccagctgcggagagcaaaaaccgcaggctggcggagaaagtggctaccttggaggccgagaagacggacctccggcgccaactggtggaggaaaggaaggaggcaaaccaggccatcgctgaggcgcaggctgcgcaggcggaggccaaagtggcgcgggcggagggaagtctcgccagccagcgcgccgaggagtgggaggcgaggttcaacgccctgcacggccgcgtggacaaggccgaggcctctacgcgcttggaggttgagcggacgctcgcacagttcgtggactcgaaccgcgagctgggtgcgcgtactgctgacttcgaggtgcccgaccgggaggcgggccttcgcttcctcgagtggttgcaggaggagttgctggtactcccgaccatcgtcgagggtttcatgtcctttgcctccctcgtcacctgcgagggtgccatgaatgtgttgtcccgtgagggctgcagacactatgaggtcttcgaccaatcagacgagagctttgaacgcgagatattcaaggccgaagaccctgttgtgaagcagtcagcgggggcactttttgataggatgtgggggggggcgcatggtcgggaggctgtcagggagcgatccgaccgggcgagagagcaggtgaagatggagcgtgccgaggacgtcgaggaccttggaggtctggtcggcgcgccgcccgaggctgtggaggtcaatccggtgctgccctcggatgccggtgaaggcccctcggccatgcccgtgcttgctatggccggcgaagaccctatgtcggcccctgcgccgacggtcgaaggtgccccggaggtggtggctgagctggcagtcgaagaccccacgaccgcggtcgtgccttcgcaggttcagggttttgggcctgcgcacgcaaccgctactgacaatgttaattttgtggtggcttcgaccgtggttgctgaaaatgattctgatgattccgtgtctaagttttttgagtctgatgattctaggagttcagttgtgtggtcggaagagtcttcggatgaggatttggattattttgcggccttggatgtggctgcagcggagacttctccgcgtgtgatgggtgctgaagttcttcctggtccgagtgctgggcataggcggcgaagggcggtggcgaaatggagggtgagtgaggtggagggtggtcgtcttcgtgtggacggggctagcaaacgggaattgttgtcctcgccggctggggcgagtgtaggtgagggggagttgcaaaatctttttgagggtgaggatctgaggataatgttgtttaactacagggagatgggtatcatcccaaaggttgagccaatgtaa

SEQ ID NO: 42750 - DNA, 1470 bp, Zea mays
  Peptide Sequence Number=SeqID_86125
atgaacgtcgtcgagggggtttcgaccgtgcaggggagggacagtgggttcggcgtcgagcagggaacgacgcgatcctcgtgctgcgttcaacggagctccggtggggttccacggatggcgaacggcacgggctccggcgacgggcacggctgctccggcgatgaaggacacggtggccggctctacggtggcgcacggcaagagaacatgagagaaagtgaggagcaggcgaagagcagaggagtaaatggacagcgcttggtcgggcttcggtccttgggcacggcgtgttcctggcttgtgcgcggcgtcggctttcggtcgggctcggcgtgcaggggcgggatcggtgccgtcggcggctcggtcggcttcgagggtcacgcagctgggcgcggtcgcgggctgctcggcctcgcactggttcctggcggcgcggtcagcatcgggtcctgtgggactcgaccgcggccggcgtcgggcttggcgtcctgcgcgtgggcgcgatgtttcagaccggccgggcagcatcctgtgaaggcccttcctcggtcccgcccatcggtttcttcccgcgactgtcggcggcgtcttccccgggataaccactcgccccatgatccttgctgcaccgtcttccgcttcacgaacgaatgcggcgggatctcggccacgcaaatccagcgcgaaggcaggacttcgcaccagctacccgccccgggagggcatctcgcgagggcatacttcgcccagcgcccagccatgtgccaagggccataccccatacccgacaaattcctcaacaagatcgcacccgctactcatgcgtgcagcgcaccgaagggctccttcatcctcatcatcctccgctacctcaaactgcggggaaccaactccacgacttccatcgaagtcttgccggtcttcggcacaataatgttttgcgaagacttccacagagggctgaccgccatacgaagtcgtcgcccagacgtacttcgccagggccaccacgacattcggcgtcagctagtggacctggacctcgaatctccgcaggacctccaccacgaatcgatgcgcaggcagacgaaggccagcggcgaaaaaagcctcaaaaacgaccaactccccttctggctcggggacctcctccactcccaggacacgccccactccgctgccaaaatatccaagttgttgcatatcttgcacgcggaccgaggacatccgcgagacgccaaactccacggtatcaccaggatgcaactcctccgccaccacgttgctcagtgtatcctcggacgatgcgccggccggcggtgtatcggcagcagaagaggaagaggacggcatggctacgtaccgtcggcgacggcgggcggtctgcttcacgcgggccagatctccgatgagcaggagcaaggagggcaggcgagcgatcaaacggtttcaagaggaggctag

SEQ ID NO: 42751 - DNA, 426 bp, Zea mays
  Peptide Sequence Number=SeqID_86126
atggtcggcatagagcccagaggcatgggggcctctggggtgggcggtggggcgtcaagacccgccggtgaatgcccatggaagaggtgctgcacggtgggccagggaggcggcgcgctggcgctcctgggaggcagcaacggtagcctggatggtggagatggtggcgacgagcgtggttttactggtgagaatgtccgaaagctagttaggagccccagacctagcatgcatgatgagaatgtccgaaaactgtgttttgtgcctgctctaatttgcaactggatgatccttctccattcactgaagctgctcctgaacgtcgcatgggagacgacgtcactcatgggattttggaactcggaccacacatctacctcccgcacacccttggagcctcaagaggtcacccactctcccatttga

SEQ ID NO: 42752 - DNA, 405 bp, Zea mays
  Peptide Sequence Number=SeqID_86127
atgtggccgggccaggcccccagcacttcccatcctctggtgctggcgccggctctcctgactacgccgcccaccaatggcatgcctccatatggcgtgccacctctgaccccgccccagctcctgctttcggggcagtctaccatgacaccatggtccccgttcgctgccggctgggaccctaccgccttcgcctccgcctccgcctacagcaccatggctttggccccaccgccttccgactgggtcatcgactcaggtgcatcggtattccctggaccgttcgacctcaacgacgttctcgtagcccctcacatcactcacaatctcctttctgtccatctgttcaccaccaacaatttttattccattgagtttgaccctactggtttttcggtgttgtga

SEQ ID NO: 42753 - DNA, 513 bp, Zea mays
  Peptide Sequence Number=SeqID_86128
atgccctttacatttggtagtaattctatagtactccaccaaggtctaaatagccttttcatctttaagtcggtttccttttctgctatcacgccgaagctttcctgctcacaccttcggcgctatgtcaaccttcgtattctttgggcttctcccactgtggataggcttcaagagaggctaagaaagtctaagtgtttaggacttgaagaggctgcaaagaacaaaggttttgaccttggtaacgtcgatgccatgcagacggacatggaggttgtgttcgaggtgctgaagagcctagaggacgttgaggagctagaccccgagtggctgcatgatcctcacaagctgcacacgtgcgtggagaaggacacctccttgtcggactcgtgcggcgtcggcccattcgggctggtggtgatggcgcccgaaggcatgcaaagcaggagcagatcaccgtattcttcagggagtgaccagcatctcagcttctcgatctatgcttctttgtga

SEQ ID NO: 42754 - DNA, 894 bp, Zea mays
  Peptide Sequence Number=SeqID_86129
atggcctctctgccttgttcacaaataaagttaagcaaagtacttgtcaggaggaagtttcatgagagtggacagaccaatttgccaaggcctcttcactggaaacccttgcgaccaggccgttttgaaaatcttgtgttgcaatgcaccaagaatttgtcatgggaaacatctcttccatatgcctctgcagaggatgatgccagtatcatcaagggaacaggtgttgttgaacctattgatacagaagaagctccacagattccaatcctccagagtgatgaagatgttgtagaggtgaagaatgaaccttcttggcatcttaaggcatttaaattggcaatgtggctagtagggccttcaatcctgttggttacgggtatagttccaactttatggctgccattgtctttagtgtttcatggtcccaacatcgctggccttctatctctagtcggacttgacttcatttttaatatgggagcaatgttgtttttccttatggctgatgcatgcagccgtcaagagaacagtatttttgacctgaaaaggtccgccctggatgatctgcacactgaaactacaagttctaagaagacgtccacctttaacgttgatgtgtcggcgtgtcgcaacggaccaggacacaaggggcctatttggttcagcgatgggaggagtgagggaaaggcagaaggaggaggcgaggatggtcggaccggcggaggaggcgagcgaggcgaggatgcggggctgccggtggatggatggagggatggagcacgggagggcggcgggctgccggcaggatgcagggtgaggtgcgaccgcgagcggatgtggggcggatgcggaggcgcggcagaaccatgtgggtgtgaacgcctacagtag

SEQ ID NO: 42755 - DNA, 642 bp, Zea mays
  Peptide Sequence Number=SeqID_86130
atgccaatcgtgggtggatcttgccttcctcggattcgatttcgtcgtcggctcgtcgtcgtctttgtgctcaccggccaagatgcgtgtttcggcgccggcccaaccatcccgccggcctacgtcgttgtgggcttctcagcgctgatgagcataggaggcaggagaggcgactacggcgggtctgctgaagtaagtcggctccaagcggaactccgccgcaggacggctatctgggtcgtagatggcgaccgcataaatgagctgagaagagatgtccgccatctgcgagatcagctcgcggaccgggatttggaacttgactgggttgttcaatcttgttcgcttgcatgggacaaggagcaaaaagctcaagctcgagtagccgagctcaacttgaccgttgaagaactacagacatattgcaataccttacatgaagaggttcatgtattatattcgcaactgcatcccaatgagcctacgaatcctattgagtcggaagccggaccctcgcatgttgcgggacacgcgcttggtggtgagttagacctttttcagccccctcctatgaggctggtcgacaaatcgtctcccacacccgacgacgaggccgccaagagcaatgggaagcaggactag

SEQ ID NO: 42756 - DNA, 240 bp, Zea mays
  Peptide Sequence Number=SeqID_86131
atgtctgggcaaggcgtggcgagcaaggcatggcgaggcgatggactgtcacaacctcgtggagagggcaccgtagttgataataatatctgccacccaacagaatttgatttcttcctgtgcagccatgctggggccaagggaacaagtcgtcctacgcattaccatgtgctacgagatgacaacaagttcaccgcagatgctctgcagtctctaacatataacttgtgctacatgtaa

SEQ ID NO: 42757 - DNA, 300 bp, Zea mays
  Peptide Sequence Number=SeqID_86132
atggcttgccctcttgacaaagacgacaaggggcaagtgacgccaaacacaaccgcaatacagtttgtaagaacacacaacattaacttacaacccttgtcaacagaagtttcacagaagctactaaagactactggtaaagggtacctacaacaagctgctctcggaggtgcccaagtacaagcatatcacccctccatcctttctgagtgcctcacggttaacctaggcaagagcgtagaagatcaagtacctaaggaaccaataacttttctatacgtatgtcatataaaggcctaa

SEQ ID NO: 42758 - DNA, 339 bp, Zea mays
  Peptide Sequence Number=SeqID_86133
atggcgcgcgccaagcgtgtggccgctcgtctcatcagcggtggcggcagtcggggtggcgctggctcaagcagggcgagtggtgggcggcttttggcagcgacacgcgaaggcgggctacggtcgccgtcgcggcgggcatcccagcaacaccaccacccgtccacccacccatcggcaccagcgccgagggaagagccggcgacttcgtctgtagacaaagcttcgagaggaagggaggtggcattccgcggtgagaccgcgatgggaagatttgggaggcacgaagccgcggcggcggcggcgcggtactgcgaggagagcgagtcgagcaggtag

SEQ ID NO: 42759 - DNA, 678 bp, Zea mays
  Peptide Sequence Number=SeqID_86134
atggggttcgcggggaacgtggagccctgcttcattagccccactgtcgtcgccgtcaacgagtccttctccggctccgcccagccggcggcgaggggcacccccgccagggggaactggctcgctcagcacagcgccggcgtcatggctgacctcgaagcgctagcccgatcccgtgccagcagctcgcataatttgagctatcccatccgcaaaggtcaggtgggcgctccagctgtgtactgccgtgtccagttgctggtgttttttttcgcgaccttacttacgattgatttgggctggggcgaactctttcaggtggagaattgggataccatggagaggttctggcaacagtgcatcttcaattacctctcgtgcgacctagaagatcattattttcttctaactgagagccctctgactgcccctgagacccgggagtacaccggagagatcatgttcaagacgttcaatgtgcccagcctctatattgcagtccaacctgtccttgcgctggcagctgggtacactacaaccaagccccaaccaccaaacttgaccgttggctggaggcgtctgctcgatggcgcaccggacagtccggtgcacaccggacagtccggtgcccctgccacgtcattactgccgttggattctgaccgttggagcttctga

SEQ ID NO: 42760 - DNA, 204 bp, Zea mays
  Peptide Sequence Number=SeqID_86135
atggcgcaccgaacagaccggtgcacaccggacatgtccggcttccccgccacgtcctcagagcagttggaaattgaccgttggagttctgacttctgggcccgccttgatgtccggtggcgtttgggtacccaaggatgttctcctcccacgagaaaaactgatgatccccaacgagctatcacattcggggatgcaaattaa

SEQ ID NO: 42761 - DNA, 855 bp, Zea mays
  Peptide Sequence Number=SeqID_86136
atggaaacagcgttctgcctggctagctgccggggccatgaaggtgatattaccgatcttgcagtgagttccaataattctgtggtagcatcttcatctaatgatttcattattagagtgtggcgtatgcctgatggaatgccagtctcagtgctcaaggggcatacaggggcagttactgctattgcatttagtccaaggccaggtgctgctttccagctgttgtcgtcatcagatgatgggacatgcaggatttgggatgccagatactctcaacaacctccaagactgtatacaccaaagcccccagatgttgcccctggtaagagtggtgatgcatcttccagcgccgctcaagttcagccaacaaatcaccagatcttatgttgtgcatttaatgctaatggaaccgtgtttgtcactggcagctcggacacttatgcaaggtttagtggatgtgcagttgcatcaagatctttttcatctgattccagtcatacctctaaggaagaaaatagcctgaagttaagaaattcttggttcacgcataatattgttacctgctcccgtgatggcagtgcaattatatgggttccacgatctcggaggtcacatggaaagattggacgttggacgcgtgcttaccatcttaaagttcccccacctccaatggctcctcaaccacctcgaggtggtcctcgtcaaagataccagccaactcctcgtggtgtcaatatgatagtttggagtctggacaaccgctttgtgcttgctgctatcatgggtacttttggtctactaattcatatgttttcagtaattcactgcaaccatatccacattttacttgagtaa

SEQ ID NO: 42762 - DNA, 519 bp, Zea mays
  Peptide Sequence Number=SeqID_86137
atgagtgctggatatgatgggaagacgatcatctgggatatatgggaagggaaacctgttcagatctatgaaacaggacaatttaaactagttgatgggaagttctctccggatggtacatcacttattttatcagatgaagttgggcgagtattcattattggaactgggcaaggagagtcccagaaagatgcaaaatatgatcagattggtctaaccaggtctaaattggtccgctgcctatgtggcatgcaaccattgtgcctcctgcttggtggtaatctgaatcatattactgctcaccccagggtagctaggactgatttggacccacctgaaaaccatgataagtttaagttcttccttggagactatcggcctctcattcgtgataccaatggaagtgtcattgatcagacgccgctccactcgcaatccagacgccgagaagcgaaagcagcaactgaaggcaacgtcgaggccgagacgaacttcaaacatgacgccttcaaggagtga

SEQ ID NO: 42763 - DNA, 498 bp, Zea mays
  Peptide Sequence Number=SeqID_86138
atggcacccaagagagctacctcgaaggctgacgaggctgcgaaggcagcactgctggccgagaaaaagggcaaggcccttgtcgacaccacccaccaagaggcctgcgaagacgacgcactcagcaagaggcagcgcaacgagcaacccactcccgaaggcaatctccgcacctgcagctctggaggacaaccacaacttcccccaggcttcgctccaccagagggcgcgaacgccaccgaggacggcgaagtcatcggcgtttcggcagaagaacagctacaactgcgcgccttgcgcatcaagaaccgcaacctccagaagcaaaaagagatcctcgaggccaagcgccaacgcgtgtccgcacaagccaaggtgcgacagatgatacgcgacgaagagcagaaggctcaggagcttgaacaagagatcgccctcatgcagagcgaaggccaactcggcctgcaacacggcccacccctccaacagcgcgcatga

SEQ ID NO: 42764 - DNA, 2229 bp, Zea mays
  Peptide Sequence Number=SeqID_86139
atgccgtcctcctacgctgccgctgcagccggatcctcttcccgcaagccgaatcgcacctccagcgctgccgcacccactcttcgcccaccagcaccctcaccgtcgccggcacccgctcccctggcggtgaaccctagcgtcatctctgattccgacccctcctcctactcatcttcctctgcggatgaggccgatttcgccgcctccgactccgcaactgcctctgttgtctctgcctacctctcggttgctggcgagggggccgacctctcgaaagttggcattttcctctcatccgccgcgcgccgccgatcgccgccgtgccttatctgcttcgatcctatacgcccctctgacccggtgtggtcatgctcttcatcctgctttgccatcctccacctcccctgcatccagtcatgggcgcaccagtcagcatccgggcccgccgtgccgtgcccaacctggggatgccccaagtgccgcttcgcctaccccaagtccgagatcccctcctcctacgtctgcttctgctccaagaccatagacccggctccggacccctggatcctcccccactcttgtggcgacgtctgtggccgccgtcttgatgcgaatctcgactccggctgtgagcatacctgcctgctgctgtgccacccagggccatgcccgccatgcccggccgttgttcctaaagcgacgtgcttctgtggagtgcaccgggagccccgacgctgcgcacatcagcgttactcttgtggggggaaatgcaacaaacgtcttagctgtggactccaccactgtccagtggattgccatgatggcccctgcccgccgtgtgcagtgctggggagtcacaaatgtgagtgtggagagatattggaggagaaattgtgctctgaaaggattttccagtgcaagagggagtgtggtgggatgctagattgcggtaagcataagtgtgagagggggtgccatgggggcaagtgtggggaatgcccactccgaggtcgacgcacttgcccgtgtgggaagaaaaattatccaaggttggagtgtgatgcagaggctgccacatgcggatcaacttgtgagaaggtgcttgggtgtggacgacacaggtgccctgagcgctgccatcgtgggccatgtgatgggacttgccgtcttgtggttactaaggcctgccgttgcggggggttgaagaaggaggttccttgtgggactgagaagaatcagaaaccacccaaatgctcaaagaaatgcaatatacctcgcctttgccgacacaagcttgaatgccggccccacaaatgccactatggagcctgcccaccttgcaagctgatctgcggggaagaatttccatgtgggcacacgtgtaaagaaaggtgtcatggccctatttctcctccaaactccgagttcacactgaaaccgacaaaaaagaaaatgggaaagcacatagaatgtacacctgggacaccgtgcccaccatgcaaagaggtggttttggtgtcatgctttgcgcagcatcttggccaagaacgcactgtcaacacccgttgtgcatgcagcactctgaaacaagagtggcgatgtcaagatgtcctcaaggaataccgtaagtctggccgggatccaaaagaagtacctaaaagtcagtttggagttggcttacttgcctgcggtgaagattgcaagaagaagctgaaggctccagattcagagttgcatctccggaaaagtcaggagaacaagatccctgctgtggaagtcgtaaatgcacccaaacgcaggaagcggcgtgaccgtggacaagaagttaaaatttcgaaattccaggaagtgaagacttttgtgctgagagcgctactgattattttgctgtcaataatcgttgctgctggtctgtacctgttgtggaaaggtattttctggctttctgactggatgaacgaaatggaagagcagagggcgagtcaaagaagtaacaccatagtttgtaagtataggttgtatgaaaagtttgatgataattttacattaaacgaaatgtgtgacactaggaagagtatgacacactacatgttaatgtcgttgcacaatgagggttattggtcacgctacaaaatggtagttcaagggtcaaatatgacattgcttgaggttttattggagaatggatataggaagtctttctatggtgttagagtcaatgaataa

SEQ ID NO: 42765 - DNA, 2934 bp, Zea mays
  Peptide Sequence Number=SeqID_86140
atgtcgtcctcttcctcttctgctgccgatacaccgccggccggcgcgtcgtccgaggagacgctgagcaatgtggcggcggaggagttgcgcaccggcgacatagtggagtttggcgtgtcgcggatgtcctcggtccgtgtgcaagacatgcaacagcttgggtattttggcggcggagtggcacgtgtcccgggggtagaggaggtcctcgagccggaaggcgagttggtcgtcttcgaggctttttttgccgctggccttcgtctgcccacacatcgatttgtgggagaagttctacgtatattcgacgtccaggtccaccagctgacgccgaatgctgtgaaaaggaaaatcggaaataagattgctcaatttggatcttgcacatttacgccgaagaccggcaagatttcgatggaagtcgttgagttggttccctgcgcccgcaataaatggggcaactggtgggaattttggttctacgttgtcgaaggcacagtcgaagaccatttggggctccccgtggccgtcatgtgttcgcattattactcagcgtacctgcagtttgaggtagcggaggaggatgaagacgaaggggccctgcggtgcgcggctcgcatgagtagcggacgcgatctggttgaggagtttgtcgggtatggggcgctgggcgaagtatgccctcgccagatgccttcccgtggcgggatgctagtgcggagtcttgccttcgcactggatttgcatggccgagatcctgccgcattcgtgcgtgaggcggaggatggggcggtgcgaattgttggtcgctacgtgccaaagacggaggcccagcggagttgggatatacgcggaatcaacgaccgcctgaatagggtcttcgagttgaattgtttgtcatatggcgttgatgaggacatgcgcggcccctggggaaggatgtcttcgcccgagctccgggagtcttcggcgcggatgctggaggttaccgggggtcgatggcctaagaacgttcctatcccccgcgcggccggtgaagacttctttacatctcgcatggctcgtgacttgagagtgtttccttacggacggaatattgctgttgttgtgtcggcagtgatgaacaaggatcgccaggaagctgcgcagaagcgccgggcggtcatcaggattcccgaggctagaccgaagagggcgcgggggactgcgaaggctaccgcccccggcggtagccagccgacgctggcggagaagccggtcgccctaggtccaacaagggaattgccttcgccggggaaacgcattgccgacttcggcacgaatattagtgtggacgattatctcgttggatcaggcgaggggcaacttgttgttgttccgcctgcggtggcgaccacggtgtctgtcgcggtgcctagggtgaagggtagcgctctcagcgctggcggcgagattttggcggtcgctgccgtcaaggacgaagcgggcactgtgtcccgccgattgagggaggcgtcgcaacagctgagtcaagcggccgacttcaccgaccgtgtggcgtcgggggcccttactgcagatgtgtctgccgaagtcgagaaacttcgagcgcagcatgctgacgccgtccgggaaaagtcggctgcggatagcaagtgccgcaagctggcggagaaggtggccgccctggagggcgagaggacggacctccggcgccagctggtggaggagaggagggaggccaaccaggccatcgccaaggcacaggcggcgcaggcggaggccaaattggcgcgggtggaggggagtcttgccagccagcgcgtcgaggaatgggaggtgcggttcaacgctttgcaggcccgcatggagagggccgaggcctctacacgctcggaggttgagcggacgcgcaaacagctcgtggactcgtaccgcgagctgggcgcgcggactgctgacttcgaagtgcccgaccgagaggcgggccttcgcttcctcgagtggccgcaagaggaattgttggcgcttccgaccatcatggagagatttatgtcttttgcctccctcatcacctgtgaaggggcgttgaacgcgctgtcccgcgaggggtgcagtcactatgaggtcttcaaccgatctgatgaagattttgggcgcgagatttataaagtcgaagaccctgtgatggcgcgtgccgaggacgtggaggactttggacccctgaaccgcgcgcagcccgaagcggaggccaacccggttgtggctgaggctgaagtcgacccggcaccacccccggaaacgggtgaaggctccctcgctgcccctgcggctgctgtgtctggtggaggctcgtcgccagccactgcgccgatggtggagaatcccccgaaggcggcgacggagccagcagcggagatcccatggtggcggctgggtcttcacaggtggcttagtgggtgtggggattttgggcctgcgcacgcaactgctattgctaattttatggcggcttcgaacgtggtcgctggaaatgaatcggatgagtctacgtttaagttttctgattttgatgactctgggagttcggttgagtggacggaagagtcttcgaatgaggacttgaattactttgcggccttggatgtggctgcggcggaggcttctccgcatgttacggatgctgaagttttgcctggttcgagtgctgggcgtaggcggcgaagggcggtggcaaagcgtagagtgagtgaagtggatggcggtcggcttcgtgtgggcagggctggcaagcgggaattgttgtcttcgccggttgggacgagtgtaggtgagggggagttgcgaagtctttttgagggtgaggaacttaggataatgctatttaactatagggagatggtaatcattccgaaggttgaaccaatgtaa

SEQ ID NO: 42766 - DNA, 876 bp, Zea mays
  Peptide Sequence Number=SeqID_86141
atggctgaaaggtaccaacttctacgaagttacgttcctccgacgacaaggcggaaggattgcgggcgtcccccatccgggggcttggaaggtggaaagacagggtgcataagggagcgcgaagacatggccgcctttcaaggagaccagcgggcgaaagggtggatagccatgcagtcggcatgcaaccgcgccaagtgggcgcgcccctttgactccaacgcgctcagcatggaggtccaggcgggcgagagcagcggtcacgtcgtcagccaagcttacgtcccatccaggggcagcgagagaaccctctctcacggcgtgaagacgacgcgcccgtgttccgttcctcgaacggctcgcgcacgcacaacggccgcctcgcgaaccactcgccccgtcacattaactctgcggcgggacaggcagcgcctcaggcaggagaagcaagcgacgcttcgccttcgccataatgaccgcgtcgaaaaaggaaacaggccccgagccttcctactgatcaaaggttcaaaggctggcccctcgaaggggttcaacggccgcctcagagcacttgggttctgcgcccactactggtcagaggttcgatggccggcccctcggaagggttcaacggccgcctcaggccactcgggctccgcgcccactactgatcagggcgggaacgatcttgtaacggaatcccatcagagggaggcatcgagccctcagaccccgtcaaaaggggaccgggtccggcagatcacccgcagcgccgcctgcgccgctccgactgctgagccactcgacagagtgaggctgacagcagccaagtccggcctcaggcgtcataggaaactccgcttcgcccgaccctag

SEQ ID NO: 42767 - DNA, 495 bp, Zea mays
  Peptide Sequence Number=SeqID_86142
atggccttgctagaccctctcgagtgcttccagtctgaggtggcactcaactcagtgcgcaacctgctcagaaggggtgtgtcggcgtttgctagaaggatccgtgtcggcgccactcccctcggcgatctcgccgctgaggagttcgtgctctccgtctccaacttttcctatgggttggcgctgccgatctcgcctttcttcgtgctgctgctggaggagctcggcctccaacctcagcacttcacgctccacttcatcctccaagcggccatcttcgcctacctctacgagatgtccgtgggggcgacgcatcatctgacctacaggatttggcctgggaagccaagccgtgtgcccggaccccctgaatcacagttccagatactaggacaccatcgcagagtggtggagcgtgtaggcttacggtacgggaccaggctaagcggctacacggttccggaccaccccaggggacgtgcatccattctctag

SEQ ID NO: 42768 - DNA, 126 bp, Zea mays
  Peptide Sequence Number=SeqID_86143
atgggtatggaggtcacgacgagccagaacgagttggcttggctcgctcaaagctcgcgagctgctctgagccaaggcaagccgctccaagcgagtcggctcgcgagcctcgagttttttttctaa

SEQ ID NO: 42769 - DNA, 183 bp, Zea mays
  Peptide Sequence Number=SeqID_86144
atggcccaagggcacatttccctttcaaaaggacataaacttgttacttttgaaccagatttgaaaccatatgcgggcgaggatgaggagttgccatcgaggatgacttctattcaagaaggggaggatgatgaggacatcaaccccaacaaaggaatggctactccaactgaaccagcatag

SEQ ID NO: 42770 - DNA, 153 bp, Zea mays
  Peptide Sequence Number=SeqID_86145
atggacacatccaaatccctgaacaaggaaaggagggggcgtgtaagggaaagtcggctgcttgccaaaaacaaagatggtaggcgcccaaatctggttgcagcttgtaatcctgctttatgggaatattctggggataaactaggtgtctga

SEQ ID NO: 42771 - DNA, 426 bp, Zea mays
  Peptide Sequence Number=SeqID_86146
atggctgtcccctgtccatctgcgacagcgcccgtcccccgttcccggctggccgcatgcgcaggcggcggtgacgacgtccgtaccctctggcctgacagcactccctctactgcactacgatacgactacagcactactactgtgcacgttttcaccgtaccagccagtcagcttcagccacgcttccccatcctatccgtcgacaggtacagcgaccctgccgatcaacggacaaacacacgtgacaaggaagccgtcgccgtcccacgcgacctgtactgtaatgtaacgctcggacgggcggggcggcgacccgcgctgtgccgtcgggatcgggtttttgtccaaacccacgcgtttggaggcggccgccggcaaattccgtgcactgcaggtggcttgttccggaaccctgaattctag

SEQ ID NO: 42772 - DNA, 465 bp, Zea mays
  Peptide Sequence Number=SeqID_86147
atggagcaccgtcccgggtcggagaggttgctggagactgcccatctggagcttgacgggaagctgttcgtcaacacgcaatgggtcgagcgcgtgggcgagcgcgaaggggggaaaggagcgaggcggccggagaccggcgtgagagaggtgggaatcccgcggccttcgtgttcgtcccgcgcccaggtcggggtgatgatggcgcttcctgttgacgtggctggcctgcgccctaggttgggcgacgtggaggctcctccgaagccgaggtcaagtctgtcttccatggccgaggccgagtccgagcccctgggttgggcgaggcggaggtcgttcggcagaggccagggcggagtccgagccctggggtcgggcgaagcggagttcgtcgtcttccgggacttagcccgagtccgagccctaggtcgggcggagcggagttcgccgtcttccgggacttag

SEQ ID NO: 42773 - DNA, 1110 bp, Zea mays
  Peptide Sequence Number=SeqID_86148
atgggtgccgaacatggtgtctccggtgagctgcaagcggggcccacgcgatctgaggcggctgtcgaacccttcggggggccagccttcgaacctctgatcagtagggaggctcggagcctggttccttcacggggaaggatccttttcgggcatccggcgcgccggttgcgtgacgcgtgggcctgggcctccatgctggcgtgtcgggagtcggagaagcgcgtccacttggcgcggttgcatgccgcctgcatggctgcccgcctctttcacccgttggtccgggcaaaagcggagggtcacttgaacgcaactccgtgggagttggtacctttcagccatcgttcggcttcaaggattttcatcagtgagcctggctgtacccccccccgccggcggtcacccgagacggtgaccaccagctcccgggtggggagaagcaagccgggctgcgatcttggtcccaccctcagcttcaaggatgttcatcatcctcactggggtgggtgccgggctgagccggagctctacctcccgcgtgggttcgcgggtcaccctctcttgcggcgttcaagggagagggcgctcgctggccccatgggcggcccggacttcgacaacgcggggctggtcgacggcgggcgtcgtcagccccagcgtgtcgagctcgtcggcctggctcccggtggccctttctgccggaaggcggctgccgcgccatactcgcctgttgattatctgaaccgctttaccaagcatgagtcgccccgtatcaaggtgacgagtgagccgggttgtccgttagcgggaccgacgccggagtcgatcagccgaggcctcgggtcgggctggcgcccttggaagatggttggccgaggccccaggggtaaccggccgagccgcctgctcgggccggattcccagagaagtccctggcagcgattgtccgagcgtgacgatgacgtcgtcctccagagtggggatccttggaccgcgtcgccgtccgaggctaggtcggaccttactgaaggtgtcgtcgatgacgagggtgttactgcccccttccagcgtcaagacccgagcctgcaggatcagagtgtcttgtag

SEQ ID NO: 42774 - DNA, 372 bp, Zea mays
  Peptide Sequence Number=SeqID_86149
atgggcgagcgcgaaggggggaaaggagcgaggcggccggagaccggcgtgagagaggtgggaatcccgcggccttcgtgttcgtcccgtgcccaggtcggggtgatgatggcgcttcctgttgacgtggctggcctgcgccctaggttgggcgacgtggaggctcctccgaagccgaggtcgagtctgtcttccatggccgaggccgagtccgagcccctgggtcgggcgaggcggaggtcgttcggcagaggccagggcggagtccgagccctggggtcgggcgaagcggagttcgtcgtcttccgggacttagcccgagtccgagccctgggtcgggcggagcggagttcgccgtcttctgggacttag

SEQ ID NO: 42775 - DNA, 279 bp, Zea mays
  Peptide Sequence Number=SeqID_86150
atgaaggccaagtcacaccagcaaccaaatcaaggaggtacctgcaaaaattatgccacaagcaaggctgagtatactaatattcagctagacttacccgtgaccgcacttgtacccaccataaccggaatgggagaccacgtctcaggtcgcgtgaggagggcaatcagcgggcaggttcactcagaccacgcatccccatggatccgtgtccacagaccatcatcattctgttatcaaagtggatacaaccaattcctgacctcgcgcgagtgctag

SEQ ID NO: 42776 - DNA, 267 bp, Zea mays
  Peptide Sequence Number=SeqID_86151
atggtagcgcgtcggggaagagttcggggagtctcgtggggttccgacgagcttgatgatggcggtgattggtcggaggaggataaatcagaaacccaaggtactccaaagcgcttcctaaggagagctcaaaatgagtttgagcgcaaaagatcagaagcgacaatggatctgaattcaagaatcttcaagtggaagagtaacttgaggaggaaggcatcaagcatgagttctctgctccctacacatcacaacaaaattgtgtag

SEQ ID NO: 42777 - DNA, 420 bp, Zea mays
  Peptide Sequence Number=SeqID_86152
atggcgctggccgtcactgccgctgcttccctacagctcgtcctggccgtgacctcgccatggagttcccacacgcgcggctcccttggcgtctctcccatggccgcgtcctgctcggctctcacgcccgtcgatttggagctccagcgcgaggtcttctctgccgtcggcagccctcaaagcaagatcggggcttcacgtgatcaagcgaaggcgtttcgtggtggaggaagtgtgtgggagttctctgcgacactgcaatttctcgccgtcgacctgcgctctgccgcagatccgctttcgccgtgtatggacgctctccgcgccgagacagccgaagagcccgttactgaggatcctggtgagcagcaggttgaagtagctgagcaggagctcattgaaggcaagttgtgcccttga

SEQ ID NO: 42778 - DNA, 465 bp, Zea mays
  Peptide Sequence Number=SeqID_86153
atggcgaactccagcgatggcggtggtggctcaaatggcgaggagagtgagagagagaaaggggcgagctcgggtagggaggagggacagagaagctcggccggtatttatagagagaaggaggggagaggagaggaagtcgggagagagagaggcgaccgggttcttcaagacgccattgatggcggcggcatcaatggggagagagtggggaggggagaaatggtcgcgttgaagctccattacgctgaggagacgaacgactgcgggacgtcgcgcggggtggctcggacgcggagcttgggcgcggcgcgtcggctggcggcacgacatcgggcgcggggtggtgtcctggcgcggggctcgaccggggtcggggcgcggcgtcctggtggctgcgcggtcggggaagggagagggaagaagagaggggccgggtggggcccgcgcttgatggttttatag

SEQ ID NO: 42779 - DNA, 340 bp, Zea mays
  Peptide Sequence Number=SeqID_86154
atggatgctcaatatgatgtgactcaagaatggcttgatagggtgaagatagcaaggaaagggcttcgaggaactaagcgaagctggtattcaaatactggttcagctggttttcaggctggttcagctgggaggattagggttgaaagagacccggctctttgtgggcgcctcaacgaggaagtcgggcaccttggtgatgttgatcctagggcaatagatcttgccatgagaatcgctgaaaggatgttcctcaaaatgaaggaagatgaggcaaagaacaagattgaagaagaaaatgatcgatggagaccaaacaacgaatccacctcttcacaag

SEQ ID NO: 42780 - DNA, 921 bp, Zea mays
  Peptide Sequence Number=SeqID_86155
atggatgaaggaactcccctcggtggtctggagtctgaggacgactccaagccgagcaacgggcttcacgccgttctttctagtctatggggccgaggctatcttgcccacagacttagaatacggttccccgaggacgagggcgtacgacgaccaaagcaaccaggccagatgagaagactcactggaccagctggaagaggctcgggacatggccttactacactcggcaagagtctaaccgtcaaggaagggtcagccttgcctcggcaaagcccgaccctccctcaggggctagaaggggggaaccccctctgcgtcaaaaatttcctcggaaaaagtctttctgtcagaacgtctttcgcgcttttcgactacttcgatagtggaatcctaaaaacgatggagtacacaatgatttttcgtgccttctcgactgtatcgataacagaatcctacggacgagtaagagtacacgatcagacatcagtagggggagcagcagcaccctcggcatcgactccaccttcggcggaatccgacccggcctcggacgacgacacaggcgaaggatctccacctcgaaggaagatgtcagcaccgcgcctgggccatcgccgccagggtctccttcaggaacccggcccgagcagacggctcgaccggccgctctgtaacctcagccagctgtcccccgaggacacagcccggctcattgcctcggcagcccgactccagagttggtcccgccagtgtacgacccagccaggctccggccgccgctgctatgccttctcagtctgggaagtcccctgctcccgggccgacgaagtttcttctccaaccgactccgcctctgtccatgctgacaccgctgcctccggctccagctcatcgcacagcggccgagggtttctttaa

SEQ ID NO: 42781 - DNA, 159 bp, Zea mays
  Peptide Sequence Number=SeqID_86156
atggcgtatcaaaagttgccggtgtgggttcatatttatatgcccagtgctttgcaacttggtggaccccatatgtcattgactattgctattctagcaaagggaaggtacttccttcatgaccttcgtctgaagatcattatatcccaagggagataa

SEQ ID NO: 42782 - DNA, 765 bp, Zea mays
  Peptide Sequence Number=SeqID_86157
atggtcacccaagacggtgaccaccagttcgatggtggggagaagcaagccgggctgcgacctctgccccgccctcagcttcaaggatcttcatcatccttgctggggaggagggcgaggcgagccggggcctgccttcgcgtgggctggcgtcccgcttcttcctccggcttatgggggtggaaaccatcctccagctctgtggaggaggcatcctccagccatgccggggaaggcgaactgctgctgccagggtgcagcattccgttctctgtccgggcgacggtggccagccgcaccggggggtctcacaacacgtcatacgccgcgagggcggacgggagtgagggcctgccggtgcgctttggggcggccggcgctcgctggtgcggtgttggtgggcaggtggacgccgccgtcggtgctgaggtggtggcagctggagaaagcttctccgtcgacgagaccgtcagtgccacccgcggaccaacctctggctctttggctttaatgtgtggttctcgtccctcgagtggggacgcgaacgagagccttccagcggtagcgtccgccctgggaccatcgctgctgctgcagaggtcaccggcgagtcacccagagtttgtcgtcccgcaggctctccgatgtggaggttgttcatacccgcgggagtggaaccggagttccgtttgtaatggcatcttgagtgccggtgtctgttcattgtggctgtcggggcctaaacatctaggtattttggcgtaa

SEQ ID NO: 42783 - DNA, 1335 bp, Zea mays
  Peptide Sequence Number=SeqID_86158
atggccaccgcacccgccgccccgccgccggcctccgcggacgacgagatcatctacgagtccatgccctgcatccgcgtctacaaggaccgcgtggagcgctacttcggcaccgagttcgtcgccgcctcgacgaacgactccaccggcgtggcctccagggacgtcgtcatctcccccaacgtctccgcgcgcctctacctcccgcgcctggacgacgggaacgccaagctccccatcttcgtctactaccacggcggcggcttctgcatcggctccgccttcaaccccatcttccacgactacttcaactgcctcgtggccctcgccgacatcctcgtcgtctccgtcgagtaccgcctcgccccggagcaccccgtccccgccgcctacgccgactcctgggaagcgctcgcctgggtcatctctcacctcggccccgccggcgacggcgcccgggacccgtggatcgcgggccacgccgacttctcccgcctcttcctgggcggcgagagcgcgggctccaacatcgcgcaccacatggcgatgcgcgctgccgcggaggggctggcccacggcggcccggatccgggactcgtcatgatccacccctacttcctggggcacggacaaggtgccctccgacgacctcagcccggaggtgcgcgagagcctggggtccctgtggcgcttcatgtcggcctgcccgagcctagacaccacctaggatctccactccccgacggggtccctcccgggagcgagatccaggcgccgtcggcgatcttccgccgtctctgcgtacgtgcggaccgtccggccccagggcgcggaccgtccggccgtcaggcagaagtcccagcagcgcaccaggccgcggaccgtccggccccaggccgcggacagtccgcccttgcgcagagagcaccaccgcgcctcgcaccaggccgcggaccgtccggcccctgcgcgcggaccgtccgcccctgtgtagagggcaccgccacggttcttgttgagtgtttggcgctccgaaaaggagtcaacatacttttggcgactccgctggggacgacatatctaagctcatcaaatcggccctcaatggccggttcaagggatagctttgatatttctccaagcaacatcatagagccgacttgggaaaccttgccggctgacgagcagctccagttcgaggagcacaaggagcggatgatccaggaggcgaaagcaaagttcttggccaacttcaaagtggacaggaacaacaaggtcgtccgacatcgggcaacggatccggcttcgctccaacccacgccagatatccccaat

SEQ ID NO: 42784 - DNA, 231 bp, Zea mays
  Peptide Sequence Number=SeqID_86159
atgagaaaggaggccaataaaagcttcaacgacaagagcttgaacaaaaaaatcgaagatttacaatgtccaactttaccaagacctgatggacctaagtcacaacttgcccgaggcctaccccaagcgaggaacacagtcatgactcgcctaaggccactcctagacaagcagcacatttcctactcgaccgatggcatcttaggcgatgatctggaatatgatatgtga

SEQ ID NO: 42785 - DNA, 348 bp, Zea mays
  Peptide Sequence Number=SeqID_86160
atggcggcgctcgtgaccggcagcgatgatggcgctcgtgaccggcgaaactccgtcattggttgcgcttcttgtgactgtgcttcgcatcactttggtgaaactccgatgatggtgagggagggggaatcgttgggttcactccgtgcgctgcagcacccggtggctagctcagcctgtgctaggaccgagagggcagaggcccagggcgttcccacggccgcaggccagagctcactgtcaaccccaaggagcgttactgttcacagccggcggcgcgtctgcatcgtgccgcgggccgactggctcgccgtggacgaggtcacgggcctgtgcggttacatgtga

SEQ ID NO: 42786 - DNA, 960 bp, Zea mays
  Peptide Sequence Number=SeqID_86161
atggcgatgagctggatccgatcggttgttaggagggccctcatcgctccgaagccgcggggctcccgccagtttactgtcaccgccgccggcggcggcgcgacgcagaccgaaagggtggcggcggagatggtccgctacgccctcggcggcgccgtgcaccggagctcgccagtggaagacgtcaagacgcagtggaaaagctcaaagcaacccaacaagttgccccttctgcagtttttagagactgtagaccgcttattgtttgaacatccaatgcaaatatattataatcctacattgccttatgttttttttggtattggtgttgcagcgtgggaagcactaatgggattacacatggaggcagggcaggagatgtcatacttgatttccccaaatgattcagttgatctgtcaatcaaatatgatagcaaatggtctgatcaggaccatcttaaatttcgggttaatgctgtcagaggacttgttacacttctgaatggagaaacagaatcagctgcccagctgttcgatggttggtgcagagacttttctagaggcgaaaaccaaacaggtgcaaaccacccaaaggtcggcattatattgacctgtgtagctagaatgtacaaactaaaggcaaaatctgaaggttctacttcaattatggtccaggaggggctgtacaggaaggccctagaagtattgaaagcccctgctattaattctgagggtaccagcaaacaggttgactggagagatatcatctccctcgctagaggtgagtacgcggagctgttattaattcagtctaataggaaggcggaaggtgaacggatgaagcagtgggcagaagatgcttggaggaaccgtaggctaacgctagcacaagctctagagttttcagaaccttcaaagccgactgtcgttgttgacacccgaatcggcagggtcgtgtag

SEQ ID NO: 42787 - DNA, 399 bp, Zea mays
  Peptide Sequence Number=SeqID_86162
atggcgcatttcctcagcagcctcatcaatcttcctctgaagattgacgagacggagcatcttttctttcttcttctggatctgttgatgaatggcttcaaggtccctgatttcttggtccaactcctcctcctgagtggctgcaatgcagcccctggccctgatgacttctttggcgaaatggcgaagaagcttcctgtgacagtatattatactggaaagcatgttagtcgtgtttttgagaacctttggaagacgaaggcccctagcaagaaccttttgcgtcgttatgtacttaacttcaactctatccatggataccaagtcccgcaaggacctccacacaaagaatcagagtctcttgcttctctttacaacaaagagaattggagggagtga

SEQ ID NO: 42788 - DNA, 228 bp, Zea mays
  Peptide Sequence Number=SeqID_86163
atggtggggctcgtctcgatggtgggctatgggatccaatcgatgcttaaggagggccacgaccacctttcatggctcaaggaggccatgctcaagaatatcgatgcctaccaagagctctccgtcatcacacgcacatttctaggccccaacggcgtgatcatccaccccgcacggcagcgtacgcaccaagaagagtgtgagaccttgtttggttttggtaattga

SEQ ID NO: 42789 - DNA, 126 bp, Zea mays
  Peptide Sequence Number=SeqID_86164
atggatgttttgatgattaggtaccttggagagtaccagcaaggacttgggaaaggccaagggataagccttcgtggcgaggtcattcgtgtgtcacgggtgataaccaacggagccgtggtgtag

SEQ ID NO: 42790 - DNA, 741 bp, Zea mays
  Peptide Sequence Number=SeqID_86165
atgacgtttgactatatcgataacagaaccctaaaaacgacgagagggaccttgagcggcaaggccgaccgagccgaggaactcctacgcctccgggatacggatacctcactcatcaccttccgcgaaaagaatgaacaacctccacaccagagggcctgcgggataacaaactccaggtggctcgccagcgaccgctccaccggcagcgacaacgacatctgcctcgggcggctaaacagcagcagtgatgacctcagggcagacgctgctgtaaaagggccctcgcccacgtccccacacgaggggcgaggacaagccatcaaagccaaagagtcggaggtccaaccacaggtggcgccgacggtctcgtcgacggagacaacctcctctggctgccaccacctcagcaccgacgacagcggccacctgcccaccgacaccgcaccggcaaatggcagccgccccagcctgcaccggcagatccctactcacgtcctcccagacgggccggcgtcgacctccgtgcagaggcgtcgtgccggagtgaggacaagacaatccaagaacacgaacgccgcccatgcggcgtacgacgtcttgtacggtcccccggtgcgcacggcgcgacagccgcccgtgcgatggacggacagcaatgcccagaccaagcggcaagaggcagcgtcggaggccgcgccagagccagctgagccagcaagccaggcacactgcagctga

SEQ ID NO: 42791 - DNA, 1230 bp, Zea mays
  Peptide Sequence Number=SeqID_86166
atgaagccaaaagggtgcacgaccgtggtgcggtcgcatgcctcctgcgtggcggtccgcccttccgcccgctggtttcggcaaggatgggggaacgcttataaccgtggggcggttacctgcttcgcgcgtggtggtttggcttcttctgtttctgctgttggaggagcgcgaccccgtgggggttggcgctcttcagacatcgctcggcttcatggattttcatcacatagcccggctgcagtcccccgccggcggtcacccaggatgatgaccgtaggcctcgtggtggggagaagcaagccgggctgcgtcctctgccccgccttcagcttcaaggatgttcatcatcctcgctgtggcagagggcgagtcgagccggggttctacctcccgcatgggccggcgagccgcttcttccttcagcattcaggagagaaggcgctcactgaccttgcggagggggcgaacttcgacaacgcgggaccggtcggccgcaagcgtcgtcagctgcagtgtgcctggcttgctggctcagctggctctggcgcggcctccgacgctgcctcttgccgcttggtctgggcattgctgtccgtccatcgcacgggcggctgtcgcgccgtgcgcaccgggggaccgtacaagacgtcgtacgccgcatgggcggcgttcgtgttcttggattgtcttgtcctcactccggcacgacgcctctgcacggaggtcgacgccggcccgtctgggaggacgctggggcggctgccatttgccggtgcggtgtcggtgggcaggtggccgctgtcgtcggtgctgaggtggtggcagccagaggaggttgtctccgtcgacgagaccgtcggcgccacctgtggttggacctccgactctttggctttgatggcttgtcctcgcccctcgtgtggggacgtgggcgagggcccttttacagcagcgtctgccctgaggtcatcactgctgctgtttagccgcccgaggcagatgtcgttgtcgctgccggtggagcggtcgctggcgagccacctggagtttgttatcccgcaggccctctgccatgaccttcggccgctctgcgatgagctgaagccggaggcagcggtgtcggcgtggacagaggcggagtcggctcgaaaagaggcttcgtcggcccgcgagcatgtggcttcccaggccgaggaggtgcagcagcggcggctggagcttggctag

SEQ ID NO: 42792 - DNA, 642 bp, Zea mays
  Peptide Sequence Number=SeqID_86167
atgcccggagctaaggtggcccaagctcctggcggccaggccaggcgggtgcgatacagtggcggcagcggcgataatgccactccagtggcctctgggcggctgtccaagctgttttggccggctcggatgcacgtggctgacgttattgggcgagttctggaacgggggcagtcgttggattcggtggagctggagctggagaggctccatgtcgacctggacccctttgttgtcaaccgggtgctccggagcatctcggactcggagatggcagtgcggttctactggtgggcagagtccaggcctgggtttgatcacacccagttcgcgatagcgtatgttgtcagcctgctctttgtagacagcaactttttcctgctgtcggagttcctcgagagagtgaggagtcagggggttgcattgcatcgctctctctatcggatcctcttgtcgggctatgtaagggcaggcaagttcgattctgtcatccatacatttgatgagatggttacatctggatgccgtgagtttggtgtggactacaacaggttcattggtgttctagttaagaattgctgctttgatttggtcgagaagtattatagtgtggcacttgataaaggttgcatgatgccttga

SEQ ID NO: 42793 - DNA, 1131 bp, Zea mays
  Peptide Sequence Number=SeqID_86168
atgctgctgagtcagagctctatctgtagagaagaactcaactgtgataaaaatcatccgagcggatgtcctgcccagatttgccgagtttctttcaagacatgggcttccccagctccaattaacctcgtatacttttcgcagatggaggcagcctgggttcttaccaacatagctgcatctgattatacactgctggttgcagaatgcggtgctgttccaagagaaggcatgaagattccagttctgagaactgctatgtgggcactgtcaaatctttgttttggaaaattgccagccgaagtgcaagtgaaaccaatactagaaattatcagccagcttattcactctgctgacgagaagatactggcagatgcatgctggactgtttactacatatgtggcgataaaggtgatgctgtccaagatgtattagatgctggggtctgccctcaacttgtaaatcttttgatgcatgcatcagctaatgttcttctccctgtcattatggcactcgcaagaatttctgcgggagatgataagcaagttgaggtcttaatagagaatgacattctcaattgcttaggacagttggtagcacgaaattacccaaagaacatcaagaaacaagcgtgtctaattgtttctaatatcgctgctggtagcaaggatcagattcaggctgtaatcgatgcagacattataacctctctcattgtcttgctaagaacgtcagagccggatgttaaaaaggaggctgcttgggctatatcaactgctgcgtccggtggttcaagtgatcaaattcagtatttggtcagccggggatgtttagagcccctctgcagcgtcctcacccacaacgatcctgaccttgtgaggccggggaagaaagggcgaggaatcagggacgaaacccatacgccgagttttattcttagagtgcggaggtctggagaaactggaggatctgcaggacgtggacagcgacaggatctacgagctagccatgaagctgctacagagctactgggaggaggaagagaggaaagcctggttccttttcttagtggcactggcatattgtatgatacttactatgatcaggtcgatgtagagaggaacgtgtga

SEQ ID NO: 42794 - DNA, 681 bp, Zea mays
  Peptide Sequence Number=SeqID_86169
atgcgattgcaaataccagaatgcgtgaacagtaacggaatactgttcactatttataggcacaggacgcagcctttcgtggagtacgagcgcatggtgtacctggacgcggacatgcaggtctacgagaacatcgaccacctgttcgacctcgacaagggcaagttccacgccgtgatggactgcttctgcgagaagacgtggagccacacgccgcagtacaagatcggctactgccagcagagcccggaccgggtggcgtggccggagcaggagctggatctgccgccgcagccgccgccgctctacttcaacgccggcatgttcgtgcacgagcccagcctgcgcaccgcgagggccctcctggacgcgctggcggcgacgccgccgacgccgttcgcggagcaggacttcctcaacctcttcttccgcgacgcgtacgcgccgctcccgccgacctacaacctggtgctcgccatgctgtggaggcacccggacaaggtggctctccacgaggtcaaggtggtgcactactgcgcggccggggccaagccgtggcggtacacggggaaggagcccaacatggagcgggaggacgtcagggcgctcgtggccaagtggtgggacatctttgacgacgagagcctggactacgacaagcagcagggtgcggcgccatga

SEQ ID NO: 42795 - DNA, 777 bp, Zea mays
  Peptide Sequence Number=SeqID_86170
atggagaatggaagtggtgcggttgtaccttctaattcttcagataggtccgacaggtctgataaacctttggaccaaaaggcatatgtgcagcagctggagagcagtaagctgaaacttgcacaactggaacaggaactccagaaagctcgccagcagggaatcttcatttctagctctggagaccaaacccatgccatgagtggaaatggagctttgacttttgacatagaatatgctagatggctagaggaccaaaataagcagataaatgagttgaggactgcagtgaatgctcatgcaagtgatagtgatctacgacttattgtagatggcataatggcacactatgatgaaatattcaaggtcaaaggtgttgctgcaaaggctgatgtgtttcatatactttcaggcatgtggaagacacctgctgaaaggtgcttcctatggcttgggggttttcgtccatctgagcttttaaagggcatggaagcactgcagcaatctttggcagagactttggctggatctctcggtccagcaggttcttcaggaaatgtggcaaactacatgggtcagatggccatggccatgggcaaactcgggacgctagagaattttcttcgccaagccgacaacctgcgacagcagacgttgcatcaaatgcaacgtatcctaacgatccgacaggcttctcgtgctcttcttgcaatccacgactatttttcacgattgcgcgctttaagttctctgtggcttgctaggccacgtgaataa

SEQ ID NO: 42796 - DNA, 111 bp, Zea mays
  Peptide Sequence Number=SeqID_86171
atggaccacaaatgcaatatattcctgaacccgctttacctgcccggctctcgcatcacatcatcccattttgataccaaggtcagggccctcgcaaggaagtacctgtaa

SEQ ID NO: 42797 - DNA, 225 bp, Zea mays
  Peptide Sequence Number=SeqID_86172
atgggcaggccaaagggcgccacgtggcagggaaagacaccacaccccagtaaggccggacccccacagaaggacatcgaacccctatatacgagtccggagccttcggcagcacacgccagcgcaggcgtcccggactccgtcgagggcagcgcctacggtgctgactgcggccaaagaattgatgtgccacccctagctccacggcatcactgggggccatga

SEQ ID NO: 42798 - DNA, 354 bp, Zea mays
  Peptide Sequence Number=SeqID_86173
atggcatgcatgggccatgctgctgatgcatacgtatgcattcaacgccgcaagaccgcaggtacggcgtacgtcaccttcctggcgggcgacggcgactactggaagggcgtggtggggctggccaagggcctgcgccgcgtgcgcgccgcctacccgctggtggtcgccgtgctccccgacgtgcccgaggagcaccgccgcagtctccgcgaccagggctgcgtcgtccgcgaggtccagcccgtgtacccgccccagagccagacgcagttcgccatggcctactacgtcatcaactactccaagctccggatatgggaggtgttggggacttgttctcaaatgctatga

SEQ ID NO: 42799 - DNA, 168 bp, Zea mays
  Peptide Sequence Number=SeqID_86174
atgtctggagggatcgcgcgcggccgcctcgccgaggagcgcaaggcctggcgcaagaatcacccccacggtttcgtggcgaggccggagtcgctgaccgacgggtccgtgaacctcatggtctggaactgtaccatccccggcaagcacggggaggtagaaaaataa

SEQ ID NO: 42800 - DNA, 294 bp, Zea mays
  Peptide Sequence Number=SeqID_86175
atggaggcatctgttatggctcctatattctcgcttagggatctaggtacgggcgtcgtcccacggctttctcctgagggcagagggtataagtttggtgaggaccctagggaaaagccacgtagtgataccctgccagaccacctaggaagtggtcaatggggagtagcgctcatcgggcagaaagggaatcacggctcatgggtaaactgtgcaacctctccagagtgtaatgaaactgatatatcagccgtgctcacggttaagagcggcattaggatcctctttgattag

SEQ ID NO: 42801 - DNA, 312 bp, Zea mays
  Peptide Sequence Number=SeqID_86176
atgacgatgaccaagcccatgctctatgacattgttggcctcatctctctttgcctcatgctaggtgacatctacgttgttgaaacctccctgatctctatgctcttcgttgtggtgctctcttgcatctcgcttagtggtagtagggacaaagcacttgagctcaccaagtggtgtgcgcttttcatcgtcgcgccatacgtgagatcattgtgctctatgggttcaacacctttgcgaatatgccaagtgaagcacgaggagtatagcatagtgagaccaatatcggcggcgatcgcaatgggccactag

SEQ ID NO: 42802 - DNA, 240 bp, Zea mays
  Peptide Sequence Number=SeqID_86177
atggtcgatgatcccaaagggctaccaggagttgcaaatcaagcaaacatgagaaggaacgattgtgcaccaaggcaagacaccaaggatgtcttgaataagtttaatattggtgaggtcgagcctctttttacgccaatgtcaatgatgatggacttggatggtaacgaggatggttattctgatggtgactttgtcgagtgtcacttggatcataagtctgctttgagtatctgttag

SEQ ID NO: 42803 - DNA, 800 bp, Zea mays
  Peptide Sequence Number=SeqID_86178
cggcgtcatctttctctccctgcaataccgaacagcagcgcctccgtggagggagcgaccacaccgatgggttgcacgggcaaagcacaggagtgaggccgtccccagccacggcgcgatcggcgcgtcctcagccacagcgcggctgcggcctcgacgtgggcgtgcccaaggccaggagcgtccccggcggctcaagcgtggcccgacttggatattgctcagacaagtgcgcaacggccatggcttggtgcttcctgtacttgggggacgcatgtttttgcatacccatggcgacccatgtcggcaagggtagcagcgtgcatgccgaatggctgttcgcgacgaaaagggaggcaccggtcgggcgcggcggagtgggcggcgatggtgctgttcatggtgcttgcggtcgtggtgctgctgggcgccgtggccgtccttgtggtggtgctgatgctgcagccccgcgtgtcgtacgtggcggtgcgggcgggctggcggtgctctgcgcctacccgttccgcgtgcccgccaggggcgtcctcccgctggcgtacgtggcgcgcgcgcagggcgccccgctgggcgacgccggcagcgccgccatggaggtcgcgctccgcgacggcgtggtgccgttccgggtggatggggaggcccggacgcgatggaaggtcgcggggatcatcggcgttgaccagtggacgcgcctggcgtgccagctccgcttcttctggcccaacggcaccgtgctccccttcagatgcatctccaagtccaagttcttgttcttctga

SEQ ID NO: 42804 - DNA, 174 bp, Zea mays
  Peptide Sequence Number=SeqID_86179
atgggagacctcgtctcaggtcgcgtgaggggatatgtccactgccgggttcactcaggatttaatgacattatgctaaaagaaactaagtcaagaagtaacttagggtttcttagtcatgcggggcttccagtgggttatgcttattactttttaggcttaggttttcattga

SEQ ID NO: 42805 - DNA, 216 bp, Zea mays
  Peptide Sequence Number=SeqID_86180
atggcgcgggcgtggtcacgggcggccgcgggcgcgcgggggttcgcgcacgggcgtgctctgagcgtgcccctggatgtcagctcgcgtcgaacacgtggaagctcgcttctgccatggttcaacggcggatttgagcaccatagcgttaggaagtatattacaacttttatatttggcccaagccatgatcacaagatttacatgaccttttga

SEQ ID NO: 42806 - DNA, 885 bp, Zea mays
  Peptide Sequence Number=SeqID_86181
atggcggtggggaagggaggagggctgctggtcctcgtcgttgtaggtctgctcctgcacggcacccgtgtcgccgacgcgcagtctctccgggttgggtactacagccagacgtgcggcagcgccgagtccatcgtcgccgacgaggtccagaaggcgtcgtacagggataggggcgtcctggccagcctcatccggctgcacttccacgactgcttcgtcaatggctgcgacgggtcggtgctgttggaggccagtgaccggcaggcggagaagaacgccaagcccaacctgagcctgcgagggttcgacgtcatcgagaggatcaagcagaggctggaggccgcgtgcgcgctgacggtctcgtgcgcggacattgtggccttcgccgccagggacagcgttaagctggacggcacggtgtcgcgggcgagcatgaccggcgacctcccgcctccgaaccagcgcaacgtggacctgctcgcgcagtacttctaccgcaagggcctgacgctggacgaaatggtcctcctctcagccgcgcacacggtgggcatcgcgcactgcagctcgttcgactaccggctgacgagcgaccaggacaagggcatggacccggccttccgcaacagcctacggagccagtgccagtacaaccccagcaactacgtgcccttggacgccggcagccagtacgcgttcgacaccggctacttctccaacgtgctggccaaccgcaccgtgctcgactccgacgccgccctcgcctcgccgcgcacagcagacaaggtcaagcagtggaagaacaacccggactggttcaagaacagcttcgcggccgccatggtcaagatgggcagcatccgcggcagctaccccggcaag

SEQ ID NO: 42807 - DNA, 129 bp, Zea mays
  Peptide Sequence Number=SeqID_86182
atggcaaccactacgcccgagaagcgcggcggaagttggatccgcccgagatgtccgacggaggaagaggaacggcctgacagtgcggtcccaccagcagtgagtgtgaggcacgcagggggagaatag

SEQ ID NO: 42808 - DNA, 432 bp, Zea mays
  Peptide Sequence Number=SeqID_86183
atggctctaacagacaaaaacaatatatttacgactttgatgacatttttagagaagagaagaagcctccagaaaacaattgaccgctacaggacatacacaagggaaaatgtcaataacaagactgttcaacaagatatacagcaagtcaaagcagatgccgtaagcttggcaagtagactcgaagccctagaaaagaccaaacgagcagaacggccatcaattcaccgccttgacatgagttgcagaatgtttctgggtgaaaatttagaagaatgctccattgaagaactgcataatctggaggttaaactggcgaagagccttcacgtcatcagagggaagaagacacaactgctggagcagcagatatccaagctgaaggagaaggagaggaccctgctccaagacaacaaagagttgcgggataag

SEQ ID NO: 42809 - DNA, 148 bp, Zea mays
  Peptide Sequence Number=SeqID_86184
atgtccatgaatggtgttgagtttgtgatccaaattctgaagaaggcggccaagttggcgagcgaagcggaggcccgtcgccgggaggcttgggccagagcgcagcgaggccaactggccttcccgcggcccagggacgcctgggggg

SEQ ID NO: 42810 - DNA, 843 bp, Zea mays
  Peptide Sequence Number=SeqID_86185
atggtgaaattaccatcgggaatttcccagaatccagagggtgacgtgtcggacggggccgggtggttgttcctgtacatgaggttatctacctgctgcatctgcttcactggtcgacagccactgccgctaacctttgtgtcctggcgatcatccgtgaaggagaagcctgtaatgtcaaacattgggaaatcgactaatattttatggcacaattgcttgattggacaatctgatagacagaaattgctgggacaaaaaggctgtgtcgtatggataacaggactcagtggttcaggcagggcgggttgccaggccagggcagcatcacgtgccagggccaggcagtacccgtgcgcattggagccagtgctgtttgcagggaccagaggccacctcacgtatgtacttgatggtgacaacctcagacatggcctaaatagagatttaagctttaaggcagaagaccgtgcagaaaatatacgaagagttggtgaagtggcaaagcttttcgctgatgctggtgtcatatgcattgctagcttgatatctccatacaggagagatcgtgatgcatgccgtgctctacttccacattctaactttattgaagtatttattgatttgcccctaaaaatttgtgaagctcgtgatcctaaaggcctatacaagcttgcacgtacaggaaagattaaaggtttcactggaattgatgatccatacgaaccaccaattaatggtgagatagtaattaagatgaaagatggggaatgcccttcacccaaagcaatggccaagcaagttctatgctaccttgaagagaacggatatttgcaagcttag

SEQ ID NO: 42811 - DNA, 1431 bp, Zea mays
  Peptide Sequence Number=SeqID_86186
atgaccaaagccaaactggccttctggctcggatggattgctctcctgcaaggctgcatggtgaaatcatctctcccgtacgagtacgactactctgcaagcatcgaggcaagtccctgtgttccctacatgactgcgtgtgccatgcacgacaactgtacgtgcccgtcgacgtcgaggtgcttgccggagccgctggagccgcagtacggcgggggcgtcctccgcaacgccgacttcagcgcgggcctgcggggctggtccgccttcggctacggcagcatcgccgagagcacgtcggcggcgggcaacgggttcgccgtcgcgctcaaccggacgcggccgtaccagagcgtcagccagaaggtgtacctgcaggccgacacgcactacaccctctccgcgtggttgcaggtcagcgacggaggcgccgacgtgcgggccgtcgtcaagaccgtcggtgacttcgtccacgccggcggcggcgtcgccaaggccgggtgctggtccatgctcaagggcggcctcaccgccgcgtcttcgggtcctgccgagctctacttcgaggtaggaacaaggtcgtccgttgattgcttttgtttcacggatgtgagagagcgagtgagaccgaggcagccaatcgagatgatatatgatacgatcgtgcggccgtactacgtgcagagcaacgctacggtggacctgtgggtggacagcgtctcgctcaagcccttctccaaggacgagtggacggcgcaccgcgccgagtccgtgtccgcggcgcgcaagaaggcggtgaggctccaggcgacggactccgcggggaatccgctggagggcgcggcggtgtccctggacgcggtccggaccaacttcccgctgggcgcggccgtgagccggtacatcctcaccaactcggcgtaccagacgtggttcgcgtcccggttcgcggtggccaccttcgagaacgagatgaagtggtacagcacggagcctgcgccgggccaagaggactacacggtcccggacgccatgatggcgttcgccaagtccaacggcatcgccgtgcgcggccacaacgtgttctgggaccagcccagccagcagccccggtgggtgcagtcgctgccgtacccgcagctgctggcggcggcgtcgcgccgcatccgctccgtagtgtcgcgctacgccggccaggtcatcggctgggacgtcgtcaacgagaacctgcacttcaacttctacgagggccgcttcggctgggacggcgtccaccgccttctacgccgccgcgcgcctgctggacgccgggctcccgcgctcatgttcatgaacgagttcaacaccgtgggagcagccgggcgacatggccgcgctgcccggcgaggaataacttcaaacatggagctcgacttttgtgttattgggtag

SEQ ID NO: 42812 - DNA, 1002 bp, Zea mays
  Peptide Sequence Number=SeqID_86187
atggctgaaaggtaccaactcccgcggagttgcgttcctccaacgacaaggcggaaggattgcgggtgtcccccatccgggggctcggaaggtggaaagacacgatgcataagggagcgcgaagacatggtcgcctttcaagggggtcaccctccttttaaaggcgactctccctacctgcgtccccagccgtcgtgggttgagtcttctccaacacgctccaaggtcctccccctacggcgcgggggctgggtcccacacgtcatgcaagctagcccagggcggaagaatccaaaccgccgcgcgcggtgcatgcaaccgtccagcggttacaagcgcccctccactttcgcccagaccagcggacgaaagggcgggcagccgtgcaggcggcatgcaaccacgccaagtgggcgcacctctccgacttccaacacgcccagcatggaggcccacgcccacgcgtcatgcaaccggcgcgccggtcgctacgtgcaagcaactgcaccgccactcgcaccactaccgcgcctcctcgactgcggaaccagtaccgcgactcgaggcgacccagcgcatgacacagcagcgccatcctggcgcgacggccaatacggccaaaaatgggccggcagtaatggcggtggcaggcgggcaggagcagcggtcacgtcgagaagcaagcgacgcttcgccttcgccataatgaccgcgtcaaaaaagggaccgggaaagggggataccccgaaaaggatccttctccgtgaaggaaccaggctccgagcctccctactgatcagaggttcgaaggctggcccctcagaggggtttaacagccgcctcagagcgcgtgggctccacacccactactggtcagaggttcgaaggccgacccctcggaagggttcaacgaccgcctcaggccactcgggctccgcgcccactactgatcaggggttcgaaggctggccctcgaagggttcacagccgcctcagacatag

SEQ ID NO: 42813 - DNA, 1041 bp, Zea mays
  Peptide Sequence Number=SeqID_86188
atgggcgcggagatcctgcggagtccggcgtaccagcggtggttcgcgtcgcggttcacggtggccaccttcgagaacgagatgaagtggtccagcacggagcgcttgcgggggcgcgaggactactcggttcccgacgcgatgcttaggttcgccaggagccacggcatcgccgtgcgcgggcacaacgtgttctgggaccagccgggccagcagccggcgtgggtgcggtcgctgccgtaccggcagctcctgcaggcgacggcgcggcggatcaggtcggtcatgtcgcggtacgccgggcaggtggtcgcgtgggacgtggtgaatgagaacctccacttccggttcttcgaggacaggttcgggcgggacgcgtcggcggagctgtaccgcaaagcgcaccagatggacgggcaggcgctcgtgtccatgaacgagttcaacacgctggagtggcccggcgaccccaaagcctggccgagcaagtacctgggcaagctgttccagatcaaggagttcccgggcaacaccaacgacgccaggatggccatcggcctccagggccacttctccgtgcccagcatcccctacatccgcgccgcgctcgacaccttgtccagggccaacgcgcccatctggctcaccgagattgacgtcgcgccggggcccaaccaggcgtaccacctcgagcagatactcagggaggtgtacgcgcacccggccgtgcacggcatcatcctctggacggcgcgccaccggcagggatgctacgtcatgtgcctcaccgacaacaacttccagaacctccccaccggcgacgtcgtcgacaggctcatcgcggagtggaagacgcattcgcacgctggcgtggcggacgccgacggctactacgaggccgagctgtttccacggggactacaaggtcaccgtcagccacccggcggccaactccaccgtggtgcagagcctgagcgtcgacaggggagaccgatcccgataccgagttcaccatacacgtctaactgccttagctcctag

SEQ ID NO: 42814 - DNA, 231 bp, Zea mays
  Peptide Sequence Number=SeqID_86189
atggccggcgacgggcaactacttccgccactgcagctcgggctgaatgatttcggcaacctcactgttgtttttgtccacttgaagaagaaatcccgcttgggtgatgagcttttggcttttcaacatttcgggagaaaaaagagctaccgaaagcttcctaaacatgaccttatcttgtttttgggatgtcacaattatgcaagcggctattatccggatggtagttag

SEQ ID NO: 42815 - DNA, 1752 bp, Zea mays
  Peptide Sequence Number=SeqID_86190
atgcttctcagaaatttgaaccaatcagaaggtctatgcaatggtacaagattgctcataacttccttgtgtgacaaagtgattgaaggtcaaattatgacaggtattcacaggtcaaaaaatgtgcttattccccgtatatcattaacactgaagaatacaaaatggccattcgttcttcaaagacgccaataccctataaagatataccaagtaacaatgttattcacacctgtggcagaattacatcctcaatctaccaatgttgtcataagagtgcgagtgatcagaaaatgggaattccgaggcgcaacaaatgatggtcctctgcaacacattaatttggttctagctgacgagcagggtacgtccatccacgctgagattgcagccgccctggcagttgacaaaggctcaataatagaaattgaaaaagtatatgagctcaaacgctttcgtgtcacgccttccagaaactattttaaacctgttgacaacaacttcatgatacaattcactctgtacactcaagccaaagttgtcaaagatccaccacaagtgtttcccagatatatctacaagctcacatgctttgaaaatatagaagatagcattgacaatagaacttacttgattgatgtccttggaatgttgacacaaattaatcctccacatccagttggctataacaactcaaccatcatcagagacatcttcatcaaaaatacaagtgacatgtctctgaaaattactctctggggaaatcaagcatcaagcttttctatcagtgatgtttacaatcaaagcaacaaacagcctattgtcatactgctcgttggatttcttgctaaacgattcaaaggtcaaccatacctaagcagtactgcagcaagttcatggtacttcaatcctgtaattcctgaggcacagacctactacaacaggttgcaaaacaatgacctccagctaatacaacccacagcagccgaagaagaaattctgctttctcaaccaccaaatttggaacaaaagactgttgaagagctgctcaacatagatccagacatgtttcccccagaaggctacagatgcactgttactatctcacgcattgtgcaaaatagcaaatggtggtacccatcttgctcaaggtgccacaaatcttcatctcaaacttcaactggatatcactgcacatcatgtggctgcacagatattaactttagatacaagctcagcttcattgctactgatgggacatgtgaggcagagttcttttgttttgatagcatagccagaaaaatagtaggaaaaccttgtgacaaccttgttacagcagttgcaacttctcagggtcccccagcagccctagccgctattgtgtgtctgaaatttacccttgcagttaccatcaatatgtcagcctactcagtcacaaatagagtattctctattctgtctattttaacaaaccatggaagacaggccttaataccatctaacatgcctagccatcctcagcaagagttggatacacaggatgaaatacctagccttacaaccacacaagactctccagcaacatcaatggcgaaactatctacctgtagcaacgaaagaaacgagggtgatgcccagcgcataagtgaactcagcaatgaagagttatcgtcgccaccgaaaagaatgaaacatggccacagtagcaaaggaataccagatcttacagaccccaaagagaagagctcctag

SEQ ID NO: 42816 - DNA, 330 bp, Zea mays
  Peptide Sequence Number=SeqID_86191
atgcagaaacttatatcatatattgacacgatatgtagggtactcagcatgcagcaagacgtgctgctgcctttgttcggggtgatgatgtcgttcataagctatttactgagctggcctttcgctacaggttcgtggatagggagaatgagcttcgagaggccaaacctgcaacgccgccgcctcctcaacgagtccctcttgatccatgggccaagtcacgtgctagccaacagtgggcaggacctaaaatcaccaagagctcggaaacggacggcttatgagctagtatacctatgttccatagaaagtttcagttattttgcttaa

SEQ ID NO: 42817 - DNA, 519 bp, Zea mays
  Peptide Sequence Number=SeqID_86192
atgaatcagaaatgtgggtatgcacagaatgcgaagggggaggaggctttgtatgcttacaggatgatgagagcaacgggcctcatgccagataacaccactgttcttggcttgctttttggttgcaaacatgctggtctggttgatgaaggaaatgcactattcaagaccgcagggatggagcaacctggcatactgaaagctgaacattatgcttgtgtggttgatctatcactatcccatgccaagtggtttgacgattgcaaggggtttcttgaggagctcctgctggaaagctttggtagggggctgagggagattaaggtgaaagggctgaagaggatcaccggctgcagttggattgaggtgcaggacaaggaggaacacaccagaccagactacacttcagtgttgcatgctggaagaatgaacaatcagatttcaggcttcatcaatgcattcgcggtagcagcaataaaagtccctccctcaatcccaacagcaaaggaaagtgcatga

SEQ ID NO: 42818 - DNA, 204 bp, Zea mays
  Peptide Sequence Number=SeqID_86193
atgtcgactgagaaacgccacctagatcagatcgaactcctcagtgctaggcggctcctcctgaaccacctgatcttctcctgtggggggtgtgaggacagcaagggtggagctcacacattgatcatagctcaacaagttgtggggggaaccagtggacataaactcacaaaggggttaaagctgagcattgcttttaagtag

SEQ ID NO: 42819 - DNA, 324 bp, Zea mays
  Peptide Sequence Number=SeqID_86194
atgggcaagaacaacaagcgcaagcgtgagccgactcctccgtcggaggagtttggtgactcggaatactcagaggaggagttctcctctgagtccgaggggctcgagggctcagatgagtctgagttctcctcggacgaggaggactcggacggcggcgaggacgaggatgacgacgacgacgacggcgacgacgacgacggtggcgacggcgacggtgatggcggcaacggcggcggaggcagcggcggcaagggcggcagcagcgtgggcagcaccggaggcggcggcggcaagggcagcggcggcagggccagtggctaa

SEQ ID NO: 42820 - DNA, 336 bp, Zea mays
  Peptide Sequence Number=SeqID_86195
atggagggtactttcaatgcaataaatgagcttcccacaaaaattacccaaacagcccgccatcagtcagatttaccctctgaaaatgtgggcatccaaatgttctgttttctgacatcatgcataatatttgaggaaacgccagtctatcctgatgggcgggtttgtatctctattcttcatccacctggtgaagatccaaacggttatgagctcgcaagtgagcgatggacacctgtgcacacagtagaaagcatagttctgagcattatatcaatgctctctagtccaaatgatgagtctccagcaaacattgaggcagctatagcatgctag

SEQ ID NO: 42821 - DNA, 186 bp, Zea mays
  Peptide Sequence Number=SeqID_86196
atgggtaaattccgcaagcttggccgcgattactcccaacgcatctgcatgctcaggacgatggtgtcgcagctggtgaagcacgagcgcatcgagaccaccgttgccaaggcgaaggaggttcggcggaaggcggatcagatggtgcagctagggaaggagtctgatccctttatttctcagtga

SEQ ID NO: 42822 - DNA, 1053 bp, Zea mays
  Peptide Sequence Number=SeqID_86197
atggcggtggtggtggcgggcagcagggcgagagcggagcaggcgaggcggcagtggcgggagcaggagcccagaagccccgagatggccgcgccaccgccaaggtcgaccatgccgcggccggcgagggcggcggcggtcgtctactacctggccaggaacgggcacctcgagcacccgcacttcatggaggtcgcgctttcctgccccgacggcctccacctccgagatgtgatggatcggctcgacgcgctgagaggcaaagggatggcgcgcatgtactcgtgggcgtccaagaggagctaccggaacggcttcgtgtggcacgacctggcggaggacgattacatccacccggtggtcgcccgggagtacgtgctcaagggcaccgagcgcctgcacccggcgctgctcgacgcggcggccgcgtcctcctcgtcctccgccggctcgcaggagacgcccaccacgtcgtcctccgccaggtgggaggcgcaccggatgacgatgaagggcgcgtgcggcggggctgaccttggcgagtacgtggcggcgtacatgggcgaggagcgcggcgcggacgccgcgacgcagaccgaggacgacggccgcggccgccagaggcgcgtccagtcccccgccgcgcaggaggagctgagcagggcggagacgtcgccgccgacggcgtcgacgagccccgaggcgctggccaaggcggacgggcgcgccgtgctggagggcgccgtcagcggaagcggccgggccagggcgtcctccgtgctgatgcagctcatctcgtgcgggtccgtatccgtgcgggacgcgcgcgcctccccggtgatgccgcgcgcgcaccaccaccaccgcccaccccggccgccggccgtggaggcaccgtcgtaccgccgcgccaagctcgtggtggaggacaaggagtacttcagcgggagcatcgtggagaccgcgacgaagcgctcgccggccgacggtgtgacgtcccgggacgacctggccgttctccggcggtcggcgtcgtacaacgcggaaaggtaa

SEQ ID NO: 42823 - DNA, 837 bp, Zea mays
  Peptide Sequence Number=SeqID_86198
atgcgcgcgcggcgctgcgggtggcgaccaagtgtggtggtatgcacgacgagtgcgaccgcgtcacgtttcttcgtgtccaagcctctcgtcacctccatccaagcagagctcagctcagctgatggcctggccgaccggttcgcagacgtgaacgcctcttccattcccatcacagttgagatacgcctgccccagtcagcgcactgcgcacacacacaaactcccacccacaggccacaaccacaagcaagcgcgctcggcccggtttatactattatatttgaacacgtacgtgcgcacacgactcgggagagagcaaggagatggagggcctccgtgcgcactccgaggcccgcgctgctcacgctgtcgtcgacgacgacgggcggcaccggcaccggcaccggcaccggcacggccgcggcggcggagggcgcgttcgagtgcaagacgtgcagcaagcggttcccgtcgttccaggcgctgggcgggcaccgcaccagccacacgcggctgcaggcgcggacgctcgtcggcgacccggccgagcggtacgacgacaggccggcggcgcgggtgcacgagtgcgccgtctgcggcctcgagttctccatgggccaggcgctcggcggccacatgcgccgccacaggggcgagggcccgccgccaccggccgcgcacgacgacgacggcgacggccccgcccagccggaccgggacatgcccgacctcaacctgccgccgttggacgacgacgatggcagccaagcaggttcacggcagtcgggcggtggtcgcggctccgggcctcagctgctcaacctgctcgtatag

SEQ ID NO: 42824 - DNA, 615 bp, Zea mays
  Peptide Sequence Number=SeqID_86199
atggcagcgagcaacatcgggatgatggacggagcctacttcgtcgggcgcaacgagatcctcgcgtggatcaacactacgctgcagctcggcctctccaaggtggaggaggcggcgtcaggcgcggttgcgtgccaactgatggacgcggcgcatcccggcgccgtgccgatgcacaaggtcaacttcgacgccaagacggagtacgacatgatccagaactacaaggtcctgcaggatgtgttcaacaagctcaagatcactaagataactgagctgaagctccttgtggatagcctggagaaggagagagatttctacttctccaagctgcgggacattgagatcttgtgccaaaaccctgaggttgagcacgtgccggtccatgctatccagaacatactctacacatcagaggaggaccctcagcagcaggctccagccctgagccccatcatggaggcgtccgaggagaggccgaagcaagaggcggcgcacaagagaaagagcatctcggacctggacgagtttggtatgtcgtccagctcaaggcagaggctctccgacatctcagacgtgcagctgtgtggatccccgctgacgagtttcagctga

SEQ ID NO: 42825 - DNA, 474 bp, Zea mays
  Peptide Sequence Number=SeqID_86200
atggaggaggaatgcgatgtgacgagtgagaatggtgataagtctatcagaatcctatgtgcttctgagctcattggttcagttattgggaaaagtggggctaatgttaggcgggtagagcagcagactggtgttcgcattaaagttcaagagattgacaaagatgcttctggagaaagactgatcactgtttcatctaacgagataccaactgaaccaatatccccaacaattgaggcactcattttgctccatgataaagttgcagggcctccagctattgcaagaggagccctcacagagattgcttcaaggcttagaactaggactttgagagatacaagtactgccaatagtcctccaccttttgccccttccgatgatcctcctggaattctgaacacagtgtatatgaatattctgctcgcctctcctctcctaaaggccattttaaaggacgcgactgcagtatag

SEQ ID NO: 42826 - DNA, 87 bp, Zea mays
  Peptide Sequence Number=SeqID_86201
atgaagagcctacaaggagctcaagatcttgtaaaaggttctggtggtgcagccgaaatagcatgttttttaagtgtttgccgttag

SEQ ID NO: 42827 - DNA, 202 bp, Zea mays
  Peptide Sequence Number=SeqID_86202
atggcgaccagcagatgcgtgaagcccccgagtgccttctgcatggggaccgacgaggtccagaccccacacggcaaacgaccaggtgatgggtattgtttgcagggtctgagcgggcaggtttggcgtaaccccgttctgctctctctcgacgcgcagggcctcgccctcggcgcccgagggtacctcgggctgggccgag

SEQ ID NO: 42828 - DNA, 408 bp, Zea mays
  Peptide Sequence Number=SeqID_86203
atggcgcaccggacagtccggtgcacaccggacatgtccggtgcccctgccacgtcatcagtgccgttggaatctgaccgttggagttctgacttgtgggccacccttgatgtccggtggcgcaccggacagctcctgttcattgtccggtgcgccggtatgggcaaacctgacgtctgcgcgcgctgcggcgcatttaatgcctctgcagcgcgagagcccctggaaattcccgaaggtggcgagttcgagctggagtcccctggtgcaccggacactgtccggtggcacaccggacagtccggtgcgcccagaccagagggcctacggttggctctttgcccttttgttgaacccaacacttggtcattttattggctatgttgtgaacctttgacacctgtataa

SEQ ID NO: 42829 - DNA, 666 bp, Zea mays
  Peptide Sequence Number=SeqID_86204
tatagatggcttcctacaaactccactagttcaaacctgaagaccttcgaggaaaaattcctcacccaacagcctcagagtgcaggttctgttcaacttcattggtcacaatggccttctcaaaactcagcacattctagatggttttctactagcaaagggcttctaggagcaggacccagtggcataatggctgctgatgctattgtaacagaatctggagctttacatgttgctggggtaccccttgttaatccatccactgtagttgtttgggaagtgatgccaggtcttggaaatggtattcaggcaactgcaaagataaatgcagcaagttctgttcctccatctctgaatcccccttcatggccgggttttgctccactagcagcctacctattttctttgcaagattatcttgtttctgagggtgcacagacaaaaaagctgacagacaataatgagactactgaggctgcatcaattcattgttgtccagtttctaatttttcagcttatgtcagtccagaagcagctgcacagtcagctactactaccacctgggggtctggggtcacctcagttgcttttgatccgactcgtggaggatcggtcattacagttgtaatagttgaaggtgagagtacagctccatttaggagatga

SEQ ID NO: 42830 - DNA, 237 bp, Zea mays
  Peptide Sequence Number=SeqID_86205
atgaagcttacccgatattttctgttgttggaggttcttgccttcaatggcacaccagttacaaacttgaagcacctagcgaccatggtagaagagtgcaacgaggcattcttgaagtttgatctggaccacgatcaggtggttgtcctggagacgaaaactgcaaaggctgccactcaagatattgtgacaacacattgtataccttcggctgtctcagaagacctgaggagctga

SEQ ID NO: 42831 - DNA, 216 bp, Zea mays
  Peptide Sequence Number=SeqID_86206
atgcagttcaaaagaggactcgttctgaagctaagaggactaggatcgaggtacaagccgctctctgaggattcagggaatttagagaacggcttaaacagttacagacatgtggctctgggccacacgatccgcgacctaggcgcaggagtggctccttccctacacgcttccagacggtccatgcctggggctagactgtccgcgatggcgtag

SEQ ID NO: 42832 - DNA, 444 bp, Zea mays
  Peptide Sequence Number=SeqID_86207
atggccgctcatcccgccgccgtgcccaccgctgccaccaccgcggttttgcccgcgcactcgcctccctccacggttgcgccccgccgtcccctgcgagacgctcgactgcccacgccccgttccccgtccacgcaccctcgaccccaaaccccgcctccccctccacgccccgtccaaccggcctcgatgcccgcgcctgaccccatgatcccagcccttgctccggtgtgctcaacccctaggggcgatgtccataggggcggggcccactctgcgcacacatcgtcgaggcacacgcctgcccggcttcgtcgtccacaccccacaccctgctcaaccaaacctagctacgcttcctcctcaaggtctcagtgcctcggctcatggttgccctcggagcctgcagccgaggatgccacatccgccatgccggactcatga

SEQ ID NO: 42833 - DNA, 780 bp, Zea mays
  Peptide Sequence Number=SeqID_86208
atgtcagcacaacacatcaaagcgcaccatgccctacatggtgtgccaaatgtcgtcgaagcgacaccaaggtctaggccgcatgagcataataccctatgtcctctatgtagtggatgtatagatctgagaagccagaaaaagcctgagaggagtcccttctacgttgttcttcccctctcttttacagcacgagggaggggagagttacatctttgcaaggatggcgggcctcatcgtgcagagactcaactactcgtatcttttcgttgttgttggtctatacatgatgaatgccttagtcgtgctagagcatgccatgttgtagtggcagttactagagtctatgtcgtcgagtacggtgcagttggtttccctatacttggaatagaatggcaaaaaatggaaaatcctgatctccgcaaggcaatgggaatgaaagctaaccaaaagggtgttcgggtacgaagggtcgagccgactgctcctgaaactggatgcctccaaccttctgatatcgtccttagctttgatggtattgacattgccaatgatggtacagtggtgagagttgtctcactgagtcatcagttgagtttaatctcaaacttttgcgacaaagcggatctacggatgtgcattgtttcaatttcttttttgacaacgggatcttgggtactcttcctcctgcagttgctggtggaagtacaatgccaccctcttcacagtctccacactttgctccatctgggtgatgatgtagacctgaacaatggttaa

SEQ ID NO: 42834 - DNA, 318 bp, Zea mays
  Peptide Sequence Number=SeqID_86209
atgaggctgagcacgaagacgaacatctcgctgaccagaactccaggaccagaacttcaggagcatgaggagcgtgaagacgacgacctgggagctgggcatcgcaccacctccttcagcatgaacctcgcgactccgatcttcttggccactacccacgagcattgtgggcttccccaggacggcgcccacgcgggaaagtcgggggaggtcgtcgacgccgccacgcccgcggttgcgacagggccgatttttgggcgacgcgggactgtccgtcgatggcagaacgggttggtggcagaacaggtgacattatga

SEQ ID NO: 42835 - DNA, 447 bp, Zea mays
  Peptide Sequence Number=SeqID_86210
atggcgatgtgcccctaccaggggtggaagtacatcgtccacgagaccaatcccttatcgttggtgcctctggcacctagaggaggcatggcaggggtgttgaaattggttcttaagaccgagccacaagtgtcgcgcggtgtggccacattcttgaacaaccttctgaagatcaagagagattgtgttggtgagcaagcaaaggacgatgcgcgtcagacgggtctaggcagggtcatcgggaaaggcgtcgtcggactcgacgtggtcgacgagggcttatcacgtcagggccagcatcatgagatcacgccagcgagcgtatttgcacgacgaagcttccagaacgatattcaccaattggcgaacattcggggtttttatggcctagttgtggagaccggcaatgatagtctccttgtaggaggtgtcgggcgaggcgtctaa

SEQ ID NO: 42836 - DNA, 450 bp, Zea mays
  Peptide Sequence Number=SeqID_86211
atgggaagctccgcctcgcccgacccagggctcggactcagcctcgaccccgaaagacggtctccgcctcgcccgacccagggctcggactcagcctcgaccccggaagacggactccgcctcgcccgaccccagggctcggactcagcctcggcctcggaagacggtctccgcctcgcccgacccagggctcggactcagcctcgaccccagaagacggactccgcctcgcccgaccccaggtctcggactcagcctcggcctcggaagacggtctccgcctcgcccgacccagggctcggtgatgaggacatcactatgagtacgactacaccagcagcacctccacatcaagcgccacttccttcattacctgggccaatcactcgggctcgtgccagagatcttaacttcgtcatgctactgaagaatgagggcccagaagaatag

SEQ ID NO: 42837 - DNA, 852 bp, Zea mays
  Peptide Sequence Number=SeqID_86212
atgcacccccgcatcgcatcgggcgccaccggtaagtcgaccgcgccgtacggttcctgggagtcgccgatcagcgccgctgtcgtctccgccgccgggaggaccgccgaggggtttgcaatcgctggcgacggccggctcgtctgggtggagacgcgccccgaggatggagggcgcgcggtcctcgtgaaggaagcggcaggaccaggcggtaaggctcttgatgtgacgccgcagggtttcgcggtgcggtccctggcgcaggagtacggtggtggggcattcgccgtgcaaggggacaccgttgtgttctctaattacactgaccagcgtctgtacaggcagacaataggagataattcaccactaccactgacaccagattatggaccagtagtacgctatgctgatggtgtctttgatccccatttccatcgtttcgtaactataatggaagaccatcggcacaatagctcaaatcccatcactacaattgttgctgtaggaataagtgatccggatgtcaaagaatatactatgctggtcagtggcaatgacttttatgccttcccccgtattgatccaactaaaaaacgtatggcatggattgagtggagtaacccaaacatgtcctgggacaaatcgcagttgtgggttgggtatttcaatgagaaaggagagataaaagaaaagatctgtgttgctggtggagacccaacaatagtagaatctcctactgaacccaagtggtcttcaaaaggcagaatggaaagtcatgttggagtgcttgatcaagattctgagtccttcctgaaaattgacattcccttctcttctgtaactaacatagtg

SEQ ID NO: 42838 - DNA, 633 bp, Zea mays
  Peptide Sequence Number=SeqID_86213
atggcggcgcaaggggcaggaagggcgatttcctcttctctggctaagtctctcgggttgcgaaaacctaagagggaggcaggaagcggagcaaagaaccgtcaacaggccctctcccagaggctcgggggctgctctcgcaaacctagctccggccgaaccgttgacagcgtcaacataccagcccgagaacttgggacccgaccgtacacccgggctacggccagctcgcatgagggaacaaccagactagccgaagcattacgcgaggcattaagacctcgaaggagtgaaaccactcctccgaggcctcgggggctacacccggcgggtgcgctcgcgcgcacccaccggaacaaaatgcaaccgagaaaggctggtccccttgcaaaaaagtgcgacaaaagcctccaagcgagtgctaacaatcccttcgaggctcgggggctactgtcggggacgataattaggggtaccctcaaggctcctaattctcagctgaaggacagcgccgcctgcgccgcgccgactgcagtgccacttgacagagtgaggctgataggcagtcaggtcctgcagaaggcaccacaggaaactccgctctgcgcgacccagggctcggactcgggctaa

SEQ ID NO: 42839 - DNA, 645 bp, Zea mays
  Peptide Sequence Number=SeqID_86214
atggggagcgcccgtgttgctttcgtcttgctgtcgttggaggagcgcaacttcgtggaagttggattttcatcatgcagcccggctacatcccctcgccgatggtcacccaagacggtgaccactagtttgatggtggggagaagcaagccgggctacggcctctgcctcgccctcagcttcaaggatcttcatcatccttgctggggcggagggcgagctgagccggagctctacctcccgtatgggccggcgggccacctcctccttcagcattcaggggagagggcgctcaccggcctagcggggggcggacttcgacatcgcggggccgatcggccgcaagcatcatcagctccagcgtgcccggttcgctggctcagctggctctggcatagcttccggtgccacctcccaccgctgggcggagtgcggctatctgtccgccgtacgggcggttgttgcgccgcgcgcaccgggggaccgcccaagacgtcgcgtgctgctagggcggcgttcgtgttcctgggctgtcctgcccttgctccggtacgacgcctctacgcggaggtcggtgctcgcccgtccgggaggacccgagtggggatctgccggtgggcagatggctgccgtcgtcggtgctga

SEQ ID NO: 42840 - DNA, 381 bp, Zea mays
  Peptide Sequence Number=SeqID_86215
atgcaggcggcatgcaacgataccaagggggcgcaccctttcgactccgacgcatccagcatgtgggcccaggcccacacgtcatgtaaccggcgcgccggttactacgtgcgggaaactgcaccgccacttgcgccaatatcgcaccttctcgactgcggaaccggtgccgcgactcgaggcgaccctgcgcatggcccaacagtgccaaccgagcacatcgatcacggggaccgagaaaggggatactccgaaagggatccttctccgcgaaggaagcgggccccgagccctcctgctgatcagaggttcgaaggctggcccctcagaagggttcgacatccgcctcagagcactcgggctccgagcccctcctactga

SEQ ID NO: 42841 - DNA, 687 bp, Zea mays
  Peptide Sequence Number=SeqID_86216
atggaaggtttgcctccacgccattcatgctgctccgtgagtcccgctcccctcctcttcctgacttgtggcttccaattctcctttatgccctcagatggagttctagatcagcgcggcagggtccacggcactgcatcgggggcagcgttggagttggaaaagggctgcgtcgtgaccgcggagggaacaacgcaagtgagcggtggaggcgttccactccacaaccctccaaccccgccactgccatccaaccacgtcggcgccgaggtctactaccttccctacgtcaccgacgccgagtactacacgaccggtggtaagaagatatctgccacctcgatctactttgagagcctgccgatgagtgtcaccaaggggtacatcaacttgattttcgtcccaagctcatcatccgcggcggcagtgtgtctgatcctcgtgttaaagagaagcgtcgaatggatgcaatcaaaactagaagggtgtgcgccatcgaggatcactgcagctaaggcaatcgtgaaggatggaatcgttgttatggggcatgttggcctcacaccgcaagctattactgtgctcggtggatttaggcctcaagggaaaacggttgacagtgttgtaaaggttgtggagacaacacttgccatgaaggagactggatgcttctctgttgtgtattag

SEQ ID NO: 42842 - DNA, 690 bp, Zea mays
  Peptide Sequence Number=SeqID_86217
atggaagcaaagaagctggcgtcctccatcgcaaggtccaagcaggagatcacagaggacttctcattgattggcgggacatcgcccccacggcggcccaagaagagacaaggtgcaacgacagctcaatactccgcgtccaccggctcccatcgcacgctctccccaccacgctttcgcatctgccgatggaggtcacgcaacttcaccttgacgcctccccaccgcgcggacgccgatggaagggacccaccccgccccgcccctgcgatcctcgtccttccaaggacacccctgcacccgtcttgcccaatctgtctcctggatcgcggggtcccgtgcccaccgcgcaccaccgctgccctccgccccagacagccttcgggaccgcccatgctcgggttcgcgctagccgcctcacccgctcgcgaggtcgatgaagatggatctaaggacgccagtgccgcccctctccgagctccccctatggccgctgcgggcttgtgcccctgggtagccagtcgccccactcttgccgccttcgagctccggcgaccgcagagctggcagggcgcggccgacgccgcaatggacatgggtagccagaagacccatgaaaaactaatgaaccaaaagccccctccccacgctgatgagatcgccaagctcttccccaacctgttgggctag

SEQ ID NO: 42843 - DNA, 195 bp, Zea mays
  Peptide Sequence Number=SeqID_86218
atggcgagagtagcgtgtaccctccgtggcaagaggctggacgatggtgtatctatgctctcggttgaccatatccttgagagtcttttactttgtcgggtgaagaagcagcaaacttttgttgcttctgttccaagatggtaccgaaagaagagaatcaagactaaagctgcaggaggaaagaccctccgttaa

SEQ ID NO: 42844 - DNA, 69 bp, Zea mays
  Peptide Sequence Number=SeqID_86219
atggaggaggacgacctgctgggagaagacttggtcgactacggagatacgccagaacactcagtttga

SEQ ID NO: 42845 - DNA, 408 bp, Zea mays
  Peptide Sequence Number=SeqID_86220
atgcggtctacccatgtcctgttagcggaaacgcgagccgagtccccctccgaggacttcggtgactccgagtactcggaggaggagttctcctctgagtccgaggggtcaccagcctacgcctctcccccggtgtcgtccgatgactcagacgattcccaggggatcgccgccgaggtgtggacgtacattcgggccgtcgagcgctccgggctcgagggctcgaatgagtcagagatctcctcggacgaggagggctcctccgactcatccaaggaggggagcggtggcgacggcgatgacgagggcgacgacaagggcgacggcggcatcggcaagggcgacggtggcaacggtaaggacgacatcggcagtggcagggccagtggcaaagcgccgctggcttaa

SEQ ID NO: 42846 - DNA, 183 bp, Zea mays
  Peptide Sequence Number=SeqID_86221
atgggagaccacgtctcaggtcgcgtgaggggatatgtctgctggcaggttcaatcagaaaacgcatccccatggaccgttgtccacagaccaccatcattacgatatcaaaatggatacaaccaatttcttgacctcgcgcgagtgctacaaaaatcactcgacttctaccgagatccctga

SEQ ID NO: 42847 - DNA, 501 bp, Zea mays
  Peptide Sequence Number=SeqID_86222
atggtggaggatctggtgtctggacaagcagcagcagttcgtgtgacggctgacaggtgtgccttttacggctacagattcctcggctggcagataatggttggttttggtaaacttccaaagtaccatcaggatcctacaacagaagagttagccaaaacactcgactgttggccttcattgaactattatatcactgtttgtaaatatgttcttatgccatggaaattcaatggatgctacgcacttttcgtaatcgatcatggtaaaaagcacgtaacttttatagactttacacccactcaagattggtgtaaacacatgccatacaagaggtttgcggaagcaattatcatggcctcaaagaaatataagattgcctacaacaagaaacattttggatgggcagatgatatttttaagtgggaacatacaattcggtctggtgttccaattgacttaaaagggtattttctcaataccatgttctcaacagtttaa

SEQ ID NO: 42848 - DNA, 330 bp, Zea mays
  Peptide Sequence Number=SeqID_86223
atgccctcagtggggctgcccggcaaggaggctgggtatttgggggagtatcggcgaaacatcatggctcccgacgaagcagggggctgcgaccagcgcgctggacgttgctgggggccgtctgatgctggcggcggctgctgcttgggggcagcgacagagttcatgatcgtcgagacttttgataccagattgctaaaccggactccgttgagcaaaacgtgcctggactccgttgccttctgcccgcacttgcttgcggtgttctcccctgactcgtgggacctctacgacagggccgtcttctccggtgggtgcacgcacgactga

SEQ ID NO: 42849 - DNA, 591 bp, Zea mays
  Peptide Sequence Number=SeqID_86224
cctgtaaagagtcatgttactatatgcggtgatattcatggacaatttcatgatcttgctgaactcttccgaattggtggaaaggtagttaatttcaaaaccattgtgcagatcgactttagttcatacaatgttggtgatgaagactattgtggttatgactatagccttgtagggcagctttcagaagttaggattgtttacctcaaccgttttgttcaagagattatcagttattttatgggacttgtgccaaaaagttctgatgccgttgtaaagctgaaagacaataagactaactcagagaagtgggttagacgttctccctcttatcaatcaaatctacctgatgcacttgcttatggaaagacttttaagggcaaccgaccatcactaagtttgcttctgcctacactatctacatatgaggttggacaggattttgtgctcatttggggaattaacagtaaagtttttagagttgtccaaactacagagcacgaagtattaatgatagctgaaagtagagctgaagaagggcatctatttgaaggatggaccgaaggggtcatcaactttcctccaacgtag

SEQ ID NO: 42850 - DNA, 300 bp, Zea mays
  Peptide Sequence Number=SeqID_86225
atgccgccgcgcataagaaagaccgcgcgaaagtctactgggcagattggcgtaccccaccatcaactagccccacggcatgaagacagtagcagtggtagcaacgatccaatcggggatcttgaagcccaagttgaacagcttcgatcagaactccatcacaggaacgatatatgggtcgcggatggtgaaagaataaacgaattgagaacagacatccgccaccttcaagaccaacttgctgaatgggatctagcgctcgattgggctgtgaactcccgttcacttgcttgggcatag

SEQ ID NO: 42851 - DNA, 231 bp, Zea mays
  Peptide Sequence Number=SeqID_86226
atggaaacgacaccctgccacgatggctctcacggtggcttcagcgcctttccacctcgactaccccatgccccgggggtaatcgccgccctcgtatcccgtggccacctcttcatgatagactacctggagtttgtggagatggctggtggcgatgaggacctcatctacgacgcgctttgcatgggctcggactcggatctaggtccctctaagtgcgatgatgagtag

SEQ ID NO: 42852 - DNA, 282 bp, Zea mays
  Peptide Sequence Number=SeqID_86227
atggccattaagaataataaagtgctcaacatggaaaagaggaaggagaaaagtcaagattcaagtgctcaagtcaaagttgttagaaaggtaccggatgtgtcaagtgcaggaacgggtggtgcacaagacatgtctactacccttgatttaagcccaccaagagacaacatagagtttttgggatcattgagcgactattggagatcatcactagctctaatcatcattgtgaggggctcttgtgtggatttcctaggggtttgtgaagaacaactttag

SEQ ID NO: 42853 - DNA, 1407 bp, Zea mays
  Peptide Sequence Number=SeqID_86228
atgaagcccatgagctgccacgagcaggagcacccggagctcgccgccaccacgaccaacagcggcttcgactggcttgaggatcccatctccttcctcaccgcagacgtcgacatcgccggcggcggctatgggtggtggtccgatcccgcggcggcgcagcaagatggtattggcagcgtcgtggcgcagaccctttcgcccccggcgccgctgctggcgcacacctcgccgagcattgcgtcaccggtcgtgtcggagccttcgtccaagaaacgcaagtccccggcgcacagggcgtccgccaacgccaaccacccggctggccgcgctcgggctgcacgcgctggcccgcatgatcccgcccgccgtcggcccggcggccgcggcgaccgtgcgggtgcctccctgcgagtgcccgacgccgggggttcgcggggcgcggagccgcggctgttccgcgcgtcgctcatcaagttccacgaggtgagcccgtggttcgcgctccccaacgcgctcgccaacgccgccatcgcgcaggccgccgcgtcgggctcgggcgggcgcgggggctccgagccccggtcgctccacgtcgtcgacctcggcgtctcgcacggcgtgcagtggccgacgctgctggagtcgctgacccggctgcccggcgggcgcgcgccgccctccgtccgcctcaccgtcgcgggcgccccgccggcgcccttctcggcgtcgcctccggggtacgacttctcgccgcacctcctccggtacgccaagtccatcgacctgcggctcgcgatcagccgcgcggcctccctagactccgtgcacgggctcgcctcctccccgtcgggcgaggcgctcgtcgtgtgtctccagttccggctcggccacgccggcgccgacgagcggacagagattctaaggaaggtccggggtctcaaccccggagctggtggtggtctcggagctcgacggcgggggcgacggcaccgcggcgggcgagttcacggcgaggctggagctgctgtggcgggttcctggagtcgacgtccgcggcgttcaaggggagggatggggaggagagggcgcctgctggaggccgaggctggcacgtccgtcgcgtcggaggcggcaggggcagggagggaggcgtggcgggagcgcatggtggtggccgggttcgaggcggcggcgttcggagacgaggcggtggagtcggccaagtcgctgctgaggaagtacgacggcggctgggagatgtcggcgtcggggacggcccggcgcggtggcgctgcggtggaaggggcagccggtgtcgttctgctcgctgtggcggccggcgtgcagcggctaaggccgcggagccgtgcgtccatgggatcaccggatcagatatccagatag

SEQ ID NO: 42854 - DNA, 450 bp, Zea mays
  Peptide Sequence Number=SeqID_86229
atgggtaagcttagcctcggctggaccaataccagaaaggctggcctgcaatgggagtggagagatggcgagagtatcgtgtatccacctggcaagaggctggatggtggggtactgagctctcggttggcggggacccgttctggtcttgagaaacccgtgggcgagttgacatatgcaaggcatacccttgagagtcttttctttagtcggaatttatttctgctgcaaatgttggtgtgtgatttgtgtttacttaatcctgcgatcttggagccgtctgaggtctttgagacaaggacaggtgcatgtgggcccgataacttgggaggttctgcgacagtagacatcggcagggccttcgtctcgcaacacgagagcgaagggggtcgcacaggtcttcgtccggtcgacgccctcgacttgttctggcgtgttctgtggatgtag

SEQ ID NO: 42855 - DNA, 306 bp, Zea mays
  Peptide Sequence Number=SeqID_86230
atggagacaccagcacctccgttgagacatcgtggctctacggcgcagctaggtgcccagacttggccgattaactgtcattgtgttgcatatggtctcgttgttgcgtcgtatgtcgtccgtcgtccaaggcttcaatccaccatagttagaacgtcaccgcatgacaggacagacaaccaagggcaagtactgggctgcagatggggcattagcgattggaaaatgccaaagaggacaagcagccagctagcaactgagcaacaaccaacaagtgcatttcgatttaaaaactttttgaaatag

SEQ ID NO: 42856 - DNA, 576 bp, Zea mays
  Peptide Sequence Number=SeqID_86231
atgacgctcgccgcagctgagatctggtcgaaccctccttatcttttacaatttgttagaaaaaatctttatgctgatgggggttaccagctgagaattaggcgtcttgagggtacccctaattatggtccccgacaaatgtgcatgaactcaccaaaggtgggagttcacgtgaagtgtaaggcttaccaaagaggatggttagagctgagcattgcttttaaagttggtcaaaattttattagcaattatttatgggaagctccaatgcagggttcttgcctgaccgccatcgcagcaaaatcaaccaaggacctccctacactgaccactcccctactgcccttgcccctttcggaacatgagtgggtaaaagaagtgatcaagggcacaacttgcctgggacttgagattccagatgccagggatttttctgaaaatttggaggaccgatctgcaattccagaatttatttccgaggtcaccgctgtgaaaggtaggacggcgggtttattccctaatactccaggggctcttttgcacttttgctcggcgaaggggtatcctgaaacctga

SEQ ID NO: 42857 - DNA, 462 bp, Zea mays
  Peptide Sequence Number=SeqID_86232
atggacgccgccggcgcgcgtccatcggcaccgtcggccgctgctgccgcagtcgccggggcctccgtcgcggacgagccccgggacgcgcgggtggtgcgggagctcctgcgcttgatgggtctcggtgagggcgagtacgaaccccgcgtcgtgcaccagttcctgggcctggcctaccgatacgtcggagacgtggtaggggacgcccaagtctacgccgaccacgccgggaagactcagatcgacgccgacgacgtccgcctcgccatccagaccaaggtcaatttctccttctcccagccgccgccgcatttccctctgttcgtaatcaaaggtgtttcttgtgtttcaaaatcttcattttatgcatctaaatatgacaaggctattgacactttttgtccagattctttgataaaatactctgactcaccaattcctattggttctgttaattga

SEQ ID NO: 42858 - DNA, 105 bp, Zea mays
  Peptide Sequence Number=SeqID_86233
gccatcagccgccaaccgatgtctgcgagtactagtagcgcagaccgccagaggccaggtgaccaggtcggcagtgcagccgtgcaggcggccagccctctccag

SEQ ID NO: 42859 - DNA, 315 bp, Zea mays
  Peptide Sequence Number=SeqID_86234
atggccgggtctggagagtcgccggcgatggaaggagatggcgttcgtcttgatccagatacagagggaggagttggtggtaactcactggtgacaccacctcctgctctaatgcgtcctgagatcgccgagaagagcataggggaagaaggagaacaaagggttcgacctcctatgtccaatattagctccagggaaatggatacgccacaaataatgcattcacatttttgtggatcccacagggaatcatgttcagctatgatatctaagtcttggctttcaaacagcggcgtctcctcggagcatacttga

SEQ ID NO: 42860 - DNA, 216 bp, Zea mays
  Peptide Sequence Number=SeqID_86235
atggtgagttcggctgtctccttgcttgcctggtggaggcagatcctcatgttgccggtgcgcctagccgtccgtcgtggccctcgtcgtggtgctgccgaggctctcgccttcgcgcagttctggtcgggcttcgagctcggtactggcgacctgttggaggatgcgaccgatggtgccctcaaggagtttgaggatgaagtgaaagggaaatga

SEQ ID NO: 42861 - DNA, 720 bp, Zea mays
  Peptide Sequence Number=SeqID_86236
atgggggcactcttccaatgggtgctggcctcagtccatagggagaaacgaagaagtcacccctcagcaaagaaagctgttgcacgtaccatcgagttgcgatcaatgtcatcgtcctccaaaaagcattgtgtgggttacactatagtgcgtagtccggaccaaacgccgacaccagtctacctcccactcatgacctacaaacaactcaggttgcagagcactcatgacctacaagcccctcggaccgcgacacatttatggctgtgtgccagcgacacactcaagacctatcagattaggcctaagtgcgcaggccaccaacagtggtgcaacatgacgagccacaccaagccccaggctacgaagttcaagggccggcatagcccaaatgatggcgctcgggaccaccatgcccgcgccatccgcaataaagaatacaggacaaccaagcgatcacgagcacgtcaggctttaccccatggtaagatgcccagttttaccatcgtccgatggctccttcttgaggaagccaacatgaatcgacccccttccttagcctataaaaggagggggttggcccccagactcgagaggttctttctttctttcgagtggacaactcaaggacggacgcagatgagacgacgctcagaagaccaacgaacaagaggaggacccggagaccggagctccacctccaagccaaggcttagatag

SEQ ID NO: 42862 - DNA, 833 bp, Zea mays
  Peptide Sequence Number=SeqID_86237
atggttcgcactctcaaacaacccgcgtcaacaccagctacgcccctcagccccggcaggtcccggtctacccagtggtagtcgaggaagctccagcggatctccctcccgtccgagtagagaacgtgatcaacctggaggacagctcggaggagcagctgccgacccccaccccgttggccgagtccctggcctacgcagctgggtcatcgatgtcagcatcgtcggcaccagcctttcaagcacctgcacctggaggcgacgaccccgacgactccggagacggcgatgacgaggatgacgatgacgatggagaggatgagcacgtcaaccaggaagctgactacgcccagcaggaccacttcatggggattggtccagttgtcgaacattatacatcaatgttcgagacaggacacttccccaacctgctgcatgcagtgctgcacgagctaggagcctatgcccgccccctgtacgagacgaggcgagtgagcgagcctccccgggcttgctattacatcactcgcatccatgtcaggcgcctgcgaggagagaaccagaccaacattgtcccaggagagcctggtgaggatcgcctcaacaccctagctggtgtagtggccggtctcaacaccgacctggacagtgccactctggacctctacagtgtgcacttggagctggagaatgcccacgccaggattgcagccctggaagcccaactgcaaggactggatccgccagaagatcaggtccccgccgtggcgctatctcctccccgcaagaggatgcgctatggagagcccggatcagtcactaggctgctttag

SEQ ID NO: 42863 - DNA, 528 bp, Zea mays
  Peptide Sequence Number=SeqID_86238
atggcacccaagagagctagctcgaaggcagccccatccgttgacgaagcagcgaaggcagcgctgctggccgagaaaaagggcaaggcccttgtcgacaccacccaccaagaagcgtgcgaagacgacgcacttagcaagagacagcgcaatgaacaacctacacctgaaggcaccctccgcacctgcaactcaggaggacaaccgcaacctcccctaggcttcgctccactagagggcgaggacgccagtgaggatggcgaagtcatcggcgtttcagcagaggaacaactacagctgcgggccctgcgcatcaagaaccgcaacctccagaaagagatccacgaggccaagcgccaacgtgtctctgtgcaggccaaggtgcgccagatgatacacgacgaggagcagagggctcaggagcttgagcaagagattgcgctcatgcagggcgaaggccaacttgatctacaacacggcccacccctccaacaacgcgtgccaatcgaagacctgttctttccttag

SEQ ID NO: 42864 - DNA, 228 bp, Zea mays
  Peptide Sequence Number=SeqID_86239
atggccggagccggggacgagagggatgaccgggagggcggcgggtttggccgggcggcggggctccagcggcggagctacgccggtgatggtcgggtggggttggccgggtggggtcagcctggcggggttggccgggagggcgggttgcggtgctccggtggtggcggggctggccgtcgatgctccggcgacggcggcgatggccgggcgacggtggttcgctaa

SEQ ID NO: 42865 - DNA, 705 bp, Zea mays
  Peptide Sequence Number=SeqID_86240
atggaagctcttgggtcattagaacatccttctgctcagaggaagaaaggatttccctcatctcttacgaagttgcgcgctacgcatggggatccgcaagaagccggaatatgtctgaaagaataccgagaaaacggagttgagaaagtgctctatggcaatctacatgggagaaagccgaagtcacccaaaccaccctcccttccaagtcaccttcatcgggcaccgctttcccagacacttgccaaaacgttgcccgaaaagcccttaaacagctatgccaaaactacaacagagagcaacaaaaatacccccacctggaggaaaagacttcaggccctgtcagggagagatcctaccgaggatgaccccaccatcgtctacatggccggatacctccacactctcgataaccactatgacgacctttcctcccactgcacccacctaaactcccgggtggaaagcttagagcagcaggtcaaggaacttaaaaaggagaaggtgtccctccaagagtgtctcgatatagcagaaggcgaggaggccaacactcgtgaagcctaccgaaccctgaagatggattacgataagaagctaaagaagctcgcccccatgaagaaaatccaaaagaagaccaagagccaaggatgtcagactgagcggaagaagaaagccctccagcaccacctcccgccaggatag

SEQ ID NO: 42866 - DNA, 558 bp, Zea mays
  Peptide Sequence Number=SeqID_86241
atgggcgggctgggctccagcggcaggctgcagaatggtggagggaagagcgagggaagaaggcgactgggaggaagtgatatgcgcaggagggcaattgcgtcgggcaccacccccttccctcccatcctcctttatctccctctccaagcgatgattgcggggaatggtagagaaggagggagacgtgggatgggggcgcgatcatcgcgcggtgatgagggcggctcgcgtggtgatgagggcgatgacatttttggaaaggaagggcggcgaaccccagaaattttatatgcaattttggacccgatactcggcgccataggatgtggcgccgagatgaaagacatataccgggaggcattgtggcagaagagaggtcgccctcgggagttatatccggatgtatctagtaaggatgctcctgttcctcctgaactccctatgcctaactgtaactgtggcatactggcttgggggcacctgaggtgtttatttttccagtggatcgacggtcctggtaaatttgaccctcgatatcttcttttcgctaattga

SEQ ID NO: 42867 - DNA, 459 bp, Zea mays
  Peptide Sequence Number=SeqID_86242
atgacggatgcggagaaggaggtagcaacagaaagaaggctggactcaccgtctcgatgcgattgtggagaccgtgctgtcatcgacgaagacactgagaaacagtttgtgtgtccgaacattgattatccatacgggtggcgtaagtgtcgtttcagagagtggttgtatggtcctttgtcccattggctagagccagaggagacgaggaaatgcagttgggagagttacgacgacaaaggagaggtgatgcgcacaatagagtccaagagactaatgggacagaagatgcgttgtggatctcagctcgtcgattcgtacattaacgatcgcatatgcgacatgcgtaggtacgcgaaatttgccttttatgatagtccgaagcgtgcagagtttaggaggttgaaggcagcagatgagaagagagcacaggatgcaagggaatgggaagcggcttga

SEQ ID NO: 42868 - DNA, 867 bp, Zea mays
  Peptide Sequence Number=SeqID_86243
atggataagcagaggtggtttgtgcgggagtatggactgatacgaagcaatttgctcgtgcttgttgaatatgggcctcaccctcccccaggaaagaccggtgcaaaatatattatcaggggagatggtcagaggcttgatcttcggtatgtgaagaaaagcagcgatcagcatctggagcttggttacaaggtggagaggcatctcaatgatggggattttgttcttttcaatcggcaaccaagtcttcataaaatgtctatcatggttttcagcatggcattcagtgctctctctgatggtgcaaggatacggaaatgctccgcgtactgcctggttgcaagcaatcagatggttggattgttcctaatgatttgggctctgaaagagatgaagaatgacattacaaaatctgaagtggtaaagaagtgccaggatgtgaaatatgggaagcatgtgcacattcttccaattgatgatacagttgaaggcattacagggaacctatttgatgccttcttgaaacatactgaaatattttgtgatggggagcctattaagagagaggatgaggagcgtcttgatgaagttggttattatgatgttggtggagttagaaagcaaatggcccaaatcagagagcttgttgagcttccactacgccatcctcagcttttcaaatctattggtgtgaagccaccaaagggcatattgctatatgggccacctggttctggaaagactcttattgctcatgctgttgcaaacgagactggagcctttttctttctaatcaatggtccagagatcacaaaatttatatgtatagctaggatcaccaatggattacaaaatcttttctcataa

SEQ ID NO: 42869 - DNA, 2175 bp, Zea mays
  Peptide Sequence Number=SeqID_86244
atggaggccttcatggcctccgccgacctccccgcctacccctggggggcgccggccgggggcggcaacccgccgccgccgcagatgccgccggcgatggcgatggcgccggggttcaaccaggacacgctgcagcagcggctgcaggccatgatcgaggggtccagggagacctggacctacgccatcttctggcagtcctccctggacgccgccaccggcgcgtcgctgctaggctggggcgacggctactacaagggctgcgacgacgacaagcgcaggcaccgcccgccgctcacgcccgccgcgcaggccgagcaggagcaccgcaagcgcgtgctccgcgagctcaactccctcatctccggcggcgcctccgccgcgcccgcgcccgcgcccgacgaggccgtcgaggaggaggtcaccgacaccgagtggttcttcctcgtctccatgacgcagtccttcctcaacggctcgggcctccccggccaggcgctcttcgcgggccaccacacctggatcgccgccggcctctcctccgcgccgtgcgaccgcgcgcgccaggcctacaacttcggcctccgcaccatggtctgcttccccgtcggcacgggcgtgctcgagctcggctccaccgacgtcgtgttccagaccgccgagaccatggccaagatccgctcgctcttcgggggcgggccggggggtggctcgtggccgcccgtgcagccccaggcggcgccgcagcagcagcacgccgccgaagccgaccaggcggcggagacggacccatccgtgctgtggctcgccgacgcgccggtcgtggacatcaaggattcctactcgcacccgtcggcggccgagatctccgtctccaaaccgcctccgcctccgcctccgccgcagattcacttcgagaacgggagcacgagcacgctcacggagaaccccagcccctccgtgcacgcgccgccagccccgccggcgccaccgcagcggcagcagcagaatcagggcccgttccgccgggagctcaacttctcggatttcgcgtccaatccttccttggcggcggccccgccgttcttcaagcccgagtccggcgagatcctcagcttcggcgtcgacagcaacgcccagaggaacccgtcgccggcgcctcccgccagcctcaccaccgctcccggcagcctattctcgcagtcgcagcacacggcgaccgccgcggcgaacgacgcgaagaacaacaacaacaacaacaagcgttcgatggaagccacctccctggcgagcaacaccaaccaccacccggcggcggcggcgaacgagggcatgctgtccttctcgtcggcgccgaccgcgcggccgtcggcaggcacgggcgcgccggccaagtcggagtccgaccactcggacctggacgcgtccgtgcgcgaggtggagagcagccgcgtcgtggcgccgccgccggaggcggagaagcggccgcggaagcgcgggcggaagcccgcgaacgggcgcgaggagccgctgaaccacgtggaggcggagcggcagcggcgggagaagctgaaccagcgcttctacgcgctgcgcgccgtggtgcccaacgtgtccaagatggacaaggcgtcgctgctcggcgacgccatctcctacatcaacgagctccgcggcaagctgacgtcgctggagtcggacagggagacgctgcaggcccaggtcgaggcgctcaagaaggagcgcgacgcgcggccgcacccgcaccccgctgccgggctcggcgggcacgacgccggcgggccgcgctgccacgcggtagagatcgacgccaagatcctggggctggaggccatgatccgcgtgcagtgccacaagcgcaaccacccgtcggcgcggctgatgacggcgctccgcgagctcgacctggacgtgtaccacgccagcgtctccgtcgtcaaggacctcatgatccagcaggtcgccgtcaagatggccagccgcatgtactcgcaggaccagctcagcgccgcgctctacagccgccttgcggagcccgggtctgtcatgggcagccattttgatgagctgaaagctgtgggcgtgtcctgtgtcacctgtgactgcgagggcgtgcgagaatttaacatgagcgacagtaggatgtgcacatga

SEQ ID NO: 42870 - DNA, 3852 bp, Zea mays
  Peptide Sequence Number=SeqID_86245
atgattggggatgctgcattatctatattacacagtatgacatctgcacggtccgatcttgatgatgcaggtgaaatagtaactccaactcctagggtgaaacgtatattgtcaagtccaagatgccttcctcatgtggcccaggttatgcttactggggaaccaagcattgttgaagcagctgcctcattgcttatggctattgttacaagaaaccctaaagctatgattcgattatacattactggtgccttttactttgcattggcatatcctggttcaaatctcctatcaattgcacatttgttttcggccacacatactcatcaagcttttcatggtggtgaagaggcagcactatcttcatctttgcctttggcaaagcgtagtgtactgggtggactcctcccagaatctttgctgtatgtcttggagcgcagtggcccttctgcttttgccggtgcaatggtgtctgattctgacacaccagaaattatatggacccacaagatgcgagcagaaaaccttatttgtcaggttctgcagcatctcggtgaatttcctcagaaattggcacagcattgccattcattgtatgattatgctcctatgccacctgtgacttacccgaatctgaaagatgagatgtggtgccatcgttactacctccgcaacctatgtgatgagattaggtttcctaactggcccattgtagaacatgtggagtttttgcagtcattgttggtgatgtggcgtgaagagttaactcgtcgtccaatggatttatctgaagaagaagtctgtaagatactcgagatttctcttgatgatcttgtgcttggtgagaacggtagcatcaagcagtcatctgacttaagtttggctaattccggaaacaaaattgaaaacattgatgaggagaagcttaagcgccaataccgaaagctagcaataaaatatcatccagacaagaaccctgaaggaagggagaaatttgttgctgtgcaaaaggcttatgagcgattgcaggctagtatgcagggattgcagggaccacaagtctggaggctgctactcttgctgaaggcacaacgcatcttgtacaagagatatggagatgtcttgggaccattcaaatatgctggttatcctatgttgctaaatgcagttactgtagataaagatgacagcaattttctttcatttgataggacccctcttctgatagctgcttcggagctaatttggttgacatgtgcatcatcttcattaaatggagaagaacttataagggatggtggtatccccttgttggcaacacttctttctcgctgtatgtgtgttgttcagccaactacaccagcaaatgaaccagctgcaagaatagtcaccaacataatgcataccttctctgttctcagtcagtttgaatcaggaagagttgagattcttaagtttggtggccttgccgatggcattgtgcattgcacagaacttgagtttgttccctcagctgtggatgctgcgctgctgacagctgcgaatgttttggtttcatctgagttgcaaaatgctctgctcagggctggatttttatggtatgtgctacccctgctgcttcaatacgattcgacagcagaagagaatgagacatgtgaagcacatggtgttggggcaagggtgcagattgccaaaaatctgcatgctgttcatgcaactcaagctttgtctaagctttgtggtctcagtggcgatgatatcctgtacccagataacaaacctgcatacaatgcactgaaggctcttcttactccaaagcttgctgacatgctgagaaaccacccacctaaagagttattatcaaatctaaattcaaatttggaatcaccagagatcatatggaattcatccaccagaggggagcttctcaaatttgttgaccagcagcgtgctagtcaaggccctgatggttcatatgatttgacagaatcacattctttcacctatgaagctttatctaaagaattgaacgttgttactgaagcatctatgtctggaaatgatgaagtcagtgattcaactattgaaggaaaaatggataattcatcaggaaaacaaagtacagatggagattctgaagttattataaacctccaaagtggactaacatcacttcagaatcttcttacaagtaatccaggcttagctgctgtttttgcttccaaggagcgtctgattcctctttttgaatgccttgcactgcatgttccttctgaaagcaccagcccacaaatctgtttaagtgttctttctctgttgactaagcatgcttcttgtttggaggctatggttgcagaaaggatgagcctgattttgctatttcagatactccactgcaatcccccttgcagggacggagctcttgctgtactgtattctttagccagcacaccagagcttgcctgggcagctgccaagcatggtggtgttgtttacattcttgaacttatgttgccacttcaagaggaaatccctgtgcagcaaagagctgtagctgcatctttattgggcaaacttgttgggcaaccaatgcatggccccagggtagcaatcacccttgccaggttcctgcctgatggtttggtttctgccattaaagatggacctggtgaagcggttgtttcttctcttgagctgacaactgaaactcctgaactagtatggacacccgcaatggcagcttctctttctgcacagttggcaacaatggcatcagacctctatcaagagcagatgaaaggacgtgttgttgattgggatgtacctgaacaagcttccggacaacatgtaatgaaggatgaaccacaggttggtggaatttatgtaagactttttcttaaggatcccaagtttccactgagaaaccctaaaagattccttgaagggctcctagatcagtatgtctcctctgttgctgctacacatcatgaagcaattgctacagatccagagcttcctttgctactgtccgcggcattggtttccttactacgagttcatccagtgcttgctgaccatgttggctacctcggttatgttccaaagcttgttgcagctatggcttatgagggacaaagggaaactatggcatctgggcaggcttccagtggatcgcaggcagaacctggtgaacatgacaattcatctcactctgaggccactgtgcagactccacaagaacgtgtccgccttagttgtttgcgtgttctgcatcagcttgcgtctagcacaacctgtgcagaagctatggcatcaacaagtgcaggaactcctcaggtcataccactgcttatgaaagcaattggatggcaaggtggaagtatactggcattggagacattaaagcgtgtagtcggtgctggtaatcgggctcgtgatgctcttgttgcacaggggcttaaggttggtcttgttgaagtgctccttggtattcttgactggcgtgctggtggaagacagggactccgtaataaaatgaagtggaacgaatcagaggcttcaattgggcgtgttttggctgtggaggtgcttcatgcttttgcaaccgaaggtgcacactgtgctagagttcgtgaagtcctgaattcctctgatgtatggagtgcttacaaagaccagaagcacgaccttttccttccatccagtgcacaatcttctgctgctggagttgctgggctcattgagagctcgtcaagattcacttacgccctcgccgcaccgccatcttcttctctctctccaccatcagctccagcaaaccctagtggacggcaatattatcagcattcgtag

SEQ ID NO: 42871 - DNA, 309 bp, Zea mays
  Peptide Sequence Number=SeqID_86246
atggtgcaaggtccggagcaggggatgctaatgaatccgccgctattgcctatgaaggctccaccgctgttgatgacatttcctgagccagtacaggctgttggacgccagacatggattccatgccagctgccaccatattggcgaccacgtcatgggagaagtctggcgcaggttcctcagcatgtggcacctatccggagtcttgtgcaagcactcgtactgccctgggatgattccgcaacgggggatgaaggactagaaaaaggaaatagagcctcatcaaaaactacgtcccgagaaatgtag

SEQ ID NO: 42872 - DNA, 1125 bp, Zea mays
  Peptide Sequence Number=SeqID_86247
atggcacgcgacttgaaggtgtttccttatggacggaatattgctgttgttgtgtcggcagtgatgaacaaggaccatcaagacgctgcgcagaagcgtcgggccgtcatcaagatggtagaccctgcgcgcgaggcgaagagggcgtgggggagcacgaaggctgctgcctccggcagtagcaagtcggtgccggctgcgaaaccggctgcccctgggcccagcaaggcatcgacgggcgcgaagactgcagcctctggcagaaccaagcctcccccgggcggacccgtgaagggatgggaggtgccatcgcccgcgaagctgccttcgccgggtagacgtgttgctgacttcggtacgaatatcagtgtcgaggattatcttgggtcgggtgagggacaattggttgttgtcctgccttcggtggcaaccacttcgccatcggcggtggtaagggcgaaggggaccgcgcaggacccgtgggccgccttctgcgtgagcggcgagattgtgacagccgctgccgctagggacgtggcgggcaccatgtcccagcggctgagggaggtgtcgcagcagctgaagcaagaggagctgttggtgctcccgactattgtgcatggcttcatgtcctacgcctccctcgtcacctgcgaggggaccatgaatgcgttgtcccgcgaggggtgcaaacactacgaggtcttcgaccggtcagacaaggactttgaacgtgaaattttcaaggtcgaagaccctgtggtaaagcagtcagcgggggcactcttcgataggatgtggggttcgcacggtcgggaggcagttagggagcggtctgaccaggcgagagagcaggtggcgcatgccgaggatgtcgaggatcttggaggtctgatcggtgcgccgcccgaggctgaggtcaacccggtgctgcctgaggccgaggtcaacccggggctgccctcggatgccggtgaaggctcctttgctgcactcgtgcctattgtggccggtgaaggttctttgccggcccctgcaccgaccaccgaagaccccccgaaggtggtgacgaagccggcagccgaagaccccatggccgcggctgggccttcgcaggtggcttag

SEQ ID NO: 42873 - DNA, 99 bp, Zea mays
  Peptide Sequence Number=SeqID_86248
atgaaggagctgctcctgaagctgatgcagctgagcagatgcctcctcctcctcagcctcagtagttctggcagcctgaacttgcagcaagggctctag

SEQ ID NO: 42874 - DNA, 141 bp, Zea mays
  Peptide Sequence Number=SeqID_86249
atgacgtcgaagaggatcctcaaggagttgaagtacctacagaaggacccgcccacctacgtaggaaaacaacaaggtaagcctacacggttaaattttattaaaacgaccatgatacaaaaagataaggaaacactccag

SEQ ID NO: 42875 - DNA, 2430 bp, Zea mays
  Peptide Sequence Number=SeqID_86250
atgtctggtcatcgcatagatccgccttgtggggtagcacatcttgagatgccctatcatggttctgttgacatggagtcagcttccatgcacacaaaacatttggccgcaattgctaaagaggctgtagtgtcatctgacactgttcctggagcaaaaatcagattgtggcgtagaataagggagtttaatgcatgtgtaccatacactggagtgcccgtcaatattgaagtacctgaagtggtcgtactggccttgatcagtcttcttccaaccataccacatagccttcctgctgatgctcctcctcttctgcctccatctccaaaagcagcagcaacaataatgggttttgttgcatgcttacgcaggctacttacatcaagaagtgtggcatcacatgtgatgtcgtttcctgtcgctgttgggagaataatgggtttgcttaggaatggttcggaaggagtagcagctgaagctgctggacttgtggctatgctaattggtggtggtcccggtgattcatccatcttaatggatgcaaggggagaatcccatgccacctacatgcatgcaaagtctgtactgttctcgcaaccaatgtatgttccgatccttgttaacaggttgaggccaatatcggtgtcaccgttgttatctttgtctgttgtggaagtccttgaagctatgctttgtgaaccccatggtgaaacaacccaacatgctacatttgttgagctactgcgtcaagttgctggtttgcgccgtcgtttgtttgcattatttgcacatccagctgaaagtgtgcgagagactatttctgttataatgcggacaattgctgaggaagatgcaatagcagcagagttcatgcgtgatgctgccttgaaggatggtgctcttctgaggcatttactaaatgctttcttcttgcctgctggagaacagcgtgatgttagtcggcaacttgttgctctttgggctgattcctatcaacctgcacttgatttgctatcaagaatacttcctcctggacttgttgcttacctccatacacgttcagatgaagaatcacagagccagtatgatgaagcaccgttgagcagaaggcagagacgaatacttcagcagaggagggtccgtggtagtaaaagtatgtcagtacaagaacaaggggtaccccccaatggtgttgaggatggggaacccttcaggcacaccagtgcgggcacttatggagtagcagatgttcatcagaggcatgttggcccatactcttccacccactctcctttgccaggtataagcattgatccttcttgtgcagttacagtgccacatggttttgtacctgaggccctttctgaaaataatcatcaaattggggaaccacagctggattcacatgtttattcagtggactccaatgccaatggtgatcttgtgagctcatcgcattcagatttttcagtccctgcacaggttgtggtggaaaacactcctgtgggatctggcaggctcctgtgcaattggtatggattttggagggcattcagtctagatcacaacagagcagatttgatatggaatgaacgcaccagacaggaactgagggaagcattgcaagctgaagttcataacctggatgtcgagaaagcaagaacaaatgatattgtccctggaagttcagtcactgaggacgctggtggtagtgacaacttacctcgaatgtcatggaattatgctgaatttttagtgagctacccaagcttgtccaaagaagtctgtgtggggcaatactatttgcgactgctgcttgaaattggaagcaactatcgagcacacaattttccactacgagatccggttgccttttttagggctctgtaccatcaatttttgtgtgatgcagatattggtcttactgtggatggtgcagtacctgacgagttgggatcatctgatgattggtgtgacattgggagattagatggctttggtggtggtggagggtcttctgtcttgatgaatgacctttcaaatgttgaagcatgtgttttggttggaggctgtgttttggctgttgatttgcttactgttgcacatgaaacatctgagcggactgctattcctttgcaatctaacctcatcgcggcaactgcatttatggaaccttcaaaagaatggatgtacattgataaagatggcacacaagttgggccacttgaaaaagatgcaataagaaggctgtggtcaaagaagtcaattgattggacaacaaaatgttgggcttctggcatgtcagactggaaagggctacgggatatacgggaactgcgatgggcactttctgtaagagtgcctgttttgactcccactcaggtatcaagggcttatttggttcagctttttactgaggaacttttctaa

SEQ ID NO: 42876 - DNA, 714 bp, Zea mays
  Peptide Sequence Number=SeqID_86251
atggacgtggccgtagcatccggaactggcattggtcacctgcatttcctgcacgttttgctgctggaaagcccctggttttcgccggcggagtgtatggagcgggaggaggagcaggaggcgggcacgggcacgggcacggcacaggcactgctggggaggcgcgtgcgcgcggacacgcggcaccccgtgtaccgcggcatccggtaccgtgggggcaagtgggtgtcggagatccgggagccgcgcaagtccagcaggatctggctgggcacgtacccggccccggagatggccgctgccgcgtacgacaccgccgcactggcgctgcggggcgctgaggccgcgctcaacttccccggcgcggccctgtcgcggcccgtgccggcgtcgcgctcccccgacgacatccgcgccgccgccgcgtccgccgcccgttcccagtcgccgcaggtgggtggtgaagctgctgctgctgctggtggtggtggtggtggtgcaagcacgtcgtggtccggtgccggtgccgatgcacagggcccggcgccggagcgccgagcgggcgacaggagcatcgtggacgaggacgacgtgttccaggtgccgcggctgctggcgggcatggccgaggggctgatgatgagcccgccgaggctcgccggcgccgcgttgctggaggaggacgtcgtggtgagcctgtgggaccactcgtga

SEQ ID NO: 42877 - DNA, 432 bp, Zea mays
  Peptide Sequence Number=SeqID_86252
atgggcaagggtaccaagcgcaagcgtgagcccactcctccgtcggatgatttcggtgactcggaatactcggaggaggagttctcctccgagtccgagggatctccggctcccgtctctcccccggcgtcgtctgatgattcagacgactcccaggggattgccgcggaggtctggacgtacatccgggccgtcgagcgctctgggctcgagggctcggatgagtcggagttctcctcggaagaggaggactcggacggcgacgagggggaggatgacgacgacgacgacgacggcgatggcgacggcagtggcgaggtgagcaagggcggcaccaaggacggcagcagcgtgggcagcaccggaggcggcgacagcaaaggcggcaccaggggcggcggcggtggtagcaacagcaaggccagtggctaa

SEQ ID NO: 42878 - DNA, 207 bp, Zea mays
  Peptide Sequence Number=SeqID_86253
atggcgaacgacgatcgcgtggagggtatggtcgcacagacgcgcgacgacgtgagcgtgacgactaggcagtgggcaactcgtgccgcgtggaagaggaggagtggggtggacaatgacggtggtggcgcgaggggaggggttgacggcggtgtggacgcgaggaggggagggctcaaggatgatccaaataatattgtccattag

SEQ ID NO: 42879 - DNA, 1888 bp, Zea mays
  Peptide Sequence Number=SeqID_86254
gcgtagcgtagctctctccaagtctccatttcccttcccgaaccctcgcgccgccgcctactccagcctccagcgtgatctgagtcctgaccaagccctaaacgccaccgccctcgcaaatctcctttcccttcgatccatggccgccgccgtcgccgcccccgcgccatcccgcaagacggagacctacaccgacaccaagcgccgcgacgacgtgcgcggcgccaacatcgccgctgcgcgcgccgtcgccgacgccgtgcgcacctcgctgggcccccgtggcatggataagatgatcgcttcgggcgaccaggctcaggaggtcatcatcaccaacgacggtgccaccatcctttcccgcatggcgctcctccagcccgccgcgcgcatgctcgccgagctatcccgctcccaggacgccgccgctggggacggcaccactaccgtcgtcgtcctcgctggatccctcctccgccgcgcccagtcgctcctctccgccggggctcaccccaccgccgctgccgacgccctccaccgtctcgccacgcgcgctgttgagatcctccacgccatggccatccccatcgagctatccgaccgggaatccctcgtcaagtctgcgtccacggctctcaactccaaggtcgtctcccagtactccacccttctctcgcccctcgccgtcgacgccgccctctctgtggtggaccccgctcaccctgaccttctcgacctccgggacatccgcatcgtgaagaagcttggtggcaccgtggacgatactgagctcatccctggcctcatctttgacaagaaggctagccatgctgctgggggcccaactcggatggagaatgctaagatcgctgtcatacagttccaaatctcaccacccaagactgacattgagcagagtgtcattgtatccgactacgcacagatggaccgcatcctacgtgaggagcgcaattatatccttgggatggtaaaaaagatcaaggcggctggatgcaatgtattgctcattcagaagagcatcttgcgtgatgcagtcactgacttgtctctgcactatcttgctaaggcaaagattctggtggtgaaggacgtggagagggatgagatggagttcatcaccaagaccctaaactgccttcccattgccaacattgagcacttccgcacggataagtttgggtatgcagatgttgttgaggaagtctctgttggagagggcaaggttgtgaagatcactggaatcaaggacatgggtaggaccgcaactgtacttgtcaggggatctaaccaattggttattgatgaagctgaacgcagtctccatgatgcactctgtgtcataagccgcaaccaaaatggcagggatgctgtccttggcgttgatgttgcgtcgtgcgagaccttatgtgatgctagtctgaagtactggctggatgaaacccatggaacaaacgccaggtgcttggtcagcaagagatttttgattgctggtggtggtgctccagaaatagagatgtcaatgcagctggctgcttgggcaaaggagcttcgagggatggagagttactgcatcaaggagtttgctgaggcgcttgaggtcatcccttacacattggctgagaatgctgggctcaacccaatctccattgtcaccgaactcaggaatcgccatgccagaggtgagaagaacactggcatcaatgtgaggaaagggcagatcacaaacatcctggaggagaatgtcgtgcagccgttgctggtcctctccatcgaagctgctggggaggaccatattgccgacctccctaggagctcctcgccctccttgtcacacccgtttttacaagacaaaccaaatgtgaaccat

SEQ ID NO: 42880 - DNA, 201 bp, Zea mays
  Peptide Sequence Number=SeqID_86255
atggttaaaaattttgacaggaaaacagtgcaaatagcaatgaatgttgtggtaacttcacacctactcgtctgtttatatagtgctgcagcatttgagaacaagtccccaacagatccactacgaggcctttacaaagttccactagcttccgaaaacccactacagtttatgggaagagcacttgcaagaatcccctag

SEQ ID NO: 42881 - DNA, 255 bp, Zea mays
  Peptide Sequence Number=SeqID_86256
atggctatggtggcagatgctatgtatggttttgcacaaaccattatatgtccaaaggatccaacattttctaaagtgcataacaagcttagaccttatgacccttcctttgatgggtgcataggagaagcgaactatccacatccaccagcagggaggtattatctagtggatgctggttactcaattcgcgatggttacttgccaccatatctaaatcagagacatcacttagaagattttaatcgaacatga

SEQ ID NO: 42882 - DNA, 507 bp, Zea mays
  Peptide Sequence Number=SeqID_86257
atggtttacttttttcattggactgatgatcgtctcttgcgcgttaaaaaaatgactgatgatccacatgctctacgacagtggtgctcttttacacactctgatgcaacatacagtcatacacatattattgagcagaatgatatgactattgatgagtattattctgcttttgatcgtttgatgagttctttgctatccatgttgccaacctgtgcaaccaatccatgtccagcttatcagtttattgagaagttcttcacatttgtcatgggagttcgggctgaatatggcactctttgtgctcgtctactccacacttctgattctattactatggcaaaggctttgtctgaccttcttgatgaagagactcgtctcaagtcaatgtcttctgctactggttctggctctcatagtgtattggctgctgctcacaagtcctatgcacctaggagttccttttggttccttctgagcatttcaagaagaataccatcggtctga

SEQ ID NO: 42883 - DNA, 1335 bp, Zea mays
  Peptide Sequence Number=SeqID_86258
atgggttctccccctgacccaaccccccccccccccgaccccaacccctccccttccgccagccaccacagcccctcgacggctgccactccggcgtcggcgaccacccctcagtctcgtcctcttggcttccgcgcctctcaggttggacggtccaaattccagcgatgggatgacactgcttcgggttcctcctctggcagaccgttgcactcctataaggaggcccttctatctagaaccggcaccacctctcctgcgttagatgtgaagacctttagcgcagcgaggtcggtgttctgtgacaaggaagagagacagtgccggcgtgatgccttggcgccggtcggcaaggatgatggctggcacgtggtgaagagcagaaagcggtttcgttgcgctcctccgcgtagagggaacactgtgaacctccgcggaaggtgtctcaagctcgagcatcaagcttccctctgcccttccatacaagtcggtcctcaggagcagaagatccccggttgcttgcgtgaccacctggacaccgatagaccgttcagccgagaatcatatcgggagggaaagaagtttgtctggcagcgtttagaagagcccagggaccgcctctcggtgttccggagattatcatctcagaaggtctcatccctacagagcggagctgggagtgttgctcctcatcagaagaagtcggtttgggtgcgtatctctcctactccccaaacaaccgacccaaagactgatcagctcattccaatgatgaacaaccttgctacggttgttgatcaacgttcccttcgcaacaagagaaagagaagaaggtccaagagtaagaaaggaaaaggtcctgtagaagatgcgggagctggtgcaagtgtggactccccgccctcttcatctgataatactaaagctcattacactcagtcgagggtggaaagccacaacatatatctcccaacagctgacgtctcacgtgttcttacgttcactgatgagatggcaagggaggagatcaatttacgaaaggccctattcgtcaccattgcaggaaccagacctgtagtgcagggatcagaggtgttggatgaggtggctcgcagctttggtgtaagcattgacaaaatgtccatccaccattcctcgccggaggatttcttacttttcctgccggatgaggaaatggcatccaaggttttcaatgatggcagattgttcactggacctcgtttctgcatgttgttcaaaagatggtctagattcttgcatgcttctgtctcgaatggcccacttagtggatgtgcagatctgtgggatccctga

SEQ ID NO: 42884 - DNA, 651 bp, Zea mays
  Peptide Sequence Number=SeqID_86259
atggagacaggagggatcctcgtcctcgacgttcgggcgctccccctgatggccggtccatctcaggacgtggaacatgctgctaaagaagaaatcttgtgtgaagatttgaggcagctgcaaattctcaaggcaatcggtcaggacccaaggtggaagatgaacaattccctagacatggaccccactgtcattatgagtggggcacgcgggtcgctgacccctcccaagacaattttgccccagcccctggtgactgggtcgctggaattggctgggtcgggatcgccccttgcgttagtcccttctcaggtctctgctttccccccggctggacccgtccttgggccgcctgaaacgacctgcttgtctgatgtatcgccccacatggttgggccgcttgagacacatactctcagaccagtctcgccccaggacgttgggatgggaaatgctggttctggctctggatttgggctgcctcagacggactgtgcgcctgtggcctcgacccctattattgggttgcctgagacacagaagtttgtgttcttgccttcgatgggaaacagtggtggcatccttgtggcttggaagaggaacattggccatactggactccagagaattgacagtcatagggaatgctga

SEQ ID NO: 42885 - DNA, 1128 bp, Zea mays
  Peptide Sequence Number=SeqID_86260
atgaagcatttttccccaaaacaactgcagtcattgaatgtggatgaaaaatgggaaggggcttcaattgggacaattcttatgaggaacaagcttcaagatgctactctcgatgaaaatattcttcgtatgatctttgtactgaattcaactgactccagtgtcaaacaaatacagtattgtgccatcatcctacagcctgttgatcttaagattgatgaggaaacgttaatgaagctagtaccattttggagagcatctcttgcaccttcaggcacgacaagcacacaattttatttcagacgttttgaagtacatccaattaagatcatagcaagctttcggcctggtggccgacgcacaacatatagttctgctcaagaggctctgagggcactacttcatagtgttataaaggtgcctgaaattagcaactcagctgtggagctcaatggggttctcctaaatcatgctttagttacatttcgtgagctacttctaaaatgcgctcagcactactcatggtatgtattaagggcaatttatgtaacaaagggaagcaaattgcttcctccatcttttgcctcaatttttgatgactctgcttcatctgttcttgatgtcttcttcgacccttctgatggatcgctcaacgtccctggccttaccataggcatgtttaaatttataagcaagaacatgaagtcgggtggtttttctggaacaaaacggtaccttggtgatctcgggaaaactgttaaaactgcaagttcgaacgctctctttgctgctgtcacagaaatttcagatagtgttgttagaggagcggaaacaaatggtttgaatggcatgctatacattgaagggtacctgcaggctatgttggatgtcatgtataagcaagaatacctccgtgtcagggtgattgatgaccaggttatactgaagaatctaccaccaaatagcgccctgataaacgaaatcgtggacaacgtcaaaagctttcttgtgagcaaggcactgttgaaaggcgattcttccacagttcgaccgatgcgccatctgcgaaatgaacctgaatggaggattgccccaacggtgctcaccctctgcgagcaccttttgtga

SEQ ID NO: 42886 - DNA, 717 bp, Zea mays
  Peptide Sequence Number=SeqID_86261
atgggtcaaggagaggagccaacttcttcaaaggcatatgcttttacatgtgataacaaaaaaatgagaggcaagaagaaggctccaagctcaagtgaagaagaggaggaagaagaagatgatgacgatgatgatgaagatgatcaagcctcaatatcatcctccgaggatgaagaaacagtccgacgtggcggaaaggactcgcagccaccgctcatcatcacgctcttcacggtcatctcacaaatgccttatggcgagagaaatgttgttatagaaacatgttcagatgagattgcaatagagaatgagcaattaaggcaagaggtggcttgcctaggcaaggctttgcatgacaagaaaggcaaagccaaacaaagccaacctccacaggataacaccactgtgggagtgaacaagcctgtagagggagaaactgtggtttgtaggctatgccacaaggaatgccacaagtcttaccaatgcaaggtgaagaccggggaaaagcaaaagaaaaagccaacaagcaaaatctccgacacctacatcaacaaggtggataaaagggctgctacaccatatttgattaagaagaaaaagaatggaaaggtgatagcagtcaaggccaacaagcaagccaacaaaggaaaggggaccaaacgcatccgggtgccaaataagattatctcaaccatgaaaagcactaagaaggtttag

SEQ ID NO: 42887 - DNA, 648 bp, Zea mays
  Peptide Sequence Number=SeqID_86262
atggagctcttggagaagctgccgcagccaggaggcctcggccactccgttggccacagcgcggtactcggcctcagcgttagagcgagagacgacgggctgccgcttggtggcccaggagacgagatagagaacagctcaaggctggcacttgtgtgtcattttaaagataatggggatgcactaattcctgggcaacagtcaacttcagttttcttgagccacttaacatttgatgataatatttcacatgatcaaatggtttctatttgcttactcaaggaaggtgtattttcaactattccaatcagcatttctctccacgagtctggtatttttgcatggagaacccgtgtgtcaccagtcaaagacctgacaaccttttctggaccatttattgtggtcaaggtgtctcatagttctgaggaaggcttatctctttcagttcaacctttggttaggatccataataagagtgactttcctcttgaactccggtttcagaggccaaacaaagctagtgaagaggctgcatttgtcacagttagaagtggagatatggtcgatgaatctactggagtatttgacgccatggatttgtctggtggaccaaaaagagcattgatgtctctagctcttggcaagtaa

SEQ ID NO: 42888 - DNA, 354 bp, Zea mays
  Peptide Sequence Number=SeqID_86263
atgcaaaacaatgtcaatatacctgaaaccatgttagcagaatcagcagaaaagacttcaagaggagtggtgtacctggattttgcatttgacaacctgaagaccatcatggatcaacagcgaggtgagctgctgatgcagtttataaaactattgataaacacagtaggatttatccgaagtccaccacgtgaagcactaaagatgatgtctgatgactccaaatcaaagttgcagttcaacactgagttctacaatgaggatccgatgtgtcttcctccgcaatatgttcaacaagctccattgtgctccccttcatatcttttttataaaacgatgctagtcttccaataa

SEQ ID NO: 42889 - DNA, 321 bp, Zea mays
  Peptide Sequence Number=SeqID_86264
atggtgaaccaagtccgcaaccttaggagcaccaagtgggacgaccacgaagtcatcaagcttatcctaagtgacagggacgaggacaagaagggaatgcagaagatggagaagaagaagtactatcacaagaagtgcggtgaggcacatgttgtgagagaatgggactccatgagagatccaacaacgacaaatatgccaccaacattgtcgtcaaaaagggacttctcttccccaacatcggccacaagtgtctcatggccaaggagggcaaaagaaaggtacaacctagaaccaccccaaatatactacttccgatga

SEQ ID NO: 42890 - DNA, 2415 bp, Zea mays
  Peptide Sequence Number=SeqID_86265
atggttctcgtggaggccctgcgcgcgcggctgctggccgcgttgcggccgtggctggcggcctcttcgctcgcgccccgcgtcgtcgcgcgcgggctaaagctcgacgtcgccgcgctcaacgccgccgccggggcgggggagtccccgtcctggcctgccacgttcgaccgcgcggccgccgccgaggtcgagctcgccgcctcgccatgggccgcccccgcgatcgacgccgtcgtgcgcggcgtggacgtcgcgctcaccctcagggagcctgcgccgaggaagcagcggccagactataaggagtgggtatctgaggagaagaagcgagtgcttgcatcattggaccctcaggtgcggtttgacgatgtcatgatacaaattcgataccttgatgactcccatttttttgtactgaggacaaccgacttacggttcggccctgagcctgttttccgcagcactctgttcagaggactagttgggtctttaattccatccagaaagaagaataaattgtctgttaaatgcgctgaatttgaattcctgatgaaggagaatgattctgtagattgcagtgcatctttcactggcgtatctgcttcagtcagattggataatttgcaactttctgcctttggcattcatgttcccaaaacttgctggaaaatttcaccaaagtttgctccttctttgctggtgatattggatattgcaaaccaaaaggaagattatgcagttaggaacggcagagagctttggaaagctgctgcacaaaaggttgacaattcagtagtgtgccaaaggttttctttaagaaaagccgtaagctgtgctgctttctggcggagctatgtccatgcttatgtattgttgctgacattagcagggtatccctcagacaagattgtagtaaggaactgtggcagggtatcaaggaacaagaaatttttgggtactattagacatcaatggaaaactgttgttgatctggaggataagattcctgtagaagctattgctagagcacggcgtgctgcacgttcaaaactgattgtatcacagcaactgaaaaagcaggaatcatcaaaagcagttctggtttctttcttgttgaaaattcttatgcccttcttatgtttatggaggtttcttgtgttcatatggaggccagtgtgggcgatgatgggccctagaaacaaggcatcatatgcatatttttttcctggttctacttatgatgttgacatggagcttcatgtcagcgtacaccttggggaactgtctgtaaccttgttaccgttcgttgattgtttcactgatatgaaaggatcagacagaagaaacactcagaatgagttagcttcagtgcatcttgtaatgaagtcatcatgtttactttactcagctggttgcaccacacaatcattttatctagttctcggggaactgaagacatgcctttccagtgtcccaaagttggtacaagcagatagtaacaacagtccaaggaggagttcatcttttggaacatcagagttcatcaaggacactgactctaggataatcctctggtgtgactcagctagtatgagtccattctcccgacaacaagccgacagatctctttacttcaatgatgatttgtccactgcccttataaagagtgatatggatgagttatggtcaaattggatgataattagcaatgcatacaatgaatcgggtgtgattcatcatgaaaaaccttctattatttttgaattcaaatcttttctgattgatccttacataagtataagtggttaccaacaatgtagattcacaattgggagactaaaccttgatttggattatttatgtgtttcatcaacttatctgctgtacagacagttcatgcaccacaaacaggcaaaagaaccaactgaaagatcagctgatttttcgaacaatgatgatacccatctagactctacaagtggagttgctgacaaattgagatcatcaaatcatagaataaaggttgcaatgttggatgtgattccagaaaacactcttcgtattgtagcactggttactggtccaagtatacggaactatgtctattccttcttcggggtgagaaacgtcatctcaactaacttagaaggaaagatcattggtttcctagctttcttctgcatggatgaactcttcatggtttgccagataatcagaaacaactggagagtcatcattgttagtacaaacatcaacaataggttcatcaggatcggctgtgggactagtgcgaggatgacgaatgtaggttttgtggaagatgaagacccagatgaaggagcatggatgggaggcagccacatgaaagaggtggactctgtagaaaaagaagaatgcgtgagggagttataa

SEQ ID NO: 42891 - DNA, 420 bp, Zea mays
  Peptide Sequence Number=SeqID_86266
atggtgacggtggaacgggcgcgcgggcacggcgagcggtggcggtcttctgagagctctaagaaggaacgacatatgagcgaaggcgagctggggcgtatgcgagtgggggaaatggcagagcgaacggaagggggcttgagtaggggttgggcgcgtggtggtggtcggaattcacgcggacgtgggcgcggccatggcgggtgcgcggattggaagttagaggagggtgagagggctgacaagcggggcccgccagacagtggctcaggcacgcagatgcgcgaaggaacgcgccgacaagcgggacccaagcggcagagagagggagggagagggcgtgcgggcgcgaaaactaccgctgacgggtgggctccaccggtcagacagagtgaacgcgcgcggaagacgaatctctag

SEQ ID NO: 42892 - DNA, 270 bp, Zea mays
  Peptide Sequence Number=SeqID_86267
atggcgaaatgccctattcggcgcgcagtcgaatcccgctgctggagaagattccgctgtgcgccgaagacagcttcgctcgcctccgagtcgcctagacgcatagaagaaatgaaaaaagcggaggatgcggaggagacgaggtggcggttgtttaggaagccggcgcccaaattgaaggtggggaacgcgagagctaacggagccgcagttgtagattggaagatggcatcatatattcatatgcctgcctgctggtgctgggggtag

SEQ ID NO: 42893 - DNA, 180 bp, Zea mays
  Peptide Sequence Number=SeqID_86268
atgaaggtggacaagatgaaggatacctcaatggcggtggaggcagtgacagagatggccatgcatgaggatataataaatacagacgtggcgcaatccaacgacagctttgctcggaacaccataggaagagaagaggaagcagcagtcatatcgaaagggtcaagcttaatcatctaa

SEQ ID NO: 42894 - DNA, 765 bp, Zea mays
  Peptide Sequence Number=SeqID_86269
atgcagaggctcggggactgctctcgcaacccggctacggccaaaccgttgacagcgtcaacaaaccagcttaaaaactcggaacctgaccatgcacccgggctacgaccaggccgcatgagggaacaacaaggaaaacagcgccgctcaccccgctccgactgctgtgccatccacccgggcaaggctgacaatagcaagttcagcctcgggcgcgacaggaagctctgcctcgcccaaccttgggtctcggtctcaggaggaggtctccgcctcacccgaccccaagactcggcctcagcttcggcctcgggaagaatcacgacctcgcccgatcccggtctcggcctcaggagaagtctccgcctcgcccgaccttgggctcggaccgaccgcgccacaggggatacatcattaccctacccctatctagctcaggctacgagggaacaagaccggcgtgccatctggctcgtcccggtaacaggcaatgatggctccccatgtgcgtccatgacgacggtggttctcagccccctacggaagcaaggagacgtcagcaggatcccagcagcaccgtcagctgtgcttctacagggctcaggcacttctccgacggccacattatcgcatacgctgggctctagcacctctccgacagccatgttggcatgtacacagggctcaggcacctctttgccagacacgttagcgcataagctacaccccccattgtacacctggaccctctccttgcatctataa

SEQ ID NO: 42895 - DNA, 371 bp, Zea mays
  Peptide Sequence Number=SeqID_86270
atgatcgatatggccaaaagtggaccggcagtaattgcagcagcaggcgagcagaagcagcgggaccgggaaaggggatacttcgaaagggatccttctccgcgaaggaagcgggcccccgagccctcctactactcaggggttcgaagactggcccctcggaaggattcgacaaccgccctagagcactcgggctccgagcccattactgatcaggggtttgaaggctggcccttcggaagggttcgacagccgccccagagcactcgggctccgcgcccattactgatcaggggttcgaaggctggcccctcggaagggtttgacagccgcccagagcactcgggctccgcgcccattactgatcaggg

SEQ ID NO: 42896 - DNA, 510 bp, Zea mays
  Peptide Sequence Number=SeqID_86271
atgaacaaaaacactggcattcaaagtgccattacaaacagaactccggttccccctccgcaggtacgaacaaccccactccatgggggaaggcctgcggagcaacggaagaccgacgaacggcacgccgtcacccgctccagcagtggcgacgacgacgacttctgctccggggggccgaacagcggcaacgctgatctcagggtggatgtcgctgccaggaggcccccgcccatgccaaaactcgtgaggcaaggacgggcagaaggccgtagagttggagggaccgggaaagggggataccccgaaagggatccttctccgcgaaggaaccgggctccgagccccccattactgatcaggggttcgaaggctggccctccgaagggttcaacagtcgcctcagatcgcgtgggcccgacacccactactggtcaggggttcgaaggccagccccccgaagggttccatggccgcctcaggctactcgggctccgcgcccattactga

SEQ ID NO: 42897 - DNA, 180 bp, Zea mays
  Peptide Sequence Number=SeqID_86272
atgtcagatgtactcagggatagcacgagtctggccatgatccagaattcctctataaggaagtttggagttggcttaatttcctacggtgaagattgcaagcagaagttgaaggctccagattcagagttgcatctccggaaagacaggagaacaagatccctgttgtggaagtggtaa

SEQ ID NO: 42898 - DNA, 810 bp, Zea mays
  Peptide Sequence Number=SeqID_86273
atggccggttctaaagatcacaccgttatcttcccagacaatatcctgaagccggctgttgaaagtctgacaggtgatgagcaagaacaatacgaggactacatgcgtcaagcgaaggagaaattcttgtcaaaatacacggtggatcaccaccagaaagttatcaaacatggagagaccgacgtcgcatctcttctatcttcgcttcaagtccccaatgtaagtaaacctgacgacatccattctattaaacataacatgatatctatgtctaatacatcggcgacaaatggggattcgcaaccccagccattatatggtaagccaatgaactcatatccagggcaaataccaccaccgtcgtccctgcttggcagatcggcgcccctggacatggtcggatcgtctaagcttttgcccggaaagtctggcccatatgcagaccatccggctttccctatcggacaatccaggaccgcaccagggctactgcgtggcgccccaataatagcgaacacaaccgatcagttcggatgtaccactggacagaccggatacgcatacgcaaaacttactgttgcacactatgcaccaaattattacacaccacagcagcagtacgttctgtcccctacgtatttaacccacatcacgccttacgatcacagggcgatcaacattatcgatcggtcacagcaagaaggtcgtcataataatgcccgaccgaatgagccccacagcctagggtccgatggtctgccaccgggcgcaatagagaaaattagggaagagatgactgaactattttga

SEQ ID NO: 42899 - DNA, 231 bp, Zea mays
  Peptide Sequence Number=SeqID_86274
atgaaggccaagtcacaccatcaaccaatcatcctaaggagtacctgcaaaaattgtgccacaagcaaggttgagtatactaatactcagctagacttacccgtgaccgcacttgtacccatcgtaaccggaatgggagaccacgtctcaggtcacgtgaggggatatgtccacttccaggttcactcaggtatccgcacgttaatccttattccaattttcatctcgtag

SEQ ID NO: 42900 - DNA, 450 bp, Zea mays
  Peptide Sequence Number=SeqID_86275
atgacagcagtaagggcagcgaggaatctcaccgaggacttacggcgtcgcggatggggctgcgcagcgagcacgagagcgacgacacgcgacgaggggagtggagatcgaacgggagggctgctgcagcgcgcggcttgctgcgcattttatcgaacaaccggcgggcacaacgacgaacagcgaggaagggggctcgctgctggaatttctgggcgtccatgggaggagctagcagggggaaacgccagggcagtggagagcgcgctcaacaggccgacggcgctctgcgcgatggtttatggctggggcgagcagggaagggagggagctgagttgagcttcctgctgctgcgcgtggaagaaaacagggagcgcccatggaggagcaggaccccgggctgggggcagcacgccatgggatcggctgttggcgtccatggaggctag

SEQ ID NO: 42901 - DNA, 333 bp, Zea mays
  Peptide Sequence Number=SeqID_86276
atgggcaggagcaagaaaggcggaagttcgtcgcaccactccggcgacaagcggaagcgcgagccgagtccccctccgaggacatcggggatcgctgccgaggtgtggacgtacatccgggccgtcgagccctccgtgctcgagggctcagatgagtcggacatctcctcggacgaggaggactcctccgactcgtccgaggaggggagcgatggtgacggcgacgacgagggcgacggcggcgacaagggcgacggcggcaagggcgacggcgacagcggcaaggacgacggcggcagcggcagggccagtggcaaagcgccactggcttaa

SEQ ID NO: 42902 - DNA, 465 bp, Zea mays
  Peptide Sequence Number=SeqID_86277
atggcaactgtggcctcccacaggagaggaggcagctgcctcacgctgcagggagtggaaagggcctctagggcctcctacagactgcagctagcggcgaggaccttgcatggaggaaggaggcagttgatgggacaagatctttctggactaggtgtcaagggacttcaaaatctagaaaatcagctagagatgagcatttgttgcatccggacaaaaaagggaagtctcatccaacaagacaacatgggattacacagaaaggtcaacctaattcgtcaagaaaatgctgaattatataagaagctctatgagaaagaagcagaaggtgaagtcaaccgagattcaacaactccgtacaactttgtagttgcagagggtgccaacgttcctatccatcttgagcttaatattccactgcaagaaaatggtgttgagcaacctgtggctcctaaattagggtaa

SEQ ID NO: 42903 - DNA, 81 bp, Zea mays
  Peptide Sequence Number=SeqID_86278
atggctgctgatcttccaagatctctccagttcagaggatgggattatgggagcttagaccagagtactagtttgtattaa

SEQ ID NO: 42904 - DNA, 345 bp, Zea mays
  Peptide Sequence Number=SeqID_86279
atggataatgccccgacaggctcgacactcatgctttcagggcttttattgagatcacaatctctcgccggctccggctcctcattctggttcaacgcgaggcgtggaagacttgggaaagcatatgaggaaaccttaacgataaaggatggcaagctatatatcttcaaggacaaatatgaaaaattcaatatgcaaggggggagaagttatgagcaagagaaggacaagaagagcataacattcaagggccctaaggtaaaatatgatgaaagtgatgatatctatagtgatattggagtttataaagaatattcttatgacaaccttgttgaagttctataa

SEQ ID NO: 42905 - DNA, 578 bp, Zea mays
  Peptide Sequence Number=SeqID_86280
atgccggggaaggcgaactattgctgcccagctaggatgcaacattccgtcctctgtcctcgctttcgtggtgaggacgggagtgaggacctgccggtgcgctttggggcggccggcgctcgctggtgcggtgttggtggacaggtggacgccgccgtcggtgctgaggtggtggcagctggagaggtaggctttttcgccgacgagactgtcagcgccacccgcggaccgacctccggctctttgtctttaatatctggttcgtgtcccttgagtggggacgcaaacgagagccttccggtggctgcggccatcctgggaccatggctgctactttggaggtcgctagcgagtcgcccggagtctatcgtcccgcaggctctccgatgtggaggtgtaaaaagttcaccctcagccaataaaagaccaagttttggattcaacaaaggagcaaaaaggcaaccgaaggcacctctggtctggcgcaccggactgtccgaggactccaactccgaactcgccatcttcgggaatttccggaagcactcgcgctatatattcaccggaactgtcccggt

SEQ ID NO: 42906 - DNA, 1044 bp, Zea mays
  Peptide Sequence Number=SeqID_86281
atgcaggcggcatgcaaccgcaccaagggggcgcaccctttcgactttgacacgtccagcatggaggcccaggcccacacgtcatgtaaccggacaggcgacacctttggcaggcaaagcaggcgacgcttcacctccgccatgatgaccgcgtcaaaaaagggaccgggaaaggggatacttcgaaagggatccttctccgcgaaggaagcgggccccgagccccctactgatcagaggttcgaaggctggcccctcggaagggttcaacagccgcctcagagcactcgggctccgcgcccactactggtcagaggttcgaaggctggcccctcggaagggttcaacggccgccttaggccactcgggctccgcgcccactactcatcaggggttcataggctggcccccgaagggttcgacagccgcctcagagcacgtagagcgaggtatgaccctgggtacgttcgatacataaccaaggctcgggctacgctcccgaggccaaggctctgctcaagggacacgatcccgcctcgcccgagcccgacctcgggcaaagacagccgaccccggaagattcacgcctcgcccgagggtcccctcaagcaacggacggaccatcgattcgctcgaggcacagctcggggctcggactcaacctcgacctcagaagacggactccgcctcgcccggccccagggctcggacacagcctcggcctcggaagacggtctccgcctcgcccgacccagggctcggactcaacctcgacctcggaaggcggactccgcctcacccgaccctagggctcggacacagcctcagcctcggaagacggtctccgcctcgcccgacccagggctcagactcaacctcgacctcggaagacggaatccgcctcgcctgacccagggctcggactcagcctcgacctcggaagacggactcgacctcgacctcggaggagccttcgtctcgcccgacctagggctcggaccgaccacgtcacagggggggcatcattaccctacccctagctag

SEQ ID NO: 42907 - DNA, 438 bp, Zea mays
  Peptide Sequence Number=SeqID_86282
atgcgctccttgctgctgcttcttgtcgtagctcttttgggccctgacagccccgacgcccatggggacgaagacgctgtcaacgaagatgatgtgacgatatttggcgctgcccctggagatgggcacgccagcgtccaggatgtgatgacaaaattggaaggcggtgttgtccatggagatggtgacgtcgattgccaggatgacgtgacgaaggtggcatgcgatgcaacccatggagatgggaacgtcggttgccaggacggcgtgacgaaggtggcatgcggcgcaacccatagagatggggacgtcggttgccaggacgacgtgacgaaggtggcatgcagcgcaacccatggagatggggacgtcggttgccaggacgacaccatgaaattggtagcagaagccataggatcaaatcgaaacctaagctag

SEQ ID NO: 42908 - DNA, 405 bp, Zea mays
  Peptide Sequence Number=SeqID_86283
atggtggggcccgagctaaggtggccaaacttcagggaggggttaaacatgggcctggcgtcggatcccgagctgaggtggctagacggtgaggaggcgctggcgacggaggtgtcaacggcggcgaagtggctggcggcgctggtgggacgaccgaagccacaccagagatggacgcagaggcgggggccacgcctatggcagcgttggtggtggccaggccagtggcggcagtcgctcacatgtcgtgcccatggcggctttggtggtggccaggccagcggcggcagccgcgcacaggccggcagtggcgtccgcgtcggcggcgaacaggccgacgacctcggcgaaggagagggggagaggcgccagggggcggctgcaaggccgctggcgggccgctga

SEQ ID NO: 42909 - DNA, 309 bp, Zea mays
  Peptide Sequence Number=SeqID_86284
atggccggcggcgacgataaggagagaggagagagtcagcgatgggctagagaatatgagcagcaacgatgtgaagaaggtggtcgatggggcagtgagggccagcaaggagctgtaaaaattatgacaaactatcttatccgcacaagacaccaaatcacaaaattctatgccctcaagtcccagctacaaggtgtatctcttcgtatacagactctgaaatcaacacaggcgatgggtgaagccatgaagtgtgtgacggaagccatgtggcagatgactagacagatgaatcttcttgccttgtag

SEQ ID NO: 42910 - DNA, 444 bp, Zea mays
  Peptide Sequence Number=SeqID_86285
atggcaatgaatgttgtggtaacttctcaccaacctatctgtttatatagtcctacaggagaagaaggtgaaccaccacagtgtgcacactggctgaatggtggactagccaatgctcggaatattttaatcgtttttgataacaagctcagggaaggtgtttttcggaccttcggcattccaaagccttcgtgtttttcgcgaaccgagctcgttatgaaaaagcgatctagcaccgcgaagggctactactgggggtcttcttctccgccaaaggtcctcaaggaagacacctttggcaaaatgatacagaggtccgccctccttctgccgaaggttctcaagacgaagaccttgcgtagaagcaacgatgtcgaaacgccgaagctgctgtcagctttggctcagatcaatcagagaaggaaaagactagatagaccctag

SEQ ID NO: 42911 - DNA, 381 bp, Zea mays
  Peptide Sequence Number=SeqID_86286
atgtcggacggccttgttgttcctatccactttgaagttggccaagaactttgcgatcatctgctccttgtgctcctcgaactggagctgttcgccttggagaagtgtcaactgaagacagcaatcagcaccacctctgctcttctggatacagttgatgcaatcctgcagaaagtaatcaggcagcagttctcaagttgcacggttataaccatagctcacagggtaccaactgtgacagacagtgacaaggtcatggtcctgtcctacgggaagcttctagaatatgaaacaccagccaagctgttggaagacaaacaatcagcatttgctaaacttgtggctgagtattgggctaataccaagagaaattcaacatga

SEQ ID NO: 42912 - DNA, 195 bp, Zea mays
  Peptide Sequence Number=SeqID_86287
atggccatgatgggttcaataactgacaagatgtacctctgccaggtaagctttgccttggacagactaataccagaaagaccaacacacaatgggagtggagagatggcgagagtagcgtgtaccctctgtggcaagaggctggacggtggtgtatttgtgctctcggttggcgtgaacccggtctggtcttaa

SEQ ID NO: 42913 - DNA, 654 bp, Zea mays
  Peptide Sequence Number=SeqID_86288
atgccgcgcacgaagaatgtgtcggcgccagggggaggcgatgatgaggatcctcgtcaccccttcaggcaggtcaagggaaagaccgtatacttggagcagcaggaaggccgcaagaagcggcatcctaggttatttgaccttcagcgtgctacagctgcacaggtgtcaaagattcaacaaaaaccaatagaaagaacaagacagggttcaaaacaaaggagcaaaaagaaaccgaagtgctccctggtctggcacaccggactgtccggtgtggcaccggacagtgtccggtgcaccagggaggattgccttcgaactcttcatcttcgggtttctcaggcgcagcccactataattcatcggactgtccggtgcaccaccggacagtgtccggtgctccagagtgaagcggctctgaactggccagcttcgggaaaatggaaggccgctccgctaaaattcaccggactgtccggtgtacaccggactgtccggtgcgccagcggagcaacggctacctcgcgccaacgatcgactctgacagcgaacagtgcgcaacagtatacgcggcagaagtcagagcagaaggacataggggcaccggactgtccagtgtgcaccgggactgtccgggtgccacatgaggactaa

SEQ ID NO: 42914 - DNA, 753 bp, Zea mays
  Peptide Sequence Number=SeqID_86289
atgagcaagaatacaagagacacaagatttatctcgaggttcagtcacaacaccaaggtgtcctacttcctcgttgtggcgcccacaaagatcctatcacaccgattcaatgcagttgatgcgcataccgctgcagtccttttctatgaatgtgtgatgacagcacttgcagagaagactgtcgtccttgtgacccaccaggttgaatttctgactgaaaccgataggattctggtaatggaaggtggtcaagttagtcaacaagggaaatattcagaactcctgggatctgggacagcatttgagaaactggtgtctgctcaccagtcttcgatcacagcattggataccagtggtagccaacagaaccaagttcaagggcaacaagagtctgctgaatacatagtgccaagtgcgcttcaggttataaggcaggccagcgacatcgacgtcatcgcaaagggcccttcagcagcaatacagcttacagaagaggaagagaagggcattggcgacctgggatggaagccatacaaagaatacataaggccatctgccaaccaggcagcaagatgcagttcatcctacaggaagatagatctggagaaggggtctgcatgggatcttggaggtgaaccaggtcatggcatgttgcagcgccttgacgagctctacggccactcgccacctccaacagcaccgtcaagcagaggcccgcgcgcaggggtagcagcaggtgcaggggcgccgtag

SEQ ID NO: 42915 - DNA, 726 bp, Zea mays
  Peptide Sequence Number=SeqID_86290
atgttgtgcgccttcgacgtcgtggagacacgtgccaatgtgtcgtcgggcgacagcagggtggcgctggtgtgcgtgttctccttcgagggcccgctcatcgggaacattgccttccagaggcggttcgagcaggagctaggcgtgctgccgagttcgtggagcgacccgctacgtgaggaaatattgacactgcgaggggaagctgtgttcaagatcaccagtgacgtgaggtactaccttgttcaagctatatgtagtaagatcagatttgtgtataatcaggttccaaaattgagaggtgctcccatggaaccccattcaacaggtcatggcactctggtaactaaattttcttttgaatatagggaacttttcaagggcccactatattatgctattactataacttttgccatgtctattatggagaacctcaccaattgctatagcacttatatgcaacttatgtgttgggaatggattcattacagctaccttgttctacaagctatggtcatatgggggaatgataggcgaatggaatttgttaggaaagcaaagattcttcaacagaactttgtgcttgacctgttaagatacaaggacaatttgtgccgatatatcattcctacaaacatacaacaaagatttaccatcgctaaaaacataagattagtgtacaattgtcgacatatttgcttatcattaaaaattctatattga

SEQ ID NO: 42916 - DNA, 369 bp, Zea mays
  Peptide Sequence Number=SeqID_86291
atggagaggagcgtgcaacggcacgctgtggcggtgggagaggatttgtccatccgcgagcctgaagatgtgcgcgaccgcaccgtggccccgcgcggcgacagccaccagcgtcgcggcaaccagccgctgcgaggagcttgcggacggctgcgagttgtcaacgcaggagcaggaacggccctgctgagacatcgcctccttctgtcttcaccgtcggatccttctcgccatggttcctatgtcttccggtacagcggagctgacaacgtgatcaacggcttgtgggcggtggacgacgatgtcgggggcggcgaggtcatcgacggcgaggtcggtggctccgtccgatccgagtgtctgcgttag

SEQ ID NO: 42917 - DNA, 1512 bp, Zea mays
  Peptide Sequence Number=SeqID_86292
atccttcaggtaatggtgctgggcatcgagtcgttggagacacatatgatgaagattgcctcatcagtggcagtagcgttctttctgaaatcacatctgagtccagcaggactgatgatggtactctgactacagtggctacacagtactctgaaaaaggatcatctactgaggatggggatccatctgatccagcagttggttctgaacagatccaggacgttcctacgtctgttgttccagcagagcctgaagaccgtgctaaattcagttctgaaatctctgaatctgaaatacagaacccgagtattgtgcgtccggaatcagacgcagctggaggtggaacttctgaactgacggatgatgtagccagacagcaggatgaggttgccgtgactggggaagatgctgtgttcgacgccatagatggaagcaaatctagtgaaaggaattctgtgcaaggtgatgagcttaatctctcctgtcaagatatactacaaacggagactggtggggggcacagtagcactgtagtggaggaagattcaggtagcaaggatcctactgcaagtgacggccaagaaatcctgatcgaagaaactgaaccaaatcagcagagcaagcatgcgttaactggctcatttgagaaagtccctgacattgagtctgttgggtcttctgctgagaaatctgtcggtacaggtgatgacttgcttcaatctggtaaaggtgcttgccactcagaaataccagtcgatatcatagctcagctgcaacttgaccctacctctggaacggcagatcatccggcaatctccaaaggggcagacaattttgaaggacaacattatcatacaacagatgaaagcatcggagcaataccaagtacatttgaacctgctgttggtgccaaagttgtatcagttgatgtcactgctgaccttacagaggatgtttgttcgtctgacataacaatagatgacggcatgcaggaaaatgtgacaagtggtactattgtaccatctcaagttgatatactggattcgagtccttccgctacagcacatgaagtcaacattgtcggtagcataaacgatgatgacgaaaagagtcaggatggaaaaagcagtgcagatcttgcttcatacgaggtaaaagagatggttgtcaaggataactttgaagaaaagcagcagaccaaagaggtcattgtagatcccactccacatgaagccaacaactttcccagtaccgataatcacgaggaaaatgagcagaacaaagaaattgttgcagacaccacttcacacaagataagtgctgtacaaagcatgggtagtactgaagaaaaggaacatattgaagatttcattgcgaaactggcttctgaagagatcatttttacaagtaacagagatattgtcgagcagcaggatgagactgatatgaaaacaaactatgaaatagacagggcacgcaacttagaagctactgaagaaattgctgctggtg

SEQ ID NO: 42918 - DNA, 1218 bp, Zea mays
  Peptide Sequence Number=SeqID_86293
atgccgtcttcctcttcttccgctgctactacgccgccggccgccgcctcgtctgaggagacgttgagtagctcgatggtggaggagttgcgcgccggcgactctgttgattttggtgtgtcacggatgacgtcagcccgcattgaagatatgcagcgattgggctactttggcggcggagttgctcgtgctccggggacggagaaagtccccgagccggagggtgaattggtcgttttcgaggcgttcttcgccgctggtctccgcttgcctgcgcaccgggtcttcgaattaaatcaattgccgtatgacggctatcctggtcaagacgaagcggaccgccgtggaaagaaaccggcggtggagactggaggcgaccctgcgctggcggccgccccgtcctcaaaaaagagaaaattaggtactgcgatgggaggacttggggtgtctgatagttttgctagagagttaatgaggacgtgcgccgccccgggggaaaggatgtcttcgcccgagctccgggagtcttcggctcggatgctgagggttaccgggggttgctggcctaggaatgttcctgtcccctacgcggctggcgaggactgttttacatctcgtatggctcgtcggtggagagtttttccttacgggcggaatatcggtgctgttgtgtgggcagtgatggacaaggatcgccaaggtgcggcgcaaaaacgccaggcgactgtcaggctgcatgaagctaggccgaagaggcagcggggggctgcgaaggctgcggcctccggcggaggcaggctgccgccggcggcgaaggcgggcgcctctgcacctagcaaggcgccggaggcaacggcgggcgttgggggctccaagtcaatgaaggtggtgccgccggccagcggagtggcggaggcctcgaaggcggcccgagcgttgccgttgtcgggcaagcgcgttgccgacttcggcaccgatattactgtagacgactatcttggtgggtcggacgaggggcagtttgctatggctgcgtctggcgcggagaccgcgacggcggccatagtgccgagggcgaggggcgaggcccttggcgccggaggcgaggtgtcggccctcgcggtggttagggacgaggcgagcgcagcgacccgccggctgaagggagtgacgaaggcgctgagtcaggcgatggaggcgctgagtcaggtccgctga

SEQ ID NO: 42919 - DNA, 282 bp, Zea mays
  Peptide Sequence Number=SeqID_86294
atggagagcgcccacaagagcggaggcggaagcgcgcccggagcgggagccggaggggagggcgtcctgtgccacgcgtgcgggtaccagtacccgaacgggcacccgagcgccaagcagcggcgcgcgcaccggaagcactgcggcaagccggcgtccgccgcggcggcggcggagggctccggggagcacgaggccagcgagctgcttctaggtaccgtgggttccgtgcctccgtggtggtgtactggactgccgggaaatgtcgtcggtaagatttga

SEQ ID NO: 42920 - DNA, 138 bp, Zea mays
  Peptide Sequence Number=SeqID_86295
atgaatcagcttgattcgttcacgcctactggcagcagttcaggagtgccggcggcagtggacatcgatgggctcgcggagaccaccaccgaggatccaagccatggattatgcaagttcgccaggtctctcgactag

SEQ ID NO: 42921 - DNA, 207 bp, Zea mays
  Peptide Sequence Number=SeqID_86296
atggcgtccatccctcctccccttcttcctcaagccagtgcctccctctgccccctgtgcttggcgctcctcccgtcgactcccatggtgaacgcgctggagaagaaccccatgttttgcgaggagaaggcaagccgctcaacgctcgtcgatgtgcggagctctgcacaaatcggaatcgccatcgttcttacaaacgtcgattag

SEQ ID NO: 42922 - DNA, 324 bp, Zea mays
  Peptide Sequence Number=SeqID_86297
atggcggcggtctcgccggggactccccatatcgcgcacccgaacccaaaaacggccacggtcggcccaaaacgtatcagggaaagaggcgaattcgttggaggttcttaccaagcgctcggtgtggccgagaactccggccacgacaaggtgcttcccggcggcgccgtgcgatctccaatgagaaattgggcggcgcatgatatagttccaagggtgggaaggtcgcgtgcaccatgggaatgccacggcgaatccccaagccaacaatcgaggctcatgctggtcgagggcccagaatttgtcgatggcggatgtggctag

SEQ ID NO: 42923 - DNA, 216 bp, Zea mays
  Peptide Sequence Number=SeqID_86298
atggcagaacaaaggggcaaaaggaatcaccctgacaaaggcttcatagatataagcataggtggaaagggaaaagatggctataggtataagatagccaagcatgaggccatagaactcaaggatcgcatgggtgaaacaaaagagagggaagtactcaccatcgtcttccaacaaaagttaggcaaggtgtactgtgtgacagacatcgcttga

SEQ ID NO: 42924 - DNA, 171 bp, Zea mays
  Peptide Sequence Number=SeqID_86299
atgccattaatggggctcggtgtatgcggctcgctctgccaaggtggtgatgaggatgatggttttggttatgaccatggtaatggttgtccgtgttgcaacccctgctcaggtgaagatgaagtcgtggaggaggacttccaggagttccaagagtacgatgagttgtag

SEQ ID NO: 42925 - DNA, 117 bp, Zea mays
  Peptide Sequence Number=SeqID_86300
atggcgagaaatatggtaaatcgttatggtgggtacaagtgcggtcactgcacgacggcagtcggggtcagtgaggcattgtacgctaaggcggtattccttaggatgattggttga

SEQ ID NO: 42926 - DNA, 171 bp, Zea mays
  Peptide Sequence Number=SeqID_86301
atgccgttaatggggctcggtgtatgcggctcactctgccaaggtggtgatgaggatgatggttttggttatgactatggtaatggttgtccgtgttgcaacccctgctcaggtgaagatgaagtcgtggaggaggacttccaagagttccaagagtacgatgagttctag

SEQ ID NO: 42927 - DNA, 255 bp, Zea mays
  Peptide Sequence Number=SeqID_86302
cattctggggtgtttgtggaccctcggggtgttacacctgccacgtggaaagcaccggacccggtgcataacgggcagacctccgagaaagatcctagacccttccgtatggggcccagacagatcaccaccgggtcccaggattctggggcagggcatacccgggccccgccctggaaggggtccggtgctggcacgctccccgctcggatagagaccccgttgctgctacgtggcttgtggctcatgacataa

SEQ ID NO: 42928 - DNA, 417 bp, Zea mays
  Peptide Sequence Number=SeqID_86303
atggttggcctcggccagacggcggcaacagctggcgacgtagcggattcatggcgacctacagggaggagaatgatggtcagctgtagggagagagatctggacaccaagggatggcgatgccttgagggtggattgcggcaaaatggagggagggagcagtacctggcggcgcccttcacggatgtggcggcgttcttcatggaggtggcggcgccctccacggcggctggcgtgacggcgacctggacagagggctggtggcgggctgcacgacgggggccggcggggagctgctccggcgagctggacgggaggggggacgcgcagcagggggccagcgctggttgctggcgacgcctttgtgggagaaagaccgatactggtcgatctctcctgtacgtggctagggattga

SEQ ID NO: 42929 - DNA, 612 bp, Zea mays
  Peptide Sequence Number=SeqID_86304
atgaagaagatgcagaggaagacgcccaccgccgagcctcgtccagatccagccgatgccctcacccaccggagggacataggatgttttgttgccttctactaccttctccctctaccattttatttctctccatatgatttggttcacgggaaccccaatggcgaggaacttgagaagaggaaggagaaggccaaggttgcctacgaatataggtgtacatttgtgctgtgcctaataggccggcccaaagcacacaatttctggcacggcccatatctggcacggtccaacctaattgccggcccacatgtacatgtatacctacgaaaggaggaagcaattggccaagctgagaaggtggaacaacagctcctggaatcaatggtgtaccttgtagggatctcgacggtaaccgtgagcacaccgtcactgcacacggcgccgatcttgtccatgtcagtgttgtccggcagcacaaacttgcgcatgaacttttggccatcaggcggtccatgcacagcgtgtgtcgaatttttagatgtcaagacaagagaacttatgctagggcccctttgcgactatgactacatgtctaactatgaagtctag

SEQ ID NO: 42930 - DNA, 712 bp, Zea mays
  Peptide Sequence Number=SeqID_86305
acccccacaggcacctcgtcctcctgtccagcggccccctgcggagtgcggacgacgcagtctgcggtcgtccaagccgacgccgacccaggcagatacgacctggccagctgacgccttgcgcggcccgtcggccgcctccaccagtcggcgcctcgcccgcacgcaccttcccgccgcgccaagggacaacgggaacggggagctttgccctttcggcggaaccagactggtccgcggggccccagcgtgtctggacgccccgcacgctggcctgacatttattatttttacctcaacttcccttggaaaaccgaggcgcgcgaggttcgccgcgccggcgtccgggaggaaaaagagcagagcggagcgccaccagccaatcctttgcctgcccaagcagcagcagcagctggcccgatggctctgtctctctccggcacctccgcccgcttcgccctcgcgtcgctggtccccccgggccagggcctacgcggcgtcggcggcgtccgggggccatgaggcgcgcgggcggagggcgcgggccgcgggcgaggccaaggaggccgggcgcgccgccgccgccgccgccgagggctcgtgggtgcccgaccccgtcacgggccactaccgccccgccaactgggccgccgccgtcgaccccgccgacctccgcgccgcgcacctcgcccgcacctacgcccgggcctga

SEQ ID NO: 42931 - DNA, 321 bp, Zea mays
  Peptide Sequence Number=SeqID_86306
atgggagaggacaccgaaaatcagaacaagctaatagattccttcttcccatcgcacatcttcctctacctctcgctctctcctgcttcgatctgccctactctgtttgatcccctctaccacaacgctaataggtgtgcaccggacagtccggtgcacctgcagacagaaggcaaccatgaacttccaaatgaagttcaaatagctccttggtcccttaaggctataaaaggaccccctaggcgcatggagttgtcaaacaagcattctttgagcatactacaactacgagacctcgtgaccacgctgctatttcgttag

SEQ ID NO: 42932 - DNA, 366 bp, Zea mays
  Peptide Sequence Number=SeqID_86307
atgctagaacattcaacagagggttatgaatcaacctggagcaggttggccacggtgagctcacaccgcacggtgttcttggttgatttgggggaaatcccaaattggggcttgctggtgagcaattggaggcacgacttggtgggttgggtgcttgactaccttacggactcgacggcacactcaatttataggctctgggggcggtggcctgtgaatttggagttggcgcggtggcggccggagaaggaagaggtcactggtggcgcaatcatggcgttcaccggtgtagtggttcagagaggatctgattcagagtgcctgaccaagcaacttgtgacgccaagatcttggatttttgcgtga

SEQ ID NO: 42933 - DNA, 439 bp, Zea mays
  Peptide Sequence Number=SeqID_86308
aagtcagatggaggttcattgccaaaccagcttttgccagaatgaagatggtttccccaagttgctgagagcatgcacagttcgtctcggaatcaggagccaaccagagtatgatggtcgtgaattcgtcgagcatggcacaaagaaagagaccgtccagtttggatggccaggatgcgtgcattggaagggaagcagctgcatgggggatgaccccatagtcgtgtacctcactgcctacctgctcaccctagatgcacagtatgatttcttggctcagcaccaccgtcagatgattgcccgagcagaagatgcagagaagcgaaaccgtaagctccatgtggatctcaccacagctcaagcccgtgcaactgccttggaaagtcgtgaagtcattgctgctgaagccctgaagcaagccaaggatgagcacgtctag

SEQ ID NO: 42934 - DNA, 273 bp, Zea mays
  Peptide Sequence Number=SeqID_86309
atggctaggacgaaccacagcgagatggggacgaccaaactgctcattctatcgagcaggtggcacgtgacggaagatgagcatgcacccaatgacggaagctggaggaagcatgcgcacgacacagtagcagagccgagtggaggggcgctgatttggaagggagcacggatgaccgaacctgagagagttcggtggcaggtgcagaacgttaccagggagctggcgaggtgctgcaaagtgagcaccaagggagctaatgccgagctgtaa

SEQ ID NO: 42935 - DNA, 810 bp, Zea mays
  Peptide Sequence Number=SeqID_86310
atggttggtcggctgctccgcctcgcagggttgctcgacagagggttggtcagcaactgggtcgctaagaggctttgggcctactttggacacctggttcctgggtacccgacactcagatcgcatctggtggcaacggcgcaacaacagtttcggccactatgttctttgctcacaaggttggcataccagtttttgttactgggggcattggaggtgtgcatagacatgggtgaacaaactatggatgtctcctcagacttaactgaacttggaaagactcctgtagctgttgtatcggcaggtgtgaagtccattttggacataccgcggacacttgaatacctggaaactgaaggggtgactgttgctgcttacagaaccaatgaatttcccgcgttcttcacagaaattagtggatgccaggtgccatgtcgtgttgattctccagaagagtgtgccaaaataatatatgcaaacaagaacctacgtcttggttctgggattcttattgcagtaccgatccccaagcagcatgcaacttcagggaaaattatagagtctgcaatacagacagctctaaaagaggcagggtacagtcaacatctgcacttctgggataaaaggataataggaaatgcgatcactcccttcatgcttgaaagagtaaaagaactaactggaggatcttccttggaagctaatattgcacttgttaagaacaatgctcttattggtgcgaacattgctgttgccctttctaaccttcagcagagagaaataagcagaatgggaagatccgcgttgtag

SEQ ID NO: 42936 - DNA, 255 bp, Zea mays
  Peptide Sequence Number=SeqID_86311
atggagagagataagtgcgctcctgtgtggatcctcaacgagcgcgagatggatgggctcggttcgttgctcgccgggaggaactttgtcgtggagcgcgaacgggtggggatcgctgggcggaccggtcccctggtcggtggacaccaccgcaggcgggagcgaccgcggctccgtctacctcgcgtgaagaagacaaaggagaaccgttggatccgcgatgttgggtcgagtacacttattcgctggaattaa

SEQ ID NO: 42937 - DNA, 795 bp, Zea mays
  Peptide Sequence Number=SeqID_86312
atgacaagcttgactaaggtaaccctatcttgttgtcttctcacatccactgcaccgttcttgaggctcttatcgacaaggttttcaagtcgcagtcaccgcagaaagtcaaacaagaataaaaagaagactggcaaattcaagtcccagaaaagaccgcgtttgtcttctgaatcagaagtcattctggaggaaacctctgtagatacaatgagcattgatgacaatgcaccctcacctgagcttataagtgatgaatcgccacaccattattctaacaagcgtaagaagattatgtctgctactgaggaagatagtaacagcagaagtttaaaaaagtttaagaaaactaaatcaagttttatttctgagttgtcacctaggccgaaggaggaccttaatgattcagatccaaaatcagtggctagaactaaaagtgatggcagactttccatcccttgcatgccagtaaagcgtgttattgtgataaagcctgagagattgaaaaagaagggaatatggtctcgagattgtgcttcagactcatggacatctgaggaagatgcagttctttgtggaactgtgcatgagtatggtcctctttgggaactggcaagtgattttcttcactccttgccaggcgggtcctcctataggggaagatatcatcatcctttgcattgctgtgagagatacagagaacttttctgcaaatatgcaatatcagcaacagataattctaacagtgaaaaggctccttctgggactggaaaggctgtacttagagtatctgag

SEQ ID NO: 42938 - DNA, 405 bp, Zea mays
  Peptide Sequence Number=SeqID_86313
atggcgtccagcagtgatagtctcagaaatggagctaagtatggcagtacactagaaattggagcctcctccgcattcggcggggcttccgcccaccgcgtctcgccacgtgtgccaatggacgccgtcgcgttcccgctgtcgcccgcaccgttcctcgacgacgacctcgatttcggggacttcaccttcgcctccgcgccgcagccgcagccgcccaccgccgccttcgcggccttcgacgactggggcgactttgtggcaagcgggctcggatccgacgcgggcacatctgccccaacggccgcgccagccgccgctccctcctcctcgccttgggagaagccgcggggcccgctgcccctctccctgttcggcgtcgatgccgccgccgacggccagtag

SEQ ID NO: 42939 - DNA, 546 bp, Zea mays
  Peptide Sequence Number=SeqID_86314
atggcgtcaaaaggtccccggtcaaggctagaccatgacacaagagctaggcgtcagaaggctcttgaagctccaagggagcctcgacggccaaaagttcactgggaccatgtccttgctgagatgttgtggctggcaaaggagtttgattctgagagaaaatggaagttgtccatggccaaaaagattgctcaaagagcaaataagagcatagttgatcaagcagcaaagggcgagagaaaacagaaggatcgtccgcccaccacgttccggcttcccagactggacgttcaaaatcccagagatggaccgatgccagtgactactcgtcatcctctggtggctccagtctggcaccgggttcctacaaataggctgtttcctactctaggagcacagttcctcgttctacgtcgggcgcacgaccgccaaacagtggcgctaaggcgtgcgcggaacttgaggcgtctgacgcgccttgccgtggagcgtaaggcgtccgtcgtggcgcagggcgtccgcaaggcgtcgacggggcgtctttga

SEQ ID NO: 42940 - DNA, 94 bp, Zea mays
  Peptide Sequence Number=SeqID_86315
gcgctgggttcgacctataggtcatggggccaaggcggaacacgtgtaccaggagaaccagtcaggacctgttagcaccaagtggtcacattag

SEQ ID NO: 42941 - DNA, 249 bp, Zea mays
  Peptide Sequence Number=SeqID_86316
atggtggactcgagggcgacgaccgcgccgcggctcgcgagagcggtcgcgacctccgatgccaccacgatcgacatctgcggactgcggcggctgtgccggttctctctagactgtacggcggcggcggcgaaggcgaagtggttgaatagtgtcatggagggactaacccctacgactgacatccataagtacagaaagctcaacatgagaggatatagttggggtgaggttctgaaagtcgcctag

SEQ ID NO: 42942 - DNA, 390 bp, Zea mays
  Peptide Sequence Number=SeqID_86317
atggacgccgtcgcgttcccgctgtcgcccgcaccgttcctcgacgacgacctcgatttcggggacttcacctttgcctccgtgccgcagccgcccaccgcggccttcgactggggcgactttgtggcaagtgggctcggatccgacgcgggcacatctgccccaacggccacgccagtcgccgctccctcctcgccttgggagaagccgcggggcccgctgcccctctccctgttcggcgccgatgccgacgacgacggccaggaggaggaggaagggccgaccgggccgccgccgatggccacggcgccccagtgcgctctgtccgtcccatccaatgggtcgcgccccgcggatctgaaggacctcatcttcgccgccacgacataa

SEQ ID NO: 42943 - DNA, 624 bp, Zea mays
  Peptide Sequence Number=SeqID_86318
atgttctggcgcatgactggcctctccgcggcctcgcccgggagcgctgcggtgggggaggaacgcggcggcctctgccagggagccctcgatcccgccgcgcggggtggcggtggatctctcgccccacggctccggcggcgcgcatgcggagcggaagcccagcttccgccgctcgtgcgagtggacggcgtcccggggcccgagcagaggctccctgcccctgcagccgccccgccactcgtgggacgggtccatggtgggcagggcgttcgcgtgctccttcgcctgcttagaggagcggggagcccccggatgggggcgacgaggagcaacgcggaggaggcggtcggggagacccgcgccgcggctgctgagagcacgaatggcggacactcgactgatgcagggggcgatgccgatgagcgccgtctcagcggaaggaggtcttgtgacactgggacggagatggccgtctctagtgctgggagacggaggtccaacaggtggagcagggtgtgggatcggagcataaccagtcctctcaaggagttccgtgaggaaaggggagcatgtcctcgagcgctccctctcggaatcgaggagggagatccggaggggtaa

SEQ ID NO: 42944 - DNA, 1059 bp, Zea mays
  Peptide Sequence Number=SeqID_86319
atggggcaaatagtaaaatttggaagaactctatcccagattggtgtctcaaggtttgatcctaaggaaggatggcaacagaagttgaatgaccaaagaagcctagacctatacagcgaaattccaagaaaaacagaatattctgaaccagaggaaactaagaaccatctacacactgcaaagcttcgtccccaaagcttatcttctatctgtaaacagggtatcttagaagtgattgctttactgggaaaagaaaaactagaatgcagaagtatagatgcattggctggcaatggtacactggatatgtgcaaggatgacaacggaaacaacatgctcaatctcaatgaagagataaaaaagagggtggaagagattagggctctactatccagtggaaatgttcagcgcacaggatgtcagaaatacaagactagccatgtcaaccgtatgattgtgagcccagtggcagaatggttgaaaggcaaactaatgaatataatgcagaagggatatgtaaagagggaggataaaagacttcaaactgcccagataaatgcagccctctcggttgcaaagctgtctacagtagttgcaggaactattggaaatttcacctttgggtcaaataatttgagtggcattgccatgactgagaggagagaagacactgacatgaagatgcatgccgcaatcatgtcagctgcagcgctggtggcagcgtcatgtgctgaggtggcgaaatctgccggagctaccagggagcaggtttcatcagtcattaatatgggaatggagactagggcactgggagatttgctcacactaactactagtgcggcagcttgtctaagaggggttgagggtcttaagatgcggataagcaactgttccttggaaggccgcatgaacaaccagaaagatgccacactatttgttcgtacacccaagggaaggttccataagaggattgtttccgtgcactgcaagtatgacaatataatactaacattaggcaagaagggtcatttcaaaagctctgaaaaatgtgagtactaa

SEQ ID NO: 42945 - DNA, 1287 bp, Zea mays
  Peptide Sequence Number=SeqID_86320
atgtaccggcggatcattgggagtctgaagtacctcgtccacatgtggcctgatctcgcgttcacagtggtgtatgtcagccgcttcatgtacagcaccattgactatgacctcgtctaccctcgtggcataggagaggctaaattgctggcaatcgatgaagcagtggatcgttgttctgtcttcatgggaaataaagtatgttcctgcaacaatggcggcaagccaattgttggcatggttactgggcgttctcacaggaaaggaagctaccacagggaaactgaaaatggacaacatgtccgctgtggcactcagcaagacatttggtaccatttcatccgtgaatgcttgaagaagttgagttttataaagctagctgcaactctgttccttttatacttggtcagtaaggatcaagctcagatgttggtgaatgtgaccagtgaacttcccaacaatgaattgcttctccagaaacacttcatggctgtaatttcatctgtatggagatcaaaatgttgccgtcatccctgctgttttaggaataagcctggtggatcaagtgagaactggcccatggtaaactttagaccaagcgtcaatctagttagggaagcccttgcagctggtcaggctaagtttacgctaactgtgattccaccaccgtcaagaaaccaggaatactcacggaattatttagaattagagttagatttcttgaaagatcaacatgcctatgaggaagacttcccgtctgtactaaatgtatccatactggaaccagaatcatccaaacaggctccagagccagtggaacaatcattgttatctgaactttcatgtagacaggctgagaaccgactcaggatagcgtcagaagcttgttatgatggtgaaagttttcattgggcatcatcatctttccacataaatgatgctgcccgccacaaatctggtttgaagtctatagggaagcacaaagcagcatcggaatctggtagacctcccaaatccaaagtccagaagattactgaattgcatcaggaagggccaattgccatgagtaattttctctgtatgcctgctcaactattgccaagtacagctgacttccacattagtgactccctatctgactttggtatcaacgattatgaattcaactactctgaggatctcttgcaagagtttgacgccctcgagttcttcccagatcagggtgactctggtctccttggtattgaagagttagaacctctttcggatttcacagatatcggatga

SEQ ID NO: 42946 - DNA, 251 bp, Zea mays
  Peptide Sequence Number=SeqID_86321
atgtggaagacgagcttgctggcgatgtggaaggacgaggatgttggcggtaatggtggacatccggggacgatgtcggggtaccgccacaccttgaagtccaactctacatgcagcaccgtcgtgtactatggcatctccatggtgccactgctgatcggcagacgcgatgaggacgaggggcagcgacatcggcatgggggatgggatcatgatgtcttgccatggtcgtcgtcttctccatttgatgg

SEQ ID NO: 42947 - DNA, 753 bp, Zea mays
  Peptide Sequence Number=SeqID_86322
atggcccgtgcccgcgcttataaaaccctcccagacttagattgttcccttccgcgcaccctcaaaccacaccggagtcgagctcgtcgccgtttgcccgtgcgtagcgagtccgcggccgcccaacccctcggccaccatagaccggccggtggagccattcccaaccccgtccagccctcggagaagactgtgcacacctctgtgaagctccccgagcgaggaatcggagtttgcttcgccggagaggccagtccacgctcgccggagctctcaaccccgccggagtacgtggaccgggtaaaccactccaccatccttcgattccttgtgcacacggtcgctatgttaccccgtgaagctcaccatgccctcggattgaaccagttcgccgtggtttggccggtatacttgccgccgacgaggacaaccgcctgcacgcgtggaccgggcgattccggccatccccgacgtcaagccgtacctcgacgtgaccgccagagtctccccgagccaaccccacccttcgccggacctccctcgccgccggtaagccgcgccaccctattctttcccgcggttactgtttacataagcggaaggactgcggaatgtaatcttgctgacggagagtacatcctcgtgccggagcaaggagctgctcaggaggtagccccggacccagcacccgagcctgcaccagaggacctgcctgccactgctttggaaggcaagccccggttttatgcataa

SEQ ID NO: 42948 - DNA, 888 bp, Zea mays
  Peptide Sequence Number=SeqID_86323
atggtggcccccacagtttttgttgttacgacaacaccaaaaaacgaagggcaaaaccaagtgaagccaggccaagcaactttcttgttgtcctttcgtctcacagcggcagcaggatccattagatgctcaggtggagcactgagccttttccggcgggagagttacctgcatctacatggaagagggaggagacccacagcttccgagcatctccgcacgccccacgtccgaaggcgcgggggcgtcgacttggatctccttgagcagctactgtctgacgacaacggctggctcgaggtggtctcacgctcgcccaactcggtagcgtttcctccactctcagccttcttctcggctgacgcgacagccaccacagtgacgacgacggcgacgaccgcgaacgccagctggtggattcagacgggtggcgcgagcccctcctccgtggaggagcagttcagccaggcactgtcctacatccgggatatgcagagcgacggcgacgtcctcgtgcagctctgggtgccggtcaaccacgatgacgggaaactggtgctgaccaccagcgagcaaccgttcacgctcgaccaccgctccgacagcctcctccggttcagggaggtgtccaccaagtaccagttctcggccgatgttaagtcggggggattcgccggggctgccagggagggtctttatcggcaggctccccgagtggtcgccgaacatcaggtacttcaccagctacgagtatcccagggtaagggatgcacaatacctcgatgtccatggcaccatgggtctgccagtgttcgagaagggaagctacaactgactgggcgtcatcaagctgatcatgacaaggcagaagataaacttcacttctga

SEQ ID NO: 42949 - DNA, 297 bp, Zea mays
  Peptide Sequence Number=SeqID_86324
atgggcgagaacgatgaagctgataggtgggcccgagctgccagggagagggagcggcgcgagagggagggaggcgagtcgctgacgggtcatgatgaggttgactatgcggtggccctcgctgtcattggttatttggagcccctctgggctgcggacggctggcgtgccgatgacatggtagaatacgtcggagggcagggcctcgcctctagcggctgccttggccaatgcgtcgacctcctcgttcttggctcggtccacatgctgcaaggtggtgacaccaagtgcccttag

SEQ ID NO: 42950 - DNA, 366 bp, Zea mays
  Peptide Sequence Number=SeqID_86325
atggcacccaggagagctagctcgaaggtagccccatccgttgacgaagctgcgaaggcagcactgctggctgagaaaaagggcaaggcccttgttgacaccacccaccaagaaggctgcgaagacgacgcactcagcaagaggcagcgtaatgaacaactcacacccaaaggcagtcttcgcacctgcagctctggaggacaaccgcaacctcccccaggcttcgctgcgccagagggtgcggacgccaccgaggacggcgaagtcatcggcgtttccgcagaggaacagctacagctgcgtgccttgcgcatcaagaaccgcaacctccagaagcaaaaggagatcctcgaggccaaacgctaa

SEQ ID NO: 42951 - DNA, 504 bp, Zea mays
  Peptide Sequence Number=SeqID_86326
atggccgggatcgacgccggcgagggggcggccgccgcgccgccgccggagatgtcgccacagcagcgtatcgagcaggcacaatgtcaagtgagcaaggatcaggttgccacttcatttagaggcatgctacatcgacgtccaggcatgattattaaggtgttgctaaagcgatgcctaagcggtaaggtgagctggagccaacaaggcgtcctgttgccttgtggcaaggctggggcgaggggaagaggcggcgacacgcgcggaagaggaggcggcagcgcgtggggaagaggcggcggcggcgcggggggttgtggcggcgttgcgggggtcgttgcagcgtcgctggtctggtggtcgtggcggccgcggcggcactgggtagctgtgggagagagaaccggagaactatggggagggagagcaacgacgaagaaccagccatgcgtgagaactggcaggcagtggctgctgggagtcggctgggagaggataacctaa

SEQ ID NO: 42952 - DNA, 1170 bp, Zea mays
  Peptide Sequence Number=SeqID_86327
gcggcgctgtccttctgtcagactggccagtggagcggtggagtgacggcggtcacctcggctctgccgggggcgcgtgtcaggatagagctttatgctgatgggggttaccagctgagaattaggcgtcttgaggcccccgagcctctgcacagggcgagaggacgatcagggacagactcggctttttacatacgcccctacgtcgcctttccgcaaggaggagggggggagtgcgccatgttaccctcgatgggcaccgaacatggtgtctccggtgagctgcgagcggcaactggcgtgccagttgctcgacgcgtgggcctgggccccaggctggcgtgtcagaagttggagaagcgcgtccatctggcgcggttgcatgccgcctgcatggctgcccgccccttctgcccgttggtctgggcgaaaatggggggtcgcctcgccgggtcttcccgtcttccaagcccccggatgggggatatccgccgcctttccgcctcctcgttggaggaacacaactccacgggagttggtacctctcagccatcgttcggcttcaaggattttcatcatccagcctggccataccccgccaccggcggtcacccaagatggccaagatggaagatgaggcgagtcggggagccgcccccgcgtgggtcggctgcccctttcttccccctgcgcccgggggtgaagggcgtccttgagccccacggagacttcctccagccatgccaggatatgcggggcgccaggggccctgggcccccgtttccttgcctgaatggctggttctcgtcctcagtgggggggagcccttccgccgtgacacctcccctaaagctgctgcctaagctgcttcgctgtctggggcaggggtgggacccctcggccgccctttggtggatcgaggctgggggtagcgatatcagtatgaacagaggcggagttggctcgagaatggggaacctggttggccggagcctagccgtgtcgcccgtcagcggtgccgacgcccaagtcggtcagtcgaggcctcggatcgggctagcgcccttggaagccggttgcccgaggccccagggacgtcgtcgatgccgagggtgctacggctcccctcggcgtgaagacccgagcctgcaggatcagatcatcttgtag

SEQ ID NO: 42953 - DNA, 663 bp, Zea mays
  Peptide Sequence Number=SeqID_86328
atggacatcacaagtaagatgaacattgcaaaagtgatactcgggtgcgtagctcggagacaactgatcaagccaaggacggaggcaagaagagcttcgaggtaccaagtgcacgggagaaggtcaaggaggctgaggaacccaaagccaagggtgaagaagaaggcttgcaaagtcaagggctcaagatcaagctctaagaaggagatcaagccaagattcagctcagtctggcacaccggactgtccggtggtgcaccggacagtgtccggtgcgccaagttgaaccccggtgaacaggccgctctcgggaggagtctggcgacgtacgactataattcaccggactgtccggtgtgcaccggactgtccggtgagccaacggtcggctgggccaacggtcggccgcgcaatccgcgcgtgacgcgtggacaagccaacggtcagatgggggcaccgggctgtccggtgtgcaccggacagtgtccggtgcgccaacggctccaggactgcaacggtcgactggtccatttatggaaggagatcaggcaccagacagtgtctggtggtgcaccggactgtccgggcattttgagacaggatcttctattccgctgcaacctactcgaaggatctttcattccactgcgatctggtctttga

SEQ ID NO: 42954 - DNA, 420 bp, Zea mays
  Peptide Sequence Number=SeqID_86329
agatgctctcgctgtggctgccagttgcgccctatcgtcttcctcctctatgcggccaccttgaacgaactggctaattttcttcaagctgctgttgactacaagaagaagattggattcaacagaacactattgatagagcctaaaccacaggaaccaacaaaacaccactgccatcatgaattggagactgcacggattaatgggctgcttggaaatatcgatgcaaacactggtgatcctcaagttggttgggacacagatcagttcatgacagacattgcagaggctactttggttatgtcaagtgtagttaagaatgctaggaaaggagactttgagacgctagaaaagaaggttctagagtggggtgagcccgctgttgcatctggcaagcaggcaaatgtattgacagtctag

SEQ ID NO: 42955 - DNA, 426 bp, Zea mays
  Peptide Sequence Number=SeqID_86330
aacatagaagtttttaattacaatatcacaaaacggaagcaagcaatcaccttggaggtcgggtcgcgggcgggtggaggcgggggcagggggcggcgtggagggtggacagtggttgagggtgccggcagcgtgggggcagcggcggccgaggcgtggcagcgtggagggtggagagtggtcgagggcgcggcggtcgagggcgccggcggcgtgggggcagcggtggtcgaggcacggcgacgtggagggtgcacggcagcggagggcaggggcgcgacgggcgagggcgtggtggcgtcggacgagggcgcggcgatgagcgagggcgcggcgggcgggcgagggcgagggcgtgacgggcaagggcgtggtggcgtcgagcgcggcggtgaaagtcgcctagaggggggggggggtgaatag

SEQ ID NO: 42956 - DNA, 219 bp, Zea mays
  Peptide Sequence Number=SeqID_86331
atgagggccaataatagtaaaagacctgagcataagtcagacgacgtcgtggtccgtccatctcatgcttccatagctcctgatcttgttgaccagggtcttgagcctgttggttatccgtactatcaaattgcattccattctcaactatctcccaaatactgggatgaagagagaaaaggtgactacacattttgtgactccaaaaagcgtagttga

SEQ ID NO: 42957 - DNA, 162 bp, Zea mays
  Peptide Sequence Number=SeqID_86332
atggcggtcctgcaaagggatttcctgcattgggagcttcctataaactgtagcggggtttttctgaagatctatcttaaccaagacaccaatacaaagaagatcaacctcatcaaggaaaggataagggtcaccgtcaagggaggtaatcgtcaaggataa

SEQ ID NO: 42958 - DNA, 390 bp, Zea mays
  Peptide Sequence Number=SeqID_86333
atggtgtcggaccccgcaccgtcgtcggcaccgcgctacttggcgtactcgctgccgtcgaaccacctccccggagaggacatcctcttctgcatcaacgtcgacctcgaggtccacgccaagatgaacgtcctcggatccatgtccaccacgtcgcagaccaaggccgaccgggccaagctcgacggcatgtacgagtgcatcctctgcgcctgctgctccacctcctgcccgtcctactggtggaacccggaggagtacctcggcctggccgcgctgctccacgccaacaggatgattatcacgagtacttcaagcgctcatttgaggaagacatcgctgcgcaagtgcctcaaggagtggaatggtgagcccctgtccatctgctga

SEQ ID NO: 42959 - DNA, 1164 bp, Zea mays
  Peptide Sequence Number=SeqID_86334
atgaaaggacaagaggataaaaggatcacgctctcactagcagcagcagcaggcaccgcctacccttcgtcctcgacgtcgacgcccctgctcatcctgtttctgttccagctgccatcgccacttaccgccgcccgtgttcttcatatctccatctctcactatcgcggccacatctttccagcttcacgccgccgccgccgccatgccagcagcagcagcagcacggcggacacggtgagcaacagaagctggagcgctttctccgatgaggttgatagccgcttgagcgccgagcagaaggagcccgccagtggtggggcactggtggtgtcggtgtcgggtggcggcgacggggcgagcatcgagttgtccaagaagcggaggggccgccccccggggtccaagaacaagccgaagccacccgtggtgatcacgcgggaggcggaacccgccgccgccatgcggccccacgtgatcgagatcccttgcggctgcgacgtggccgacgcgctcgcgcgcttcgcggcacggcggaacctcgggatctgcgtgctcgcgggcacgggcgccgtcgctaacgtgtcgctccgccatccgatgccctgcggcgggggcggcgccccgaccgccatcatgttgcacgggcagtacgagatcctctccatctccgccacgttccttccccccgccatctccgccgtggcgccgcaggccgccgccgccgccgcgtgcctctctatctcgctggctgggccgcacgggcagatcgtcggcggcgccgtggcgggcccgctgtacgccgcgtccaccgtcgtcgtcgtcgcggccgccttcacgaaccccaccttccaccgcctcccagcggacgacgacgcgtctgtctccgtctccgtctcgctctccgccggcagcggcgacccggcggacgagcaccgaggtggccaccagcaccccgtccccgtggagccgccgccgcgagagcgtcatcgccctcacgtcgtacgacgcaagcccgcgccgcaccttgcctccgcagcgccgtctgtggagccgtgcggcccaccggctgcacccatctacgccgcttgccacccgcagccgcaagacgtgatgtggccgccgccgaaccgcgcgccgcatccgccgccgccgccttactga

SEQ ID NO: 42960 - DNA, 96 bp, Zea mays
  Peptide Sequence Number=SeqID_86335
atggctggcgcctggcagctagcagatggacaggggctcaccattccactccttgaggcacttgcgcagcgatgtcttcctcaaatgagcgcttga

SEQ ID NO: 42961 - DNA, 345 bp, Zea mays
  Peptide Sequence Number=SeqID_86336
atgaagaacacgggcggcggaaaacagacggagcaggggccaggagggcaggccgcagagcccccactggccacggccggccaccgcaacgtccgctccgcccacccgcaggtcgcaggcgctggccccgacgtcgtcagttttccggcggcaatgcaatgcaatgcaaccggagcgtgcctcgaggtcgagggagggattcatggcgttgttgccctgcggcgcatcggtttcttgcaccagggacccgctgcccgagacgatacgtaccccggcgtggagattcgtcaaggcgtgggcctgacgcggatccggtctgggctgccgcccatgccaaagcgttga

SEQ ID NO: 42962 - DNA, 558 bp, Zea mays
  Peptide Sequence Number=SeqID_86337
atggaggtgcccaaggcggtggcgctcgtggccgccctggcgctcgtagcgctgggagcgctggccaccaggtggctgcagcgcatggaagcgcggaacgaggaggtacgccgcctcgcgttgctcgcggcggcggaagaggagaccatcgcgagggaggaggcctactactacgggcagtacggcgggtttgtgcgctcgtccgacttgccggaggcaccctcgctgtgggcggcgcaggaggtgcctcctgcgccgaaggaggtgatggctgaggcggcggcggcggcggcggcgacggtggcctcccctacggcggggaagggcgtctgtgcgatgtgctccaagccaacgacgctccggtgcaagcgatgcaagagtgtcaagtactgtgttggattgcttatatttgagccaatgtcaactgtcaatttgttcaattatgaagttggatttcaatggaagatcttgttttccacctttaggagtaccttgcatgctactagttctccaactgcccgaaacagatgtgtgatgcatgggtccacagtgtcttaa

SEQ ID NO: 42963 - DNA, 363 bp, Zea mays
  Peptide Sequence Number=SeqID_86338
atgttcgtacccatccaccagattgccttcccacactccccatccccgatccacagcttccttgaggatgctcttcctgcacaccatcaccctaccgtgggcgctgtcagctgctatgcaaatgctattcttcagtgcttggcatttacccggccacttacggcatatcttttagaaggatatcattcacaaaattgttctaaaactgaatggtgcttcatgtgtgagttggaaaaggtcttgatagagggcaaacaaggaaaatctccagtatcacctactggaatactatatcatttgaatgagattggggtcagttttggccagggcgaggaagaggatgcccatgaatttatgaggtga

SEQ ID NO: 42964 - DNA, 1022 bp, Zea mays
  Peptide Sequence Number=SeqID_86339
aggaccgggacgcttcaggtggtatcagagctgttaggttggccgtaggacaagtcaaaatggaggtccgctgcccaaaccagcttgtgcccagaatgaagatggtttcccctaagttgctgagagcatgcacagtccgccttggaatcaggagccagccagagtatgatggtcgtgaattcgtcgagcatggcacagagaagtgtgtcgtgaatatatacattggatccagtccgcaccatgtggaatggagtgtcactgccgctgggcacagattcaaagacacctgccaagtcgtcgctcgcaaggcattgagggccctatgtcagatctatgaagaagaagtggccgacaccctgctcagattctttccgccctttcagagaaaccgtcctgtttggatggccaggatgtgtgcattggaagagcagcaactgcttgaggatgaccccacagtcgtgtacatcactgcatacctgctcaccctggatgcccagtatgatttcttggatcggcaccaccgtcagatgattgctcgtgcagaagatgcagagaagctcatccgtaagctccatgtggacctcaccacagctcaagcccgtgtagctgccttggaaagtcgtgaagccattgctgttgaagccctgaagcaagccaaggatgagcacatccagaagttgatggaggcctacttggtaacccataaccaacgtagagccctgtggatccaagagcccgcttcatccaaccctgttcaacccatcagagctgaagacccccagattcttgaagtcttccctcaggctatgattaagcaagagcaccccgagtcctcccaaggtcccctaccagagttgtttgagcccctcaccatgaagaagattccagcaccatcccttgaagtcaaggaagaagctgcaagcaccccaccagcaccgccgccctctgaggagctacaagagccagtcccgcttgaagaagagttcaaccctgtcctgccatctcagccaccgccagaagaa

SEQ ID NO: 42965 - DNA, 285 bp, Zea mays
  Peptide Sequence Number=SeqID_86340
atggctgctggccggagctggagctcggccgtgcatgcgactgggtgccatggagggagcgtacgcaggggccgtcgggtcctaggcgtagcagggcgcgccatggagacagggaaacagggagccgagggaaggagcgccaagcacagggggcagagggaggcgctcgacatctgctggacagccgacaccggagggaagctgggcggccatgggaggggaggaagctccctgcgcgcagccgtgaggaagaaaggagcaggaaaaaaaggaagtggcggctag

SEQ ID NO: 42966 - DNA, 405 bp, Zea mays
  Peptide Sequence Number=SeqID_86341
atgaagaagaaaagcaatccaatcgcaagagctcaaatgaacacaagtctctctctcactagccactatttgattggaaagatctttggacttgggagaggatttgatctctttgatttgtgtcttgtattgaatgctatagctcttgtaaggtgtttgaaggctgaaaacttggatatattgaagtgtggtgggtcgagcgatctgcctaacccgccggtttacagcaaagtgaacccggcagatccgccgatcatgacgctcgccgtcatctcaaccgccatgcccgatgacgcaagtggaagatatgtggaaacccgcgtcgcgcaaaaaacttcgcagatttccggtgtcggcctggtgacgctttccggcgttcacgtccggctgttcgtgtcaacttaa

SEQ ID NO: 42967 - DNA, 633 bp, Zea mays
  Peptide Sequence Number=SeqID_86342
atggaaataccctcactcggtggctggactgtgattctgaaagtgttctcgcgtgtaccgagtgacaggggtgctcctctatttatcctctcgcagagggaagctgaaggagaaaggtcgccgagtcacgccaagagtcggccagctgaaggagaagggtcactcggcagacgaagagacagggtcactcggctgacagcttcagatgtgtctggcctcctcttagatgactttgaggattgccgatgttcacctcgtggggtgactcaggtgcagcacctgctcgacgtcccggaccacgttcggaatgttgtggagcatggtgttcattgtggcgctaccattgcctctgccatcactagggctgaccttcgcacccctatggatcttccccaaggcgcgtcatcgggggccttggagagcttgatcaaggggtatgatgaggcgtctagaggaatcatgggtttagtgtccttggagaacctgatccgctgcacgctgggctccttagagattctccaacagacatctgccttctgtgatcgagctcttgttcccccgattttgtataccggtaatcaaggaaaaggtcaccaaatcttgtatgggcctgctcccccattgcgcttgtaa

SEQ ID NO: 42968 - DNA, 162 bp, Zea mays
  Peptide Sequence Number=SeqID_86343
atggcatcacgctccttgcatagaaggattgggatccagccggcctgtcgtctttctggcgaccactatggtctgcagctgctccgcttcaacgacggcaaagataaaggttggggaaagtgcactaggagtcgcgtcaggagtgattttgtttcttcatga

SEQ ID NO: 42969 - DNA, 1059 bp, Zea mays
  Peptide Sequence Number=SeqID_86344
atgggctgccccgccaaccccgccgtgcacaacgagaacgccttcctcgtgcgtgtcgtcacgcccatctgcgacgtcatccgtgtcgaggccgagtccaaccgtgacggcaatgcaccgcacgccgcctggaggaactacgacgacatcaacgagtacttctggcgtcgtgacgtgttcgatcgcctcggctggccccatggaccagtcgcgctagttcttcaccccgccggaccgcagccgcgtacacaagacaggcttcatcgagcaatcgtggcatgggagggcgccaagtggccgtgggatgatctgctctcatcccgtggcttagagtccaaggacacactgacacacagtggtgttgatctacctcatggatatccagatttggtatgctatattttcttctttgtcgggtgcatttgtgggatttttgcacatttgggagagatcaaggacatgaaacagctgcgacttaggttccagttctttgcaagtgccatgtcattcaacatcatgccagaggagcaacagcgattacaactaaggtatggtttcagcagatcctttagaaagattgagtcaaatcaagtggaagcacaacggtttgcacttgtttggaatgagataataagcaagttccaggaggaagacattgttagtgatcgtgaggttgagcttcttgagctgccacctaagctgtggaatgtgcgtgtaatccgttggccttgtttcttgctctgtaatgagctgtcacttgcacttggtcaggcagttacaggatctaatcgcaggctttggaggaagatatgtaagaatgattatcatcgttgtgcagtgattgaggtctatgatagtgcaaaacatatgcttcttgagatcataaaggaggggaatgaggagcatggtattgttacacaattgttcagcaattttgatggatccatgaagatggagaagttcactgtggagtataagatgactgagctgcacaatatccatacaaggcttgtagctctatgcctccctccccacgccgcctcagcccggcaaccctag

SEQ ID NO: 42970 - DNA, 156 bp, Zea mays
  Peptide Sequence Number=SeqID_86345
atgggtccaagagcgccgcgtggcaaggaaagggagtacatcccggtgttcatcgctaggtccggacccccgaagaaggacactggacccctatacatacaagtccagggccccaagaaggcggcgtcagggtcgtctagcaggcggcacatctga

SEQ ID NO: 42971 - DNA, 327 bp, Zea mays
  Peptide Sequence Number=SeqID_86346
atggaaattaaggaaaggaaaatgaataatgactgtaatcttgctgacggagagtacaccctcgtgccggagcaaggagctgctcaggaggtagccccggacccagcacccgagcctgcaccagaggacctgccagccactgctttggaaggcaagccccgaaactcagctagtgcttttggcaaccaaaccccacagccaaacagctgcatgtctagaggttctctggaggagatgattgctgggataacttggccgtccaccttgccaccgggttggactgttgagtgggaccctgcctcggctgaggaggagcatgaggagtga

SEQ ID NO: 42972 - DNA, 1140 bp, Zea mays
  Peptide Sequence Number=SeqID_86347
atggcggggcttcacttcgtgctcgtgccgctactggcgcagggccacataatcccgatggtggacctggcgcgcctcctcgccggccgcggcgcgcgcgtcagcgtggtcaccacgcccgtcaacgccgcgcgcaacggggccgtcgtcgagagcgcgcggcgagcggggctcgacgtcgagctggcggaggtcgcgttccccggcccggggctcgggctgccagaagggatggagaacgtcgacatggtggtggaaaaggagcacttcatgccattcttccaggccacgtggaagatggacgcgccgctggaggagtacctgcggtcgctgccccggcgcccggactgcgtcgtcgccgactcgtgcaacccgtgggcggcgcgggtgtgcgccccgccacggcatcccgcgcctggtgctgcactgcccgtccgcctacttcctcctcggcacgcactgcctgtccacgcacggcgtgtacggccgcgtggcccacgagctggagccgttcgagtggccggggatggaaaagctacgagcgcgacgtggcggaggccgaggccaccgccgacggcctgctcatcaaacacgttccgcggcctcgagggcgtcttcgtcgacggctacgcggcggcgctcggaaggaagacgacgacgacgtgttgggccgtcggcccgacgtgcgcctcctcctccggtggcctggacgcgggcgcgacggccgcccgcggcaaccgcgccgacgtcgacgtcggcctcgtcctgtcgtggctcgacgcccggcccgcggcgtccgtgctgtacgtcagcttcggcagcctcgcgcagctgtcgctgaagcagaccgtcgagctcgcccggggcctcgaggcgtccgggcggccgttcgtctgggccatcaaggaggccaagtccagcgccgacgtgcgggcgtggctgctggccgagcggttcgaggagcgcgtccgggacaggggcctcctcgtccgcgggtgggcgccgcaggtgaccatcctctcgcaccccgcggtgggcggcttcttgtcgcactgcgggtggaacgcctcgctggaggccatcacccacggagtgccggtgctgaagtggcccaacttcgccgaccagttttttttttga

SEQ ID NO: 42973 - DNA, 1521 bp, Zea mays
  Peptide Sequence Number=SeqID_86348
atggcggcggcggcggcctctgccacccaagcagcactcgcgctcgcccacgacctggaggacgcctccgaaaggaaggcacacttcgtgctggtcccactgatggcgcagggccacaccatcccgatgaccgacatggcgtgcctgctggccaggcacggcgcgcgggtcagcttcgtcaccacgccgctgaacgcctctaggatcgcggggctcatcgaccacgcggcggcggcgggcctcgcgatccggttcgtcaggctccgcttccccgccgccgagttcggcctgcccgaggggtgcgagaacgccgacatgctccagtccagagacctgttcaagaacttcatggacgcctgcgcggcgctgcgggagccactcgctgcgtacctcagagagcaagaacaacctccgagctgcgtcgtatcggacatgagccactggtggacaggtgacatcgcgagggagtttggtgtccccaggctgacgttcaatggcttctgcggcttcgcgtcccttgccaggtacatcatggtccgcgacaacttgctggaacacgtcgaagatgagaatgagctcgtcagtttcccaggattcccaacgccgcttgagctgacgaaagcaagatgccctggaagtgtatctgttcccggtctggatcagatccgtaagaagatgtatgaggaggagatgagatccagtggtgttgtcataaacagcttccaagagctggaggccttgtacatcgagtccttcgagcaggttacagggaagaaggtctggacagtgggaccaatgtgtctgtgcaaccaggacagcaacacgatggcggcgagaggaaacaaggcctcaatggatgaggcgcagtgcctgcaatggctcgattccatggatccgggctcggtgatctttgtaagcttcggcagtatggcccgcaccgcgcctcagcagctcgttgagctgggactagggctggaatcttccaacagggcgttcatctgggtgatcaaagcaggagataagtttccagaagttgagggatggctcgcggacgggttcgaagaacgggtgaaggacagaggcttgatcataaggggctgggcgccgcaggttatgatcctgtggcatagatctgttggaggtttcatgacacactgtgggtggaactcgacattagagggagtctgtgcaggcgtgcccatgatcacatggccacactttgcagagcagtttgtgaacgagaggctggtggtggacgtgctgaaaactggggtggaggttggagtcaaaggggtgacacaatgggggcatgaacaagaggaggttacagtgacaaaggatgatgtggaggcagctgtgtccaggttgatggatgaaggtgaggctgcagaggagatgaggatgagagcaagagaatttggtgttaaggcaaggaaggctttggtagagggaggttcttcgtataataatataaatctattgattcatgaaatgggaaaccgggcaaatgtatctacctag

SEQ ID NO: 42974 - DNA, 582 bp, Zea mays
  Peptide Sequence Number=SeqID_86349
atggcccgacccaattttctaaccgtgtttggcgggctaggcccaaaacgagtcaggcttcaccgggcccgggtcgggccgggcggcccgtttggccaggatttggacccgaagctcagcgccatcagctacgacgccgagatgaaagacatgtaccgggaggcattgtggcagaagagaggtcgtcctagggagttatatccagatgtatctagtaaggatgctcctattcctcctgatcttcctgtgcctaaatgtgactgtgatagaccggcttggtggatcgacagtgctgataaatttgatcctcttcttttcgctaattggttgtgtggaaggactagtcatgagcgttttaagcgttgggttcctcctcccccgaatcctccaccaatgacggatgcggagaaggaggtggaagagttgaagtttgattctgggttggatcctatgtcaatgggttctcctaggggtaccaccggattcaaagccccacaacgccgcgaacaggacgagaaatctcaacctcgttcgggaccgattgagtatctagcacaacaaccacttcttccggaagcttag

SEQ ID NO: 42975 - DNA, 381 bp, Zea mays
  Peptide Sequence Number=SeqID_86350
atggcgccacgatcgcagggcccggtgtcaccacaccgaatgaagctacggctcatgtggcagacgttattttcgatggagtaccacagtccgagaaaggatccggacgtggaaagtggccatcacaaggttcgcaagggtctgttcgttttattcgtggccacgaacatgggagcgccctgcgcctacaagcctccacgatctaatttaattgatgtgggcgattcgcaacccaacgaagaggaacaacatgctgaaccactaattgaaaacaataatgaagttatgacaaagcagcttggacttttgagaacactagagggttttgtgaaatttgtatccaagaaatcaatgctggtaataggtcgaatgacatcatga

SEQ ID NO: 42976 - DNA, 594 bp, Zea mays
  Peptide Sequence Number=SeqID_86351
atgggcctctgcatatccgtgtctctctggaaggagaagctctacggcgccgacggcagcagccggtcagtgcagtgtcgcgtcgtccatgaggttgccggcgtggagagtggtgactgcgagtgcgggaacttgggaagcgacgccgacgcgctgggggtagagcacaaggcggcggcggcggcggctccggcggccatgggcgtgaaaagcggtggagtggagggagctgccgctgccgtgtcgggtggcactcctgtgcggccgatatggcagaggagggtgctgatgggcgtcaagtgccagctgccgcggttcagcgggatggtactctacgacgagagcggccggccggtgtgcactggcgtccgggacagagctcgtgaccaggaatttatgaatatttatatattatcaccaatttcatgtggatcttatatgctagagcgttctatttttttaagttcacagccggtattcatcgacaaaccggattcagacggttttaatgacaaatttaagctcgggttcaatgttcaacctacgcatgagaaacatgctgcagcgatttcagtgctgaaggacctgctttag

SEQ ID NO: 42977 - DNA, 1266 bp, Zea mays
  Peptide Sequence Number=SeqID_86352
atggatggcagcaaccacccccgcggtggtgagccctccgtctcgcagctcctgcaaagcctccagaagtggctggagattcttctgtctcttgcgcggggccccatagcgccagttgctgccggcggcggtcaccactcgttgagaaaacgacgggagcctcccatcgtcgttccggaggtaaaaccaccggcgctgccaccccttgttcgaagacacaaggatggcggggatgtactgttgcgcacgcgcctgcctcaactggaggatgcagccaccggctcgcaccgccatgcagactctcttttcccctgtcgtcaaggcaaaaggctccacggagaagagatgggtccacagatcccagtgggggtcaatccccaaaaatccttcgcaaaccgccgcgaagatggctacttgcgcgatagagttggggttgagattgtgcagctccaccccatagaagtgcagaatcgcccgcatgaaacggcttgccggcactccgaacccccgcttgtggaaagagacgaaactcagcacataccccggcggcggggacggggcggctccgctcggagggaccatccactccggctacgggtcaccggagaggggacgaagcaaaccgtcggcaacaagggcctccaggtcatccgccatgacggtggagaagggccacgggtcgcgtggcagaacgacggttacccggtcggccatcaccaagcgaagggggtggcggcggagcggacaagggcaggcgacacctttggcaggcgaagcgggcgacgcttcacctccgccataatgaccgcgtcaaaaaaagggaccgggaatggggatactctgaaagggatccttctccgcgaaggaagcgggccccgagccctcctactaatcagaggttcgaaggctggcccctcggaagggctcgacagccgcctcagagcattcaggctccgcacccactactggtcagaggttcgaaggctggcccctcggaagggttcaacagccgccttaggccactcgggctccgcgcccactactgatcaggggttcgtaggctggccccccgaagggttcgacagccgcctcagaacatgcagagcgagggatgactctgggtacgtccgatacatggccgaggctcgggctacgctcccgagaggctcgggggctgctctcgcgaactcggctctggccaaaccgttgacagcgtcaacataccagcccgagaacttagaacctgaccatgcacccgtactatga

SEQ ID NO: 42978 - DNA, 336 bp, Zea mays
  Peptide Sequence Number=SeqID_86353
atgcccgtgtcgggcttgggccgtgatccagtcacgccgtgccggcccggcacggcccgtttaaacggcgcggaggcacccaactccgtcgacgtcgatgtgtcggccgtcggccgccgtgcttcctggatcctccgtcctcggcacgtcgtcggcatcctggctcctccgtgctcaatcgacctcgcgcgagcgccggtggactggatctgctccggtgcttccccctcctcttctccggactccggtggaatggatctgcggatctgcctctcctctgtcctctccatctccggtggactggttctcctctcctccgtctctggatctgatctg

SEQ ID NO: 42979 - DNA, 1521 bp, Zea mays
  Peptide Sequence Number=SeqID_86354
atgaacaaaagaccggcattcaaggtgccattacaaacggaaccccggttccacctccgcaggtacgaacaaccccacacgattggggggcctgcggagcaacagaagaccgacgggtggctcgccgtcgcccgctccggcagcagcgacaacgacccccgctccgggtggccgaactgcggcagcgatggcctcagggcgaacgccgctgcaaccttgccctcgcccacgccggcgctcgaggggcgaggacaagggccgtcagcccctcggaagatccccactcagatcctcccggatgagcgaagcactgacctccgcgcggagacgtcgtaccggtgcaaaggcaggacagccccagaacacgaacgccgccctagcagcgcgcgacgtcttgggcggtcctcccgtgcgcgtggcgcgacaaccgcccttgcggcaggagggggcaccgggagtcaaaccggcgagcccaacgcgctgaagctgacgacgtccgtcgtcgaccagccccgcgttgtcgaagtccgcccctctcgcagggccagtgagcgccctctccctcgaacgctgaaggagaggctgacccacgaacccgcgcgggaggtagagctccggctcagcccggcctccgccccaacgaggatgatgaacatccttgaagctgagggtgggaccaagatcgcagcccggcttgcttctccccacccaggggctagtggggctcggaaggtggaaagacacgatgcacaagggagcgcggagacatggtcgcctttcaagggggtcaccctccttttaaaggcgactccccctacttgtgtccccagccgtcgtgggctgagtcttctccaacacgctccaaggtcctccccctatggcgcgggggctgggtcccacgcgtcatgcaagctggcccagagcagaagaagccaaactgtcgtgcccggtgcatgcaaccgcccagcggttacaagcattcctccactttcgcccagaccagcgggtgaaagggcggacagccgtgcaggcggcatgcaactgcgccaagtgggcacgcccctccgacttccaacgcacccagcatggaggcccaggcccacgcgtcatgcaaccggcgcgccggttgctacgtgcgagcaactgcaccgccactcgcaccactaccacgcctcctcgaccgtggaaccagtaccgcgactcgaggcaaccctgcgtacgacccagcagtgccagccaggcgcgacggtcaatacggccaaaaatgggccggcagtaatggcggtggcaggcgggcaagagcagcggtcacgtcgtcagccaagcttacgtcccatccaggggcagcgagagaaccctctctcacggcgtgaagacggcgcgcccgttttccgttcctcgaacggctcgtgcacgcacaacggccgccccgtgaatccttcgccccgtcgcattaactccgcggcgggacaggcggcgcctctggcaggggaagcaagcgacgcttcgccttcgccataa

SEQ ID NO: 42980 - DNA, 684 bp, Zea mays
  Peptide Sequence Number=SeqID_86355
atggaaggcgatcggcatcagcgtccgcgtccgctgcgccaaatcgaggaatccgcgccccaaatcgaggaatccgcctccgctatggaaggagatcgcccggtcggcatcatcctccgcgtccgctgcgcccaggctctcggtccttcgcccacgcgttgccacaaagagatggcagagcctagggtttggtctgcctcccacagccaccgctatgctttggctgcatcactcgctcctcttcggagcctccctttcgctggcggcgtaggaagagatggcagagcgtttgacaagtgcaagcccaagaaagtgccgccagggagtgcaagaagaactgccccgtcgccaagcccggagcacatgaaaattattgaagacaacggtccaggtgcagccttctatgccagtgctaaggccatgaccaatggaaatcacactttctatgtgagcaaactgatacagaggttggctagattcagtaaatatgatacaatgtatcacctgcacagatacattatgaaatgttcttcatggaacattaatgatgaccaattgaagctggaggaaacaactcttaaaagactatttgaaagtaccaaatgtttcttacttgactatggggctaaaatatatgtatgggttggccagttctggaatgacttacctcatcaagcacgatag

SEQ ID NO: 42981 - DNA, 1293 bp, Zea mays
  Peptide Sequence Number=SeqID_86356
atgccatgcgcaagactttggaagcggatgcataggctttactgccaaactattgtgttaccgtctctcgggctccgttcacctataccattccgaccccagagtcccgcagccacagatgcttccagaaccgagcatcggttctcttccgggcccacgcggaggcgagtagtgatgccgctggctgagccgccccagtggcgccgcaaagccacggatttcttctccacatctagtgtcaagctgaagcaggcagggcaatcggccggggataatatagctgatgttgctgggaaggttgggtccgcggtgaagagtcggtgggtcgtcttccaggaggctaggcagcagcagcagcagcaacggccaccgcatgagacagtgcaagagcgtatcatcaccgctgctgccaccactggtttgcttttcaggaaaggcatttcagagacaaaggagaaggttgcagtgggaaaggttaaagttgaagaggctgctaaaaaaactgcagataaaagcaagagtatcttgaacaatattgaacgctggcagaagggagtcgcaagcactgatgtgtttggtgttcctattgaagccactgtacaacgagagcaatctggtaaagctgtgcccttggtgctagtgagatgtgcagactacctggttatatcaggtttgaataatgagtacttattcaaatctgaaggtgacaaaaaagttcttcagcagttagtttctctttacaatgaagactctggcgcatctttacctgaaggtgtgaatcctattgatgtaggtgcactggtgaagtgctaccttgccagtatccctgagccgcttactacattttcgctttatgatgagcttcgagctgcgagggttagcattcctgatcttagggatatattgaagaagcttccaaatgtgaactacatgacaatagagtttgttacagcattgcttcttcgagtcagccataaatcatcacttaacaagatggactcccgcagccttgctgtggaatttgcgcctttgatcatgtggcggcaaggtgatgctggcacagatttgcgtaaccacctcaagttaaccctgaaaccgcctccaaaaattgtggatacaacatcaaatactgccacgtgggacctgtttgatgaggatggcgaggatgcttcatcccagatccccttggacgatgcttcacccccagactacaactccattgaggtcatccagtgtctgatcgagcatcataatgccatcttcactgatgcaaatgaaaccgtgtggagatga

SEQ ID NO: 42982 - DNA, 465 bp, Zea mays
  Peptide Sequence Number=SeqID_86357
atggggggtggtggtggtgatgttagtcgttccatcaaccacgaactgatggtgctgggagaacatggagaccctgagagtcgtggtgctgccactatcaaccttggtagtggcattggtattagcagtgatgctgctcctatcaaccttgccactggggactcttctactggcagaggcaatgacatagaagctcctgctgcggttggtcatggttccagcaaccacaagaggatgggcaagcagtccatgattaagttcaatcctgatggttctgttcataattttgattattgtacccatcgtgctagaactgagatgtgtaggttgattgccaggcttgatcttcctctaaattttggattggctgctagagaagagaatcttgaccttaggctcatagagttagctcacactagtgagaacattgatgaccatatctataatgtgattgatgatttttga

SEQ ID NO: 42983 - DNA, 759 bp, Zea mays
  Peptide Sequence Number=SeqID_86358
atgggctgggtcttctccaacacgctccaaagccctcccctacggcgcgggggctgggtcccgcatgtcatgcggaccggctccgagcagaagaagccaaaccgccgcgtgtggtgcacgcaaccgcccagcggttacaagtggcatgcaaccgcgccaagtggacgtgcttctccgactcccgacacgccagcatggaggcccaggcccacgcgtcgcgcaaccggcgcgccggatgctgcatgcaagcaactgtaccgcctatgccaccacctcgcctcctcgattgcggaaccaataccgcgactcgaggcgacccagcgcgcgacccagcagcgccagcctgacgcggcggccaacgcggccaaaagtgggccggcagtaatgacggtggcaggcgcgcgggagcagcggtcacgtcgtcagccaagctcacgtcccatccgggggcagcaagagaaccccctctcacggcatgaagacaacgcgctcgtgatccgttcctcgaacggctcgcgcacgcgcaacggctgccccgccaactactcgccccgtcgcattaactccgtggctggacaggcggcgcttctggcaggagcagcgggcgacgcttcgccatcgccgaaacaaccgcgccaaaaaaggaaccaggctccgagcctccttactgatcaggggttcgaaggctgcccccccgaagggttcaacagccgcctcagatcgcgtgggccctacacccactactggtcagaggtttga

SEQ ID NO: 42984 - DNA, 297 bp, Zea mays
  Peptide Sequence Number=SeqID_86359
atgaacaaaacaccggcactcaaggtgccattacaaacagaactccggttccactcccgcaggtggcgcaccgccgcccactccggcagcagcgacaacgacctccgctccgggcggccaaacagcagcagcgatgacctcagggcagacactggtgcgacaaggccctcgcccacaaccccactcgaggggcgaggacaagctaccaaggccgtggagccggagggaccgggaaaggggatactccgaaagggatccttctccgcgaaggaagcgggccccgagcccccctactga

SEQ ID NO: 42985 - DNA, 303 bp, Zea mays
  Peptide Sequence Number=SeqID_86360
atggagtattcggcaaagacaacgcttccactcaactccttcgggattatccactctttgtcggtattccgcatagttctcctctatggtgtcaaagattcaacaaaaaccaatagaaagaacaagacagggttcaaaacaaaggagcaaaaagaaaccgaagtgctccctggtctggcacaccggactgtccggtgtggcaccggacagtgtccggtgcaccaccggacaatgtccggtgctccagggaggattgccttcaaactcttcaccttcgggtttctcaggcgcagcccactataa

SEQ ID NO: 42986 - DNA, 495 bp, Zea mays
  Peptide Sequence Number=SeqID_86361
atgtgggccaaggcctattacaatatacacaacatactaacagttagttcagggcttcaggccagtttggcaaatgataaaggaaagagtatgaacatagagggaactgatgctggagaaaccgacaaggtcctttcttccaaaacggataagcagaaggattcggtggaaagtgtaacaaagcagatgagtggcattgctatttctgagtcacatgcaatgccgtccacaaatactataaacaattcgcaaccagaatcatctgctccagacatagacaagaagattcgagcactgaaaaagaaggtttactcttgctctttcttgcgtctgcacattttctatgaaaaaaagatgaatatacgcttagctgaagcacaagtacaaggtgaccctgaaaaattgaaatctgaaacgctggaaaagattaaaaagattgatggatggtgtatggaactgaagcttttggaggacagcagagctcctgcggcctag

SEQ ID NO: 42987 - DNA, 333 bp, Zea mays
  Peptide Sequence Number=SeqID_86362
atgtcgcggagctccagatgggatgttcctgtcattgttagtacaaagcagaaacaaaggcaacaagcaaaaggtatgaaccctacaactactctcaagggtggtggtggaacacaagttgtgaagcgtctgaccccgctcttacaaggttcttaccagcactgcagccgacaaacggtggccgatcctaaagggaagaggatggtggccaacaaccacaacgagaaggtgaagattctggttgatgatgagcccaaaggcgagaagtccgtctactcaggaacaaagaaggagggaaagaagaaggcgtatcaagaagatcgtctattatga

SEQ ID NO: 42988 - DNA, 1125 bp, Zea mays
  Peptide Sequence Number=SeqID_86363
atggagagggccgaggcctctacacactcggaagttgagcggacgcgcaaacagctcgtggactcataccgcgagctgggtgcgtggactgctgacttcgaggtgcccgaccgagaggcgggccttcgcttcctcgagtggctgcaagaggaattgctggcgctcccgaccatcgtggagggattcatgtcctttgcctccctcatcacctgcgaaggggccatgaatgtgctgtcccgcgaggggtgcagtcactatgagggcttcgacccgtccgatgaagactttggacgcgaaatttttaaggtcgaagaccctatggtgaaggattccgtggggcccctcttcgatcggatgtggggtccttatggccgggaggcggtcggggagcggtctgatagggcaagagagcagatggcgcatgccgaggaagtcgaagacctcggaggtctaaacagtgcgccgcccgaggctacggagggcggaccggtgctgccctcggatgctggtgaaggcccatcagacgtgctcatgcctgctgctgccggcgaagaccctgtgtcggcccctatgttgacagtcgaaggcgctcaggaggtggtggtggagccggcggtcgaaggccctacggccgcggacgcgcccgcgcaggttcagggttttgggcctgcgcacgcaaccgctactgaaagtgctaattttgtggtggcttcgatcgtggttgcggaaaatgattcgggtgattctgtgtctaagttttttgagtctgatgattctgggagttcggtggtgtggactgaagagttttcggatgagaacttggattattttgcggcattggatgtggctgcggcggaggcttcgccgtgtgtgatgggtgctgaggttcccggtccgagcgctgggcgtaggcggcgaagggcggtggcgaagtgcagagtgagtgaggtggagggtggtcgtcttcgtgtggacagggctggtaggcgggaattgttgtcctcgccaactggggcgagtgtaggtgaggggcagttgcgaagtctgtttgagggtgaggagctgaggataatgttgtttaactatagggagatgggtatcatcccgaaggttgaaccattgtaa

SEQ ID NO: 42989 - DNA, 1170 bp, Zea mays
  Peptide Sequence Number=SeqID_86364
atgccctccctgggtgggcagaaagtgcgaagtccgctttttgctttggatgtgcgagggcgggatcctgccgcggttgtgcgtgaggcggaggatggggcggtgcgaattgttgggcgctacatggcgaagacggaggcgcagcggagctgggatatacgtggatccaacgaccgcttgaatagggtattcgagttgaattgtttgccgtatggcggttatctcggggaagacgttgtcgaccgtcgtgggaaaaaaccagcggctgtgactgaagacgaccccgcgctggaggccgccccagccactaagaagaggaagctaggtactgcggtgggagaactgagggtctccgatagttttgctatggagttgatggggacatgcacggcccccgggggaaggatgtcttcgcccgagctccgggagtcttcgacgcggatgctggaggttaccgggggtcgctggcccaagaacgttcctatcccccgcgcggctggcgaagacttctttacatcttgcatggctcgtgacttgaaagtgtttccttacggacggaatattgctgctgttgtgtcgacagtgatgaacaaggatcgccaggatgctgcgcagaagcgtcggacggtcatcaggctccccgatgctaggcgtgaagcgaagagagcgcgagggagtgcgaaggctgccgcccccggcggtagccagccgacgctggctgcgaagccggccgtgcccggatccagcaaggtcccggagagcgcgaaggcgatcggcgccagcggagccaagtctgccccggacggagctgcgaaggtccgggagctgccttcgtcggggaaacgcgttgccgacttcggcacgaatattagcgtggacgactatctcgttgagtcgggcgaggggcaactagttgttgtcccgcctgcggtggcaaccacagcgtcaaccgcggtgcgcggggtgaagggtggcactttcagcgctggtggcgagatttcggcggccactgctgtcaaggacgaagcgggcactatgtcccgccggctgagggaggcgtcgcagcagctgtcgcagcagctaagtcaagcggccgacttcgccgaccgtgtggcgtcgggtgcccttactgcagatgtgtctgccgaagtcgagagacttcgggcgtag

SEQ ID NO: 42990 - DNA, 643 bp, Zea mays
  Peptide Sequence Number=SeqID_86365
atggctcgtcttagacacacagcacgtaagtcggtgattcctttcctgccatctcgacttgcggagcgtcctctgcaccgcaccgtgtccggtcagtcgagtcacctggagaagctgcaccaccgactgcgtgaggagcaggaacgccggcgccagcacagagagcagcaggactcttcctccccaccccagcaagaggtggagtccgtgaggccccgttcctctgttgcccagctggaggcgccccctgcaccaccgcgggacgccccggctattggaggagctactggaggaggtcctggaggagaccccgacgacgacgactcagaccacagcacggagtcctctgagccgcaggaggcggaaggatgggtcgcccgacccatcaccttctaccagcacagtcgcgggaggtacccggaccgctgggaggctacctgcctagttcgccgtccggaggatgacctccggggtgcggaggccgtttcggagcactattccatctccgagagggacactgcagaggcggctatgcaggatgcagcacggcgtgcactctcccagtactgttctttgttcggtggcgtgaccgacggtctcaaccttcggtactacccccgccgccctactggcagcacagaga

SEQ ID NO: 42991 - DNA, 279 bp, Zea mays
  Peptide Sequence Number=SeqID_86366
atggcccccaagagagcgaatttgaaggccgtcgtttccatcaacgacgcagcgaaggcggcactcctggcgaagaagaaaggcaaggttcccattgcagacggcatccctcagcaggccttcgacgacgaccccgtcaacagcaaaaggcaatgccaggacaaccagcccgagagggcaccgcgcgcacctgcatttctgagggggcaccacaaacacccccgccaggcttcgctcatccagaaggtgaagacaccgtcgaagacgacgatatcatag

SEQ ID NO: 42992 - DNA, 114 bp, Zea mays
  Peptide Sequence Number=SeqID_86367
atgcaggtggtatgggccttcgccttgcagatctccctcgaaggcgactggagtgatgagggggccacgctgcaggtggtgattgttcttgatacgcagggctcaaagctttaa

SEQ ID NO: 42993 - DNA, 345 bp, Zea mays
  Peptide Sequence Number=SeqID_86368
atgtccgcaggatcaaagatccacggtgagcgtgacggcgccgcccacacgcgcggcggagccatcgccggagcacgccagaccgaggccacgatgctccccgcacgcaccaaggccctgattcgcaatgaggagggtgattcgaatacgatggagctactcaccgcagctggagggcaatggagggagctggccacggaggagagcggacccgcggtggcgcttgagctacgacgagcgattccgacgtcgccggcccccaatcgcacccggaaaggtcacagaaggtttccagacgcgcaggctacaccaatcgagcacttccccagaaccaaaatgcggtga

SEQ ID NO: 42994 - DNA, 567 bp, Zea mays
  Peptide Sequence Number=SeqID_86369
atgatgtccgcaggatcaaagatccacggtgagcgtgacggcaccgcccacacgtgcggcggagccatcgccggagcacgccagaccgaggccacgatgctccccgcacgcatcaaggccctgattcacaatgaggagggtgattcgaatatgatggagctactcaccgcagctggagggcaatggagggagctggccacagaggagagcggacccgcggcggcgcttgagctacggcgagcgattccgacgtcgccggcctccaatcgcacccagaaagcgacgaacgaggacgaagacccagcgagcccagcgttcgctgccgcgcgaggtccgcggttcagtgtaatggcgtggcagagggagcggctgacggggcgggcccgcgaccagatttgcgcgacaccgaggcaaagcctacgcgaccgaggagctcaggaggacgaagacagggctgacaccccggtcccagtgccagtgacgaggatgcccgcccgggcgcgcgcggtggggaggaagaatcgcggggccggctggtcagcggcatcaggcgcgcggtggagctaa

SEQ ID NO: 42995 - DNA, 1131 bp, Zea mays
  Peptide Sequence Number=SeqID_86370
atggccaccgcattttcgctgcgcgctgcggccccggccaccgctccccgcgccgtctcccgatccacctccgcggcgagggtcgtgcccatggcatcggcactggcgggacgcggaaggctggcaaaggcggatgtgccatcgagcacgtccgacggccatgaggtcttgctgtttgaagctcttcgtgaggccttgatggaagagatggaattagatccaacagtgtgtgtgtttggtgaagatgttggccattacggtggttcttacaaggtgacaaaaggtttggctgatacgtttggtgaccttcgagttctggacacccctattgcggagaactcgtttactggcatgggagttggagcgggaatgaaagggctgaggcccgtcgttgaaggcatgaacatgggattcctgctccttgcttacaaccagatctcaaataactgtggcatgcttcattacacttccggcggccagttcaaaatcccacttgtgatccgtggccccggtggtgtgggtcgtcagcttggagcagagcactcgcagcgcctggaatcgtatttccagtccatcccaggcctgcagatggtcgcctgctcgactccttacaacgctaagggcctgatgaaagctgccatcaggagcgagaaccctgtggtgctgtttgagcacgtccttctgtacaacctgaaggagaaaatcccggacgaggagtacgtgctctgcttggaggaggccgagatggtgcggcctggggagcacgtgactatactcacatactcgcgcatgaggtaccacgtgatgcaggcagcgaagacgctggtgaacaaagggtacgatcccgaggtcatcgacatcaggtcgttgaagccgtttgatctgcacactattggcaactccatcaagaagacccaccgcgtgctgatcgtggaggagtgcatgcgcacgggtgggatcggcgccagccttaggtcggccatcgtcgacaatttctgggactaccttgacgcccccatcatgtgcctgtcatctcaggatgtgcctacgccatatgctgcgactctggaggatgcaaccgttgtgcagcctgcccagatcgtggctgcggtggaacaactatgtgcatag

SEQ ID NO: 42996 - DNA, 225 bp, Zea mays
  Peptide Sequence Number=SeqID_86371
atggcggagagaacgaggcgggaggggcggactgggagaggagaggaggcggccgcagaggtcactgcccagagcctttgtgactgcaggtgggccctggcgcctcccaggtccatctggcagccacagggctatgcgcttttagaaatggaggtattttgtgaggtggcaacagattccaccgtctcatttgtaacaagtggtggcaatttggttcatttttaa

SEQ ID NO: 42997 - DNA, 306 bp, Zea mays
  Peptide Sequence Number=SeqID_86372
atggcccaagggcacatttccctttcaccgcgtcaaaaaagggaccgggaaagggggataccccgaaaaggatccttccccgtgaaggaaccaggttcgaaggctggcccctcggaagggttcgacagccgcctcagatcacgtgggccctacacccactactgggcagaggttcgaaggccggcccctcggaagggttcaacgaccgcctcaggctactcgggctccgcgcccactactgatcaggggttcgaaggctggcccccgaagggttcacagccgcctcagacgccgagcgagggatga

SEQ ID NO: 42998 - DNA, 393 bp, Zea mays
  Peptide Sequence Number=SeqID_86373
atggtgctccagcctccattccacaaaagcagaaaacctcaaaggcagagagacgtgcaattcaggaggctcaacgtgctgctaaagcggcaacgaaggaggcagcttgcaataacagataaatcaggaaaatctgctggtgctgcaatctccaagcaagccaagccagtaaaaactgttcagaagaaagatgtgccccaagctgcaagtacagttgtttctgagaagaaggctactgaacgtcctccagaaagagaaagaaagttagatgctcctcatccccgcatgcagtttgatgatgtgcataaggtggagaaagcaaaaaaacgtgcggtagtcaaccaatcagaagctcgaaatagagttgaactgttcaggcatcttcctcagtaa

SEQ ID NO: 42999 - DNA, 258 bp, Zea mays
  Peptide Sequence Number=SeqID_86374
atggatggcaggagcgcgggggcaatggagggagcgcggatcgcgggggcaatggagggagagcggatcgcggggagaattgcagcaacggcgccatggatggaaggctttcctcggatggcaggagcgcggagggcgcgctggcgattgcaggaggatggaaggagggcggaagatggaagccgcggctgcaggcggttgcgggttgcgacgcggatgcgggatgcgggcggcagaacgtgcgccgagcgtgtgtga

SEQ ID NO: 43000 - DNA, 105 bp, Zea mays
  Peptide Sequence Number=SeqID_86375
atggcgttgtgtggaatttggagaggatttgatctctttgagctcgagtccgcccttgatgagtccgccaaggcgctcgccgaggcgcttgccggagttgcctag

SEQ ID NO: 43001 - DNA, 273 bp, Zea mays
  Peptide Sequence Number=SeqID_86376
atggctctaccacacctggcgctgaagccggaccttttcgagggtatgcgcttcgatttgaccaagatgatcaccccgtacttcgctttgactcacagcgttgccatgggatccattgagatcccggcacaggggagcgagacgatgctcatggggagggtctcacatgaagggagggagaacatccgtgtcaagcatgatattacggacaacctttctttaaagataaatgctcagctttgcttgaagccacctttaaaaatccttagttga

SEQ ID NO: 43002 - DNA, 141 bp, Zea mays
  Peptide Sequence Number=SeqID_86377
atggtggccacaaagaagacgaagaaatccacggacaacatcaataacaagctgcagcttgttatgaagagtggcaagtacactctcggctacaagaccgtcctcaggactctcaggaactctaagtttgatcgcaagtga

SEQ ID NO: 43003 - DNA, 306 bp, Zea mays
  Peptide Sequence Number=SeqID_86378
atggcgcccgaggctggacttggctgctgtcagtctcaccctgacgggtggcacagcagtcggagcagcgcaggcggcgctgttttcctgtcaggtcagtcagtggaggggcgaagtgactgcggtcactttggccttgtcgactggggagcacgcgtcaggataaggtgtcaggcgatccttgcattgaatgctcctgcgatccggtcggctggcgaggtgatctggccaaggttgcttctacgcgaagcctgcccgagctgggcctcgggcgagtcgaagggggaaccactgcggatagcctaa

SEQ ID NO: 43004 - DNA, 2170 bp, Zea mays
  Peptide Sequence Number=SeqID_86379
ctctctggcggtttccagcgcccgccgtcgaaaggaaaactccggcggcctccatctccggcggcctccatctcctgcgacctgcgcacctcttttgctccccctaggatgccgcgcacgaagaatgcgtcggcatcagggggtggcgatgacgaggaccctcgtcgccccttcaggcaggtgaaggggaagactgtctttttggagcagcaggaaggccgcaagaagcggcgttcggacagagaggctcgtgcagcagcagcagcagcagccgctgcacaggcagcacttggagatcagccggatgttccttcagatcagattgctttccgtgctcgtcgtctcgcctcccggtctcgctcctccactcacacctccgcttccactccgccacccactctgcctgccccagtcacccctattgctccatccacctccaccgccatacccactaccagttccacgccagcttccactgctacccctgctcccgctcccgcttctgctccacctgtaccccctcctcgcttccgggagcgtgacgagactgaggtccgtccactggtttcggatcctcgtctgtttgatcttcagcgtgccactgcagcccgggtacgtcggttcaggtacgtacccgtggagtcttggctgccagctcagagagacccagcagcaggagttcttttcagcacgcggattcaggagtctttcttcagggctcagttgtctgctcagattgcgctgcgtgtgcaccgcctattggatcttccagccttcttgctagcagccggtgctgagtctgaggcacatctcacctatttgccagggcttctgtcctttctgactatcagcggcagatatgttgaggagtgggtccgcgtcttctatgcctctgtttggattgacccggatcatcattggatgaggttccgctttgagcgcgaggatgtcacaatcactgccgatcagatccgacagctatttggcttccctgagtcgacgactcgcctgcacagtctctgctacggcacttcagatcctccacgtcgccctcacggcggtgtggctccagggacagctcacgtcgcggctctgttccgcccgcccttcacagatgggtcgcgacgttctcccgcagatttcaccacagcagcaaagtacttatatgagcttatcagacggactctcctgcctcggatgggatacagggaggctactactcatattcatctatggctccttggtgccctggtatcccactctgagtttgatgttgttgactttctgatctgtgagattgaggacactgttctggatgggattcgtgctcggcggcagctaccctatgctcactacttatgccacatatttgcgcagctgatccagccacctcgttttcagagcacccttgaggcctcacgccttggtgcagctgctgctgatgatgatgatgatgatgattttggggttcctcttccgcctcctatgcctccacgctcacatgatcatgaggctgggagttcccgtgctgcccctgctcctcctccagctttggaccctgcccttgctacgattcttcagactctcacccagcagcagcagactcttacccagcagcagcaaactctcacccagcagcaggctctcctggcagccgagcaggcccgtttatccgacaggatgctctcgatgtttcagagcatgcaggacaggcaggatgcacttcagcagcagcttattcaggatagggccgagaatagggcattcatggccctcatgcttcagcattctggtatctcagcacctccggttcagtctgctccgccttcttcgcttcacgctccagtggtgccttcgatcttgtctgcaccccctgctgttacctctccgctccggccggtcaccttggcgttcacttctccggttctcagctctgtctgcccgcagccgctcgtgcctccagcatctgctgttaccactaccgctgtggcagtatctgtgaccgcttctgttccggtagctcctgcagcgctgcctgcgtccgagtcagtaccagctccagcttctaccgcagatcctggatccgagactgactctgaccctccgtcggcgtttgctctgctacctcgacctcgaccggatgcgcccccgcctcctcctcctgcttcag

SEQ ID NO: 43005 - DNA, 240 bp, Zea mays
  Peptide Sequence Number=SeqID_86380
atgccaaatggatacatgtctccagtggcccattgcataatgcgtattggtcttggtgtggccaacccctttattggaaactgttgcgagaatggagtccctcatgttcggtgtaagatgagtgtcctggattctgatccaaagggatacaaactcctgtactgggctgcagtgggcaaagattttagatctcaggttcaattcggaaacaatggtttctatggagcaaactacatccag

SEQ ID NO: 43006 - DNA, 606 bp, Zea mays
  Peptide Sequence Number=SeqID_86381
atggacacgagcaacctcctgcgccagggcctaagtctgtcgcggtcctccacgccatcccaacagaggagtatgggggttcagaggcgcacgagtgtcgcggtgatcgaggcagaccgaggggatgcggagcagcgtgccctggcgacgtccctcgcgagcgggaaacctgccacaatgttggagttctactccccgcgctgccgtctgtacgcctctctgcagggcctcatgcgcgagctcaaagacggtaccagtggcgccgccaatttcgtgctcgctgacgctgaggacgaccggtggctctccgaggaatcgagtgcccaaagtaggcccaagactctcgatggcccactgcctaccaggcccctatcgagcaactctgcaaggcaaaggtcccgaccaagtccttgtcgagcgactcagcaaggtggaggtcccgatcaagtccatgccgagcaacttagcaaggtggaggtctcgaccaagtctttgtcgagcactcagcgaggcacagatcctgaccaagtccttgctgagcaacttagcgaggcagaggtcccgaccaagtctctgtcgagcaacttagcagggtggaggtgctga

SEQ ID NO: 43007 - DNA, 285 bp, Zea mays
  Peptide Sequence Number=SeqID_86382
gttgcgactgcacaaattgcaaccactggaatggtcgcgcttagttatgtttcccttgcatctgatttcatgtacaatcaaatgacaaaggatgtaacagcaagctttggttatgattatatgctgagacagtgtcgattgagagggaaactggataccaatggcgtaatttcttctcttttggaggagcgattgactccaggtgtcactttccagttgtctgcagagctggaccactggaagaaagattacaaatttgggtttggtatggctctcggagagtag

SEQ ID NO: 43008 - DNA, 1056 bp, Zea mays
  Peptide Sequence Number=SeqID_86383
atgcgcctaggggtcccttttatagccccaaggcagctaggagccgttgagaacaaatctggaaggccatccttgccttctgtcgtcgggcacaccggacactgtccgcgtgctacagcggcacgagtacgtaggttcagatacgtacccgtggagtcttggctaccagctcagagagaccctgcagcagccggtgccgactctgaggcacacctcacctatctgcctggccttcagacccttctgactaccagcggcaggtatgttgaggagtgggtacgagtcttctacgcctctgtatggatagacccggatcatcactggatgaggtttcgttttgagcgcgaggatgtcaccattactgccagtcagatccgccagctttttggatttcccgagtcgacgactcgtcttcacagcctctgctacggcacttctgaccctcctcgtcaccctcacggcggtgtggctccgggtacagctcatgtcgcggctctgttccgcccgcccttctctgatgggtcgcgacgttcaccggcagattttactacagcagccaagtatttatatgagcttatcagacggactcttctgccgaggatgggatatagggaggctaccacacatatacagctctggctccttggtgccatggtctctcactctgagtttgacgttgtggacttcctgatttgtgagatcgaggacaccgttttggatgggattcgtgctcgtcggcagttgccctatgctcactacttgtgccacatctttgcgcagctgattcagcctcctcggtttcagggcacccttgaggcctcacgcctcgtttttggatcctaccgtcctgcgcctgagattcctgtgccagcttctgctcctgtttttgactctcaggccgaggatgcagcttttcgtcagttcgacactcaggttacagcagcagctgatgatgatgatgattttggggttccttctccgcctccacctcctatgcctccacgctcacacgatcatgaggctgggagttctagtgctgcccctgctactccttag

SEQ ID NO: 43009 - DNA, 561 bp, Zea mays
  Peptide Sequence Number=SeqID_86384
atggccgccccgcgaatcgcccgtcccgtcgcattaactcctcggcggggcaagcgacacctttggcaggcgaagcgggcgtcgtttcacctctgccatgatgaccgcgtcaaaaaagggaccgagaaaggggatacttcgaaagggatccttctctgcgaaggaagtgggccccgagccctcctactgatcaggggttcgaaggctggcccctcggaagggttcgacagccgcccagaccactcaggctccaagctcattactgatcaggggttcgaaggctggcccctcagaagggttggaaaaaagggcaagcaaattatcctcatcatctctagagttctcctcatcactagatgttgcatatttagtggaggctctagattttaccttctttttgtcgtcctttgccatgaggcacttgtggccgacgtttgggaagaggagacccttgttgacggcgatgtttgtggcgtcctcgtcggaggaggagtcggcggagctctcgtcggagtcccattcccggcaaacatgggtgatagtcgcctagagggggggtga

SEQ ID NO: 43010 - DNA, 444 bp, Zea mays
  Peptide Sequence Number=SeqID_86385
atggaggcctccactcgcactggggtcgaccgagcgcacgcattgctcgtggatgtgtaccatgagcttggcgtgcgaactgccccttttgacaaatccggcgaagaggtgggcctccgcttcctcgggtggctgcaggaggagctggagacgctctcgtccatcgcaaccagcctcatgtcctacgcctcgctcgttacctgcgagggggccgcgaataccttgtcccgtgagggatgtaggcattttgaagtctttgaccgggtaaccgaggacttcgatcgcgggatcttccaggttggagacgaggtgctaaagtggtccgctggggcgctttatgataggatgtggggccctcacggccgcgacactgtctgggagagggccgaccgagcattggctcagttttttaagttaagtttttgcaatttttgtagatgctaa

SEQ ID NO: 43011 - DNA, 339 bp, Zea mays
  Peptide Sequence Number=SeqID_86386
atggtggctcagcaaagtcttcttgtctgggtgcttgcggtgggtggttgtggtgtggaggatttgggtggtgcggaggtggtggtggtagaacctacacctcttgatggtgctggtaagcatgattgggttgatgctggatttgctcgttatggtagggttgttggtggtggtgcgcacagtgctgttgggggtggggtgatcctagcgctgtctcttgctgttgacagcgtcatcttcgaaggcctctttgggggtggtgtcctcgagggctttgcctttcttctgagccgggagtgttgccttcgctgcgtcgtcaatggatgcggcagcctttga

SEQ ID NO: 43012 - DNA, 147 bp, Zea mays
  Peptide Sequence Number=SeqID_86387
atgggatacacgacttgtgggtacagggtacaacctctgcagagtgtaaaactgatggtcaatcccaggaagggtggtggaatcgatctacctcccaatcgacacactcgaaggatatttagacaaccacaacaacaacaagcttag

SEQ ID NO: 43013 - DNA, 1869 bp, Zea mays
  Peptide Sequence Number=SeqID_86388
atgtgttctcatttttactcagcgtacccgccctttgaggtggcggaggaggatgcggacgaaggggcccttcggtgcgccgccggcctgagcagtgggcgcgatttggttgaagaatttgtggcgtacggggtatggcccttggcgcatggctgggcattgggcgaagtgtgccctcgccagatgcctttccatggtgggaagatggtgcgaagtcccgccttcgcgctgaatctgcaaagccgcgatccggccgcctttgtgcgtgaagcggaggatggggcggtgcggctcgttggtcgttacgtgccgaggacagagggccagcgcagctgggatatccgcgggtcgaatgaccatttgaacagggtttttgaattgaatcaattgacgtatgacggctatcccggtcaagacgatgtggaccgccgtgggaagaagccagtggtggagactagagacgaccctgcgccggcggccgccccatcctctaaaaagaggaaattaggtactgctatgggaggacttggggtttccgatggttttgctagagagttgatgaggacatgcgcggccccggggggaaggatgtcttcgcccgagctccgggagtcttcggctcggatgctgagggaacccgggggttgttggcctaggaatgttcctatcccccgcgcggcaggcgaagacttttttacatctcgcatggttcatgaatggagagtttttccttacgggcggaatattgctgctgttgtgtcggcagtgatggacaaggatcgccagggagctgcacaaaagcgccaggcggttgttaggcttcatgaagccaggccgaagaggcagcggggggctacgaaggctgcggcccccggcggaggcaagccgccgctggcggcaaagtcgggcgtccccgcatctagcaaggcgccggaggcagcggcaggcgccggaggctccaaatcgacgaaggctgtgccgccgtccagcagagtgccggaggtcacgaaggcggcccgagtattgccgtcgtcaggcaagcgcgtcgccgacttcgccaccgatattagtgtggacgactatcttggtgggtcggacgaaggccaacttgctatagttgcgcctgccgcggcaaccacggcggctgccgtagtgccgaaggcgaagggcggggctcttagcgccggaggcgagatgtcggcactcgcggctgtcagggatgaggcgggcgctgtgtcccgccggctaaaggaggtgacgggggcactaagtcaggtggctgacttcgccgaccgcacagcgtcgggggccctcacggtagttgtgactgccgaagtcgagagacttcggacgcaacatgctgacgccgtccgtgagaaatcggccgtcgacagtaagtgccgcaagctggcggacaaggtagccgcactggagggggagaagactgacctccggcaccaactggcgggggagaggagggagaccaacgaggcccttgccaaggcgcaggctgcgcaggcggaggccaatctggcgagggtggagggcaatcttgccagggagcgcaccgagcagctgcaggagcggctcatcgccctggagagccgtgtggagagggccgaggccgcgacacgcgcggaggcagagcggacgcgcaaacagcttatggattcctaccatgagctgggcgcgcggaccggtgacttcgaagtgccggaccgagagcccggacttcgctgcctggagtgggtgcaggaggagttgcaggcactccccactatcgtggaggggtttatgtcgtatgcctccctggtcacctgcgagggggcgatgaacgcgctctcccgcgaagggtgcgacgatctttga

SEQ ID NO: 43014 - DNA, 951 bp, Zea mays
  Peptide Sequence Number=SeqID_86389
atgcagcccggttgcacccctccgccggcgatcacccaagacggtgacctccagttcgatggcgggggaaagcaagtcgggctgcggcctctgccctccctcagcctcaaggattttcatcaccagtgctggggaggggactgccgcgtgcccggatctcgaacgcgagtggcttcgaagccgctcccggcgccggcttccaccgcggcagctggaagaggttcctccgtcgacgagatagccggggccgcctacggaccgacctccaactctacggccttctgcccgtccttgcctcacgagtttgggcatgggcgggggcctcctggcagcagcatccgctctgaggtcatcgttgctgctgttcggccccccggagcagaagtcgtcgtcatcgccgctgctggagcgggtgacggcgtgccgttcgtcggtcttctgttgctccgcaggccccccccattgagtggggttgagtccctcggctcggtcggccttgctgtccgaggcttctcttgcttagttaaaggaacccctcggccgctcttcgatgagccaaagccaggggtagcggtgtcagcacggacagaggcagagttggctcgaaaagaagacttggtcggccggagcctggccgggtcgtccgttagcgggaccgacgccggagttgatctgccgaggcctcgggtcgggctgatgtctttgggggacagctggccgaggcctcggggtgaccagccgagccgcctgctcgagccggattcttggaggagacccgggcggcgatggcctgggcgtgatgacgaagtcgtccttcagagtggagaccctcggaccgtgtcgccgtcggaggctaggtcggacctcgccgaaggtgtagttgacgccgagggtgctgctgctcccttcaaccgtcaagatccgagcctgcaggatcggattatcttgtag

SEQ ID NO: 43015 - DNA, 612 bp, Zea mays
  Peptide Sequence Number=SeqID_86390
atggtggatcaatggtggatgccatggggaaggaaggccggggagaggtgggcccgagcggaggtggaggctaagggtgcacagcggccgagcgcgtcgttccagcacacctggtcgattgacgacgacttctgcatcctggaggccctcgttgcgcttttaagtcaattggtgatcctggaggccctcgtggcgcgctaccggcgacggctgatgggggatacgacgacatcgtccccctcgacccctcctccatccccgacgcggcggcgccagcctgcaggtactggactagagtcgaatgctaggcgactgctagctgctagatgtaccagggcgagaagatctgcctcaacatgcacttctagctgttgtgggtcaagaactgtccgaggtgcagcctcacgcacacgttgtgccttggcctcacgcagtggctggcgtaggaggcccgattctggtggacttgggcatggagaaacacaactgcacaatgatgatgaggtggctccgaccaaggcttctgcctctactgctcctgatttgtatggtaaaccaagaacctgcgatttttacaaccacaatcctcgattatactacatggaaagctag

SEQ ID NO: 43016 - DNA, 486 bp, Zea mays
  Peptide Sequence Number=SeqID_86391
atggctcgtgctgacaagttaagattccagccagagattcaaatcatggtaccatctatctatcctgggttggtctacagctgcaacaatactttctctgtggatgagggtctgcatcagtacaggacaagttcaccaccaaatgcggctgtaggagcgacccggcgtggacggggtcctctcgaacctcacctgcgacagcgacagcaaggtaatattgcaaactatttgagcctggcagaggttgattccatatatcttctgatccctgtgaacttcatctttattggatttgatggaaatggacggcatgagcttaagttgggggctgaagaactggagcgctggtttacaaaaatagatcacgtatttgagcacacaagaatacctccagttggtgaagttcttaccctgttctataagactactgttaagaaacttcagcattatgatcttcctttagtcggccatgtgaaccacaagtaa

SEQ ID NO: 43017 - DNA, 165 bp, Zea mays
  Peptide Sequence Number=SeqID_86392
atggtgtcggcggagcggtgtggatgttctataaccaccaatgagctcgtgcaacgacagactgtgcctcctaccgatgaactcgctcaccttgctgtcgctgtcgcaggtgaggttcgagaggaccccgtccacgccgggtcgctcctacagccgcatttggtg

SEQ ID NO: 43018 - DNA, 1146 bp, Zea mays
  Peptide Sequence Number=SeqID_86393
atggctgaaaggtaccaactcccacggagttgcgttcctccaacgacgaggcggaaagacggcggctgtagtgggctgagtcttctccaacacactccaagtcctcccctacggcgtgggggctgggtccacacgtcatgcagccggctcagagcagagaagccaaacccgccgtgcgcggtgcgtacaaccgcccagcggttacaagcggccctccacttttgcccagaccagcgggcgaaagggcgggcagccatgcaggcggcatgcaaccgcgccaagtgggcgcacttctccgactaccaacacgcccggcatggaggcccaggcccacgcgtcatgcaactggcgcgccgaatgcttcgtgcatgcagctgcaccgccacccgcgccaccaccgcgcctcctcgactgcggaaccaataccgcgactcgaggcgacccagcgcacgacccagcagcgccagcctggcgcgacggagaagcgggcgacgcttcgcctccgccataatgaccgcgtcagaaaagggaccgggaaagggggataccccgaaaaggatccttccccgtgaaggaaccaggctccgagcctccctactgatcagaggttcgaaggctggcccctcggaagggttcaacagccgcctcagagcgcgtgggctccacacccactactggtcagaggttcgaaggccggcccctcagaagggttcaacggccgcctcaggctactcgggctccacgcccactactgatcagggcgggaacgatcttgtaacggaatcccatcagagggaggcatcgagccctcggaccccgtcgccaggggaccgggtccggcagatcacccgcagctcaccggagacaccatgttcggcgcccaccgagggcaacatggcgctctcccccctcctccttgcggaaaggcgacgcaggggcgtatgtaaaaaagtcgagtctgaccctgatcgccctctcgccctgtgcagaggctcgggggctgctctcacaaacccggctccggccacacagttgacagcgtcaacataccagcccgagaacttgggacccgaccgtacacccgggctacggccagctcgcatgagggaacgaccagaccagccgaagcattacacgaggcattaa

SEQ ID NO: 43019 - DNA, 447 bp, Zea mays
  Peptide Sequence Number=SeqID_86394
atgggtaaaagtaagaagggtagcggttcttctcctcgctctggcgacaaacgcaaacgtgagccgactcctccttcggaggacttcggcgactcggagtactcggaggaggagttctcctccgagtccgagggatctccggctcccgtctctcccccgacgtcgtctgatgattcagacgactcccaggggattgccgcggagatctggacctacatccgggccgtcgagcgctccgggctcgaaggctcggatgagtcagagtactcctcggatgaggaggactcctcggactcgtccgaggaggacagcggcggcgacggtggtgatggcggcgacgacggtgacggcggcggcgacagcagcaagggcagcgacggcggcagcaagggcgaccatggcggcggcaagggcagcagcaagggcagcaacaagaccagtggctag

SEQ ID NO: 43020 - DNA, 345 bp, Zea mays
  Peptide Sequence Number=SeqID_86395
atgatgcggagcgccaacgggtacttggtccaagaagaggaggaggaagagcatggcgatgaggcggcggcgaggagagaggatgaggacgaggaagacgaggaggcggaggcggtgtcggaggcctcgtcgatcggggcggcgtcgtccgacagctcctcctccatcggggagaactccgcgtccgacaaggaggaagaggaggaggaggatgaggttgagagtaaggcgcaggggcttggcatgatggggctggccacgctcgaatccttggatgatgccctgccctccaatagaaattgctcatgcaaaaccactgctggagatgacatgttctttggataa

SEQ ID NO: 43021 - DNA, 207 bp, Zea mays
  Peptide Sequence Number=SeqID_86396
atggagaaaaaaaagtacagccgcgatgctcagacggacgccggggaaaccacgctgtacgttgccgcggaggccagcagcaaggaggtcgtgcacatcctcctcccgctctatgacttcgaggcagccaccgtccgctcacgccttgagctcgacgccttccatgtcgccgccaagcagggccacaccgatgagctcgccttctga

SEQ ID NO: 43022 - DNA, 903 bp, Zea mays
  Peptide Sequence Number=SeqID_86397
atggggagatcctcgccaaatgataaacttttgcttgtccaagctttaaaacgaaaaggccatgttgtagctgttactggtgatggcacaaatgatgcccctgcattgcacgaggccgatataggtctttcaatgggcatttccgggacagaagttgctaaagaaagctctgacattataatcttggatgatgacttcacgtcagttgtcaaggttgttcgttggggacgatctgtctacgctaatatccagaaattcattcagttccagctcaccgtcaatgttgctgcacttgtcattaatgtggttgctgctgtgtcctctggtgatgtgcccctaaatgctgttgaggttcggacaattttcatccttttttgtgcaatttactcgaatgctgccattgcttcttcattcaagaaggaacctcttgttacaaatatcatgtggagaaacttgtttgttcaggccctttaccaagtagcaattcttctgattttcgattttgatggagtaaggattctgcgtctgcagaatgaaagccgatctgatgctgagaagataacaaatactttcatcttcaacacatttgtattttgccagatcttcaatgagttcaatgcacgaaaacccgaggaaaagaatgtcttcaaaggggtcacgaagaatcacctgttcatgggaataatcggtataacgacagtatttcagatactgataattcagttcctggggaagttcttcaaaatagtgaggcttggttggagactatggttggtttcagttgctatcggccttgtgagttggcccctggcttatgtgggtaaatttattcctgtgcccttccgatccagaactcaggtattaatcggtaatgcagacgaggaggaaggtgggcagagctaa

SEQ ID NO: 43023 - DNA, 588 bp, Zea mays
  Peptide Sequence Number=SeqID_86398
atgcttgagacaggacacagtttcccggaagagttcccccctccagggagtgttccctctagtcacaagacccacctgggttcccaaaaagtcaatttggggaaatttgttggagcaggatctgcgccaatttcccttccccacccaccgttgcgcagggttttagtgcggaaatcgcgtcacctctttatcgtaacacgcgccccctgtggaaaggtggaaagggacccaatccccttccacccttttctgaacagatggacaaggaaaaaacggttttcatcccgttcgactactgtgtcaaccaccagggtaaaactgagtcacgatctcccacgatttcagcctcgggcgcaacagggagctccgcctcacccgacctcaggcctcggcctcggaagaaggtctccgcctcgcccgaccccaggcctcggcctcagcctcggcctcgggaggagtcacatcctcgctcgacctcggcctcagcctcaggagaagtctccgcctcgcccgacctcggcctcagaccgactacgctacaggggatacatcattaccctactcctagctagttgcctcaggctatga

SEQ ID NO: 43024 - DNA, 778 bp, Zea mays
  Peptide Sequence Number=SeqID_86399
gcttgcatattccatgaaaaagatgatgcgagacaaagctctggtgaggcggctctcgtcatgtgaaacaatgggatcagctactacaatatgcagtgataagacaggaacccttacattgaataagatgacagtcgtggaagcatattttgctggaacaaagttggatccatgtgatgatgttagccagatgtcagacagtgcagcgtcacttattattgaaggaattgcgcagaacacaacaggaactgtatttctgccagaggatgggggagcagctgaacttactggttcgcctactgaaaaggccattctttcttggggccttaagatagggatggatttcgacgatgtgaggacaaaatcttcagttattcatgtttttccatttaactcggagaagaaacgtggcgctgttgcagtacagttagatgatggtgttcacatccactggaaaggtgcagctgaaatagtgttatcatcttgcaaaagctggctttccgtcgatggctctgttcagtcaatgagtgctgagaagcacgatgaattcaagagatcaatcgaagacatgggagcgaattcattacgctgtgttgcttttgcatactgttcctttgacattgaaaagatcccaatggaagacataacaagctgggagttgcctgaggatgacctgactctgcttggcatcataggaataaaggacccctgtcgcccaggtgtaagggatgctgtacgcctgtgcactactgctggtgttaagattacacattattaa

SEQ ID NO: 43025 - DNA, 303 bp, Zea mays
  Peptide Sequence Number=SeqID_86400
atggcgaggggagagagccagaaggagagcgaggatgacgctcaacaaccgcacacctgctcgtgtgatctagaattctggatctggggaaagaggttggagaatgccaaccgtacaggtgcaagagggaagggtatagatagaaaaggtgcgcatggtatgaaaggagcggtctggaagaaggatgaatcagttccgaagctatggacgatgaagcttcggcttagtgcaaagacagtaatggagaatgaaaccaacctaaagtggaaaagactacttagtcctcgacagattattccttag

SEQ ID NO: 43026 - DNA, 627 bp, Zea mays
  Peptide Sequence Number=SeqID_86401
atgactactaccatttatttatttcaccggccgatgcattggagcttccttttcctcaaaatcctggggctcaacccgaacacaagacgcgcacgactcacaggagttgacgaggttgtagcccagaaagaacaaggaaaattggcgaggatgaggatagcgaacgatgacattgcagcacacacggtatgcgtgctgcagcgattgattgtcgagacgaggtcagaaaaggcatgcggtgaggcccgagctggaaatcgggcgagggagaaggagctcgcaggggcgcctaggcgagggagcagcacgccgaggaggccgagcagggagcatatactgcggcgtccggcgagctcgtgcgtagaggcggccatgggagttgagacgcgacagaagatgaaggagaggccctcggcgagcgccaaggaacaggggacggaggagctggaggaggtcgagacgggacggtcgtgcgccatggccaagcggcagtgctcggccagcgctgaagacgaacaggaacaacacgacggccggggtacaggcgagctgcaggccgagcgagctccagatacgagcatgaagggacggagtcgtgatgctggagagacacaaccagaggagtga

SEQ ID NO: 43027 - DNA, 201 bp, Zea mays
  Peptide Sequence Number=SeqID_86402
atgaagctgtggaaggagacttccaggagttccaagattacgacgagttctaggtgtgggttagcggcaacccccagtcggctgcctgtgaaggccgcgttatctacgtttcttttccgcactttgatttattgttgtccccagtgttctcagtgctcaggaggtgatgctggcaacacggaagatttcgaggagttctag

SEQ ID NO: 43028 - DNA, 459 bp, Zea mays
  Peptide Sequence Number=SeqID_86403
atgctggtagactacacaatggtactcgatggaccaagtgtgtcggtcaaaggcccgacgaaagagggtatcgagagcatcgtggaagtgacacccgctagcggcgtcacgagtgatgggtctagcgatccatccatccggctccggctcctccgaaagctccgtgtcgtggctcgaactgccatcggcgtcgccatcgtctctgtctccgtggcatctctagctgaggtgcaggggaaggcggcctctcagactccacctcttgctgaggcaagggggaagagtcctgctgctcctggcccttctcctgctcctggcgtcagcgctcctgctcctcgtgcaggcgacgatgcagtctctccagatgactggactgacctgacaccgtgcgatgcaggggatgctccaccagttgagaaggcaaaaagggaatcacagacttacgtgcagtgcacctga

SEQ ID NO: 43029 - DNA, 357 bp, Zea mays
  Peptide Sequence Number=SeqID_86404
atgcaagatgcagcacgacgggcactttcccagtattgctcattgttcagcggggtagctgatggcctcgacctaaagtactaccctcgtcgttcgaccggcaatgctggaggtgtgattgtctcgcctgttggtgagggcaatcccaggctgaatagcatggtcaacttggtcacgtgctcaacacagagttggaccacgccctcgatgagttgggcaagatgtctgagaacaggcgcagaggtgcgaggcgtgctcagccagagcagcaggcaccccaagaagaagcagcatttgccaccaccacccccgatgaccattgagcggatgttcttaatgcagatccaggcagtttag

SEQ ID NO: 43030 - DNA, 561 bp, Zea mays
  Peptide Sequence Number=SeqID_86405
atgccccctgcaccaccacagtgcatcccggctgctggaggagaccctgacagagatggagatgacgacgacgccggtggaagtttgaaccacggcacggagctttcggaggagccggagggatggatcgctagacccatcactcgtgacgccgctcgcgggtgtcacttccatgacgctctcgataccctgttgcgtcgggccttcgaccgacacacatgtggggtagctaatggccttgacctgaagtactaccctcgccgtttgaccggtagtgctggaggtgtgattgtctcgccagttggtgagggcaatcccaggctgagcagtatggtcaacttggtcgtcgtgctcaacacagagttggaccacgcccttgacgagttgggcaaggttcaggcggaagttgcggatttgcgtgttgaatgtgcagcacgccactatcttgatggtggttctcccgcccctgttgggattcagcacccttaccgttcaccgccccgtggtcgcttcgactatggtaccccagactgcaggacccgcatagatttagatccatag

SEQ ID NO: 43031 - DNA, 111 bp, Zea mays
  Peptide Sequence Number=SeqID_86406
atggagagtcatgatctccgggcaaaacgggaatcacgacttgtgggtaaagaagaaggcatcgagtcggatctccaggagtttcaggacttcgacgagttcgaggattag

SEQ ID NO: 43032 - DNA, 379 bp, Zea mays
  Peptide Sequence Number=SeqID_86407
tgttcggtgcgccaacggctccaagtcttcaacagtcggctgcgccaatttaggaaggcgatctgcaccggaaagtgaacaggggatgtccggtggtgcaccggactgtccggtgcgccacccgacagaaggcaagaattgccttccaagaatgcctccaactgctcctagctgccttggggctataaaagggacccctaggcgagtggaggagtcaaccaagcatactttgagcattcttaatcattcacactccgtctttgcgcactcgattgactttcttagtgatttgagctttgttctagtggatcacctattcaccccccctctaggtgctctcaattggtatcggagccgttctcttcacgaaagggactaa

SEQ ID NO: 43033 - DNA, 79 bp, Zea mays
  Peptide Sequence Number=SeqID_86408
atggcgaactcgaccgtcgccatcacgccggcgcgggagcaccagagagcgcgggacacagcgaggcaggcaaacggcg

SEQ ID NO: 43034 - DNA, 195 bp, Zea mays
  Peptide Sequence Number=SeqID_86409
atggatgttttgatgattaagaaccttggagaggaccagaaaggacttgggaaaggcctaggtgttgaggaggagcagcaagggcgccacaacaggaaggaaatcgagtccgactcggatgcgactccatctcgggttccaggaccagcaggaattagccctcgtggcgaggtcaatcgtgcagtgcatggttga

SEQ ID NO: 43035 - DNA, 270 bp, Zea mays
  Peptide Sequence Number=SeqID_86410
atggcgcaccggacactgaacaatgcatgtcctgtgcaccagcggactgtctggtggcccagaagacagaagctccaacggtcggaatccaacggtttggtgacgtggcaggcgcacccggatagtgtcccgtggcgcaaccggactgtctggtgcgcccatgcgacagtagccttcaccaaatggctagtttggtgggttggagctataaataccgccaaccacccaccattcattggatccaaagttttccggattcccacactttaa

SEQ ID NO: 43036 - DNA, 210 bp, Zea mays
  Peptide Sequence Number=SeqID_86411
atggctgcgagcggcgccgctcctctccgcggcggtgaagtcaccggcattgaggcaggtgcgggctacggtggctccggggtcgccggagttgggcagaggggaagagggtgccacgacgaactcgatggcggggacagggccatgaatccacgggcagagaggggagaacgacgggttttcaaatccaaattcaaactaggtttctaa

SEQ ID NO: 43037 - DNA, 330 bp, Zea mays
  Peptide Sequence Number=SeqID_86412
atgcaggggcactccgtccccacacacatcaaccgtccccaacgattccccgtcagcagatcagggctcaccgccttggcgtacaatgcctcactgaccccgactggccgtcgtgcagtgaccgcacttgtacccaccataaccggaatgggagacctcgtctcaggtcgcgtgaggggcaaagtctactgccaggttcaatcaggtactaggcttaccgatttaccatatttctcggctcgggtgctggatctggggctacctcctgagcagctccttgctccggcacgaggatgtactctctgttggggacttgttctcaagtgctaa

SEQ ID NO: 43038 - DNA, 540 bp, Zea mays
  Peptide Sequence Number=SeqID_86413
atggccacatgcctggacctcacttatagcagggccatgaggacaacgctttcggtggaagccaagaatttgggacatggaaaaacaaagagatatgggggtgaaggatcgtctcaaggatccgagaagcggtcaaggttggtgattcgtcctttcaacccaaatcgctcttctcctcgtccacccgcatatcctttcaagcaaccagtttttatccgccccactcctgcccctgctcaaaacaatcagtcgagtgcacctattgctcgttttcccgccctacccagttcctctaatggctactttaattgtgggaagtctggacacttcatcaaggactgtccctatccaaagcaaaatagatcaaattttcaacagacttctgggaacacgtctcaaggcaagggaaatgtggccaacactccaatgggaaaaaatacaaggaaaactgggcgagtctactacacacaagtggtgaccaccccggaaggagaaccgctgatgatgggtacgtttttcactgccaaccttcctttttga

SEQ ID NO: 43039 - DNA, 52 bp, Zea mays
  Peptide Sequence Number=SeqID_86414
atgagcagacccaagagaccagattttatccgagttcggtcacaccaccaag

SEQ ID NO: 43040 - DNA, 207 bp, Zea mays
  Peptide Sequence Number=SeqID_86415
atgcggcagatgaagggaaaccttcaggcattgatggtggagtgggacaagtctcagtgtcaagacgtcgaggcttccctccgcgtcgactccctctccaagcacctggagggcgagcggtccgagggtcgagccttaaaggcccggataggaggcctcaagaaggatctggagactgcagtacaaacctctcggactctatcctag

SEQ ID NO: 43041 - DNA, 300 bp, Zea mays
  Peptide Sequence Number=SeqID_86416
atgtcgtcttcttcctcatctgctgcaaatgcgctgccggccgattcgtcatccgaagatacattgagcgatttggcggcggtggagttacagctgggccacacggtggagttcggcgtttcgaggatttcctcgtatgtctgggcggtgacttcgtacggcggtcagccttccgtagaggtcttctccaagaattactatctgcattggcaaaagagaaagattggaaacaagattgcacagtttggatcgtgcaccttcacgccgaggactagaaagacctcgacggaagtcgtgtag

SEQ ID NO: 43042 - DNA, 1653 bp, Zea mays
  Peptide Sequence Number=SeqID_86417
atggccagccggcgctgtggccaagcacggaggctccatgagcacctagcagaggtccggccatggatggatgatggagctcgggaggtgggcgtggaggtgagggagaaggctgctgctgcattttggaacagagaggaggagaagtggcgtgtgggggaagggaaggagaggggtgggctgccatttattgagctggagctctggacatgtcaggtggcagtgagcagtggcaggtggaaaaatgtggacattgggcggccatttttggcattttctgcttgttttcggaccttggtcgctgtagaagatttcttccttgatctgcactctacaattgttgtacagaactttagggcggccgccttcgccgaccatattgcgttgggcgccctgactttggagttcgctgccgagaggcaacgactcgagggcaggatcgagcgcctccgagcgcagcatacggatgctgttcaggacaagtcagctgtggaaaacaagagccgcaggctggcaaagaggcttgtggctgcggaggccgagaaggaggatctcatgcatcagttggcggaggagaggagggacacaaacaaagcttgtgttgaggcgcagtctgcgcaagccgaggccaagcttgcgcgggcggaggccagtctcgcccgccaacgcccgaggagatggagacgaggctcggcagcctgcgcgaccgcctggacaagacagaagcctcgatgcgtgcggaggtcgagcggacgcatacgtagctcgtggacgggtaccgagagctgggtgcgcggaccgtgcccttcgaagtgcccggtcaaggacccggtgctgaagcggtcggctacggcgctttttgataggatgtggggcactcacggccaagagactgtctgggagaggttcgaccgggcgatggatcagttaaagatggcgcatgacgaagaggttgaggaccttgatgatctagacagtacactgcccgaggcatcgggggtggagcttgcgccgccatccgatgcaggcgagggcccctcggcgacccccgcaccgactggagctggcgaagaccccacaccagccactgtgctggcgagtgaggatgcttcgaaggtggtgggcgaaccagctgccgaagacccagcggcggctgctgggccttcgcaggttccgacgtttgggcctgcacaagcaaccgctgctggcaatactgattttgtggtggcctcaactgtatgcgtgccgatgataatttatttggctctgtatctgagtgttttgagtctgatggagtcatcagatgaaggcttggattattttgttgcgttaaatgtggccgcagcggagtcttcgctgcgtgtggagggtgtcggggatcttcctggtgagagtactgagcataggcagcgaagggtggtgtcgaaacgcagtgtgggtgagttttcgcgaagtggtaggtgccgtcatatggagatggagcacggtcgtcttcgagtagactggattggtaaacgagaattgttgaccttgccgattggggcgagcataggtgagggggatctgcgaaatctttttgagggtgaggagttgaggataatgttgtttaattacagggagatgggtatcatcctgaaggttgaaccgatgtaa

SEQ ID NO: 43043 - DNA, 774 bp, Zea mays
  Peptide Sequence Number=SeqID_86418
atggtgacgaacagttccacggtgagggtaccagtggcatggctcgagcaaaggcagagaccgacgcagggagacaacaggactcgcggtcacgacaacgacgagagctccactgggcggcgactaccagggatctgcaagagtacagagacgcacaacagcagaaccaatcaaccggtgaagaaggaactgaccgcactcgaactcgaaacggagtacaggcaaggaataatggaaaacgcgagcgcggggaacggcagtcgaagccgagcagggagaaaactccagctgggcgcgaccaaggactgggcgagcgcgaccatcgtcgccggtgaaaagccgagcaagggaggggcgctgcatggaggaagcacgcatgcacaaggaagcttgacggcttggcgagcacaggaacgcgcacaggagctgggacaggccatgcgcagggaagatcgactgggggaagggcgcacgaccaccatggcagagggagaaaatccaacgtgcaagaacgggcaggaaggagcagagaaggagcgctccatggcggggcgagctccaaacttggtccaagaacgcgcgcgcacgacaccagggactcgcggcaggagcagcgagcggcagagaccgcgccaagggaagggaaatccgagctggggcaagcttggttgggctggagcgcgcacgggaggagaaataggtggccgggcggccgagcggatgaaggcgagaacagcggcggccgacgggataacgacgacgcgcaggggatga

SEQ ID NO: 43044 - DNA, 446 bp, Zea mays
  Peptide Sequence Number=SeqID_86419
agggaagggcggtcgtcgtccgtggcgtcggcagctgcaccgtacctggccttcggacgcgagtggcttcagagccgctcgcggcgccggcgtctgccacggcagctggaagaggttcttccgccgacgagatagccagggccgcccacggaccgacctccaactctacggccttctgcccgtccttgcctcacaagtttgggcatgggcgggggcctcctagcagcagcatccgccctgaggtcactgctgccgctgttcggccccccggagcagaagtcgtcgtcgtcgctgctgctggagcaggtgacggcgtgccgttcgtcggtcttctgtcgctccgcaggccctcccccatggagtggggttgctcctctagcttagttaaagagaccccttggccgctctccgacgagccgaggccaggggtagcgatatcagcatga

SEQ ID NO: 43045 - DNA, 228 bp, Zea mays
  Peptide Sequence Number=SeqID_86420
atgcggcgcttgccggcggccagccaaccgtctcctagtcatcgggctgccagcgctcgcctagcactcctgcctcaacgtctgccagctttcagcctcaagtgcatttcctacctcgtcaaagctcatcagtcgcccatgccttcgatagagctcacgctcaggacgctggacgtcatcctcgcatttgctttgctcagcgtcaacctctcggtcgttagattataa

SEQ ID NO: 43046 - DNA, 768 bp, Zea mays
  Peptide Sequence Number=SeqID_86421
atggcttcccatggatcctccgatgacgaaaatgcactgacccacactgacgggcttgcacgagagggttttccccgcattttgtgggaggtacttcagggggctggatacacgacaccccctcagtacgcggtgcagcagttcgagaagcaccgggtgccccgctgtagggtgaggatgactctggagcctcatcccctgcagccaggctggcgctccttggactcagagtctttcgggtaccgggcagaggacacgatcgaggcgatcgctctgcatggattgactaccttctgcggattccatcccttggagctggctacccatcccattggcttgttccccgcggagaaggaggacgacccaatgtggaaggatcgggtggagcatgccaaggacatctgggccatctacccaggacagactgcgcacttgacagtacggtgcatgaatgctctgtaccgtctgcaagtgatgcgcggtgaggcaatgtcccatctgatggcgctgctggaggcaacaaagatcacgctggacaacagagaggagctcgtggttgatttatctcaagaaatggtggagaaagatttgcaggtggagcagctatccaccgatattcaggagttggaggagctggagatccaggaccaggaggacaacgaggacgtcgacattgagggaggagatgagcctgcctccagtgtggacactgctggctcgggaagaccaccttcccccgagtcaagtgtcgcttcgttcgctcactag

SEQ ID NO: 43047 - DNA, 360 bp, Zea mays
  Peptide Sequence Number=SeqID_86422
atggcggttcaccggctccaaccttccctctctggcctacagtgctccaccgcccggtcgccagtgctcctccatgggccacggctgacgggtgcacgcaccgactgtcgcctagccctgctccggcgtgaaggacttctgcttctgcccctgcgcatcccgcccttggtcgcgcacctcggcatgttcctcggcccgacggctactgtcttgaggcatacggtggccgcccacctcgtacccagtcaccagatctcaagttccacctcaaaatccagatcaagtgaatgccatgtttcatccttggtccaatcggttcttactggaatttgtggcagaacgaatcaagctgattcttaa

SEQ ID NO: 43048 - DNA, 381 bp, Zea mays
  Peptide Sequence Number=SeqID_86423
atggcgtcggagatgagcaagaacgtgaaggccctcgacgagcaggaggtcacctcgcagcactcgcgcgcccagaccagcgatgccgccgaggagcaacggcagcagcaggcggtggatccgctggcgcggcagtcgtccatcatgtcgctgacgctggaggagctgcagaactcgctgtgtgagccgggtcgcaactttgggtccatgaacatggacgagttcatggccaacatatggaacgccgaggagttccaggccgccacggccggctgcaacaaggagggcgcgtatcgggagccggtgcccgtggcgacgacgacgggcacaggtgagaacgaaggaggaggaggaggaggagggaggggactggttcggtag

SEQ ID NO: 43049 - DNA, 756 bp, Zea mays
  Peptide Sequence Number=SeqID_86424
atgtactatcttgtcacggagtttgtttctttgctgtcaggtgttgctaatattaattcactgacatccagttgtgaatctcagttgtctaaccaaattggattctttgtagagcagctctttttaaagttcccctccaagacgacaccccatccaccatcatcatcgacgcatcgtgccttgttcgctgcttgtgacgatcactgttctcttcaattgcttcgacgacggtttatttcagaaaggaaaacaactgagataaatcaagttgctactcaagaaaatgaaatcagtcagaatggtagacctacatctaaaacatgctcagcattaccagaacctattctagctcactggagtgtgaactcagaccatgtgacagctgatagtaatgtcacggagaggcaaattagtgatccttgtactaatggattgatgatgacgcttcactcgggaaagcatgatggattgacgatgagatacccaccctggtggttgatccccttcctgaaggctaggatcaaccctcgcctcccaaaaacagacaagacccgacagcaggtcctaaaggtagcgccttttatacagcaatcaacttacagagcagatgctctcttgttgacaactctcataagagtcgataaggagcttttgatggtgaggactgaggaggcagcagcccacacctatgatcttgcagcgctcaagtacagggaatcagactgcaaactgaacttcccaattttaagcgattaa

SEQ ID NO: 43050 - DNA, 156 bp, Zea mays
  Peptide Sequence Number=SeqID_86425
atggatcctaagggaaaggggatggtggtcaacgacaatgagaaggagtccatcttcaacgagccaagggacgacaaagtcaatgactccggctgcacgatcgcagcaatatccatgcagctaggctcgtcgggaccagtttatgatatatactga

SEQ ID NO: 43051 - DNA, 897 bp, Zea mays
  Peptide Sequence Number=SeqID_86426
atggatatcaggcgctttacaagaaaaggacaacagagagacaagttttcgcatgttaaaaaatacgaggttgagttcaataaggctgcacagtccttaacagatgcgattattccttctgctcagaaaagactggctttaaatcgtttgattaaagacaacattgcactaattgcggttttagaagccaaatttgctaatcatggagctgaaaatcctggtaaaagacagctactttgtgtggcaaatacacatataaatgttcatcaagacctaaaagatgtgaagctatgggagtttttacaggttcataccctcttaaaaggattggagaagatagctgtcagcgcagacattcctatgttggtctgtggagatttcaactcgccccctgggagttctccacatgcgcttcttgcaatgggcaaagttgatcagcatcatccagatctggcaatagacccccttggaattttacgccctccaagcaagttgaatcatcagcttcctctggtcagtgcatactctgcatttgcaagaatggtaggtgttggctatgatttggagcatcagcggagaaggacagaccctgcaacaaatgaaccactcttcacaaattgcacaagagattttactggaactgttgattacatattttacacagcttctgtatctccatttttctggaataagattaaaggcactaattgtgcttattcttttgataatgaccatgtttgttctccttcagcggactccttgacagtggattcattattggaacttttggatgaggaaagtttaagaaaagacacagctcttccatctcctggatggtcatcagatcacatagcactgttagccgagttccggtgcaagcctagaatcagaagttga

SEQ ID NO: 43052 - DNA, 576 bp, Zea mays
  Peptide Sequence Number=SeqID_86427
atccaggtatctcacaccacagcgcccatccttcacaacacagccgccgcaacgccctcccacccgccctctccaactccagatgcattcactcggctcgaagagagttttgtccgtctcgcagagaagtgggatcagttcgttgtgatgttccaccgctacaaggagaagacagagaaggaactccaagcagcggtgtggcttcaggcggcagcgcgagggttcctggcacgccaccaggtacagtcccttcgtggggagaagcaccttgctgtggcctccagggccaccccatggccgtcatcacatgagcaggttgtggtgcgcctgcaagccgcagtgcgcggcttccttgttaggcgggcggtgcggaagctgcacttgctgatcagctcatcgctgcaccaactcgcagcctgcgcgcccaaccaccaggtctcgtctatactttttgaaccccctgcagaagtcgagatctggctcgaggacgagctggtcctcaagggagggggagatgtcatgggcatcatagggagcgagaggcaacagccaggctgggataaggctagagaataa

SEQ ID NO: 43053 - DNA, 483 bp, Zea mays
  Peptide Sequence Number=SeqID_86428
atgaagtaccgggctttgataccaattgaaagtcgcctagaggggccccaaccaccaaagtggccgttgggaggggctactatcgatgggcgcaccggacagtccggtgcgccagcccacgtcacccaaccattagggttcgatcgttggagctctgacaggtggggtccccggacagtccggtggtgcaccggacagaagactttcaaggtgtttcttggacagttcaatgtgaaatcattcaacaaaaatatgttaggtggaatgcttgaagatgaagaggaagttccgccatacccacaaaatggtcatcaattgctagttgaattcatgggtctgggtcaacctgttactcctgctgggtttggtctcaatatcccatcagtgcaaaatgcggatattaacgaagctgagggttgggatgcttggcctatagaggaaccatttcagcagccccatataaaacagcaagtgcagcaatag

SEQ ID NO: 43054 - DNA, 332 bp, Zea mays
  Peptide Sequence Number=SeqID_86429
acagtgtccggtgcaccagggagatcaactctaaactgctcagcttcgggtttttggaaagccactccgctataattcatcgaactgttcggtgtagcaccggactgtccgagtcagagcaggcgccagaaggcgcaccggacagtgaacagtacctgtctggtgcaccaccggactgtccggatgttggagctaagaaatgtcaatctagatcaagtcaagccaacttgatgatttatgagtccaacatcaaagctcaagcatccgagactcgccaggctgactctggcgaaaaggccgctctcgggaattcgtcggcgatgtacggctaa

SEQ ID NO: 43055 - DNA, 389 bp, Zea mays
  Peptide Sequence Number=SeqID_86430
gcccccgccccccggcgtctccagaacgttccagaaccttcaaggaaccatccacaggcgaggcctcgttccccgcccgtatctccccatttccacccggccggcgcggcgggatcctgactctggcgctgtctgctgggggcttgtgtctgctgggtgagacaggtcgaggaggcagcgtcggggctggtgctcgggagaaacgaacaggggaggagggagggaggatgctgagcgtggtccgggtgcaccttccgtccgagatcccgatcgtgggctgcgaggtcacgccctacgtgctactgcggcggcccgacggtgcagtctccaccgacgatgtccctgaaactgcgcccgctgatggccagttcatgcggtacagatggtaa

SEQ ID NO: 43056 - DNA, 330 bp, Zea mays
  Peptide Sequence Number=SeqID_86431
atggatgtacacgacgacctggatgtgttccttcgtaccgagacccagggaaacaaatatttggctgtgagcattacaaaagaaactgcaagcttgttgctgcatgctgcaataagctattcacttgcatattctgtcacgataaagttagtgaccatacaatggacaggtaactcaagaggtccacttattgactcttatgaccatgtaattggtgttaatacaactacattaacacgtaaagatctggaaggtcttgatggtctaatacctgtctatgagtacgaaagaaaaggcgggagaagtcggtctctgcagcatcgcgcgtga

SEQ ID NO: 43057 - DNA, 162 bp, Zea mays
  Peptide Sequence Number=SeqID_86432
atgcaggtggcgtgcaaccgcgctacggtggtgcaccccttcggcttcgtcgcatccggcatggaggcccaggcccacacgtcgtggaccgggaaaggggatatttcgaaaaggatccttctcggcgaaggaaacgggcccccgagccctcctactgattag

SEQ ID NO: 43058 - DNA, 606 bp, Zea mays
  Peptide Sequence Number=SeqID_86433
atggaggtcgttgtcgcgctgctggtgcagtggtcaccagcgagccacctggagtttgttgtcccacaggccctctggtgtggaggttgttcatacccgcgggagtggaaccggagtcccgagcaggtggcttcccaggccgaggaggtgcagcagcggcggctggagcttggccaggtcatccgcgagcgggaccaaccccggagtcacgctgccgaggccgtgagccgggctgaggttctcgggggacagctggctgaggctacggagcgactagccggggtgtctgctcgggccagaacccttgcagagagcctggccgtgagggcccaagcgcgatgctggcatcctccttcgaggtggagatccttccgcccgtgtcgccgtctgaggccgggccagattccgccgaaggtggaaacgacgccgagggtgctgctgctccctctgccgatgtctgaacctacaggaacaatttgtctaaaaatcgcttatccgagcgagagttacttttcacagaaggtgatgagtgaggattctattatcgatatagtcgagaaggcacgaaagtcgttttctacccgagctttagggcttgttcggtag

SEQ ID NO: 43059 - DNA, 342 bp, Zea mays
  Peptide Sequence Number=SeqID_86434
atgccggagcaaggagctgctcaggaggtagccccagatccagcaccagagcctgcaccagaggacctgcctgccactgctttggaaggcaagccccgatttccctcctcacgcgacctgagacgtgatccccattccggttatggtgggtacaagtgcggtcactgcacgacggcagtcggggtcagtgaggcattgtacgccaaggcgccttgcttgtggcataattttacaggttctctggaggacatggttgctggagtgacttggccgtccatcttgccactgggttggactgtcgagtgggaccccacctcggctgaggaggagcatgaggagtga

SEQ ID NO: 43060 - DNA, 876 bp, Zea mays
  Peptide Sequence Number=SeqID_86435
atgggtccaccgttatggtcccccgtacttgatgctgacctgagtcaggaaaaggggaagtccgggtaccgcatacagagcgatcggaaagtccctatctgcagtgtgcatccaatggaacaagcgacgattcagtgcctcggttgtctcaagtcaaaaatacctgttgctaagagctaccactgttcagctaaatgtttctctgatgcatggcagcaccacaaagttttgcatgaacgagccagtagtgctcaaaatgaaaatggggctgaagaagaggagttatgtggcagtggtggttctggggttctaagtactgctggatctggttctttgtcaaattttggacagagccctagtattaacaatgaacctgtgcctttgtatccctcaggtactgataaaaattctggagaaacttggtatgaagttgggcgcttgcgaacgtatacaccaactgctgctgatattgggcatgcactaaaatttgagtgtgtagctgtggattcagaaaaaaggtctccaattggacctccgacctcagttatgacgtcacacgtaatccccgcaccaactccgacccctcgtcgccttatccaagtgaatggggatgttttgggtcacttggatttagacagccaaacttcatccttggggacattcactgtattatcttacaatattcttgctgatacatatgctacaagtgatgcatatagctactgcccaacatgggcacttacctggacttatagaagacaaaatttgttgcgtgaaattattggttatcatgctgatatcatctgtcttcaggagggagcgagaggcaacagacatgctgggataaggccagagaataagattgagatgagctag

SEQ ID NO: 43061 - DNA, 288 bp, Zea mays
  Peptide Sequence Number=SeqID_86436
cgaggagaggagtacgccagctgccgcgagcaggccgaccccgagagcagccgcaagaagagacggtgtagagaggagtcggccctctccggtgctggcctggtggcttgtgcctctcaagatccatcagggacaggaggtggcgaatcaaggaagcgctccactggcactcggtgggcgaagtggggtggagaactggacctcgacgacggctctgctgaatcgaagaaaatattcaggtccggcacgccgccacgcgtccacgcgcgagtgctggagtgtccgtag

SEQ ID NO: 43062 - DNA, 363 bp, Zea mays
  Peptide Sequence Number=SeqID_86437
gtcctcagtgcatatatacactgtattagggatgaagagcatttacttcatagagaaggtggaaaggtcttcttggagaacacattcatttccagtctgcttaagcgtgatggcgaccctaagttaaaaggtctagaaagacagattaaacttgcagcagaacataaagagctttaccaaggcaagtggtcgaaccttgatgttgcatcatggccaattatagagaagatcacaacacaaatgcaaacccgatgggatgatataacaatgtttaggtttaagctatctgtaatattatgggactcgagattaaacacaaagaaaatacatcaaaatcttgaccacaatgtggatgaagattga

SEQ ID NO: 43063 - DNA, 381 bp, Zea mays
  Peptide Sequence Number=SeqID_86438
atggccatgccgttcgcgcgccgcgacatcgaggcggcgggcgccggcgccagcagcgacgactctcctgccgctaagaagggcaagcccgagctcgcaggggcgcgcccggctttgacgaggtccgaggcgttcgcgttcgcggccgtgctcgcgctcttcaccgccgggatcttctgcgtcttcctcaccgcgccacgcggcgagtttgggcagatcctccgcctcccgcgcagccttgccgacgtccgccttctcaaatgcaaatttagacagttaggaacatttgatatgttggttaccaatttcaatgaaggggacaaaagagggctcctttcctatctgatcttgcagcgactccacatgggagacgttgtctaa

SEQ ID NO: 43064 - DNA, 225 bp, Zea mays
  Peptide Sequence Number=SeqID_86439
atggaaagagagaaacggattcagaaacaattggttcgaatctttgttggtggcaacaaagaaagaaactgcatccatatcattcccgtgaaacttctgctgcttctggtgctttatgggattctaccaacatcaacttccttaaatcaggtaccagcagtagtgttcaactgtgagacgaaccaggaagccttgctggaactgaaggttgtcctagcctcctag

SEQ ID NO: 43065 - DNA, 156 bp, Zea mays
  Peptide Sequence Number=SeqID_86440
atggcagaatgttttacccctacaatgaggaccattacattgttcacctttgatgtggatatactgaaaggagtggagagggaaataagaaattctttctttatgctaatgatgaagatgctgcagaagatggagatcaggatgctgaattgctga

SEQ ID NO: 43066 - DNA, 288 bp, Zea mays
  Peptide Sequence Number=SeqID_86441
atgaagctcttgctgagttccatggacgcctcgtcgacggtggtggggccggccctggcccccgcgaccccgcctcaggcgtcggcgggtagtgctgtggcggctgcattccccctcttcagctccggcggcgggcatccggcaagggaaagaaacaacgggcgccagtacaggagggggagcacaggaggtggcgaggtcaaggaagcgctccactggcactcggtgggcgaagtggggtggagaactggtcgtctggaggtgaagcgggtgatgcctcgacgttga

SEQ ID NO: 43067 - DNA, 438 bp, Zea mays
  Peptide Sequence Number=SeqID_86442
atgcatcccagatctactattacctcgccgtggagagtacagagaggtgagaggttcgcggagagcaggtcgccgggtcgccgcggcgtgatagcgggcccagctgcgccgccaactgccacgtcgagtccggcccagagtgtcggcgtcgggcgtgcggcgtatgggcgcgcggagcgtcagcggagatcggcggatgaacggggacgtcgcggcacagatcgaagtggcgcgacagcagatcgaagttgcgcgacagcagggcgatcggggacgtcgcggcgcagatcgaagtggcgcgacagcagggcgaccggggacgtcacggcgcagatcgaagtggcagccacgtcgggtcagcaccagagccgcagagggaggctggggctggaggagagaggggtgcgcggaggtggtgtcgcggtgtacttagcttag

SEQ ID NO: 43068 - DNA, 870 bp, Zea mays
  Peptide Sequence Number=SeqID_86443
atggtggacaaagtgcaaatcaatacaaagtttgtggctttaagtttcaagcttttacaggatcacctattcaccccccctctaggtgctctcactattggatctgattatgtgcgtcttccagaagaaattgtgattggctatacatacactgaagattcaataaacaagctcattgtagatatattcccatcacttgaggaaaatgcaagatcaatagcttatatgagcacgtgtgccatcctttcaaccaaaaatcagcatgtggaccaactcaatgcaaagatgattgataaatttccgggcaatggaaaagtttatcatagctttgacaatgtcgatgatgattctagaaataactatcctattgagtttttgaactccatgactccaaatggtttgcccccacatgtgctcaaagtaaaaatcaatagtccagtgattcttctccgcaatcttgatcctaataatggcttgtgcaatggaacaagactcatgattagagcattgcaagacaatgcaattgatgctgaaattgttggtggtcacaatgcaggtacaagggtgttcattccttggattgcaatgtgtccatcagatgatatttctcttctgtttaagttgaagaggaaacaattccctatccgcttgagttttgctacgaccataaataaagcacaggggcaaaccatcccaaatgttggcatctacctgccagagcctgtgttctcgcatggacaactttatgtggcattgtcgaggggtgtgtcaagacaaacaactagaattttggctaggccaaagaaggaattagatcccacatggaagagcaccaagattattgtgtataaagatgtcctcaactgctaa

SEQ ID NO: 43069 - DNA, 1143 bp, Zea mays
  Peptide Sequence Number=SeqID_86444
atgaggtataactgccacataaatgttgaagcttgctcaagcatcaaagccattaagtacatgtgcaaatatgtttacaaaggccacgatcgtgcatcattctcagtttaccctgctcataaggaagatggagtaatcaatgagattcggcagtacatggatgccagatacatatccccacctgaagctgtacataggattcttggttttccattgtttggtgtcaatccatctgttttgcaactccaatgccatttaccaggtatgcagtctgttattattgacgagacagctaaactacaagacattgtcaatgagccatcttcttctatgacaacactcatagagtacttcactaagaatcgtgctgatagttttgcaaggacattattgtctaaagattttccagaatactacaggtggattcatggtagcaagcgctggcagagacaaaaacaaaggggacagattggtcgaattgtgtatgcacaccctgctgaaggggagagatatttcttgagagtacttctaaatcatgttagaggtgcatactcatttgaggatttaagaacattgggtgccatcacatgctcaactttcagagaagcatgccaaaaaagaggactcatagagactgacatgtcacttgatgactgcttgagtgaggctgcaacctttcaaatgccacatgctctgcaaaggttatttgcaacaattcttgtattttgtgaggccactaatgtacgtggactgtgggacaaacacaatgactcaatgccagaagattataatcgagacaatcctaaatcgacatgcatacaacaaatggtccttaaagacattcagaagttggttcggtcgatggggaaggatatcaaatattattatcttcctgagattaatgattcaggaggaatgggtaagaccttcctatataaggcactacttgctagagtacgttcagagggattaatagcaattgctactgcaacttcgggtatagcagcgtccatattgcccggaggacgcacaacacactcaagattcaaaatccctattaaactcgttgacaatagcacatgcaacttcacaaagcaaagtggcactgcggagttacttcgcacagcgtccctaattatctag

SEQ ID NO: 43070 - DNA, 1140 bp, Zea mays
  Peptide Sequence Number=SeqID_86445
atggggtccagacacagtgcttgctctgccgaggctgagtgccgaggttctttcgttttgctttttgttagtcaccctcctgcggggagaggaagtgatcaatggggattagctctccccgggcagaacgggaatcacggctcatgggtaaagtgtgcgacctctgcagagggtagtgaaactgatatatcagccgtgctcacggttgtccacattgtaaccactgctcaggagaagacgaagccgtggaaggagaattccaggagttccaagactacgacgggttctagatggctcgtcttagacacactgcacgaggtggagtccgtgaggcgccgttcctctgttcctcagctggaggcaccccctgcaccaccgagggatgccccggctgttggaggagctgctggagggggtcctggaggagaccccgacgacgacgactcataccacagcacggagtcctccgagccgcaggaggcggaaggatgggtcgcccgacccatcacccgtgacgccgctcgcggttgtcacttccacgatgcactcgacaccttgttgcgccaggccttcgaccggcacacctggtcgatcgagtaccgttgtgtagtctaccagcacagtcgcgggaggtacccggaccgctgggaggctacctgcctagttcgccgtccggaggatgatctccggggtgcggaggccgtttcggagcattactccatctccgagagggacactgcggaggcggctatgcaggatgcagcacggcatgcactctcccagtactgttccttattcggtggggtggccgacggtcttaaccttcggtactacccccgccgtcctactggcagcacagagagtgtggttgtctcacctgttggtgaggataaccctaggttgagcagcacagtcaacctagtcgcggtgcttaacactgagctggatcactctctgcacgagctgagcagggctcgaacgaagattgctgagttgcgtgctgagctagcagagcgccgccaccaggagggtggttcccccgctcctgttgggactcagcacccataccgctcgccgccacgtggtcaccacacttatggttcccctgcctgtaagaccaggatagatctggatccttag

SEQ ID NO: 43071 - DNA, 243 bp, Zea mays
  Peptide Sequence Number=SeqID_86446
atgaagacggcgcacccgtgtttcgttcctcgaacggctcgcgcacgcgcaacggccgccccgcgaaccactcaccccgtcgcattaactccgcggcgggacaggcggcacctctggcaggggaagcaagcgacgcttcgccttcgccataatgaccgcgtcaaagaaagggaccgggaaagggggatagcccaaaaaggatccttccccgtgaaggaaacaggccccgagcctccctactga

SEQ ID NO: 43072 - DNA, 1014 bp, Zea mays
  Peptide Sequence Number=SeqID_86447
gaggagataccccaaccgtatctgtacttgacccttgattttgaggtgaatttggagcatgagagggtcctgcttcactgttatgcgtacctgagagttctccctttgagtcttgattcaccgttcaaggagctcgcacaagcctatgaggttttgagtgatccagagaaacgtgagatttatgatcagtatggtgaagatgcccttaaggaaggaatgggcggtggaggatcccatgttgatccatttgacaaattctcatcatttttggaccctcttttggagcaaggcttgaagtccggtgcctcaatgaggtgccctggttgccagggctcaggcatgaaagtcactattcgtcagttgggcccttccatgatacagcagatgcagcagccttgcaatgagtgcaagaggactagagagagcatcaatgagaaggaccgctgcccagggtgcaagggtgagaaggtcgttcaagagaagaaggttcttgaggttcatgttgagaaggggatgcaacacaaccagaagatcaccttccctggtgaagctgatgaagcagtatgcttgtttaagcatcagtgtgataagatgttgtcggcgtttcgaccccggggggtccttggaccgacgagtaaattgtcgccgcgtgccccagcccagatgggtcagcgcgagacggagcgcgaagaggggaaaccagagggagacaggcgtaaaggggaaacccgcagccttcgtgtttgtcccgcgcccaggtcgggcgtaaggagagggcccagaggctcctccgaggtcgaggtcgagtctgtcttccatggtcgaggtcgagtccgagccccgggtcgggcgaggtggagaccatcatcttccggggccgaggccgagtccgagccctggggtcaggcgaggcggagttcgtcgtcttccggggccgaggccgagtccgagccctggggtcgggcgaggcagagtttgttgtcttctggggccgagcccgagtccgagccctag

SEQ ID NO: 43073 - DNA, 786 bp, Zea mays
  Peptide Sequence Number=SeqID_86448
atgcaggcggcatgcaaccgcaccaaggggacgcaccctttcgacttcgacgcatctagcatggaggctcaggcccacatgtcatgtaaccggagcgccggttactgcgtacaagaaactgcaccgccactcgcgccactatcgtgcctcctcgactgcggaaccagtaccgcgactcaaggcaaccctgcgcatgacccaacagtgccaaccaggcgcatcggtcacgggtcagtcagccgcgggagaaggcgcgacggtcgatacggccagaaatgggccggcagtaatggcagtggcacgcgggcggaagcagcggccaagtcgtcagccaagctcacggcaggcggcacctttggcaggcgaagcaggcgacgcttcacctccgccataatgaccgcgtcaaaaaaggtgcgccacgtcattcgatttcgtatccttttcctcttcctctttctctctcttacaacagggaccgggaaaggggataccccgaaagggatccttctccgtgaaggaaacgggccccgagcccccctactgatcagagcttcgaaggctggcccctcggaagggttcaacagccgcctcagagcactcgggctccgcgcccactactggtcagaggttcgaaggtcggccccccggaagggttcaacggccgcctcaggccacttgggcttcgcgcccactactgatcaggggttcgtaggttggccctcgaagggttcgacagccgcctcagacgcagagcgagggatgaccctgggtacgttcgatacataa

SEQ ID NO: 43074 - DNA, 333 bp, Zea mays
  Peptide Sequence Number=SeqID_86449
atgtacaggtcatcgcgcagcgggatggaccacatcgagcccccaacgacgtggtatgtcgccaccgtggcctgcggcacatggacggttaggagcgaccattttttaagcgtcgagtgcatcgccgcgcaacccctcgcaagtcgcaaccgtcgacgtgatcaacatcgccgctccactattacctacctctcgccggaatcattaaccctagggagcgggacgggagactgctgctactactgcagcggcggcagactacagacgaagacgccgggatgggcatcgggagcgaggggaaggatggccgatgctgctagcgctaagccttga

SEQ ID NO: 43075 - DNA, 143 bp, Zea mays
  Peptide Sequence Number=SeqID_86450
acagtgaagctgatgattcagaatctgatttagagtctgatgatgaagagagggaatacaatcaagatagggacaaaatttcagtccttattcaggaaattgaagaggacgacaagactgatgttgctgaagtgcagacatga

SEQ ID NO: 43076 - DNA, 420 bp, Zea mays
  Peptide Sequence Number=SeqID_86451
atggcgcctgctcacgctgctggggtccgagggaagcagggaaccagcccggaggggagctcacaggggagctggatggagaccgacgcagagagcgcggggattcgctatggcactgttgctcgcctgctagagggcaccggagtggagaaactcaccgccaggagagggaaaacaggggagggcgctcggcttgcaccgcaggagcagggaagtgggagggtgctgtccacggctgggagagcagaggcatcgcgccatggacatggacctggccaaggtcgatccagggagctcctgcgcgcgggccaagggggggagagcaggggcgaggggccagcgggccatggagcagggaggggagctcggagccaatgccccgacgtccttgaaggcaccagcaggggcgcttgggtataa

SEQ ID NO: 43077 - DNA, 453 bp, Zea mays
  Peptide Sequence Number=SeqID_86452
atgtccgagaggatgctttctctgtttcagactattcaggacagacaggacactctgcagcagcagcttttggtagatagggctgagcaccgggccttcatgactcatattcttcagcataccggtgttcagatcactccggttcagtctgcaccccctccagctcttcaaacggttgttgtgccagccattcaggcaggaccccctcttcctaccgttggtccttcttcctctccgctccagccggtcaccctggttttctcgtcaccggttatctactccgtcagcactcagccgctagtgccaccagctcctgctgttaccactgctgctgtggcggtgtttgtgacctcctcagctccggcagctcctgtagcgcagcctcagtccgagtcagtaccagctccagcttctacggtagatcctggatccgagactgactctgacccttag

SEQ ID NO: 43078 - DNA, 999 bp, Zea mays
  Peptide Sequence Number=SeqID_86453
atggagacttggctaccggctcagagagatcctgctgcagtcgatctcttcagtaccccagatacagaagtcctttcgagctcagatttctgcacagattgctctgcgagtgcaccggcttttggaccttcctgcatttctgctagccatcgcggcagatatgttgaggaatgggtccaagttttctatgcttcagtatggatcgaccctgatcaccagtggatgagattccgctttgagcgagaggatgttacaattcatgccagccagattcgccagttgtttggattcaatgagtcatcgactcgtcttcacagcttgtgctacggcacctctaatcctcctcgtcgccctcacggcagagttgctcctggtacaactcacgtcgcggctttgttccgaccgcccttctccgatgggtcgcgacgttctccggcagtttccactacagcagccaagtttttatatcagctcatgagacagacgcttctgccacggatgggttacagggaggctgccactcatatccagctctggctccttggtgccctggtctctcactcagagtttgatgttgttgacttcctcatttgtgagatcgaggacaccgtactggatggtctacgtgctcatcgacagctgccatatgctcactatctctgtcacatcttcgctcagctgatttggccaccacagttccagggcactcttgaggcctctcgcctcctctttgggtcctaccgtccagcccctgaggatcctgtgccggctccttctctagtgtttgacactcaggccgaggataccgcttttcatcagttcgagactcagggcacaacagtccatgatgatgatgatgacgactttggggttccccctccgcctccgcctcccggctcacatgatcatgaggccggaagttccagtgctgttctcgctgctcctccagcggttgatcctgctctagttgctatccttcagactcttacgcaggagtag

SEQ ID NO: 43079 - DNA, 169 bp, Zea mays
  Peptide Sequence Number=SeqID_86454
atggatgaagctcgcttcctccttttataccccaagcgcccctgctcgtgccttcacggccgtcggggcattggttccgagctccctccctgctccatggccgctggcccctcgcccctgctctccccccctggccgcgcgcaggagctccccggatggaccaggccag

SEQ ID NO: 43080 - DNA, 780 bp, Zea mays
  Peptide Sequence Number=SeqID_86455
atggcaatgagattgatggttctggttatgactatggtgctggttgtcagcattgcaaccactgctcaggagaagatgaagccatggaaggagacttccaggagtttcaagactacgacgagttttaggcgtgggttagcggcaacccccagtcggctgccgatggctcgtcttagacacactgcacgaaagtccgtcatccccttcttaccctcccgtcttgctgagcgtccgcttcgccgtcccgtggccggtcagtccagccatttggagaggctgcatcaccgcctgcatgaggagcaggagcgtcgacgacaggagcagcagggctcttctttctcgctccatcaggagatagagtccgtgaggagctgctcccctatgcttcctctggaggtgccccctgcaccaccactgggcgccccagcctctggagtagctgctggaggagacccagacgacggaagtggcgacgccggctcgagccacgacaccgacttctctgctgaccaggagccagaaggatgggttgctcgacccatcactcgcgacgctgctcgcgggtgtcacttccatgatgcgctcgacaccttgctacgtcgggcacttaaccagcgtacttggtctatcgagtatcgctgtgtggtctaccagcatagtcgcggggtctactcggaccgctgggaggcgacctgcttggtgcgtcgttcggagaacagtctccagggtgcggaggcctgctcagagcactattctatctctgagcgggactcagcttag

SEQ ID NO: 43081 - DNA, 2718 bp, Zea mays
  Peptide Sequence Number=SeqID_86456
atggcgtcggcgatgaagctgctggggagatcttccttggcgagccctgctgccgcggcgcccggacgggagcggcgaggcgggccctgcttcgccgcggtcggaagggaggggagcgcgcacaggaggaggtcgtcgctgaggtcgaccgcgccggtgggcgcgctggccgagcgggtcgtggtgacgccggcgccaccggagagggccggggcgggccccccggagccgcacccccagagcgtggccgcgcgggccgtggtcaccgtgcggcggaggcggaaggaggacgccaagcgccgggtcgccgagcagctggacgcgtacgccgaccgggttggccgcagtgtcctcctcgagctcatcagcacggagaccgacccaagaaaggggggccccaagaagagcaggcgctcggcgctggtgggctggttcgagaagaaggacgtcaagacggagcgggtggtgtacacggcggacttcaccgttgacgggtccttcggcgagccgggcgcggtcaccgtgctcaaccggcaccagcgcgagttcttcatcgagagcatcgtggtggagggctttccctccggccccgcgcacttcacctgcaactcgtgggtgcagcccacccgcgtggaccgcaacccgcgcgtgttcttcaccaacaagccgtacctgccggccgagacgccgccgggcctgcaggagctccgccgccagcagctcagcgacctgaggggcgagggtgccgacaccggcgagcgcaggatcaccgaccgggtgtgggagtatgacgtgtacaacgacctcggcaacccggacaagggcgccgagttcgcgcgcccggtcctcggcggcgagcagcagctgccttcttacgaccgcgcggagagccgggtggagtacccggagcccatctacgtgtcccgggacgaggagttcgaggacgggaagaacgagatgctgtcggagggcgcgctcaaggcgctgctccataacttcatgccgctgctggtgagctccgtgtcgcctgacatccgcgacttcgccggcttccacgacgtggacaacctcttcaaggagggcctccgcctgaagcaggccctgcaggaccagctgttccagaagatccccttcgtgcgcaagatccaggagaacagcgagggcctcctccgctacgacactcccgacatcatcaagaaggacaagtttgcttggctgcgggacgacgagttcgcgaggcaggcgctggctggcatcaaccccgtcaacatcgaacgtcttcaggcgttcccgccgatgagcaagctggacccggccgtgtacggcccgccggagtcggccatcacggaggagcacatcatcggacagctcgacggcatgtcggtgcagcaggcgctgcaggacgacaggctgtacatgctggactaccacgacatcttcatgccgttcctggaccggatcaacgcgctggacgggcggaaggcctacggcacgcgcacgctcttcttcctgacggccgcgggcacgctgaagcccatcgcgatcgagctgtgcctgccgccgatgaccgacgggtgcgcgcgcgccaagcgggtgttcacgccgcccgccgatgccaccagcaactggctgtggcagctcgccaaggcacacgtctgctccaatgacgccggcgtccaccagctcatcaaccactggctgaggacgcacgcggccatggagccgttcatcatcgcggcgcaccggcacctgagcacgatgcaccccatcttcaagctgctcaagcctcacatgcggtacacgctcaagatcaacgcgctggcgcggcagatcctcatcaacggcgacggcgtcatcgagtccgggttcacccctggccgctactgcatggagatgagctcgttcgcgtaccgggagctctggcggctagaccaggagggcctccctgccgatctcatcagaagaggaatggccgtggaggacccgacgcagccgcacggtctccggctgctcatcgaggactacccgtacgccaccgacgggttgctgctctggtcggccatcaggcggtggtgcgacgcctacgtggccatgtactacccgtccgacgagtccgtgcagggcgacaccgagctgcagtcgtggtacagggaggccgtgcacacggggcacgcggacaagcgcgacgcgccgtggtggccgcgcctgtcgacgcccgcggacctggcgtcgctgctgacgacgctgctgtggctcacctcggcgcagcacgcggcgctcaacttcgggcagtacccgctgggcggctacatcccgaaccggccgccgctgatgcggcggctggtgcccgccgagggcgacccggagtacgcgcacctggtggccgacccgcaccgcttcttcctgtcggcgctgcccagcctgacgcagaccaccacgttcatgaccgtcatcgacacgctgtccacgcactccgccgacgagcagtacctcggggagcggcctgatgaggcgtggacggccgacccggcggcgttggcggccgcgcgcgagttcgcggacgaggtgcgccgcgccgaggaggagatcgaacggcgcaacgctgacactggccgccgcaaccggtgcggcgctggcgtgctgccgtacgagctcatggcgcccacgtcggggccgggcatcacctgccgcggcgtccccaacagcgttaccatttag

SEQ ID NO: 43082 - DNA, 557 bp, Zea mays
  Peptide Sequence Number=SeqID_86457
atgcataaggggagcacgaagacatggttgcctttcaaggggatcaccctccttttaaaggcaactctctccactcgcgtcctcagccattgcgggctgagtcttctccaacatgctccaaggtcctccccctacgacacgggggttgggtcccacgcgtcatgcaagctggcccagggcagaagaagccaaactggcgcgcagtgcgcgcaaatgcccagcggttacgagcattcctccactttcgcccagaccagcggccccatccaaccctcggagacgagtgtgcacaactcagtgaagctccccgagcgaggaatcgaagcctgcttcgccggagaggccagtccacggtcgccggagctctcaaccccgccggagtgcgtggaccggatcgccgtggtttgggccggtacactcgccgccgacgagaacacccgcctgcacacgtggaccggggcgattccggccatccccgccgtcaagccacacctcgctgtgaccgccagagcctccccgagccaaccctgcccctcgccggacctatctcgccgccg

SEQ ID NO: 43083 - DNA, 489 bp, Zea mays
  Peptide Sequence Number=SeqID_86458
atgacttcccacggatcctcagaggacggaaacgcactatcccacactgacgggcttgcacgagagggctttccccgcattttgtgggaggtacttcagggggccggatacacgacaccccctcagtacgcggtgcagcagttcaagaagcaccgggtgccccgctgtaggggtgaggatgatcttggagcctcatcccctgcagccaggctggcgctctttggactccgagtccttcggataccgagcagaggacacgatcgaggcgatcgctctgcatggattgaccactttctgcggattccatcctttggagctggctacccaccccattggcttgttccccgccgaaagggaggacgacccaatgtggaaggatcgggttctgtagaggacatggttgctggagtgacttggccgtccatcttgccaccgggttggactgtcgagtgggaccctacctcggctgaggaggagcatgaggagtga

SEQ ID NO: 43084 - DNA, 63 bp, Zea mays
  Peptide Sequence Number=SeqID_86459
atggggaagcctgtcccatcactcctcatgctcctcctcagccgagtttgcccaagtgtgtag

SEQ ID NO: 43085 - DNA, 219 bp, Zea mays
  Peptide Sequence Number=SeqID_86460
atgggagaccacgtctcaggtcgcgtgaggggtaaagtccactggcaggttcaatcaggtactaggcttaccgatttaccatatttctcggtagatcctctggtgcaggctcgggtgctggatccggggctacctcctgagcagctccttgctccggcacaaggacgtactctccgtcagcaaggttacagtctatcgaaatgcaatgaacatgtttag

SEQ ID NO: 43086 - DNA, 495 bp, Zea mays
  Peptide Sequence Number=SeqID_86461
atgccgcctcgtagggctcggggtagtccgcaagttcctagtggggactcgatgagtccggcggcaatgttagccacgatgcaggccatgcagcagaagttggccattctgaggcaagctattcctgttgcccctgcgggtgctgctcagggtgctggtggtggaggagtgcccgggggcgttgtccctgtgggtgctgctccaggtgtgaaagggaaatgtgcccttaggccatttctaagtattttggtgattgagtgccaacgcaagtgcttttgtgttaatctatgcaaagtggtggacaaagtgcaaatcatgtcaaaggcgacagaaggcaagatccgccttcctggaatgctctcaacggctcctagctgccttggggctataaaagggacccctaggcacatggaggaggacatcaagcatactcaaagcattcctaagcaccaagacttcgattccacgcatttgtttcttcgtgatagcatctag

SEQ ID NO: 43087 - DNA, 828 bp, Zea mays
  Peptide Sequence Number=SeqID_86462
atgtcgcgaaaaataggtcaacaagaggagccgacttattcaaagccatatgcttttgcatgtgatgaacacaaaaagatgaaaggcaagaagaaggctccaagctcaagtgaagaagaggatgaagaagaagatgatgatgatgaaggtgatcaacccacaacatcatcctccgaggacgaagaaacagtccgacacgtcgaaaatgtaatgaggattattcgcaagattaatctaatgggtgtgcctctacaggttgaggatcttctctttaacattgataggaaaaagcaaagaaagagaggattcttatcatgtgggaagaagggtcacttaagggacaactgtccaaatatggttgaacccacaaagaggaggagcaaaggcaaggcactcataagtgtcaaaacttgggatgattcttcaagcgaagatgatcctccaagaactcgcaaccaccgctctgcatcatgctcttcatggaatgaacaattaaggcaagaagtggctcgcctaggcaaggctttgtatgacaagaaaggcaaagccaaacaaacccaacctctacaagataacaccactacgggagtgaacaagcctggagagggagaaactgtggtttgtaggctatgccacaaggaaggccacaagtcttaccattgcaaggtggacaaaaagaccgctacaccatatttgatcaagaagaaaaagaatggaaaggtgatagcaatcaaggctaacaagcaagacaacaaaggaaagggggccaaacgtatctgggtgccaaaggagattatttcaaccatgaagagcgccaagaaggtttag

SEQ ID NO: 43088 - DNA, 234 bp, Zea mays
  Peptide Sequence Number=SeqID_86463
atgtgcatgaactcaccaaaggtgggagttcatgtgaagtgtaaggttgatcaacaaaataaagagacaaccgatcaagccaaggatggaggcaagaagagcttcgaggtaccgagtgcacgggagaaggtcaaagagaccaggaacccaaagccaggggtgaagaagaagacttgcaaagtcaaggttgatcgagttaagaagagttatggtgcatcaagtatcactacataa

SEQ ID NO: 43089 - DNA, 792 bp, Zea mays
  Peptide Sequence Number=SeqID_86464
atgacttcccacggatcctcagatgacgggaatgcactgtcccacactgacgggcttgcacgagagggctttccccgcattttatgggaggtacttcagggggccggatacatgacaccccctcggtacgcggtgcagcagttcgagaagcaccgggtgccccgctgtagggtgaggatgaccttggagcctcatcccctgcagccaggctggcgttcactggactctgagtcctttggataccgggctgaggacacgatcgaggcgatcgctctgcacgggttgactactttttgcggatttcaccccttggagctttccacccaccccattggcttgttccccgctgagaaggaggacgacccgatgtggaaggatcgggtggagcatgccaaggatatctgggctatctacccgggacagactgctcatttgacagtgcagtgcatgaatgccttacaacaggaggagcttgtggttgacttgtcccaggagatggtggaaaaggacttacaagtggaacagttgtccgatgagatccaagagctggaggaattggtggggatcagggagaacaccatcgaggttctcgaagatcaactcatcaacacccagcagcagcttgttgaggctaatgagcacctggatatgcatcaccaggaaatccaggacgtgggggccaacgaggacatcgacattgaggaaggagaggagtctgcctccagcgtggacactgctggttctgggagaccaccttcccccgagtcgagtgttgcctcgttcgctcactag

SEQ ID NO: 43090 - DNA, 240 bp, Zea mays
  Peptide Sequence Number=SeqID_86465
atggggaagcctgtcccatcactcctcatgctcctcctcagccgaggcggggtcccactcgacagtccaacccggtggcaagatggacgaccaagtcactcccgcaaccatgtcctccagagaacctgtaaaattgtgccacaagcaaggttatgcataaaccggggcttgccttccaaggatgtggcaggcagatcctctggtgcaggctcgggtgctggatccggggctacctcctga

SEQ ID NO: 43091 - DNA, 780 bp, Zea mays
  Peptide Sequence Number=SeqID_86466
atgccccctacaccaccacagggcatcccggctactggaggagaccctgatggagacggagatgacgatgacgccggtggcagttcgagccacgacatggagctttcggaggagccggagccagatggatggatcgctagacccatcactcgtgacgccgctcgcgggtgtcacttccatgacgctctagataccttgttgcgtcgggcctttgaccgacacacttggtctatcgagtactgttgtgtagtctaccagcatcgttgtgggctatacccggaccagtgtgaggctacttgcttggtgcgccgtccagacgatgatcttcagggtgcagaggccttctcagagcactattctatcactgagagggacactgccgaggcagccatgcaagatgcagcacgacgtgcactttctcagtattgctcgttgttcagcggggtagctgatggccttgacctgaagtactaccctcgccgttcgaccggtagtgctggaggtgtgattgtctcgccagttggtgagggcaatcccaggctgagcagcatggtcaatctggtcgccgtgctcaacacagagttggaccacgcccttgacaagctgggcaaggttcgggcggaggttgcggaattgcgtgctgaatgcgcggcacgccactatcttgatggtggttctcccgcccctatcgggattcagcacccttaccgttcaccgccccatggtcgcttcgactatggtaccccagactgcaggacccgtatagatttggatccctag

SEQ ID NO: 43092 - DNA, 270 bp, Zea mays
  Peptide Sequence Number=SeqID_86467
atgcacgacttcctccttgagctggcactgcttgcttgttctggttggttgctggggcaggaagacgggctacctggttgctctgacgatggtattgatttcctccttgctggttgttctgacggtactgctactgctgaggaaactgcctctggtagggaaggtgtggttcatcagctgataatggaggggatcaaccaatcctctcaagaagcggtactatctattggcatccgtgttgacattgatagtcgcctagagggggggtga

SEQ ID NO: 43093 - DNA, 291 bp, Zea mays
  Peptide Sequence Number=SeqID_86468
atggctcaccggagttactctggcccgcccgagaccttctcaccgccgttctcccctctctgctcgtggattcatggcctcttccccgccgttgagtttgtcgtggcgccctcttctcctctgcccaactctggcgaccccggagccaccctagctcgcgcgtgcctcaactccggcgacctcaccgtcgcggagaggagcggcgccgcccgcagccgtctgtttccccctggaggtgaagctggtaacatggatgacttcgaggagttccagaaatacgacgagttctag

SEQ ID NO: 43094 - DNA, 285 bp, Zea mays
  Peptide Sequence Number=SeqID_86469
atgctggtagactacacaacgatactcgatagaccaagtgtgccggtcgaaagcccgacgcaacaaggggaaggcggcctctcaaactccacctcctttgaggcgagggggaagagtcctactgctcctggtcctgctcctggtgtcagtgctcttgctcctcgtgcaggcgacgatgcagtctctctaggtgactggactgacctggcaccgtgcaacgcagcggacgctccgccaggcgagaaggcaaaaaggggatcacagacttacatgcagtgcacctaa

SEQ ID NO: 43095 - DNA, 252 bp, Zea mays
  Peptide Sequence Number=SeqID_86470
atgtctggtgtgcaccggatccaacggtcgactgctatagacctcaaccgagtttgtgtcacggctgccaccatgtactggatggaacgaggcccgcagcgtttcagctggaagctcgatagtggagacaacggggagcgtccgaaaggatccagaagcggagcgccatttgcacgtggagaaggcctgtggttctctatggagttactcgaccgtggtccttggccctcacgtgggctaccctttgcgtag

SEQ ID NO: 43096 - DNA, 288 bp, Zea mays
  Peptide Sequence Number=SeqID_86471
atggcgggcaccccctctgcatgccaaggtggcggctgggccgagccgtgcgcccccaccctgtcaaccagtgcacgcctctccaagtacaagggttgccgttgtgtcgcctcctcgggcagcagcgccgccttcgcctgtcttcatcctcgtcgttgcccctacatcatcgtcaactacgttgttgtgcgcctctcgcacatggtctaccccgactgctcacgggcttcttcactaagccactcggatgcgttcagttcccggagcttcaggctagaatcggcatga

SEQ ID NO: 43097 - DNA, 201 bp, Zea mays
  Peptide Sequence Number=SeqID_86472
atgagcaggccgaactcctcgctgccgacgagctcctccgcctgcgcacgtggaccggccgactccgaccatccccgacggcgacccgcacatcgtcgtgaccctcgggacctcccctacaacctcgaccacctcaccggagcagcctcactgtcgagtttgaaattaattacagaaattgaccaaaccttagtaaagtaa

SEQ ID NO: 43098 - DNA, 543 bp, Zea mays
  Peptide Sequence Number=SeqID_86473
atggctcaccggagtttcttcggcctgctcgagaccttctcaatgtcgttctcccttctcttcccgtggattcatggcctcttccccgccactgagtttgccacggtgccctctccctctctgcccaactccggcgaccctagagccaccctagctcgcgcctacctcaactccggcgacctcaccgccgcggagaggagcggcgccgcttcacgcacgtctggtttccccgcccttgaacaaaaaccgagcacgttcaccttgatccttgactctaatccaaatgctcccattgacaaaaattcagcgaaacttgcaagcctccacacacaaacgataaaagaatgtccggggaagagatctctcaacgggatcatggccataatctcaaagatttggagccaatccgcgcttgaacactacctctctctacgctgcctcgtgctggacgctgtgccagacgccgcgcactggcgctcgcccgcgcacgccccgagcgcttgtcagagcctcccctcagccgcgctcccccacgcctattaa

SEQ ID NO: 43099 - DNA, 174 bp, Zea mays
  Peptide Sequence Number=SeqID_86474
atggtggagaagttaaggttggaggtggaagaatgtgacccagtgaaggtcaaggttatggtgcagaaatggttaaaagggaatgaggtctgggcttttgttttgctagaacaggttgtaccaaagaaagaagaggtgaaggggcagttagcagcactactcacagaattttag

SEQ ID NO: 43100 - DNA, 780 bp, Zea mays
  Peptide Sequence Number=SeqID_86475
atgccccctgcaccaccacagggcaatccagctactggaggtgaccctgacggagatggagatgatgaagacgctggtggtagatcaagccacgacatagagctctcagaggagccggagccggaggggtggatcgctagacccatcactcgtgacgccactcgcgggtgtcacttccacgacactctcgataccttgttgcgtcgggctttcgaccgacacacttggtccatcgagtaccgttgtgtagtctaccagcatcgttgcgggttatacctggaccagtgggaggctacttgcttggtgcgccgtctggacgatgatctccggggtgcagaggccttctcagagcactattctattacggagagggatattgccgaggcagccatgcaagatgcagcacgacgagcactttctcagtattgctcgttgttcagcggggtagctgatggccttgacctaaagtactacccttgccgttcgaccggtagtgctggaggtgtgattgtctcacccgttagtgagggcaatcctaggctgaacagcatggtcaaccttgtcgccgtactcaacaccgagctggaccacgcccttgatgagttgggcaaggttcgggcggaggtcatggaattgcgtgctgagtgcgcaacaagccactatctggatggtggttcttccgcccctgtcgggattcagcacccttaccgctcaccgccccatggtcgcttcgactatggtaccctagactgcaggacccggatagatttggatccatag

SEQ ID NO: 43101 - DNA, 978 bp, Zea mays
  Peptide Sequence Number=SeqID_86476
atggttacttttatgatgatgattaacaatggtgattataatcctgatctctggtatttcctctttgagggagtgcctctggctagtccactttatccaaacaggacatttgctgagtacgttgaagtgtactcacccttgctttacaaaccatcccaccccaggttgtccccactgttctcagcgttcaggagatggctcgtcttaggcgcactgcatagtgtccactgtgtcgcacagtgccagggcatcccggctactggaggagaccctgacggagacggagatgacgatgacgctggtggcagttcgagccacggcacggagctttcggaggagctggagccagagggatggatcgcgagacccatcactcgtgatgctgctcgcgggtgtcacttccacgatgctctcgataccttgttgcgtcgggctttcgaccggcacacttggtctatcgattaccattgtgtagtctaccagcatcgtcgtgggctatacccggaccaatgggaggctacttgcttggtgcgccgtccagacgatgatctccggggtgcaaaggccttctcagagcactattctattactgagagggatactgccgaggcagccatgcaagatgcagcacgacgggcactttctcagtattgctcgttgttcagcggggtagcggatggccttgacctgaagtactaccctcaccgttcgaccggcagtgctagaggtgtgattgtctcgccagttggtgagggcaatcccaggctgaacagcatggtcaatctggtcgccatgctcaacagagagctagaccacgcccttgacgagttgggcaaggttcaggcggaggttgcggaattgcatgttgaatatgcggcacaccactatcttgatggtggttctcccgcccctgtcgggattcagcacccctatcgttcaccgccccatggtcgcttcgactatggtaccccagactag

SEQ ID NO: 43102 - DNA, 228 bp, Zea mays
  Peptide Sequence Number=SeqID_86477
atgtacacttgcttcaggacacctaggatcgctccatgggagttgggagatgacaacagcgacgaacgacgacagcggatctcacgactcgaagtgggtctcggtggtggcgcacgtaatgtggaggtccccacgcccgaagatggcgacttggagatgcttgcgcgtggtagtaggaggggcactttatcccgaggtagagttgttaatagccaagttgacccatga

SEQ ID NO: 43103 - DNA, 303 bp, Zea mays
  Peptide Sequence Number=SeqID_86478
atgggtgcatcgaacactgtccggtgcgccagccacgtcacccaaccattagagttcgggcgcggacgaccgttggagctttgtcttcttgtggcaccgaacaatccggtgccgcaccggacaggcatccgttgcagtcgactgttgcgttggctagtcgttgctccgctggtgcaccagacattccggtggcacaccggatatccggtgaattatagcggagtggcgctggagaaacccgaaggtggccagttcggagttgtacggtcctggggcaccggacagtccggtgcgccagactag

SEQ ID NO: 43104 - DNA, 174 bp, Zea mays
  Peptide Sequence Number=SeqID_86479
atggggagtagctctctccgggtagaaagggaatcacggcttgtgggtggctatgagatcgatggttctggttatgactatggtgctggttgtcagcattgcaaccactgctcaggagaagatgaagtcgtggaaggagaccttcaggagttccaagactacgacgagttctag

SEQ ID NO: 43105 - DNA, 909 bp, Zea mays
  Peptide Sequence Number=SeqID_86480
atgaagggtactcaccctcatcaccttgggagtgggatgatcaaggactccctgatggaagactctctggccattaggacatcctactgctcagaggtggaagggttcccacatctgttgcgaagctgtgcgcttcgcatgggaatccgcaagaagccggaatacgtctggaaggagtatctcgagagcggaatggagaaatgctttatggcagtctacctgggagaaagccgaaactatccaaaccatccttctttccaagtcacttttaccggataccgctttccagatacgtgccagaatgttgcccgaacagccctcggacaactatgccagaactacaacaagatgatctttgaaaccccccttcgctactttccaaccagcaacaagaatacccccacctggaggaaaagacttcaggccctgtcaggaggagatcctattgaggatgatcccaccatcgtctacatggctggataccttcacacccttgataaccaatatgatgacctcaccctccactgcacccacctaacctcccgggtggaaagcctggagcaaaaagtcagggaactttcaagggaaaaggcatccctccaagaaagcctcgcaatagcagaaggcgaggaaaccaatacccgtgaggcctaccgcaccctaaagatggactatgacaagaaactgaagaagctcgcccccgcaagaaaaattcgcaagaagaccaaaagccaaggatgtcagactgaacagaaggaagaagcccctccaaccctaccccctgccgggttaagaaactcgtccgacaccgaggagatgtccctagccagccttgatgatcttctcaaggaatttggggacactttagagaaggagttcgggagtacccttgatagcactcgcatgtaa

SEQ ID NO: 43106 - DNA, 297 bp, Zea mays
  Peptide Sequence Number=SeqID_86481
atgtccacggactcgactgacgatgagctcaatctcgatgtcgtggtcgaggagcggcggcttgaagcacataatgaggcagaggatgcccggtgcctcctccttggtcccactaccatcgatctggacgacgccgggtgccaaagtttcacaataagccaagaaagggttcaaacaaagagagcaaaagacaacccaaaaggcaccctggtctggcgcaccggactgtccggtgtgccaccggacagtgtccggtgcaccaaggcactcgacgctgaactcgcaaccttcggttaa

SEQ ID NO: 43107 - DNA, 621 bp, Zea mays
  Peptide Sequence Number=SeqID_86482
atggtggttgtcttcgctgcactctgcccttcctgttttctattgctgaatcatagcggctctctaccggtgtgcaaattcacaatagtgcctgcgtcatacgcaagaattcgttgttcgcaagtggcacttgagaacgccggtcaagctcaaacagctggaaattgtatggttttgtcgacacacactgatcagcagacgacagtgctccctgacgctgggatttcgctcagaacagaagctaccacgataatgggatctagtgacaagattatggaatatcgaaaggaaaaaattaggaaattcatgcaattacaacaaaaagaagacgatgaattgttttttgtaatagttcctgccatacttcagtgccttaatgatgagaaaaggccagttcatacttctgaatatactggtgctaaaaagatgaaggaaattctagaggggcatgagagttggtgtaagtcagagtttcgtatggagcccgagattttaaggcaacatgcaactatcttaggcaacatgcaacatgagagttggtgtttacaagctgatggctgcagatggtgcttcatttttggcttctttgtatctggtttgagacatggacgaatactctag

SEQ ID NO: 43108 - DNA, 1788 bp, Zea mays
  Peptide Sequence Number=SeqID_86483
agggaggaagggcagagatgccaatactcggagaaaaccacggcggcggccgggcaggaccagacattcctcaactggatcatggacgccccggcagacatggacccgccgcccccgccgccgccgctcctcggtaatgccgccggcttcgggttcccggcaccggacccgctcgggttctccctgcagcatcaccccggtggcggcggcgcctcggccggggcgctggcctccgacctgtcgtccccaggcgcaaggtcgctcagcggcagcagcggtagcggcagcaaggccacttccactttcggcctcctaccaaccgaggcggtgcttcagccgccgccgccgccggcggccacgaccatgcgtttccacgacggtgccgacataaagcccccgcttctgggagtcccgtcggcaggtctacttcatcaacaccagacgctgccggcggcctccttcttcatgccgctcccctccttccccgaccatcagcaccagccacatctcccgcccccgccgaagcgccaccactctatgcccgacaacctgttcctcctccaaaaccagctccagccgccgccgtcgcagggtctaccattcccgccactgcataccaccacgcccttccagctccagccaccactgcaaccgccgcggggagcgatgaaaacaaccccggcggcgcagcaacatcaacagctcctggacgagcttgctgcggcggcaatggcggctgaggtcggcaactccatcggcgcgcgagagatattggcgcggctcaatcagcagcttcccccaatcgggaagcctttactccgctccgcttcctacctcagggaggccctcctcctcgcgctcaccgacggccaccaaggctccactcgcgtaacctccccgctcgacgtcgccctcaagctcggtgcatacaagtctttctccgacctctcgcctgtgctccagttcgccaattttacggccacacaggcgcttcttgacgagatcgcctcaacaacttcgtcttgtatccgcatcattgatttcgaccttggtgttggcggccagtgggcttccttcttgcaggagctcgcataccgccgtggaactgggaacggtcccctgccaatgttgaagctcacagccttcgtgtcaagtgcttcccaccacccgcttgagctgcatcttactcgggagaacctgtcgcaatttgctgtggaccttggcattccatttgagttcactgccatcaatctcgatgcgtttgatcccgcagagctcattgctcctagcgccgatgaggttgtcgctgtttgcctccccgttggttgctctgcacgcacgccaccgctcccgatgttgcttcagttggtgaaacagcttgctcctaagattgttgtggctattgaccacggcagtgaccggggtgacctcccgttttcgcagcacttcatgaattgcttccagtcctgtatgttccttctcgactcactcgatgctgctggcaccaatgcggatgctgccagtaagatcgagaggtttctgatccaaccgagagtagaggatgcagtgcttggccgtcggaaggctgaaaaggcaatggcttggcgggcagtttttacatcggctgggtttgctccagtgccactcagcaaccttgcagaggcacaagctgactgcctcttgaagcgggtgcaggtccgaggattccatgtggagaagtgtggaatgggtctagcactgtactggcagcggggcgagctcgtgtctgtctcggcgtggcggtgctga

SEQ ID NO: 43109 - DNA, 837 bp, Zea mays
  Peptide Sequence Number=SeqID_86484
atggatcaagaacagaatgtcacaggcccgcaaggcgctgatactatccgtcgctctcctcgtgtacaaaacaagagaaagcaattagataaaaatgaattaaaggaaaggaggaagaggttaaggttgaaagtccccttgtctcctattcaagatgccgaaagtgatgatgaacaagacccagattttgctcctgccggcgatggttctggcgacgacaatgttggtattgttggtggcgatgagaataagggtataactaagacgcgagctatacgatgctcacctgggaagtttataaagcttgtgaatgctctatctgatgaattgaaaagtgaagtagttgccaagggttaccaaacgttggcagagatccgccccccatgtttgatgcagatgctcgtgccttgcgggacgagctgggagagcaaatttgtggcaactcttatagatgcatatctgtgtctgctattctccaacactgacacttgcatcaggattgatgatgtaaagtatactcaggacatccagaacatggccaacaagaactggtgcaaagcggtagttgacaggctcagcatagctgcacgtctttatagaaaggattttgcagagaaaggcattaacgcacccatcagtggatgcgggatcttcgtagctaggttgtaccctttacccacaagtcatgttacccgtctgccaagggatcgcgacttcccatacacctataccgaggaggcgaggcagggtaacactacgaggcttttacaaagttccactagcttcagaaaacccgctacagtttataggaagctccaatgcagggttcttgcctga

SEQ ID NO: 43110 - DNA, 399 bp, Zea mays
  Peptide Sequence Number=SeqID_86485
atggattcgaggtatggtacacgtagaggagacattggtgaaccggatgatggatttcttaccgcgagaggaggcggtaacgaggacggccacggcatgagcaattccacggcaggagggcttcacgacgttcgatggctgatgggcgagcgaggtgccctggctttataccccgaagccgaggaaagcggagtccgaaggggaacgattgatgcccagccggaactgaatcccaagatctccggcggcggcatgcaacagcacgagctcgcttcggttttggttgaagacgaccccgaccacgaggcccacctggcagtgccagaaagtgaaagggaaatgtgcctttgggccatttctaagtgttttggtgatttagtgtccaacacaagtgcctaa

SEQ ID NO: 43111 - DNA, 171 bp, Zea mays
  Peptide Sequence Number=SeqID_86486
atgcagatgctttatgtcgacaacctgcagcatggatttgacacaagtcccttttcgatccctcgatgtgctttcttggactcgaagacgattgatgcgatagcaaataaggatctcaggggagatgttcctcctggcaccaccgagtttggacacctcaggattatctaa

SEQ ID NO: 43112 - DNA, 270 bp, Zea mays
  Peptide Sequence Number=SeqID_86487
atgcttcgctcccggtatgcctcgcagacgtccaaacagaacccgggcactaaccagcagctggagatcgagatgaccgctgagaagtctcgccgcctcatcacatctgattgtggaggcggaggtgccgatgccaagccagaggctccggtctccgaaggagtggtcaatggggacaagtggccacgttttgctgatctcggcgggatggagcagctgctgaaggatatgcagtttttgtacctcaacttgtgtccatggaggttctga

SEQ ID NO: 43113 - DNA, 630 bp, Zea mays
  Peptide Sequence Number=SeqID_86488
atgggccggatcacacgtgggcctctgagctggacgaggctgcacggtgggatgacgacgtctgaggccttcgcctcgcgccgaatcaggcgaaggactgcccccgcctctctacacccgcccgcgtgcggcgcgccagccgtgatctgcccgcccgcgtgccgcaatccccgccgcgaacgccgcaatccccaccccctccgcaatccgcctgcccgccgctgtccccgcccgccatgttcaaagggccccaacgccgacctctcgcgaaccctaaccaactgcacccgtcgtggggacgcggccgccgccatggccgcccactccgacaccgtggccacgctggtagccgacgtcgacgccaccgacaccgacggtgacgtgtcggagcccggcctgaacggccccgcgcatccacccctcctatcgttgtggttcctgaaactgaacgagggctgcctcagcacgtgcggccgggcctcgttctcgtccgcgtcgtccgctttcggccgcgtcggaggtttcgaactggaggacgaaagaccggcggcgactcgcgtccgggcagaaaaaccggcccgtggaaagtccagcctctcgttgtcgtggaacctccaccggaagccctaa

SEQ ID NO: 43114 - DNA, 393 bp, Zea mays
  Peptide Sequence Number=SeqID_86489
atgggggagatccgccgtctttccgcctcgtcgttggaggaacgcaactccgtgggagttggtacctttcagccatcgttcggcttcaaggattttcatcagctagcccggctgtacaccccccgccggcagtcacccgagacggcgaccaccagcccctgggtggggagaagtaagccgagctacgatcttggtcccaccctcagcttcaaggatgttcatcatcctcgctggggtggaggccaggctgagccggagctctacctcccgcgcgggttcgtgggtcaccctctcccgcggtgttcgagggtgagggcgctcgctggccctgcgggcgggccggacttcgacaacgcgggtgttggagactcgttctcaagtgctatgaattaa

SEQ ID NO: 43115 - DNA, 1149 bp, Zea mays
  Peptide Sequence Number=SeqID_86490
atggtcgccttccaagggggtcaccctccttttaagggtggttctccctactcgcgtccccatccgtcacagactgagtcttctccaacacactccaaggtcctcccctacggcgcgggggctgggtcccacacgtcatgcaagccgactcagggcagaagaagccaaaccgccgcgcgcggtgcatacaaccgcccagcggttacaagcgaccctccacttttgcccagaccagcgggcgaaagggtgggcggccatgcaggcagcatgcaaccgcgccaagtgggcgcgcttctccgactcccaacacgcccagcctggaggcccaggcccacgcgtcatgcaaccggcgcgccgactgcttcgtgcatgcaactgcaccgccacttgcgccaccaccgcgcctcctcgactgcggaaccaataccgcgactcgaggcgacccagcgcacgactcagcagcgccagcctggcgcggcggtcagtacggccaaaaatgggccggcagtaatgacggtggcaggcgggcaggagcagcagtcacgtcatcagtcaagcttacgtcccatccgggggcagcgagagcaccctctcccacggcgtgaagacaacacgcccgtgttccgttcctcgagcgactcgcgcacgcgcaacgaccgccccgtcaaccactcgccccgtcgcatcaactccgcggcgggacaggcggcgcctctggctccgagcctccctactgatcagaggttcgaaggctggccccctgaagggttcaacagccgcctcagatcacgtgggccctacacccactactggggttcgaaggctggcccccgaagggttcacagccgcctcagacgccgagcgagggatgaccatgggtacgttcgatacataaccaaggctcgggctgcgctcccgagaggctcggaggctgctctcgcaaacccggctccggccgaaccgttgacagcgtcaacataccagcccgagaacttgggacccgaccgtacacccgggctacggcagtcaggccccgccggaggcaccataggaaactccgcttcgcccgacccagggctcggactcgggctcagccccggaagacggcgaactccgctccgcccgacccagggctcggactcgggctaa

SEQ ID NO: 43116 - DNA, 537 bp, Zea mays
  Peptide Sequence Number=SeqID_86491
atggcgcttccccccctcctccttgcggaaaggcgacgtaggggcgtatgtaaaaaagccgagtctgtccctgatcgccctctcgccctgagcagaggctcgggggctgctctcgcaaacccggctctggccgaaccgttgatagcgtcaacataccagcccgagaacttgggacccgaccgtggtaacccccatcagcatgaagctgcaaaggccagatgggcgcgattaagtcagggatcagtccattcgagcgactcgatcaacgcctcgcccgagcctagcctcggacaagggcagccgaccccggaggatttccgcctcgcccgaggcccccctccaacggcgaacggctcggactcgggctcagccccggaagacggcgaactccgctccgcccgacccagggctcggactcgggctaagtcccagaagacggtgaactccgctccgcccgacccagggctcggactcgggctaagtcccggaagacggcgaactccgctccgcccgacccagggctcggactcgggctaa

SEQ ID NO: 43117 - DNA, 261 bp, Zea mays
  Peptide Sequence Number=SeqID_86492
atgaggatccggtgccagtggtcccggaggatggtcagcagctccctcttgagttttttggtttgggtcaacctgtgccggctgtgggctgggatcttaatttcccgccagaagacaatgtccaagcccagccagcagacaacattcaaggtgattgggaccaatggattgttaatgatccacctatacagcagcctcatctggacctgccacctgacgagcaacagatattccttctgctctgatggagccagagactaa

SEQ ID NO: 43118 - DNA, 81 bp, Zea mays
  Peptide Sequence Number=SeqID_86493
atgcccaagcccatcaagacacacatgggaactaatgggcatctcgacctcgacacgggaggggatctacttttgatttga

SEQ ID NO: 43119 - DNA, 480 bp, Zea mays
  Peptide Sequence Number=SeqID_86494
atgttgtcgctggatagtgcaaaattgaactatccagcgacaattaaaaagaaacagagggagtatatgaaatggttttgtattggtaaccataattcaagactccatgagttccttggccagtgcccagtccatcgtcttgattggatgagcggaccctacccaaatattccgaagccattgttgcagacttgccgtcaaagggatttaagatatgaaggctcagccccagagaggctctcctacttccccaagaacaagataagaagatctgcaaggacatcgacaaatctggtagatgacttggttggtccaccactgcctcaaaattgtccacccgtcagtgctctagtgacagagccctccacctctatgactgattccctagcagaagactctgagaaccgagccatccaaagttcctacttcctaggggaactccttcaggcacctcgatcccaattctatcgagtgacatga

SEQ ID NO: 43120 - DNA, 390 bp, Zea mays
  Peptide Sequence Number=SeqID_86495
atgggggaggaacggatccgtaacagcacggcggaggatagacatggtcgaaatggaggtgacgaatatacctgcgaagacgacgatgcgatgggggaggagtccaaccttgacgatgcctgcagaatgtggcgacggagttgcggcggcgcggtcaaaaccctggcgaactcaatggtcacggaccttatccaaacgacccaggcggcggaggacgacgagtggaatcgtaacggcatggaggataggaacctcgtacctgcgaagacgacgaggaaggcggcggatgaagcagagggactgcggacgaggcccgcgtcccgctgcggcggcggcgacggcgggagttgcgaggggagagagctgcggcgccgcgcggtcgaaccttag

SEQ ID NO: 43121 - DNA, 186 bp, Zea mays
  Peptide Sequence Number=SeqID_86496
atggatcacgaatccacccctcatcgtggtcgggggttctgcgcgtctaccgccgaatcaagaatagtcgcggtttgggctgaattgtcggtctctgcgaggttcaccatcgcagggcattgcgtcgctgggtctggtgttggctggggaagacaacggtctggccttcgatccgtagatggatag

SEQ ID NO: 43122 - DNA, 735 bp, Zea mays
  Peptide Sequence Number=SeqID_86497
atgtcgctgtggattcttgatcctgctggacgtgatgcaactgttttgagagaagctctaaatggtgacactatggatctgagagcagccactgagattatatgttccaggacaccatcacagttgcaaataatgaaacagacttattatgctagattcggtacttatcttgagcatgacattgctcaccacacatccgtattacactgtccggcattaggaagcttttacttgcatattatggggattccacgctatgaggtcccgaggttgatcctacaattggtgacacatgatgcaaaggatttgtacaaagctggtgagaaaaggctgggtacggacgagaagatttttatccgtgttttcactgaacgcagttgggcacacttggcatctgtttcttctgcttaccatcatatgtatgaccggaaattagagaaggttatcaagagcgaaacttctggaaactttgaatttgcacttttgactatcctcagatgcgcggaaaacccagcaaagtattttgctaagctcttacgaaaggccatgaaaggtttaggcactgatgacatgacacttataagggtggtggtgacgaggaccgagattgacatgcaatatatcaaggcagagtacttgaagaagtacaagaagccattagctgaggctatcaactccgagacatcaggaaactatcggacgttccttctttcacttgttggtcatggccattag

SEQ ID NO: 43123 - DNA, 624 bp, Zea mays
  Peptide Sequence Number=SeqID_86498
atggacgagcgccccgacgcctgcgccgtggcttcctctacctcctccgcctcagtgtcgagcgccgaggaggacgcgtcgatccaggaccagctcggcgggcacggagcgttcgcgccaccagccgtcgacgccgcccagccagtaccaccgcggcggcggttctgggcgtgggccaccctcaccgcgcgcgccgccgcgcccaggctgcacgaggcgtgcggaaccgcggcgcggggactcgtggcgtggacaaggcggggcggcgcgcctcgttgcctcctcgtcgtgtcggttggatccgtggcgctcgtggcgctaagcggcctcctgatcctcgtcttcttcgtggtggcggcggcgacgaacgccatcgccttttccgtcgtcgtgtccttggccggcgccggggggttcctggccgtgctgctggctttcctggccgcgatgtacgtcggcgcagtgtccgtcgccgtgtttgttatcttggccaccacgatcgcgacagtcgttgccatcacgatcgccaccggttgggttgcattcttctggtttgtttggtttaccgccagagaatgcctgagcctgacgactaagcgaagaaccggcaccacaagtccatga

SEQ ID NO: 43124 - DNA, 309 bp, Zea mays
  Peptide Sequence Number=SeqID_86499
atgtactacaagctccggcgcagccgccgcttggacgcggtgcagagcggctgctccgcgctgtccatcgtcaagcagggagacctcatggggtactaccttgctgatgagcgcagggtgcacttcgttttacagcccaaccaagagtcatcagtactcggtatgtcgcgcgtgttcgacgactactatatcgaggaccgtggcgtcatcttgatgacgcaggaggtgacgcagaggaggaccgacaataatgaccagttcgtcatcctcaccaccattgggatagcttttatgccgacttgcctttaa

SEQ ID NO: 43125 - DNA, 279 bp, Zea mays
  Peptide Sequence Number=SeqID_86500
atggcgatcgatcatgtgcgcgtcttctgtccatctcctccgaccatgacacacatgcatgaactggcatgcgcacgtccctccacgcgccatttgcagccgccgcgccggccgagcttcctcgggcagatttcgacatcatatagagaacgtgtcacacccggatttaaggagcaaagccgggtgcatttcatatatgcgccagagaagacaacacatataataacagagtgcatagagataaatgtcataaatatcataaatgtacttattacatag

SEQ ID NO: 43126 - DNA, 906 bp, Zea mays
  Peptide Sequence Number=SeqID_86501
atggcgcgggtggaggcagctgcgattccgacgaggtccacgtcggagggcgaggaggccgcgactggatctatggcggggggcgagttggctgcagcaggatccatgttggaggaggggaaggtccgacgggatccatggccgggggtggtggagctggctgcgacggtatctacgacagagggcgagggtgtcccgacgggatccattttcgctgtccggcggcagcaacatgtggtgaagcaggcgggtctggagttccactgcgtgaaggttgtgtcccgccatctggtggcactgtcgatccgttgtaatttagcattgaaatgtatgtgcgatgtctgtgccttgacggagatgaatgagtgtgagatgtctggcatcatttcctctcctatggttaagttgattgaaacttttgctgttttttgcaagtctcagagagctgcttatagggagaaggtgttaattgaagcagagaaacaatttctgcatgatttcacttttttcaaggaaaagttattagttgattttggccaaatagtggatgtcgaatgcattgatagtacttgccaagttctgtgtgacaaggtcaggggttgttgttcaatttgcaagtcaaggtgtactgaagctatcatcgattctctaaaaaatttggctgaagcaatgactattaagcatcagaagtttttgaattccaacaaccttctggcgaaagatatggatattaagtcagatgagaaagctaccaaaattgatactaatgtgcagccagttgatgttaagtcgaatgagaaaggggctggtgtgggcattgttgaggcttctcatggaaaagctcatgtggttattacaaatcccctgataagcagtgcccatacagttggagatacaaatcgttaa

SEQ ID NO: 43127 - DNA, 138 bp, Zea mays
  Peptide Sequence Number=SeqID_86502
atgcagggttcttgcctgaccgccatcgcagcaaaatcaaccaaggacctccctacactgaccactcccctactgcccttgcccctttcagcaatagcaaactacccaagtgattcaggggtaaacaagggcctctaa

SEQ ID NO: 43128 - DNA, 312 bp, Zea mays
  Peptide Sequence Number=SeqID_86503
atggagaaaagacgagaggagcttgctgccgagcaacaacgggaagacgagcaggaaatgaggcgtgttgctgaatgcagggaagagaaggagaagaaacttgagcgtgcatgtcgtgcaaagaaagcaatggaggagaaccctgaggagcttgctgccgagcaacaacgggaagacgagcaggaaatgaggcgtgttgctgaatgcagggaagagaaggagaagaagcttgagcgtgcacgtcgtgcaaaggaagcaatggagaaccctggtgcatttagcaagggcaaatggcctcattgcactgagtag

SEQ ID NO: 43129 - DNA, 474 bp, Zea mays
  Peptide Sequence Number=SeqID_86504
atgacgacgtcgcggcaggcgtaccgcatcgacaaggacaacccggggtccaacctcgccggcgagaccgcggccgccctcgctgcggcctccatcgtcttccgccgctccgacccgcactactcccacctcctccttagtgctgggaattgggccgggccggaccagcccggctcaagtccattgtgcttcgtgccaaacgggttcgggccagaaaagtccaaacaatttttgggccgtgccgtgccagcccgaagtctgttcgaattcggcgaccggtaccgcggcacgtacgacagcagcatcgcggaggcgcgcagctactacgcgtccgtgaccggctaccgcgacgagctgttgtgggccatgaccgagttcagctgggacgtcaagtacgccggcgtccaggtcctcacggctagggctggaaatggatgtctggagattcgaattatccgtattcgtattcgctaa

SEQ ID NO: 43130 - DNA, 525 bp, Zea mays
  Peptide Sequence Number=SeqID_86505
atggaggcggcagcgtcagccgagtacgggtactacggcggaggcgcgggcccacacgagacgaagaccgccgggtgcggggaccacttcgtcgtggacgacctcctcgcgctgccgccgtacgacgacgaggaggagggggcgacaggcgagaccccgctgtgcctgcagcctgtcaaggaggaggagggcggcctcgggaatttctcggccgactcgtccatcgtcgtcacagcaatcgacagctgcagcaactccttctctaggctagccgacgacgacttcccgggggaattctacgagccgtacgaccaactggtggagctagaatggctatcaaactacatgggcgagggcgaggaaactttcgcggcggaggacctggagaagctgaagctcatttccggtgggttctccccggcggctgtgaacgtgtcagcaccatctccagtggggcgtagcttcagcccgcctctgcgacacagtccgggatgttcctgccgggtcccgggcaaaggcccgtaa

SEQ ID NO: 43131 - DNA, 159 bp, Zea mays
  Peptide Sequence Number=SeqID_86506
atggtggcgctccgcgaattcgcgctcggacgagggaggagagggatggccgaggctggtgcggggaagaaggagctcgggcgagccttttataggtgcgcgagggaagggggggcggtggagctcctcggctccgataatctaggtgctagaaaatag

SEQ ID NO: 43132 - DNA, 411 bp, Zea mays
  Peptide Sequence Number=SeqID_86507
atggcgccccgcacgctccctgacgatggtggctctcggcccccttacggaagcaagaggacgacggtgtcaacgactgtagcaaaatggttcgtgcctgattgcacgagggacagtggacaagatttgcagacgactccccaggggattgccgcggaggtctggacgtacatccgggccgtcgagcgctccgggctcgagggctcggatgagtctgagttttcctcggacgaggaggactcggacggcggtgaggacgaagatgacgacgacgacgacggcgacgacgacgacggtggcgatggcgacggtgacggcagcggcggcaagggcagcaccagaggcggcagcagtacgggaagcaccagaggcggtggcggcaagggcagcagcagcaaggccattggctaa

SEQ ID NO: 43133 - DNA, 351 bp, Zea mays
  Peptide Sequence Number=SeqID_86508
atggcgcctcccgttgacgtggccggcccgcgccctaggttgggcgatgtggaggctcctccgaggtcgaggtcgagtccgtcttccgtggccgaggtcgagtccgagcccctaggtcgggcgaggcggaggccgttggctgaggccagggcagagttcgagccctgggtcgggcggagcggacccgagtccaagccctgggtcgggcggagcggagttcgccgtcttccggggcttagcccgagtctgagccctgggtcgggcggagcggagttcgccgtcttccgaggcctagcccgagtccgagccctgggtcgggcggagcggagttcgccgtcttccggggcttag

SEQ ID NO: 43134 - DNA, 294 bp, Zea mays
  Peptide Sequence Number=SeqID_86509
atggcccgagtgattgaactgagggtgaagagggagaatgagaacctaggccaaatgccaggaaggtgcccatactacagatggcagagggagtattttgagaaattggtgaaggagaggttgattgccttgttattcgatgattgggaggaagatgatggagaggtggattccaagaagaagttggaagggaatgttgaactttgtcaatacagttcacagatcattgaaaacagaaaacagtcacaccatagcattgttgaaaccatcagcattcattacatcccaacatga

SEQ ID NO: 43135 - DNA, 279 bp, Zea mays
  Peptide Sequence Number=SeqID_86510
atggtcgaacaaggaaatgggttggagcaaagccagtcgatcccaaggttcatttccaatgttggtcaaacattattctatagggttaataatagctacttcgttctacaagctatggtcatatgggggaatgatagacgaatggaatttgatagggatgcaaagattcttcgaaataactttgtaattgatctgttaagttgcgaggacaattcatgccgctatgccatccctgcaaacatacaacaaagacttatcaatatcgctaaaatggattag

SEQ ID NO: 43136 - DNA, 1863 bp, Zea mays
  Peptide Sequence Number=SeqID_86511
atggcctcctggctcaaggtcgccgaagacttgctcgaagtcgtcgaccggagggccaagatcgtggcaacagaactgtcggatgagcagtctacctctcagccttcaggaccaaacaaccaagaagtgcaagcaaagaagggaaagccgagggagaagggtccattgaagctcactaatgccgatggtggcaacaagatatctgctcagaaggaaaagaggagtaggcaacggccgcgagagcggatgaagatcgagaagatcaggccttcgccacctgcaggttcatcaagtgttgataccagtgctagtgaaccagaagtcactccgatcgatgttaaggaagtgggtaatgagggtacattggagaaaggagagaaaggtactgatggccttaagactgatgggtctgggattgttaataccatggttgaagttcaactgatgcagaaaaactctgacaatgccactctggatggtgttacacataccaattcagagattgctgttgaaagctatttttcagttatggatgcaaaaagtgagtcgagcagcagtaaccagacttccgagattggttcagtgattaatttggaggagagagactctactgtggctgttatccaggacacaaatgcgtctgaattgccaaatacagaggttactggcaaactgcaggaatcaaagaaagcgagtgtttcagattcatcagaaagcatagaagatcgacgcaaacaaaaatctgatacaatttctgtgaaagaacaagaccaacttgaggaggctcagggattgttaaaaagtgctgtcaagactggccagtcaaaagaagctagtgagaaacgccagctcactttagaatgtcaatggtgtactggcactggtgaagaggccctgggggcggcgctccacggtgaccccaagaaagtggtggagagggctcaagtccttcatcgcgaactcgcattgcaaggaggcgatctttcgctagaggaggatgggactgaacgttgtgagcatgatgttgaagatatagatggtctcaagaggaactgtgaacttactgaaaccagagttatacaggctttacgggaggaacttgctaccacagagcgtagggctgaagaagagcgcattgctcataatgccacaaaaatggcagctgttgagagagaagtagaactagaacatcgggctgttgaggcatcgagcgctttagctagaatccagagagctgctgatcaaagctcatcaagagtgctggaattggagcacaagttggctgttcttgaggttgaatgtgcttcattgcaacaagaactacaggagatggaagctcgtaatcgccgcgtacagaaaaaaccttccgaagaagctaatcaagttcttcagatgcaggcttggcaggaagaagttgagcgtgcacgccaaagccaacgagaggcagaggcaaagatatcatccttggaggcagagttgcagaaaatgagagttgaaatggctggaatgagaagagatgcagagcattattctagacaggagcatgttgaacttgagaagagataccgtgagctaactgacttactgtaccacaagcaaacacaattggaatccatggccagcgaaaaggctgcgttagagttccaactggagaaatcattgaaacaatttcatgaagtgcaggcagaaaggagtaaagctactcgcagatcagcatcgtcgtgggaagaagatgctgatatcaaggcattagagcctcttcctctacatcatcgacacatggcaacagcaaatcagcaggacttcgcgtccagagaaggaacatcagccatgggggatctggccagcgcgaacctgccatag

SEQ ID NO: 43137 - DNA, 579 bp, Zea mays
  Peptide Sequence Number=SeqID_86512
atggcggagaagctgacgccggagcaggtggacgagtgcaaggaaatcttcgacctgttcgacgccgacgaggacggcaatgggcttgcaggtcgcatcgccacgggtgagctcgtgacggcgctgtgctccctgggccagaacgtggacgaggcgaaggcgcggcgcttcctggaggacgcggtcgccacgggcgccggcgacatcgacctcgcggcgttcctggccgtggcggcgcgcaagatgggcgccaggcagtcggaggcgcgcctcgccgagtgcttcgacgtgttcgacgacgcctgcagcgggtccatccccacggagcagctgcggcaggtgatggtgagccacggcgaccggctcacggaggaggagggattgcggcggggtcgcgggcgaacggactgcggcggtttttgcagcgggcggagggaggcgggggcagtctacaatagagacttaatagttagtagagactaccgcgccatgtcagcacaccctctcgctctgcagcggttccccctataccattcctttaggctgcccacaccggagagctggaaatggaacccgtaa

SEQ ID NO: 43138 - DNA, 978 bp, Zea mays
  Peptide Sequence Number=SeqID_86513
atggatgaaggaactcccctcggtggtctggagcctgaggacaacaccgagccgagccacgggcttcacgccgttctttctagtctatggggccgaggccatcttgcccacagacctggaatacggtgggcgacctggtgcttcggctgcgacaagacgcccgaggtcgacacaagctcacgccccccctgggaggggccgttcgtcatcgccaaagttctgaagcccggaacgtacaagctggccaacagtcaaggcgaggctcggatcttgacggctaaagggagcagcagcaccctcggcgtcgacaacaccttcggcgaggtccgacctagcctcggacggcgacgcggtccaagggtctccgctctgaaggacaacgtcatcaccaagcccgggccatcgccgccagggtcttctccgagaattcggcccgagcaggcggctcggccggtcaccccggggcctcggccagctgtcccccaaggacatcagcccggcccgaggcctcgacagatcaattccggcgtcggtcccgctaacggacgacccggccaggctccggccgaccaggcctcgacagccacaatgaacaaaaacactggcattcaagatgccattacaaacggaactccggttccgtccccgcggatatggacaacctccacgccggggaagcccgcggagcgacaagctctgggcgaatcaccagcaaacgcgggtcgccccaaagcgcaccggcaggtcctcgctcctgtcctcgccacgcaagcgaggaagaggacggaatgttgcatcctagctggacagcgacagcccgcctcccccaacatggttggaggacgtctcctccgcagaactggaggatggtctccaccaccagaagctggaagaggaggtggtcggccggcccgcgcggggggtacagctccggctcagcccggtctccaccccagcgaggatgatgaacatccttga

SEQ ID NO: 43139 - DNA, 177 bp, Zea mays
  Peptide Sequence Number=SeqID_86514
atggagcagttcgagcatggagtctgcacgcaccaaggatcaactctgctaccgtcagaaaatacaaatgcctccagtatggagaacggggaaccagggtgtcgaggcatttgctctaccattgcgggcactgtggaggactccctcgccgcgcgagccgcgaggccctctctgtga

SEQ ID NO: 43140 - DNA, 603 bp, Zea mays
  Peptide Sequence Number=SeqID_86515
atgcaggacaggcaggatgcgcttcagcagcagctacttcaggatcgggctgagagcagggcattcatggctcttatgctacagcagtctggtgtctcagttcctccggttcagtctgctccacctcctccgcttcacgctccagttgtgccatcgattttgtcaggaccccctgttggtacttctccgctccggccggtcactttggctttcacctctccggttctcagctctgtctgcccgcagccgccagtgccaccagcatctgctgttaccactactgctgtggcagtatctgtgacctcttctgttccggcagctcctgcagcgcggcctcagtccgagtcagtaccagctccagcttctaccgcagatcctggatctgagactgactctgaccctccgccggcgttcgctctgctgcctcgaccgcgaccggacgcgcccccgccacctcctcccgcttcagaaaagcccaattcaccccccctcttgggcatcgtgttcctttcaactagcttcgacttcacgttgcaaagtcccaccttcacccgcataccagacgccgagaagcgaaagcaaccatcaaaggcgaagccatga

SEQ ID NO: 43141 - DNA, 168 bp, Zea mays
  Peptide Sequence Number=SeqID_86516
atgagggctgtcagccagcgcctggtggcgcaccggacattggtgtccggcgccaacggtcggctgacgtggcatgcaccggacatctactgtgcagtgtccggtggtgcaccggactgtccggtgcacccgacgacagaaagctgctgctttctgtccaacggctag

SEQ ID NO: 43142 - DNA, 282 bp, Zea mays
  Peptide Sequence Number=SeqID_86517
atgcacgtcgtcgtcgttgcatgcgtcccggacctgcacctgcacatttgtaggatgtataggcgttgtaaatctgctaaacaaaggaatgatcctttgaccgaaactgccttcgacccgctaccattgccaaggggggtgttccagtgcctatttgtttttgtggcgatctttggaaggttgacacgtccgaggatcatgacacctattgacagtggtattgggagtctgcccaagattcatggcgtcaacccacccatcaccaaggtttacaaaacctaa

SEQ ID NO: 43143 - DNA, 969 bp, Zea mays
  Peptide Sequence Number=SeqID_86518
atggtagttcaattttgccgagcggaaaggttccttttcctcagagccatagagggggttgtctactggattgagcaggttgtggcttatgcccatacggtcgaaggcatacaagaaaatgatgtctgcatggctaccattatcgacgagtactttgtgcaaatcccaccatgcgattctacaatttatcaccagcgcgtctacatggggtgcactgcggaggtcgacatctcttgcatcaaagtggtgggggaagtggtaagggttggtttggatgttgaggtggtggaggtggcaatgatagaatttcttgatgttgaaggcgctgttgatgtggaaaaagattgtggttttgatgctgggggtaatagtggtgttcattttgaatttgatgctggttggttggtaggtatgagcgatgactctttggttgttagctggagcggccctagccattcggtcctttgttgctttagtctctgggcagtccctggtcaggtgcctgctatgaagatttgcggcaagggggaggcctggagctgtggtgcaagagggtttcgttcatcaaggtgtgggtggattttctgtgtgaggtcgcttgctgttgactgctccatcctcgggtgcctcttagggaatttcgccgacaagggtttccttgcctttcttttcagcgagagctgccttcgccacgtcgtccggagaggtggtggccttcgatgtcgctttgttgggatccattgcgggattggtaaccatgtgggtgggcacaccctcctaagtataattatgcccccggttacctgctttagcccgggaatattcccccttgggggtcattacaacgaggttaagtacaacatgattaaatacaccataagccttaccccaggaaggggcttacaaatgggcatgaatggccagcggggcgccgcatgggcccatcccacagatgacggtcttccctag

SEQ ID NO: 43144 - DNA, 1059 bp, Zea mays
  Peptide Sequence Number=SeqID_86519
atgggtatgatgaagggttgtcacccttatcaccttttaagcgggatgatcagggactccctggtttatgggagggcctcaggtgttggctcagccgggttaggtgtgagcagaaggattgtcccctcatataaggaccgggttatgatggttggggagcaccgggaggataaggagggggaatgttttgtccggtttggacatggcggtggcctgactccttccggtataaccgttaagagaaggagatcgttgatcggcctcctgggactagtaattgtatcgaatttgagtctcaagaggtttggggcgcttcaggtagacaaaggctgcttgaaggggaagtatgtagttgcgacaaccagaaaaataaaagtggaggtgaaaggtacaatgaaggcatcagggtttttgagggcctcaagggggtttgttgaggagttggcggagacgtgcgctgagcctagggaggtcatgacttcgcccgacctccggaaatcatcttcgcgaatgctgaaggtgaccgagggtgagtggcataaaaatgaccctatccctctggcctccggtgaagattactcaatgtcctgtttggctcgagacttcaaaatctttccttacggaagaaacattggtgttgttctaacagaagtggtggaaaaggatcatcaagagtctacacggaagaagcggaaggctccgctacggctagtggatccctggcacgacgcgaaggcgccgcatcccagcgcgaagggccctactgcggctgctgccatgcctcctccggtggtgcctgtggcggcggccaggagggtgccctcaccatcacgagttgatgaggtggccgaggtgaagggggttgagactggccgggagttgtctgtggatgactacctagttgaaggtgttggcatgttcgacgctcagacggggctgccgcctgacgctgagtgtgaggctgcgtctgggcaaacggtggtgatgccggtgaagtcggttgaagagatagctctggcgaaggccgcagtggcaactttgctagacccatgggtgtaa

SEQ ID NO: 43145 - DNA, 1299 bp, Zea mays
  Peptide Sequence Number=SeqID_86520
atgacggttccgctgccgccctctgaccttccccctcccgacgcctcgtttactccctccactggcctctcgccggcccttattccaagaccggcgaccacccctcttcctttcccagcgtcggaggtttatccccttggtgttcagcgtggtggaagatcgaaggagcagcgctggcgggaggacggcggagtatgtgcctcctctgccgcgtcactggtccaggatgacgtgtttaggaaatcctataaggaggccctgtcttcatccaagtatgctgcttccagggatgatgatggatgggtgagggtggttcgtcgtcgttcgagcaccttgaagcccctccccagaccagtcccggtggatttgcgcgggagatgcttcaactgtttctcgtctgagcatcgtgcggcggagtgccgaaatcgtgtgcggtgctttttctgtcggttgccggggcaccgtgtcggcgtgtgcccgcaccggcggacgaccccgcccatccccggacgcattttagtgtggcggcctgtggctaagaagtcttcgggagagattggttacggcctgggtatggctggtggtcaggtggccgggtctgggccggagtgctttgtcgggcgatgtggaagaattgatcgggctgaggaggagctctgtcgtgcactgattgtcagtgttgtcagacaggaagattctggctacgccgcggaggtgcgtgatgcgattgcctcgaggttttgccttgaagtagggtcgctccgcttacgtcgtgctacgccaaattctttactcgtcttcttcccctcagttgtcgtggctgatcaggtggttaaaggggggcaatctcttcatgcccctccactcaggttacatattcgaaggtggtctcgtcaggctttcgctattggaagtggtcggtcgctggtgcccattggcgttgagctacgaggaattcctgcgcatctctgggggattgagtctgcggaggctgtgcttggtgctttctgtttgattcatggactgttacccgactcagtcacggaggaagacatgaaaagagagaacaggggcagcggtcatgtcgtgttgcgtgtggcccgcctggtggtgatgctggtgaagcgcgagagccggatgatggctcccatctgcgccgccttttgcaacagtgtcatggccgacaggtcatcgccggccacggtgttgcatgacctcctgctggtggtggtgagggcgacgtcctgctgctgcatgatgtgtgcgaaaggcgtcgagaagaggattgggtggtggtag

SEQ ID NO: 43146 - DNA, 348 bp, Zea mays
  Peptide Sequence Number=SeqID_86521
atggagaaggcaaggctccggccgtcatggagacaatctcggcaccgcagaacagaaatggccctagagcatggtgccccgccagagggtggaaagagggaggcacatggaccgcggcatagcgaaggacgggcatggagggagcggtcgcaaggagaggggaggagtgtacgcctgtaccgggctcacgtggaacgagggcaggcggggatcgagcaaccaggacagtgcgcggaagcgaagaatgtgtctgttaaggaaggtggtgttgctgccggcgagagcaatgtaggcatagatgtgggcggtgttagggcaaaacactgctacgggggaattgatgagtga

SEQ ID NO: 43147 - DNA, 1803 bp, Zea mays
  Peptide Sequence Number=SeqID_86522
atgcccatggacaccgacgagcgccccctcgtcgagctcgcctccgctgcggccgccactactctcgccgcctcctccacctcctccgcccccttccccgcccctgccacgcctgggttctcccgcgcggtccgctgcaacgcccccgcttcctcgctcccggccgatggcggggccggcgcgcagccggcctacccggagaacgcgatctcgacaaccaagtacacgcccgcgagcttcgtgcccaagtcgctcttcgagcagttccgccgcgccgcgaactgtttcttcctcgtcgtcgcctgcgtctccttcagccctcttgcgccctaccgcgccgtctccgtcctgctcccgctcgtcgtcgtcgtcagcgccgccatggccaaggaggccgtcgaggactggcgccggaagcagcaggacatagaagtgaacaataggaaggttgaggtgtatgatgggatccaatcatttcatgagacagaatggaagaagcttcgagttggcgatataattaaagttaaaaaggatgagttcttccctgctgatcttattttcctttcgtctagctcttgtgatggattatgctatgtggagacgatgaatcttgatggtgagacaaacttgaagcggaaacaggcattagagagcacatttataaatcaagaccagaatatgtattgcgccgagtctgataaacctgcaagagctcgcacttcaaatttgaatgaagaacttggtcaagtccatactatactgtctgacaaaacagggacattaacatgcaattcaatggagttcttgaaatgttccattgctggtgttgcttatggaagtaggcctacagaagttgaaacgtgttatggagaaatagttgaaactaatggcagttttgggcgcaaggacactactgaattcaagagatcagtcaagggatttaatttcactgatagtcatttgatgaatggaagatgggccaaagaatgttctagggatgctatagaaatgtttttccgagtcttagctgtttgccatactgcgattcctgtggcagatggaaattctgctggtatgccttatgaagctgagtctcctgatgaagcagctcttgttacagctgcaagagagtttggctttgaattttatcataggacacaaacaactatatcagtgcatgagtacgatcctgtcgttggtggaaaggattactcgtctgccaagaattctgtacatactgatcatgttgcagctgttgagaaggtgtcagaagacattgagaaggatttggttcttttgggtgctactgctgtagaggatagattgcaaaatggggtccctgagtgtatttataaacttgcacaagctggaattaagatctggattttaactggagacaagttggagacagctgccacatttgaggaaattgatagaaaattaaaagatgctagaggaaagatttcccaaaaaggaacttcaacttcatttgctcttatcattgacggcaatgctctgacacatgctctcacgggcagccttaagaactcatttctggatctagcagtcaactgtgcatctgttttatgttgtcgggtttcaccaaaacaaaaggcactggtcaccagattggttaaaattaggacaagtaaaactactttagctattggtgatggagcaaatgatgttggtatgctacaagaggctgacattggggttggaataagtggtgctgaaggaatgcagagcgattacttcttgtgcatggtcattggtgttatcgtcggattgcagctatggtag

SEQ ID NO: 43148 - DNA, 387 bp, Zea mays
  Peptide Sequence Number=SeqID_86523
atggctcaccggagagcttggtccacgcgtgctggcgggcgatcgaagtccggtgaagttgatctcgggcttccagtgaagttctgtcgggtccgagggcttgtaaagcttcacgggccactggcggagctagccgaagcactggctcgacttgggggtggccggagtgggctggccatggtggccgaggttctggcggcagtggcgggcggaaaagagctcgccggagctaaggaggggtggttggacggtgatggtgagcgcgggagatatggagcccagaaatccggtctgtctccctgctcaaacccgaggcaaatccagggttttgtcgtgtctagggctcgcgtcccaatgccatcttctggcacacgacagaggggttag

SEQ ID NO: 43149 - DNA, 276 bp, Zea mays
  Peptide Sequence Number=SeqID_86524
atggcgcagtcgaccgttggcagccagagagccgttggcgcaccggacatgtctggtgcacaccggacagtccggtgcccccttctagccgttggctcggccacgtgtcccacgcagatcgcgcggccgaccgttggcccggccgaccgttggctcaccggacagtccggtaccattcaggaaatggttgatggtgtgacttggcctaccaccctgccaccgggttggacggtcgagtgggatgttgctccggcaggagacgagcacgaggagtag

SEQ ID NO: 43150 - DNA, 1599 bp, Zea mays
  Peptide Sequence Number=SeqID_86525
atggggcgcgggcggtgggcctcggggatccgcgcggcggcgctggtcctgctcgcggtcgcggctgccgccggagccgccgcgggggatcctgatcccgacgagctcgagcgcgcgtttccaatagtggagccagaccacgggcacacaaaacttcgtctctcagaacaaggtctagaagcaattcgaaggattgaaactcctattgctgttgttggtgtcattggtccatatcgatctggaaaatcttttctcctcaaccagcttctctccttatcttgtgataaaggtatttggatttggggtactcctgttgagatggatgttgatggttccaaagtttctgtcatttatctagacactgaaggatttgaaagtgttgggaaatcaaatgtgtatgatgataggatatttgctttggcaactgtcctaagttcggtgcttatctacaaccttcctgagacggtacgtgaagctgatatatctaggctttcatttgccattgaaattgctgaagaattctatggaagagtgaaggggcaagatgttgcttttgagccagcaaagcttctctggcttatccagagggatttcctccgtgacaaatatattgatgaggtcaatcaaatacgagattcgttggcagttatggggaacaacagcactgcttttagcttgcctcagccgcatcttcaaagaacaaaattatgtgatatggaggacaaagaacttgaacccttatatgtaaaacggcgggagcaattaaagcagcttgtttcgtctattgtaaaaccaaaaattgtgcagggcagaactctaaatgggaaggactttgtgtctttcttgcagcagattcttgaggctttgaataaaggcgaaattccatcaacagggtctctagttgaaatttttaacaaagccattcttgatcgctgtctgaaggcgtacagggagaaaatggatggcttaggcttaccagtaccggtagacaaactgcagaaacttcatgagatggcaaatggtgatgctagaattctctttgataagcagcactttggcaaacatcatgctgctcagtcagctctcaagcttgaagatgatattaaaaaggtgtacagaaacttacttctagctaatgaatatcaatcgtcaaagctgtgtgaagctcgcttttctgagtgtgaagataagatggatcaccttcaagtcttgaaacttccttcgatggcaaaattcaatgcaggctttactcactgcaaccaaagtttcgtaaaggaatgcgttggacctgcaaaagaaagctatgaacgtagaatgtcaaagatgcttgccaagtctcgtgctcttttcatcaaggagtacaataacaagcttttcaattggttggtgaccttctctttggtcatggtggtcatcgggcgctttgtcatcaagttcttcctacttgaaatcgccgcttgggtgatgttcatcttcctagagacgtacacgagaatgttctggtcagcggaatcgctgtactataatccagcttggcacatcattgtttcttcctgggaaaccatcgtgtacagcccaattcttgatctggacaggtag

SEQ ID NO: 43151 - DNA, 546 bp, Zea mays
  Peptide Sequence Number=SeqID_86526
atggtgaccaccagttcgatggtggggagaagcgagtcgggctacgacctcagtcccgccctcagcttcaaggatcttcatcatccttgctcgggcagagagcaaggatgcaacattccgtcttctgtcctcgctttcgtggcgaggacgggagtgaggacctgccggtgcgctttggggcggccgacgctcgctggtgcggtgttggtggacgccgccgtcggtgctgacgtggtggcagctggagaaagcttccccgccgacaagcccatcagcgctacccgcggaccgacctccgtctctttggctttaatgtctggttcgcgccccttgagtggggacgcaaacgagagccttctggcggcagcgtccgtcctgggaccgtcgctgctgctgcagaggtcgctggcgagtcaccaggagtttgtcgtcccgcaggctctccggtgtggaggttgttcatacccgcgggggcggaaccggagttccgtttgtaatggcaccttgagtgccggtgtcttgttcattgtggctgtcgggtcctga

SEQ ID NO: 43152 - DNA, 564 bp, Zea mays
  Peptide Sequence Number=SeqID_86527
atgaagcaggccccgagccctcctactgatcaggggttcgaaagctggcccctcagaagggttcgacagccgccccagagcactcgggcttcaagcccattactgatcaggggttcgaaggctggcccctcggaagggttcgacagccgcctagagcactcgggctccgcgcccgctactgatcaggggttcgaaggctggcccctcggaagggagcgattttataacggaatcccaccagagggaggcatcgagccctcgggcactatcgaacgggtccgggtccgggaaaacagcgccgcccgccccgctccgactgctgtgccacccgccagggtgaagctgacaacagtcaagttcagcctcaggcgcaacaggaatctccgccttgcccgacccccagggctcggcctcaaccttggcctcggagggtggtctccgcctcgcccgaccctaggactcggcctcaacctcggccttggagggtggtctccacctcgcccgaccccacggctcggcctcgagaggaatcgcgtcctcgcccgaccccggcctcggccttag

SEQ ID NO: 43153 - DNA, 639 bp, Zea mays
  Peptide Sequence Number=SeqID_86528
atgagctacctcagagaggtcgggatgtatatggggcgattgccttccgttccctgtgtggctatcatccacgagggagccactgttttcccttattgggggatcaggaggaatccagcttcgaggctggagtcagctggtgcagggcatttggggtctgaggcccttcacggcgcaaaattccgcctttttgagaggcaggggtcttccgacgttgtccacgaggcagctaaagcgggatttgaaaccaaaagggtagtacatgccccacaatccacacccgaggcaaggcgtggtctcacaatggcccaattcggtcccattaaggcaccgctaccagaaagcgatggtgaaggctctttgtcaaggccctcaatagaggtagaagtgctagaggatctttcacgcgtggaggatcatcagcaggctcttaacgctgagcattccagtctgtgcgctgccattgacatagtgcatgaccatctaatgattccgtggccggaggaaatgttcgcccagatctctcgaatggcgcttatcggtgactgcatttgtgagctagaggctaacacattccggctcgagtcaaccatgcactggtccttacttgacctcattatgaggactcgatcaagctag

SEQ ID NO: 43154 - DNA, 195 bp, Zea mays
  Peptide Sequence Number=SeqID_86529
atgcagcaagatgatccccacatccctgcaaaaagagggagagatggtccacaggatcagagtatagagaagaggaagatgatccccacatccgtgcaaaaagatgggcgacttttgccaaagaaacatagggcggtagtgtcgaccctaaagggcagccctatcgtcgtgcccaaactggcaggattaggataa

SEQ ID NO: 43155 - DNA, 405 bp, Zea mays
  Peptide Sequence Number=SeqID_86530
atggcgagagttgcgtgtaccgtccatggcaagaggctggacgctgatataccgccacgcacgaggaaaactgcgcgtaagtccaccggacctattggcgtacctcggcatcagctggctccaagacataaagggagcagcagcggcaataacgaccccatcggagacctagaagctcaagtggagcagcttcggacggagcaacgtcaccgaaacagggtgtgggtagaagatggtcagcggatgaatgagttgagagctgatgtcagacatctgcaagacaagcttgctgaacgggatttggcaatcgattgggctgtcaaatcgcgttcaattgcttgggaccgggaagccaaagctcgagcccgcatggatgagctcagcacggcccttgacaacttgtag

SEQ ID NO: 43156 - DNA, 306 bp, Zea mays
  Peptide Sequence Number=SeqID_86531
atggccacagtgtctggcaaagggaaaaagattgctgacaccacttcaaaggaaatggacttcgaccttcggaacctggtcggtcaagaattatccgaggctgaaaaaaggagctacaagaatatggcaatggagggttcacttgaagaaattcaagccggaaatgctaaattaagcgaggaacttgtccaaaaatcaaaaagcttcgaacaagcgaaaaaagatttgcagacaagatacgaagctgaagctgacaaaaatacaaagctacaacaatctttgaaagagatccgaacatatgtttga

SEQ ID NO: 43157 - DNA, 1044 bp, Zea mays
  Peptide Sequence Number=SeqID_86532
atgaagggtattcaccctcatcacctggtgagtgggatgatcagggactccctgtcactcgatctgaactcgtacgggtccaaccccagggttatgaaggctggggagcaccgggaggataaggagggggaatgttttgtccggtttggacatggcggtggcctgactccttccggtataactgttaagatggaaggctcttatgtcattaggacatcctactgctcagaggaggaaggatttcctcacctcctacggagttgcgcactacgcatggggatccataagaagcccgaatatgtctggaaggaataccgcaaacatggaatagagaagtgctctatggtggtctacctgggagaaagccgaagctacgcaaaccaccctcccttccaagtcactttcatcgggcaccgcttcctagacacttgtcgaagtgttgcccaaaaagcacttaaacagctatgccaaaactacagtagagagatctttgaaaccccacttcattacttcccacccagcaaaaaaaatacccccacctggaggaaaagacttcaggccctgtcaggaagagaccccaccgaggatgaccccaccattgtctacatggtcggatacctccacactctctataaccactacgatgatctctcctcccactgcacccacctaaactcccgggtggaaagcttagagcagcaggtcaagaaacttaagaaggagaaggcatccctccaagaatgtctcgatatagcagaaggcgaggaggccaacacccgtgaagcctaccgaaccctgaagatggattatgataagaagctgaagaagctcgcccccacaaagaaaatccaaaagaataccaagaaccaaggaggccaagctgagcggaggaggaaggcccctccggcaccagctcccgtcaggatagagaatttgtccgacgtcgaggatatgtccctagctagccttgatgaccttctcaaggaatttggggacactttagaaaaagagttcggtagtacctcagagaacgctcgcgtgtag

SEQ ID NO: 43158 - DNA, 297 bp, Zea mays
  Peptide Sequence Number=SeqID_86533
atggaggcgaccaggaaggcccttgaagatctccaggcagagcaccgcgccggggtccagcgtattgccgtgtgggccagcgaggcaagcacgacgctggcagagggcggcaagctctgtcgggcggtgatcgaatacgtcttgacgtgcttccggagtcacgacccggccatatccttggagtcggtgatcgctggtccggtggtcgccactgaagatgccgcccgggagagcgtacaagatgtcgtggagctggtggccgagcgcttccagcgcgaccctgctgatgacctatag

SEQ ID NO: 43159 - DNA, 276 bp, Zea mays
  Peptide Sequence Number=SeqID_86534
atgagtgctgctgtggtagcaacacgtacctacaaactacagtacaggtcacaggaaaacagcgtcacctacgctgctccgactgatgtgccacccgtcagggtgaggctgacagccgccaagtccgacctcaggcgccataggaagctccgcctcgcccgaccccagggctcagactcaacctcgacctcggaagacggactccgcctcgcccgaccccagggctcggactcaacctcgacctcggacgacggtctccacctcgcccgaccctag

SEQ ID NO: 43160 - DNA, 141 bp, Zea mays
  Peptide Sequence Number=SeqID_86535
atggcgtgccacggtcttattccttgcgtcggtgtctggattgtgtggctcgtcttgggaagtcgaagctgctcatctcttgtgtttgagcttggcaacgatgactctagatgtttgtgtgcgggggttgtcgttgtctag

SEQ ID NO: 43161 - DNA, 438 bp, Zea mays
  Peptide Sequence Number=SeqID_86536
atgtcggacgaccttgttgttcctgtccactttgaagttggccaagaacttcgctttcgcctcctggatcatccgctccttgtgctcttcgaactggagccgctccggagtcgccaaaagtatgttgacgccttttcggagcgccaaacactcaacaagaaccgtggcggtgccctctgcacaggggcggacggtccgcgcgcaggggccggacggtccgcggcctggtgcgaggcgcggtggtgctctctgcgcaagggcggactgtccgcggcctggggccggacggtccgcggcctggtgcgctgctgggacttctgcctgacggccggacggtccgcgccctggggccggacggtccgcacgtacgcagggacggcggaagatcgccgacggcgcctggatctcgctcccgggagggaccccgtcggggagtag

SEQ ID NO: 43162 - DNA, 237 bp, Zea mays
  Peptide Sequence Number=SeqID_86537
atggcggcggcggcggcgtcgacgccgcagggagtggcggagcggcggggcatcccggcagcggccttcgttgaggacgttgaggcctacctccgccaggtcgggctcgacgtcaattccgcgctcgcttttctccaggaaagctaccatttatggcttggacactaccgttttgcaatttgcaatggtcgctccttttgttttggttctaacgtgcttgctgattatgtagtttga

SEQ ID NO: 43163 - DNA, 126 bp, Zea mays
  Peptide Sequence Number=SeqID_86538
atggctgccactgccagcaagacgaggagggcgatcctggcgctcttcatctgggccatggccatcctcctcttcatggcggcgctccaccccaacgattttgggacccttccgtgggttttttga

SEQ ID NO: 43164 - DNA, 780 bp, Zea mays
  Peptide Sequence Number=SeqID_86539
atggatacccatagggcaccacactttgatggcactaacttctcatattatactgctagaatggcttggtacctagaagcagttgatctaggtgtttggagagtcactcgtgacaggatgaaaccacctaagaatcccgagaagctcactgcgagtgatgaaaaagaaatacacttgaatgctagagccaaaaattacttgtataaatctcttagcatagaaattttcaatcaagatgaaaggcaagaagaaggctcccaagctcaagctcctcaagtgaagaaaaagatgatgatgaagaaggagatggtcaagcgtccatatcatcctctaaggatgaagaaatggtccgacgcgttaaaaagaggaggagaaaaggcaaggtgcttaagacttgggatgattcttcaagtaaagatgatcctccaaggacccgcagccaccgctcttcatcacgatcatcacgttcatcacacaaatgccttatcgcaaaagctatgtgataaggaaggtcgcaagttttaccaatgcaaggcaaagactgagggagaaaataaaaagaaaccaacaagtgaaatctccaacacttacatcgacaaggtgaataagaaggcggatacaccatacttaatcaagaagaaaaagaatgaaaaggtgatagccatcaaggccaacaagcaagccaacaaggaaaaagagagccaaacgcatctggtgcctaaagagattatctcaaccatgaaaagcaccaagaaggtttgggtcctgagagggaagtga

SEQ ID NO: 43165 - DNA, 156 bp, Zea mays
  Peptide Sequence Number=SeqID_86540
atggctttagcaggagcggggaactctggctcaacagcggaagaaggcccctcagcaagcttcggcaccctggcagtttcaatgtacctgggccgaacttcaactaaaaatttactcaagggaaaccaaagccctgccttcatgaagctcctgtag

SEQ ID NO: 43166 - DNA, 369 bp, Zea mays
  Peptide Sequence Number=SeqID_86541
atggccttgctagatcctcccgagcgcctccagtccgaggtggcactcagcttggtgcgcaacctgctcggatggggtgtgccgacgttcgctggaaggatctgtgccggcgcctttcctcacggtgatctcaccgccggagagttcgtgctcttcgtctccagccgccctagcaggctggcgctgctgatttcgcctttcttcgtgctgctgctggaggagcttggcctccaacctcagcacctcacgccgtgcttcatccttcaggcggccatcatcgcctacctctgcaaggtgtccgtaggggcgacgcttcttcctgcttcttcctccagcattcagaggaaaggatgttcaccagccttgtga

SEQ ID NO: 43167 - DNA, 387 bp, Zea mays
  Peptide Sequence Number=SeqID_86542
atgggcccgggcccccgtgccagaggctggggcgctgcttttggcggagacgaagaggcgcattaccgcgggcggtggcgtgctcctcatgtggcggttcgccttttccgcacacggaggccgacgcccaagcagtatgactcgtgggctcgggcccccgtgccagaggctgggccgctgctttcagcggagacgaagagacgcattaccgcaggcggtggcgtgctccttacggggcggttcgccttcatcgcacacggggaccgacacccaaggagcatgactcgtgggcctgggcccccacgccagaggctgggtcaccccggcgtgcgtcgggcgagatcttctgcggcgtctcggggtgttagtgggggaatctttctttaa

SEQ ID NO: 43168 - DNA, 456 bp, Zea mays
  Peptide Sequence Number=SeqID_86543
atgaccgcctcaaaaagggatcgggaaaggagatatttcgaaagagtccttctcagcaaaggaaacggcccccgagccctcctactgatcaggggtttgaaagttgcgccctgcggggttcagcaaccgccccagagcactcgggctccgagccctctactgatcaggggttcaaaggctggcccctcagaagggtccgacagccgccccagagcatgcagagtcagggatgaccctgggtacgtctgttacatgaccaaggctcggactacgctcccgagattcacggctcgcccgagggtcccctcgggcggtggaggcgcccccggctcgcccgaggcgaagctcgggcctcggcctcagcctcggcctcgggaggaggtcttcgcctcgcccgacctaggcctcggcctcagcctcggcctcgggaggaagtcttcgcctcgcccgacctag

SEQ ID NO: 43169 - DNA, 408 bp, Zea mays
  Peptide Sequence Number=SeqID_86544
atgcggctatccgtagtcgcgtggcaagcagtacctgaccctacaacgtggacggctccagggccgccacgtggccaagaaagacaatatactccaaggtggcgacagtgggtccggacccccacgggaaagtgccggacccctggatgcacagcccggaccaccgggcgaggttcaggacctccacagcatttaatgtgccctgaccgctctgctgacgaacggcggccaggccatcctgtaggcggcgtgcccgtccgctctggtgacaggcagtacgcccgtgctacggcatacactgtgctcatcatcactcgtacgttgccagtgaagcttccgctgcacgccaatactacgcagtctgcggatatcagggcgcaaggagattgctctggcgaccagcattag

SEQ ID NO: 43170 - DNA, 480 bp, Zea mays
  Peptide Sequence Number=SeqID_86545
atggagatggcggccgcgtgctcccagcgtgaccctactgatgtcgagccaataggccaagcttatgagggcggacctcaccgggctggcgtacacgtatgcacaatcctagttacaaaagggagaaaaacttcacccctcagacttggtcctatggataggacttacagagatgctccaggggttaggaagagtactccagctgtagcaaggtggttacccccaggtcggcatatttccgtcaccttgaagggtccttcccagctgggggagagtttacgggacccttctcggttcagtactcgccatagggataggtcccgaccctgggttccctactatgcacgaaccgttagtagcgcctgggcgcctggtcgcaacgtgcatttcgggtcgctgcttgccctctgcgttgatggagtccacatccttacgctgtggccgctcctgcatagactcgttagaatactggactcatga

SEQ ID NO: 43171 - DNA, 372 bp, Zea mays
  Peptide Sequence Number=SeqID_86546
atgtcagaagatcacgagcagtcgcgtgaagacgcttcccaaaaaccttattcgccctctcctggtgcaggatctagaagacgaagggttccggagacctgctctcctgatcccagaagcacctcgcgggtcgggagaagggaactaaaaggtgggttcgttaatgaagagagtttttcagcagagactgttaagttgaacttccgcctagaactccaagttacaccaacccacaacttggacaatggactatgccttgaattgcaagttttgcgtgaatgggtttcacttgaagtcatgactagtacttggctaccagtagtccccttctcgggtggagcatatacgtcgtactccaaggtctcttcatga

SEQ ID NO: 43172 - DNA, 342 bp, Zea mays
  Peptide Sequence Number=SeqID_86547
atgtcgacctcctcttcttctgctgccgctacgccgccggccgacgcctcgccgccggctgacgcctcgtccgaggagacgctgagtactttggtggcggaggagttgcgcgccggcgatacggtggattttggcgtgtcgaggatgtcgtcggtccgcgtgcaagatatgcagcggttgggttactttggcggcggagttgctcgtgtcccggggacggaggaagtccccgagccggaaggcgagttggttgtgttcgaggcgttcttcgccgccggtctccgcctgcctgcgcaccgatttgttggagaagtcttaggcgactctgcgacgaatctctag

SEQ ID NO: 43173 - DNA, 399 bp, Zea mays
  Peptide Sequence Number=SeqID_86548
atgtcaaactccaccaccagcagaggcagaggcggcggcggcggcgtccggcccaagccccgcggttcctgcagggcgtctgatgatgcggcgcaggcgcagcagcagctagctggtcacacgctaactccgcctagcccctggctccctgctagcctggttcgcggcgccacgttaccgccaaaatatcgccggcaattaatgggtgacccacccccgcccgcatacacggatacgccgcctggatcggagtggaggtactcactgcacttgacgcagcaggctaacgacgagcgtttcgatgcttttaagcaagagacgtcgtcgcgctgcgcgctggagcttactagagcccatgcagaagctacgacattacattacaactacgagttcaaataa

SEQ ID NO: 43174 - DNA, 936 bp, Zea mays
  Peptide Sequence Number=SeqID_86549
atggctttcctcaacatggagcagcagacctgggccttcaccttcggtatcctaggtaacataatctcgctgatggtgttcctttcgccgctgccgacgttctaccgcgtgtaccgcaagaagtcgacggaggggttccagtcgaccccgtacgtggtgacgctgttcagctgcatgctgtggatcttctacgcgctgctcaagtccggcgccgagctgctggtgaccatcaacggcgtcgggtgcgtgatcgaggcggcgtacctggccgcgtacctggtgtacgcgcccaaggccgccagggcgctgacggccaagatgctgctggggctcaacgtcggcgtctttggactcgccgcgctcgccaccatggtggtctccagcgccggcctccgcgtgcgcgtgctcggctggatctgcgtcagcgtcgcgctcagccggcaggtggtccggaccaagagcgtggagttcatgcccatctcgctctccttcttcctggtgctgagcgccgtgatctggttcgcgtacggcgcgctgaagagggacgtgttcgtggcgttccccaacgtgctgggcttcgtcttcggcgtcgcgcagatagcgctgtacatggcgtacaggaacaaggagcccgcggcggtgacggtggaggaggcgaagctgccggagcacgccaaggaggtggtggtggccgcggcggcggccgaggccagggcgagctgcggtgctgaggtgcaccccatcgacatcgacatcgaagctacgccgacgccggtggaggaggtgcacgagccgcaggtggtcgtggtcgtcgacgtggacgtggagcctgtcacctgcgccggcgccgccgaggcagctgcgggagcagggggcagatgcgtccggcgtggtcgaagggcggcgtcccttgaatcatggcgccgccgggagtag

SEQ ID NO: 43175 - DNA, 470 bp, Zea mays
  Peptide Sequence Number=SeqID_86550
gtggttatgagattgatggttctggttatgattatggtattggtaagtggtattctttccgtttggaaaggattcagctactcagcgtcgacaggatcacgttgcaagcgcgcggccaccatctccacaacatcttgtacgccctcccgggcggcatcttctgttgcggctaccggaccatcgatcaccggcaccaaggatatggtcgggtcatgactccggaagcacgtcagtacatattcaaccaccactcggcagagcttgccgccctctgcctccaggcgggccccgaggatctgatccaggcgccagaggcgatcggcgacatagtccagcatcgggaggcatcggagattgacgctgccagctccgacactgggctagggctcatccctagtggcaccagtgccgtgcttgccttgtcggcccactcgtcaatgcgctggaccccgacgcggtgctctgcctag

SEQ ID NO: 43176 - DNA, 591 bp, Zea mays
  Peptide Sequence Number=SeqID_86551
atggccacgctgccgaccctcgacgacagcggcgtggtgattcgccagaccagcggccgggaccccctccatgggatctggatctccgatgcactgactggaggtccccagcccgccggtgtggctcgcagcgccaatctctccatggcccctagccccttggacaagggcaaatgggctacaagcggtgcctccaccccaggtagctccaggggggcggaggaggagaggcgacgtaggctgcatcgcgttgacgggtcgctcgtttcggagccccctagaagtgctagaggactgcaggcccagcaggtcaaggccgtggagagggtgcaaaagtggcagcaagagctcgagggcaaggccagcgacgccgccctcgccgaggagaaccttaaggcgaaggagcagtccttggataggcgggagacggaccttgccaggcgagaggcggatctcacctttagggaagaaatgctcacccggcgaggcgagttgctggccgagcatgagctcgaagccgaggagaaggagaggaagctggaggagcagatttgccagttcaatgcagcgcaggcggtgtcgggtacctag

SEQ ID NO: 43177 - DNA, 465 bp, Zea mays
  Peptide Sequence Number=SeqID_86552
atgaagaggagcagtgcaccatgggatggagagggactcggcagggcgcgtcccgtgcagagggatgagcacacaggagcacgacgagtagaagtcggcggactggagaagagaagcggcgctggagagagatgcgtgcggcaaacagaaggccgaaagtgcgcgcggccatggcaaacgcagggcgcgacgaactggaggagcagggagggcgcagcccaagctcggccatggaaccggaaggcgcgcggcatgggcgagtgcagggagctcgccatgggcgccgtgagcagaggagcagggagctccggcgatggcgagggggccagaggaaagagagccgcgagcgctgagagagaagcagggggcgcggttgctggtgccatggcaggggacaagaccgagcttggtgctggggcgagcgccggccatggaggagagcagaaatccgacagggagcgatga

SEQ ID NO: 43178 - DNA, 162 bp, Zea mays
  Peptide Sequence Number=SeqID_86553
atggggctcggtgtatgcaactcactctgccaaggtggcgatgagaatggtggttttggtattgactatggtaatggttgtccgcgttacaaccactgctcagaagaagatgaagccgtggaggaagacttccaggagttccaagactacgacgagttctag

SEQ ID NO: 43179 - DNA, 831 bp, Zea mays
  Peptide Sequence Number=SeqID_86554
atgaacaaacaccggcactcaaggtgccattacaagcggaactctggttccacccccacagccaccggaaggctctcgttcgcgtccccactcaagggacgcgaaccagacattaaagccaaagagccggaggtcggcccgcaggtggcgctaacggcctcgatggcggagaagctttctctagctgccaccacgtcagcaacgacggcggcgtccgcctgtccaccaacgccgcaccagcgaacgccggccgctccaaagcgcaccggcagttcgccttccccggcatggctggtggacgcctcctccgcagagctgggggatggtttccacccccagaagctggaagaagaggtggtctatcgacccgcgtgggagctggagctctggctcgcctcgctctccgccccagcaaggatgatgaagatccttgaagctgagggcggggcagaggccgtagcccagcttgcttctccccaccatcgaactggtggtcaccgtcttggcaagacgaaagcgacacgagtgttccccgtccgggggtccggaaggtggaaggacgcgatgcatgaggggagtacgaagacatggttgccttccaagggggtcaccctccttttaaaggcaactctccccacttgcgtcctcagccgtcgcggactgagtcttctccaacacgctctaaggtcttccccctacgacacgggggctgggtcccacgcgtcatgcaaactggcccaggacagaaggagccaaaaccgccacgcgcggtgcgcgcaactgcccagcggttacaagcgctcctccactttcgcccaggccagcgggtga

SEQ ID NO: 43180 - DNA, 888 bp, Zea mays
  Peptide Sequence Number=SeqID_86555
atggacatcgtgaggatcagattggaagatttggcattggattcaaagactggtgctatgaaactcggaaaagatgcaattgttctcacacaaactaaatcctccagatcggtggcctttctttctcagtcttttaatgaagaaaaggataatcttgagatccctgtggtggcatatcgaaaggaagggcagtatatggaagttgatttgagtgtgcagtctgatgctactgcagaatataacttgaacgctattaagaatttttcttccttcaacgagtatttcattggagaaaagttgggcctatttggtgaagatactgggacacaaatctacatatggaatttagacacatggggtactgattacacattggagtggaattctggtaagtcttcagaaaatcctgtgcaccatggtcgtggagacatattaatccgttcaagaagagtcagatcacgtccaggacaaacaagtaacaaggtgctgttggattattctcttcagtcctatctggaagttatgttcttgaatcctcggatgaagatatctgtccaagggtctttggtcaaaagccgcccgttggcgaagacccttaacaagacttctgttgtgtctggtgaaattatggaaaggactattatattgactctgggaaggagcaagtcttacaagcgggttggaggccaaaagcatagtactgacatggggcgtggagtaataggagttgcagatatcacaaatctcattgatgatgaagatggtaattcatgggttctgaacaataaacagggatttcaagattgtgaaatgtatgctaaactggaggagtggcttggtaggaaagtggatgaatactgggatacgaaatttgacagtctcacgctg

SEQ ID NO: 43181 - DNA, 459 bp, Zea mays
  Peptide Sequence Number=SeqID_86556
atggagatgggagggatgagcgacgctgagcggctgttcttcttcgagatggcctgcaagaactccgaggtcgcgtacgagcagaaccccaacgacgccgacaacctgacgcggtgggggcggcgcgctgctggagctgtcgcaggtccgaacccggccccgacagcctcaagcttcttgaaggttttcacatttcaaggtgttgtatgtttaaattttattactattcagagttcgcatataggattacattgtgctgcgaatgcggaagccaaactggaggaggcacttcaaattgatcccaacaagtccgatgcactctggtgcttgggaaatgctcagacctctcatggattcttcactccagacaatgcaatagctaatgagttctttacaaaggcaaccggatgtttccagaaggctgttgatgtgtatttccatgacctcattcttgaatga

SEQ ID NO: 43182 - DNA, 1662 bp, Zea mays
  Peptide Sequence Number=SeqID_86557
atgccatcctcttcttcttccgccgacgccacgccgccggccgccgcctcgtctgaggagacgttgagtaacgtgatggtggaggagttgcgcgccggcgactctgttgaatttggtgtgtcacggatgacgtcagcccgtattgaagatatgcagcggttgggctactttggcggtggagtcgctcgtgctccggggacggaggaagtccccgagccggaggggcgagttggttgttttcgaggcgttcttcgtcgccggactccgcttgcctgcgcaccgaaaaggatggttgaggacgaagttgcccagttcgggtcatgcacattcacgccgaagaccggcaagaccacaatgccagtagtggagttggtcccgtgcgcccgcaacaagtggggcaattggaatgaattttggttttatgttgctgaggctactgtcgaaggccatgaagggctccccgtgtccgaaatgtgctctcactattactctgcgtatccgccttttgaagtggcagaagaggatgcagacgaaggggcccttcggtgcaccgccggtcagagcagcggtcgagatttagttgaagagttcgtggcgtacggggtctggcccttggcgcacggctgggcgctgggcgaagtatgccctcgccagatgccctttcacggaggaagggtggtgcgaagtcctgccttcgcactgaatttgcgaaaccgtgatccggccgcctttgtgtgtgatgcggaggacttggcagtgcggctcgtggggcgttatgtgccgaggacggaaggccagcgcagctttgacatccgcgggtcaaatgaacgtttgaacagggtcttcgaattaaatcaactgccgtacgacggctaccctggtcaagacgaagcggaccgccgtgggaagaaaccggcggtggagactggaggcgaccctgcgctggcggcccgccgccctcctcgaaaaaagagaaaattagggtcggacgagggcccgcttgctctagttgtgcctggcgcggcgatcgcggcggctgcgccagcgccgaaggcggggggagagacccttggcgccggaggcgaggtgtctgccctcgcgctggtcagggacgaggcgggcgtggcgacccgccggctgaggggagcgacagaggcgttgagtcgagcgacggaggcgctgagtcaggtggctgacttcaccagccgcaccgcgtcgggggcccttacggcagctttgtctgccgaggtcgagagacttcggacgcaacatgctgacgctgtccgtgagaagtcggcctccgacagcaagtgccgcaaactggcggagaaggtggccgccctggagaaggagaaggctgacctccggcgccagctggcgggggagaggagggaggccaacgaagccatcgccaaagagcaggctgctcaggcggaggccaggctggcgcgggcggaaggcaatatcgccaaggagctcgccggagagctgcagcggcggcttactgccctggagagccgcgcggagggggccgaggccgcgatgcgagcggaggccgaacggacgcgcacgcagctcatgactgcatatcgcgagctaggtgtgcggacgggtgacttcgaggtgctggagcgagaggccggacttcgctgtctggaatga

SEQ ID NO: 43183 - DNA, 333 bp, Zea mays
  Peptide Sequence Number=SeqID_86558
atggcgacggctctctgcgcctccactctcgcgctcgtgtggttagtgctccgcttctgcttggacggcgaccacgcaagagatccaacagtgcagagggagaacaaaaagctggtggttagaatctgtgtgtttggatacgcagattctgagattgtagattctgattcaaaaaaggaaacagataaaaacatcgaaccaacaagaagacgcgggaaagtggcttccatcaatggctcatatgcaatccttgaaatgcggccagtagggatggcaatcctgcctgcgggcacggatatccgcgggtttcatacccgatgggcatggatacgg

SEQ ID NO: 43184 - DNA, 522 bp, Zea mays
  Peptide Sequence Number=SeqID_86559
atggttaaaaattttggcagcaaaacagtgcaaatagcagtaaatgctgtggtaacttcacacctactcgtctgtttatatagtgctgcagtggaccgcaaagaccaaacagtgactctgcaaggtgggaccgacacgatctcgggaaatgaatcgtttctcggcaacgagctcagggaaggtgttttttggaccttcggcttcccgaagcttgagaggattttttcacggttcaagctcgttacgaaaaacgatctagcgccgcgaaaggggctactgttgggcccatgcttcgttgcgccgaaggtcttgcgtgaagaagcagcttcggctgaaatcgtccccaggaaatggccgaaggatgcaaagatttttcggaggaactttattatcgagctgttaagggcccctttgaatggctttggctcatctaaagaagtggcttcacctcgtgagccagagccaaagccgtttttggagaagccagagccctgccaaaggggccctaagttacgaggataa

SEQ ID NO: 43185 - DNA, 393 bp, Zea mays
  Peptide Sequence Number=SeqID_86560
atgaggaaaaaacacggctccgtgccaaaaatacatacatgttcaggccccgacagccacaatgaacaaaagaccgacattcaaggtacgaacaaccccacacgattggggggacctgcggagcagcagaagaccgacgaacggctcgccgtcgcccgctccagcagcagcgacgacgacgacttctgctccgggggggcgaacagcaacaacgatgacctcagggcggatgctgctgccatgaggccctcgccaatgccctcactcgagacacaaggacgggcagaaggccgtagagttggaggtcagtccatgggcggcaccggctatctcgtcggcgaaggaacctcttccagctgccgtggcggaaggcggcgccgggagcggctctga

SEQ ID NO: 43186 - DNA, 498 bp, Zea mays
  Peptide Sequence Number=SeqID_86561
atggcgagctcgccggtgctcaccgtctcctccatccccctctctcccccgagcgcctataaaaagcacccgcccgagccccgtctccaccacacagctccagccacctccactatcttctccgccgagccattcgagctagcgccgtcgggctcccttcatcgctccggagctttcggcccgtcggaccgcggcatcctccaggagattcttgagctctccctggatacgtcgcacctcggtggtggatgccaggttctgaccgaccccactggaagccgggggcagccttgccctggcatcgtcggcgatgcggtgctggacgtcctgggccagatgacgcacttctccggccggagcttggcctgcccactcctgcccgatgttctgtcggagctgcacaagttgtcctgcttcctcatcgagtctggcctgcatctcgcggatttgctcgagttgtgtgtcctgaccccccgcagggactgggaccacagctag

SEQ ID NO: 43187 - DNA, 1212 bp, Zea mays
  Peptide Sequence Number=SeqID_86562
atggctaccacccaggaggtcgatccctttttaaaggcgactcaccccactcgcgtcctcaggcgtcacggactaagtcttcaccaacgcgctcaaaggtcctccccctacgacacgggggctgggtcccacacgtcgtgcaagctggccaggacagaagaagccaaaccgccacgcgcggagcgtgtaaccgcccagtggttacaagcactcctccaccttcgcctaatccagtgggtgaaagggcggaccaccatgcaggcggcatgcaactgcaccacggggatgcaccctttcgactccaacgcacccagcatggaggcccaggcccacacgtcatgtaaccggcgcgccggttactacgtgcgaaaaactgcaccgccacttacgccaatactgcgccttctcgactgcggaaccggtgccgcgactcaaggcgaccctgcgcatagcccaacagtgccaaccaggcgcatcggtcacggatcagtcagccgcgggagaaggcgcgacgatcgatatggccaaaagtgggccgacagtaatggcggcagcaggcgagcggaagcggcggtcaaatcgtctgcaggctcacgtcccctcctggggcagcaggagagccctctcccacggcatgaagacgacgcgcccggcaggcgacacctttggcaggcgaagcgggcgacgcttcacctccgccataatgatcgcgtcaaaaaagggaccgggaaaggggatactccgaaagggatccttctctgcgaaggaagcgggccccgagccctcctactgatcaggggttcgaaggctggcccctcgaaagggtttgacagccgcctcagagcactcgggctccgtgcccactactggtcagaggttcaaaggctggcccctcggaagggtcaaaagccgcctcaggccactcgggctctgcgcccactactgatcaggggtttgaaggctggcccctcgaagggttcgacagctgcctcagaacacacagagctagggatgactctgggtacgtccgatacatggccgagtctcgggctacgctcccaaggtaccctaggacatttccgagaccagcaggagcgattctgtaacggaatcccatcagagggaggcatcgagccctcggaccctatcaaacgggaccgggtccggcaaatcacctgcaggtacttttggagcgtgcctctgggccactag

SEQ ID NO: 43188 - DNA, 792 bp, Zea mays
  Peptide Sequence Number=SeqID_86563
atgaaggccttcttcgactccaccggctcgctctgggaggcgcagaagctcgctgggaagggcgccgggttcttcatcatcaccggaacacagggcagggggagggggaggagaccacggtgtttaactgaaatacatatctatggcttctcttcctcctgctttactcagggcttcatgagacagtctatcggcgtttcgaccccggggggtccctggaccgacgaggcgaatgcgcttgcagtagggggttacaagcgtttgcgagggagagaagaggagccagagccctatgtacatgtcgacgtggctgttggagagggtaatgatgtacccccctgcggcgtggtcggtccgagcccgaggtcgggcgaggcgagaccgtctttcgaggtcgaggtggagtctgaggcctggggtcgggcgaggcagagaccgtcttccgaggtcgaggtggagtccgagccctggggtcaggcgaggcggagcttcctatggcgcctgaggttggactcggtggctgtcagcctcaccctggcgggtggcacagcagtcggagtagtgcaggcggcgctattttcctgtcaggtcagtcagtggaggggcgaaatgactgcggtcacttcggccctgtcgactgaggacgtgcgtcaggataaggtgttagacgatccttgcattgaatgctcctacgatacgatcggttggcgaggcgatctggccaaggttgcttctccgcgaagcctgcccgagctgggcctcgggcaagtcgaaggtgcgcccgttgcatga

SEQ ID NO: 43189 - DNA, 540 bp, Zea mays
  Peptide Sequence Number=SeqID_86564
atgaagcaatgccaggttgaggatgctaattcatcgtctgatggtcacgaagaagaaattttaggtggcggtgacaacagcacacctgaccccagctcaattgtgaaaggtaagcgtaaggtgttgcatgattctcctaaacctaagaagaaaagggatgtaaaggaagaatacatgaaacgccttgtcaaagcttatgagtctaggtccttgtgctctaacatgtccataacctcatttgagaacgaccccgttcgtaaagaggttgctgctcaattgcaacaagtcattgaagatggttcaccggaaggaagcgacttacatttctttgcgactcatttgttgatggaaaaacgttacagagatttgtatgtctttgaacaatgtcattgtgtgaaccatattggatttcaacaaatgtctgagcctgatacagactcatatgatgatgagagggatggagaattgctagttgccactttttgctgtggacatatgggggagctcgccagtgggtttcgaagaagaaccatggtttga

SEQ ID NO: 43190 - DNA, 411 bp, Zea mays
  Peptide Sequence Number=SeqID_86565
atggacgagagttgcactcaactcctctcaagtgatccaatgatcaacttgaataccacggtgttcttctttgtttactctttcccgtttgcgaggaatctccacaacttgggagtctctcgcccttacaataaggatcaaggggtcccttttatagccccaaggcagctaggagccgttggaggcattcttggaaggcaattcttgccttctgtcgggtggcgtaccggacagtccggtgcaccaccagacatcccctgttcactgtccggtgcagatcgccttcctgaattggcgcagccgaccgttgaatacttggagccgttggcgcaccagacactgtccggtgcacaccatacggtccggtgcccccatcagaccgttggctcggccacgctgaaagggaattaa

SEQ ID NO: 43191 - DNA, 183 bp, Zea mays
  Peptide Sequence Number=SeqID_86566
atgggcgcacctggacagtcccggtgcgccaccgggacacctgttccggtgcgccagttacgtcacccgacccaatgggattctgaaccattggagcttctgacatctgggcccacagggacagtccggtggtgcaccggacagggtcctgtagagtgtccgacgaccgttggcgcgaagtag

SEQ ID NO: 43192 - DNA, 168 bp, Zea mays
  Peptide Sequence Number=SeqID_86567
atggggaagcctgtcccatcactcctcatgctcctcctcagccgagtgaccgcacttgcacccaccataactggaatgggagaccacgtctcaggtcgcgtgaggggatatgtccactgccaggttcactcagtgggttactatttgtcactgcagtctgtcctataa

SEQ ID NO: 43193 - DNA, 420 bp, Zea mays
  Peptide Sequence Number=SeqID_86568
atggcagggagcaagaagggcaagagagggcgtcaccgtgctgatgggaagcgcaagcgccccctgagtcctccctcggaggacttcggggactcaaagtactcggaggaacgcgggcgtactggcgatccatcgagcgccaggcttggtgggtcagacgactcgaaggaggcatcctcggaggaggtggaggactcctctgactccaaggagtggagtgacgacgagggcgacagtagcagcgactatgacgacgacaagggtagtggcgactacggtggcgagggcagcggcgaccacgacgatgtcgaaggcggcggcgacgacagcgacggcaagggtgacgacggcaagggcgacgacggcaaaggcgacgacggcgacgacggcaaggctggtggcataatgctgccagcttaa

SEQ ID NO: 43194 - DNA, 120 bp, Zea mays
  Peptide Sequence Number=SeqID_86569
atgaagcatttgagaacaagtccccaacaaagggatatctggtccacaatgttctggttgatacaggcagtgcagcggatattatatttgctaaggccttcagacagatgcaagagctag

SEQ ID NO: 43195 - DNA, 498 bp, Zea mays
  Peptide Sequence Number=SeqID_86570
atgagcagaatcaccacagtatctcccttgcctcctcgttccctgtctccccggcaagccttcggtcgcatcggggtggcgagcttgcgctgtcagcggcgaacccctcccctgcccccgcagtgcttccgcctgctggctggactcagttcggcccttaacaagagaacgaagaccatgccgatgcgtggcgtcgatttcaagtggaatgggattatgattacttctgaaatgcatgattctaagttgccggaggaagggcaaaagtggggcttcttgatatggcttcttttcagttactgcgggcttgcctgtattgcttttgtagctattgggaagatgctccaagtcataagaatagtgatctccatagagaagggaacgttgagctggtgtttgaggttcacagatgcctcttcagggttggaaattctgggtggggtaatgccaattgagttccagcaggctttcgcgaagttgcatctgaggaaaagatga

SEQ ID NO: 43196 - DNA, 72 bp, Zea mays
  Peptide Sequence Number=SeqID_86571
atggcggcagctggagttagtggagcattgtatgccaaggcggtacgcttcaggagatggttgatggtgtga

SEQ ID NO: 43197 - DNA, 117 bp, Zea mays
  Peptide Sequence Number=SeqID_86572
atggacacgaaaagtaaggtgatgaacgacgcctccgcttcgagccatctccggcgtttgaggatgtcgggcgcggaaaaagcgaacaacttcaacggaatcacgcccaagccacga

SEQ ID NO: 43198 - DNA, 231 bp, Zea mays
  Peptide Sequence Number=SeqID_86573
atgaagactctgacgactttcggtggctaccatcccctggagatggtgatgcacaccttgggacttttccctgctgagaagaaggatgaccccatgtggtggaaccatgcccttcagagcgacgttatggcacatcttgctaacatcactcaaacgaccaagctcacccttgacagccaagaagattttgtggtcgacttgtcctccgagttggtggagagggatctatag

SEQ ID NO: 43199 - DNA, 919 bp, Zea mays
  Peptide Sequence Number=SeqID_86574
atggctgaaaggtaccaactcccacggagttgcattcctccaacgatgaggcgaaaagacggcgggtatcccccatccgggggcttggaaggtggaaagacacgatgcataagggagcgcgaagacatggtcgccttccaagggggtcaccctccttttaaaggcgactatccctactcgcgtccccagccgtcacgggctgagtcttctccaacacgctccaaggccctcctctgcggcgcgggggctgggtcccacatgtcatgcaagccggctcagagcagaagaagcccaaaccgccgcgcgcggcggcatgcaaccgtgccaagtgggcgcgcttctccgactcccaacacgcccagcctggaggcccaggcccacgcgtcatgcaaccggcgcgccgactgcttcgtgcatgcaactgcaccgccacttgcgccaccaccgcacctcctcaactgcagaaccaataccgcgacccgaggcgacccagcgcacgacccagcagcgccagcctggcgcggcgcggctcgcgcacgcgcaacaaccgccccgccaaccactcgccccgtcgcattaactccgcggcgggacaggcggcgcctctggcaggagaagcgggcgacgcttcgccttcgccataatgaccgcgccagtaaagggaccgggaaagggggataccccgaaaagggtcccttcccccgtgaaggaaccaggctccgagcctccctactgatcagaggttcgaaggctggccccctcgaagggttcaacagccgcctaagatcgcgtggggccctacacccactactagtcagaggttcgaaggccggcccctcgaagggttccacggctgcctcaggctactcgggctccgtgcccattactgatcaggggttcgaaggctggcccccgaagg

SEQ ID NO: 43200 - DNA, 738 bp, Zea mays
  Peptide Sequence Number=SeqID_86575
gcgccccctacaccaccactgagcgccctagcccctggagtagctgttggaggagacccagacgacggaggtggtgacgatagctcgagccacgacaccgacctttccgccgatcaggagccggaaggatgggttgttcgacccatcactcgcgacgctgctcgcgggtgtcacttccacgatgcgctcgacaccctgctacgttgggcactcgaccggcctacttggtctatcgagtatcgctgtgttgtcttccagcacagtcgcggggtttaccagaccgttgggaggcgacctgcttggtgcgccgtccggagaacagtctccggggtgcggagatctactcagagcactattccatctcgacgtgcggccaagcaagatgccgcacgacgtgcactttcgcactactgctcagttctcggcggggtagccgatggtctcaacctgaagtactaccctcgtcgtccatctagcagcacaggaggcatgattgtctcacccgttggcgaggacaatcctaggttgagcagcacagtcaacctagccgccgtgctaaacacagagctagaccatgcattagacgagctgagtagggctcatgctgagatcgcccagttgcgggctgagcgcgtggagcatcgtcaccaggaggatggcttccccgctcccgttgggactcagcacccatacctctcacctcggcgtggacaccagtcttatggcaaccccgactaa

SEQ ID NO: 43201 - DNA, 1143 bp, Zea mays
  Peptide Sequence Number=SeqID_86576
atgaacaaaacatcggcattcaagatgccatcacaaacggaactccggtcccgtccccacggcaacagttcgccttccccggcatggctggaggacgtctccgcctcagggctagagggcgattgccaccaccagaagctggaagaggaggtggtccgccggcccgcgcaggaggtagagccccggctcgcctcgctccccgcctcagcgaggatggcgaacaccctcaacactgagggcgggatcggggtcacagcccgaccaacgggcgaaagaggcgggcagccacgcaggcggcatgcaaccgcgccaagtggacgcacttctccgactcccgacacgccagcatggaggcccaggcccacgcgtcgcgcaaccggcacgccagatgctgcatgcaagcaactgcctcgcctgcgccaccaccgcgcctcctcgattgtggaaccaacaccgcgactcgaggcgacccagcgcgcgacccagcggcgccagcctgacgcggcggccaacgcggccaaaggagggccggcagtaatgacggtggcaggcgcgcgggagcagcggtcacgtcgtcagccaagctcacgtcccatccgggggcagcgagagagccccctctcacggcatgaagacaacacgcccgtgatccgttcctcgaacggcccacgcacgcgcaacggcagccccgccagctactcgccccatcgcattaactccgcggcgggacaggcggcgcttctggcaggaaaagcgggcgacgcttcgccttcgccgaaacaaccgcgccaaaaaaagggaccaggaaagggggataccccgaaagggatccttccccgtgaaggaaccaggctccgagcctccttactggtcaggggttcgaaggctggccccccgaagggttcaacagtcgcctcagatcgcgtgggccctacacccactactggtcagaggctggcccccgaagggttcacagtcgccccagacgccgagcaagggatgaccaaggacccggctccggccaaatcgttgacagcgtcaacataccagcccgagaacttgggccccgaccgtgcacccgggctacggccagttcgcatgagggaacaaccagacctgctgaagcgttacgcaaggcattaa

SEQ ID NO: 43202 - DNA, 165 bp, Zea mays
  Peptide Sequence Number=SeqID_86577
atgggtttgaaaaccatgagtacgaagtgtactttcacaagttttacccgtctaagggaaaagactctcaaggatatgctagcttttgggaatcaagatgtcgaaataaaagttgttctccacgggaggattctcggtctcggagacaacttcttcctctactag

SEQ ID NO: 43203 - DNA, 285 bp, Zea mays
  Peptide Sequence Number=SeqID_86578
atggaggttcatgatctccgggcagaaagggaatcacggcttgtgggtggcaacgagaatgatggtttgacattgactatggtaatggttgtctgcattgcaaccactgctcaagagaagatgaagccgtggaaggagatttccaggagttccaagattacgacgagttctaggcgtgggttagcggcaacccccagtcggctgcctgtgaaggccgcgtgtatctacgtttcttttccgcactttgattattgtgaagactatgtggatgtctcagacatatga

SEQ ID NO: 43204 - DNA, 423 bp, Zea mays
  Peptide Sequence Number=SeqID_86579
atgacctcgatcccacgcccggcccgcagcagacgcccacgtcgacgcattgacctccgcggcgagctccagatcccaccgggcttcggccgcgagtcggcggagccagacacgtggaggggaggcgcgcgcggggacgccacccggaggaacgacgacgttgagagaggccaggcgccgaccaatgccggccggaatggcaacagagcgcttgcagacgcggacgtgaggaagaaggccgaggacgcagaggcgaagcggaaggcagaggaggccgaggccgaggcgaggaggaagaaggaggatgaggagtgggatgccgatctggctgcgtactaccaggagcagtgggcgactgaggatgaaggagctgcgggcgctgccgccgctgctgctaagacggccccgctggccgctgtatga

SEQ ID NO: 43205 - DNA, 435 bp, Zea mays
  Peptide Sequence Number=SeqID_86580
atggggaagaggaagggagcagtggggaaggggccgagcaggggaggggcgctggccatggagcttctgctgggcgccatccatggaagaagggtagaggagggaggggccgagcccatggaggagcaggacgccatgggagtggctgctagggagatggtgctctgcctactgccgtgtgggagagaggatggcatgggggagagcacctacttgagttcagaccagaggaggtccatgcgggtcgggtgcttggaggaagggagctcgccgcggccaccaggaagaaatcggacagggaggcgagctgcaagaagggggatgcatggccagccgagtgccatgggcaagcttgggagaggccgctggcttcttgctggccggagagtagaaggaggacgggccagaggagggcagagcaagggaggaaggtag

SEQ ID NO: 43206 - DNA, 828 bp, Zea mays
  Peptide Sequence Number=SeqID_86581
atgtcaacccagatagctctgcgagtgcaccggcttttgaatctccctgctttcctactagcaaccagtgtggattctgaggtgcagctctcatatttgcctagacttctcactcttctgactactagcagcagatatgttgaggagtgggtccgagtgttctatgcttcagtatggatcgaccccgaccaccaatggatgaggttctattttgagcgagaggatgtcactattcatgccagccagattcgccagctgtttggatttcccgagtcgtcgactcgccttcacagcttgtgctatggcacttctgatcgtcctcgacgccctcacggcggagtcgctccggccacagctcatgtcatggccttatttcgaccggcttttatagatgggtcgcgacgctctccagcagatttcattccagtggccaagtatctctatcagatcatgagacggacgctcctgccctggatgggttatagagaggccaacactcacatccagctctggctacttggtgccttgatctctcattcagagtttgatgtggttgatttccttatatcccttgaggacccagtgccagtaccagatccaatgatagacactcaggcagaggatgcgtcattccatcagtttgagactcagggcacaaccgttcctgatgatgatgatgatgatttttggattccgccttcgcctcctcctcctatgcctccacgctcacatgatcatgaggccgggagttccagtgctgcccctgctggccctcctgccattgaccctgctttggctatgatcctccagtctcttactcagcagtag

SEQ ID NO: 43207 - DNA, 486 bp, Zea mays
  Peptide Sequence Number=SeqID_86582
atggtcttgtggattgagattagagttggtcgtgacaacctgagttctcttcggaggcatgttgatcgtagtgggccgtcgaaaaaggcctcactcaatcccgaagcatgtgctaacgtagacaacaaaggtccatttcgtctttccgaagtagacggtcaaaatctagatgacctatcttctaaacatactcagacacataatattttgctatctgagaccttcgacaaaagggccacagtaagaggaaaaacggatgcacacgtacctacggctacagtagacgggcactcacccaccaagtacagtacttacgaacgtgtagatgtaccagacacgatcgctcgactcgtgatgagtaaatcccgccccggcgaaacttccgcgtggcaaccaatggatcgctccctcgattcccagcagatggacaggggctcaccattccactccttgaggcacttgcgcagcgatgtcttcctcaaatga

SEQ ID NO: 43208 - DNA, 228 bp, Zea mays
  Peptide Sequence Number=SeqID_86583
atggagcttaggtgctgcataagatggtcagtgagcatcatgtgtggctttcatccttatgatgtacacgaagatcaaagaaactccgtgcgtttgttggctgttgaaggttgtgctgctcttggtaaattgttggagccactagattgtgtagctcacattcttccattcattgtcaatttctcccaggtacagagttcatgcccataccatttatattattcttag

SEQ ID NO: 43209 - DNA, 666 bp, Zea mays
  Peptide Sequence Number=SeqID_86584
atgtcaggccaccgaattgatgtcggtctatccctcagcccttcatctccgagcttgcgccgttggggcgctgctggccagctccaccttgccgttgttctgacctggagtccggtgctcggggcgtcgatagttgacctgggggtgcacattcgtgactcggtcgcacctggtgcagtctcgcgttgcgagaattgctcatcggagcagggaattgccgccagattgacttccatcgtggtctatgctcctatccacgcgattcatggtaataacgctctcaccccatgcgccatcgttctctctacgtgtagcaaccgccagttcgcgttttggagcatcctgccgtcggccgtagtcgcaccggcgaactccttgccgggaccattgggtggcgccgctgcacctcggctcaagatggtcaataccatgaagggaggaggaattgatctacctgccaatccacataaccggagggtgcttagacgacaacaacaacaacaagcagagatgaatcctccaaatccttcaccagttggagctgatccagcagttgcagcccagatgcatataatgcaacaaatggctgatactatggcagatatgcacgcgcatatgcgacaggagcgtcaggagatgtgccaagagagggaggagatgcgctag

SEQ ID NO: 43210 - DNA, 981 bp, Zea mays
  Peptide Sequence Number=SeqID_86585
atggcggcggatctcgatccagagggcgagcgacggcagtgcacttgtgcggtggcggtggttcctaggccggtggccgcaactacattacctcgacgcgcggtgccggaggttactcgatccggagtagtggcggcggttcccaggaaatctctactccttattaaggctctaagggtagcctgccacttttggttctgccacccgaactcccgcccagcgccctgcgaaatctccaaaattctcgcccaacgcgccctgcgaaaatctccgaaattcccgcccaacgcccctgcgaattcccgcccagcaaaaataagcggggccgcgaggatcaaacccaggccatttcagccaccacgcgcaacacaatgcaacaaccaatcccttgctcatatggcaagggccaacgtttataagccgcactatgcctactttactagccggtatggtactaaccatatctgtaaagaaaacaacacaacagtaccggtgtcctgggctaaatgtttggtgcggcccatactccagctatgtttggagcagcccatactccagcgacggacgccagctgtctcccttcattcttgggtaacctccgcctccgcgacgtcgcgcccaaccgctcgcacagctccactcccgcggcttccctctccacgatctccacttctccaccttgaatgtgctggagttcccctcccgcactttgccgacgccagagacatccgcaaccgcaagcgccccttcctccttccttcatcaggagccggaggacctcgccgtccaccacctcccctactcccttcctccatcagcgtggcgtcggcgacctgtctcggtcgagcatcagccgagaaggagcaggtgttggggatgcagagcgttaccagggagctggcgaggtgctgcaaagtgagcagcaagggagctgatgccgagctcgactgctacagctgctccggcgtgctgcgtgggtga

SEQ ID NO: 43211 - DNA, 513 bp, Zea mays
  Peptide Sequence Number=SeqID_86586
atgcagattcaacgtcttctgtcctcaccttatctatctaatacgattgctgctcttgtttctgccgaagaccatgctgagaccacccatttcaggcttcctgcttctgcttatgaagcactgaatgagatcgtgagggtcatcatccagaaactgagcagcacagatgcaaagtctataatttctcagaccactgatcagctgatgctaaccatcaggaggtctggaggatcacaaagtgccttggagaaccacaagtatgaaattgctgactgggaccttggtgccggaatatacatagacttctacgttctgaagaacttaatggcatgctactcgaagatggcagaggagctatgcgcgcttctggtggacaccccaagcgagacgctgaacctactcatggggtgtcttctaacgatgctcaacgctccagttccggacgagagcaggtcgtcgtacctgcaggacacactctccgtctttaccgaaatcctttgcagcgatccgtag

SEQ ID NO: 43212 - DNA, 2502 bp, Zea mays
  Peptide Sequence Number=SeqID_86587
atggagcggaatggcgagagccacctcaaggacccgcttctgccgacgacatctggcgcctctcctgctggggcgtctccaaggaaggagaggaagacgaggaaggtcctgttcagtgtccggggcatctcctgcgcttcttgtgccgtgtcgattgagaccgttgtggccggcttgaacggggtggagagcatccaggtctcctcacttcagggccaggccgtggttcagtacaggccagaggaaactgatgcaagaaccataaaagaagctattgaggacctcaactttgaggttgatgaacttcaagaacaagaaattgctgtgtgcagactacgcataaaaggaatggcttgtacaagctgttctgaatctgttgaacgggcgcttcaaatggtacctggagttaagaaagctgcagtgggtcttgctctagaggaagccaaggtccattacgatccaaatgtcactagtcgtgatcgcataattgaagctgttgaagatgctggatttggtgccgatctcattagttctggggatgatgtgaacaaagtgcatctaaagcttgagggtgtgaattctccagaagacaccatactcatccagtctgtactggaagctgtggaaggggtgaacaatgttgaatgggacacagttgagcagacaatagaagttgcatatgatcctgatttcactggtccaagattacttattcagtgcattcaggacactgcacagccccctaaatgctttaatgttaccttgcactcaccaccaaagcaaagagaagcagagcgcaatcatgaaattaggaattacaggaaccaatttctttggagctgcctgttttcggttcctgtattcctgttctccatggttcttcctatgctttctccttttggggattggttggagtacagaatctgcaacaacatgacaataggcatgctactacggtggttgctgtgttccccagttcagtttattgttggttggagattttatgttggagcctatcatgcactcaaacgaggatactcaaacatggatgtgctggttgctttgggaacaaatgctgcttacttctattctgtgtatattgttctgaaagcacttacatcagactcatttgaaggccaggacttctttgaaactagcgctatgttgatatcttttatattgctgggaaaatatctcgagatagtggcaaagggaaagacatcagatgcgttgtcgaaattgacagagcttgcaccagaaacagcgtgccttcttactttggacaaggacggaaatgccatttcagaaacagagatcagcactcaattacttcagagaaatgatgtcatcaagattgtgcctggcaccaaagttcctgttgacggcgttgtcataaaaggtcaaagccatgtcaatgaaagtatgataactggggaagcaaggcctattgcaaagaaaccaggcgacagggttattgggggtactgtaaatgataacggttgcataattgttaaggcgactcatgttgggtcagaaacagctttgtcgcaaatagtccagttggttgaagctgctcaacttgcaagagctccagtgcagaagttagcagacaagatttcacgtttttttgttccaactgtggtggtggctgcatttcttacatggcttggctggttcatacctgggcaacttcacctctacccccagcaatggatcccaaaggccatggatagttttgagcttgctttgcagtttggaatttctgtcctagttgtcgcatgcccatgtgctttgggacttgctacaccaactgctgttatggttgcaactggtaaaggtgcttctcaaggtgttctcattaagggtggaaatgcacttgagaaagctcataagattaaggctatcatatttgataaaactggaacgctgacagttggtaaaccttctgtcgttcaaacaaaggtcttctcaaagataccacttctagaactctgtgatctggctgctggtgctgaggcaaacagcgagcatcctctatcaaaagctatcgttgagcacacaaagaagctcaaggaacaatatggatctcacagtgatcacatgatggaatctagggactttgaggtgcatccaggagcaggtgtcagtgcccatatcgaaggcaggctggttttggttggaaacaaaaggctgatgcaggaatttgaagttccgttgagtcctgaggtggaggcgtacatgtccgaaacagaagagcttgctaggacctgcgtacttgttgctatcgataagatcatctgtggggccctcgctgtttcggatcctctgaagcctaaggcaggccaagtcatttcttaccttaagtcaatgggcatctccagtatcatggtgaccggtgataattgggctaccgcaaaatcaattgcaaaggaagttgggatcagccaggtgtttgccgagatcgacccagtgggaaaagctgaaaagatcaaagacttgcag

SEQ ID NO: 43213 - DNA, 429 bp, Zea mays
  Peptide Sequence Number=SeqID_86588
atgcagcacgccaacaccccaaccattgtcatggagcaaccaaacacccccttaattctcagaacgatagagaatacaggagctgaaatgacagctttcagcttgtgcagcaaaggtaacgagaaacccgcgcacgcatcgaccgcggatcaatcagccagcgctgcgagtccacgaccgcgagaggcgacgaaaggaaaacagaccagagaagacgggtggaacaaacgcaaacctgtgatcattcaattgaaccagaagcctgtggacgaggcggcggaagcacacgagccggcgcaggagggcgccccacctcggtcccggacgactgcggccgcggcgagaagctctcggcccccggaccccgcctgctgtagtagtctccctgttcccgcggcggggcgcctgcccggggtgtggggattttga

SEQ ID NO: 43214 - DNA, 285 bp, Zea mays
  Peptide Sequence Number=SeqID_86589
atgtccctggtctctggaggtggttctacttctaacccttcacatgctatgtttgctctttcttctttgttgacctttatagaggagaaggtggaaagccttggggatggggagctagcgcttgtgtccagtcggttcacctgttgccctcaggagggcaagcaggaggctggcccgcgcaaccactactctagtcggtgcaagggcaagcaggagtacacatccggcaaacacaagtctaagggaggattcaacaacaaggcactcaagaagaagtacctctag

SEQ ID NO: 43215 - DNA, 861 bp, Zea mays
  Peptide Sequence Number=SeqID_86590
atggcccttggagatgatgcgatgagcgacgactgccaagacatcggcgatgtatcagattccgccggtgatctcgccgctaaggtagaagagctgacgactgctttagctagtcaggataagctacttcagcttgttgctcatgagagtaaagagtttaaattcaagtatgagagcacgcttagggaacttgagcctgctagagcttcagtcatggtgtccggcgagactgaatgtgatgagtgtgctctacacatgtcgaacatcacaaccttgcacactaagtatgccaccttgctagatgagtgcgatgagttgagatctaggtctagcttgttaggctttgctgctaaggatgggagtgttgcgtgttttggaaagattggtgagtggagtggattgaaaccattagagaaacctttagccactcccaagatcatcaaaattaccccacctaagcctaccacacctgtgagagatggtgtgattgagaagcctagcccctcaactgtccaaaaggagagcccccacccacaacaaattccacctaagagggatgtgaggttccattgtgagtattgtgagagggatgggcatttggctgcgtttttctttaggagaaagagagatgaccggctagtttctgagtcgagtagaaagaacatggaccacccttctcatggtgttcatgatcctcctgttcagatacgtcctgcgaggcctagaggtgctttgccacttgctgctaggcctcaggtggtgaggccacgtggtggtcatgcccggcggggtgctggtcatgtgccatatggccaaggaccccttggcagtggctttggttcttacttccccagcggataa

SEQ ID NO: 43216 - DNA, 846 bp, Zea mays
  Peptide Sequence Number=SeqID_86591
atggcgcgccagcagccggagcgagtgccgccgcagcggcgtcctgtcggttgcggaggtggttggaagcgcgacggggtttgcgggagcccgcccctgagcggcgggctgttcgcggcggcgacgagcgccagcagccggagcgagtgccgccgcagcggcgtcctgtcagttgtggagcctccccgtgcgccgcgccgtgctgttcgtcgccgaggtgcaccggctgcgggacctggagcccagggcgttgtgtggcgtggagctctacgacgacatcctcatgcgctacgtgaaggcgtccacagcctacctaggcaagcccgcgccgcgcggggagccgtcgggagacatggtgacttcgacatcacatactaccgcagttgtgaccccgggcaggcgcgcctgttcgaggacgtgttggaggaggtcgagcagatgggcatcttcaagtacggcggcctgccgcactggggcaagaaccgcaaccttgcctttgtcggtgccgcgcgcaagtaccccggcctgccgcgcttcctgcgcgtaaggacgcctacgaccccgatggccttttttttagcagtggcagcgaacgctgcggccagctgcgcgcaattattttgcttgtggagcacgacgtcggtgagcgaggccagcgccgtggcggccaagagcctgggcacgagcggcgcgacggcgtcccgcgggtgctccccggtgacgagcgccagtagccggagcgagtgccgccgcagcggcgtcctgtcggttgcggaggtggttggaagcgcggcggggtttgcgggagggcgtgcgggcggatgtgggggcggtttacactactaa

SEQ ID NO: 43217 - DNA, 381 bp, Zea mays
  Peptide Sequence Number=SeqID_86592
atgggcaagaacaacaaacgcaagcgcgagccgactcctccatcagaggactttggcgactcggaatactcagaggaggagttctcctctgagtccgaggggtctctggctcccacttacatccgggccgtcgagcgctccgggctcgagggctcggatgagtcggagtactcctcggacgaggaggactcgcccgaagaggacagcaaaggtgacgacgacgacaacggaggcgacgacggcgacgacggtgacggcggcagcaggggcgggcaacggcggcagcaggggcggcgacggcggcagcggcaggggcagcaacggcggcggcagcagcaaaggcagcaacagggccagtggctaggtgccactggtctttag

SEQ ID NO: 43218 - DNA, 117 bp, Zea mays
  Peptide Sequence Number=SeqID_86593
atggccagccgagcgccatgggcaagcctggagagaccgctggcttcttgctggctgaagatcaggaggaggacaggccagaatagggctgagcgagggaggaagatttgtgattga

SEQ ID NO: 43219 - DNA, 1005 bp, Zea mays
  Peptide Sequence Number=SeqID_86594
gtggccgcagacaagtcagatggaggtcagtgccaaaccagcttctgccagaatgaagatggtttccccaagttgctgagagcatgcacagtccgcctcggaatcaggagccagccagagtatgatggtcgtgagttcgtcgagcatggcacagagaagtgtgtcgtgactgtatacattggatccagtccacaccatgtggaatggagtgtcactgctgctgggcacagattcaaagacacctgccaagtcgtcgctcgcaaggcattgagggccctgtgtcagatctatgaagaagaagtggctgacactccgctcagattctttccgccctttcatagaaaccgtcccgcttggatggccaggatgcgtgcattggaagggcagcagctgcttgaggatgaccccacagtcgtgtacctcactgcatacctgctcaccctggatgcacaatatgatttcttggctcggcaccaccgtcagatgattgcccgagcagaagatgcagagaagcgcaaccgtcagttgcatgtggatctcaccacagctcaagcccgtgcaactaccttggagagtcgtgaagcctacttggtcacccataaccaacgtagagccctgcggatccaagagcccgctccatccaaccctgttcaacccatcaacgctgaagacccccagattcttgaaggtcacccggtctctatcagaggagaaaagaaggcttgggaactcccggaaggagccatagtcttggaaggaattccagtcttccctcaggctatggataagcaagagcaccctgagtcctcccaagatcccccgccagagttgcttgagcccctcaccatgaagaagattccagcaccgtcccttgaggtcaaggaagaagctgcaagcaccccgccagcaccgccgccctcagaggagctacaagagccagtcccgcttgaagaagagttcgaccctgtcctgccatctcagtcgccgccagaagaagtcatcaac

SEQ ID NO: 43220 - DNA, 273 bp, Zea mays
  Peptide Sequence Number=SeqID_86595
atgggtcagtggctcgggtggggcaggggagcgagcaacaggacacaaaggcgagggtgcctaacgagtggggccacgacagagccaggcctgtcggtcagcggcatggggcaagcacaagcgcgggcgcgcactgaccggcggggcctgccaggcgatgacccagagcagagggaggggggtcagcgtggtgcttacgcgtgggacgcagggtccaccggtcagcgggccacaccaaaaggacaggagagggtcgcggctgggaagctacag

SEQ ID NO: 43221 - DNA, 651 bp, Zea mays
  Peptide Sequence Number=SeqID_86596
atggagaggctgcaaaagtggcagcaagagctcgaggacaaggccagcgacgcctccctcgccgaggaaaattttaaggcaaaggagcaatccttggaccggcgggagacggacctcgccaggcgagagacagatctcggcttcagggaagaaatgctcacccggcgaggcgagttgctggccaagcacgagatcgaggcagaggagaaagagaggaagctggaggagcagatctgccagttcaatgcagtgcaggcgccgccggagcaccgcgccggggtccagcgtattgccgcgtgggtcggcgaggcaagcacgtcactggtgccgctagggatgagccccatcccagtgtcggagctgccagcgtcgatctccgatgtgctcccggtgctggactctgccgacgatcacctctggcgcctggatcagatcctcggggcccgcctagaggcagagtgcggcaagctctaccaggcagtggttgaatacgtcttgacgtgcttccggagtcacgacccagccacatccttggcgccggtgatcgatggtccggtagctaccacagaagatgccgcccgggagggcgtacaagatgtcatggagatggtggccacgcgcttccagcgtgatcctgccgacgccgagtag

SEQ ID NO: 43222 - DNA, 609 bp, Zea mays
  Peptide Sequence Number=SeqID_86597
atggcgggcggaaatgagctcgccagagctaaggaacggtggctggccggtgaggcggcaacctaccaggagttcctgagcacgcagccacccttgttcaccaaggcagaggattcgttggacgccgacgtatggctccgcgtcgttgagtccaagtttcccctcctcacgggagactgccctgatgaagccaaggctcgcttcgccgcgcagcagctttgcaaccctgctcggaccacttccgtgctatgctccccgctgatcgggaagtgtcttgggaggaattcaagactgctttcagagggcaccacatcccagctggcattcttgatcatatttttcacgggtacgggtttgggaaggcaaaacccagtgggtttgtaccacctatgccagtatgcaggttaccatgctgattctgatgagaagaagagagaccgctttcgcaggggtcttaacaccaagctgcgggaacgactcaacactgtctgggctgatagctttaatgagttggtcaacctggccatctcccaggaggaccgtattgtagctcaccgggcagagaagaagagaaaggcaccaatggcagcaccatccgctcaggcctag

SEQ ID NO: 43223 - DNA, 713 bp, Zea mays
  Peptide Sequence Number=SeqID_86598
atgtccggtgacgagtttgacttggagtcctctggtgcaccggacactgtccggtggcacaccggacagtccggcctagcaagggtctgcacaagttcttgcagaaacattgtgagggtgaaagttaacatatcggtaaggaggccactgaaaccagcacctggaaagcctgaggacgtgcctgcagatcatcacaaggtggcacccaggatgcttgagacttctctgggtgtgaggaaaggttcaggatcttccagcaggttggcagacaggaaagggagcaaggagttcgagcaagaacaggctgttcagaaagcgccctcggccgtgaggccagccacgtcataccgctctggacggaatggagaaggcgcagcaggagtggctgctactggcggcacgagatctaaggctgatgaatgggagaaggcaaagcttggaagagttagagaggagtatgagaagatgatggagaccatagccgaatgggaaactgagaagaaggtgaaggcgagacgccaaaaagagcagaaagagaccgagctagacaaaaagagagaaaaggcactagaagaatacaacctggagatgacaaggatcagcaaaatctctggaggagcaagggcgatggcggaggagcgaaaatacaacgatgggaaaaagatcagagagaaggcgcacaagatgcgatccacaggaaagcctccccgcac

SEQ ID NO: 43224 - DNA, 441 bp, Zea mays
  Peptide Sequence Number=SeqID_86599
atgggcaagaacaacaagcgcaagcgtgaaccgactcctccatcggaggagtttggtgactcggaatactcggaggaggagttctcctccgagcccgaggggtctccggctcccgtctctcccccggcgtcgtctgatgactcggacgactcccaggggatagccacggaggtctggacatacatccgagccgtcgagcgcgccgggctcgaaggctcggatgagtcggagtactcctcggatgaggaggactcggacggcggcgacgagggtgaagacgacgacgacgacgatgacgacggcggcggcgacgacagtggcaggggcggcggcgacggcggcagggacagcaccaagggcagcagcaggggcagcaccaagggcggcggcggcggcagcgccaagggcggcggcggcggcaggggcagggccagtggctag

SEQ ID NO: 43225 - DNA, 345 bp, Zea mays
  Peptide Sequence Number=SeqID_86600
atggcgcactgctacacctcccattgtacacctggaccctctccttacgcctataaaaggaaggtccagggctctcttacaaagaggttggccgcgcgggaggacgagacggcgcgtagggtccctcgctctcccccccacacggacgcttgtaaccccctactggcaaaagagatggcaatgggtaaatacccaccgggtattaataccccatacccatacccacgacataaaaataacctcatcgggtcacttatatacagtggcgggtatggatttacccccatacccatacccatgtgggtatgggtcacccatcgggtcacccgtacccacaaaaattaa

SEQ ID NO: 43226 - DNA, 228 bp, Zea mays
  Peptide Sequence Number=SeqID_86601
atggcgaagccgctcccgtggtgcgatgcaagcgtggaggtcacggggcgtcgggtccaacttttatacacagagagaccgagtccaggactccgcgccatggtcaaccgcgggcaaatcaagaccacagcggtggcctcttccgtcacgctgtcccatggcgagatgagcacgagcctgagaggattccgcgacgaccaaggaaatcggcgcccacgcgaggtttaa

SEQ ID NO: 43227 - DNA, 2421 bp, Zea mays
  Peptide Sequence Number=SeqID_86602
atggcgtacgcgtatccgtacgtcttccgtgctcaggcgccaccagtgagtgtggaggatcacaaggcgaaggacgccgcgcctgctccgcaggtcaaggagcagtggccggccggcggcagcagaagcgctagcccacgcggcgcaggaaccgggtggccggacggtcttggctcggggtcaggtgagagccagaggctggcgagcgcctacgacctcgtggagacgatgcactacctgtacgtgcgcgttgtcaaggtgcgcgggctcccggcgagtgccgtgaccggcgggtgccgcccttacgtcgaggtccgcgtcgacaactaccgcggcgccacgcggcattgcgaggggaaggaaagccccgagtggaacctggtgttcgccttctccagggaccgtgtgcaggccacggtgctcgaggtgttcgtcagggacagggacgccctggggcgcgacgactgcgtcggcagagtcgcgttcgacatcgccgaggcgcccgtgcgcgtgccgccggacagcccgctcgcgccgcagtggtaccgcctcgagggtagtgctggtggcagaatggtggccaacggtgaggtcatgcttgccgtctgggtcggcacgcaggccgacgaggcgttcccggacgcgtggcacgccaccgctgcctccgttctcggcggtgacggcggcgcggccgtgcacaacacgcggtccaaggtgtatgttacgcccaagctgtggtacctccgcgtgggcgtgctcgaggctcaggacgtcgtgccgcccggtgcctgcgccactccggacaaaggccggcacgccgaggtcttcgccaaggtgcaagtcggcggcacggtgctcaggactcggccctgcaccacgaggggtccgaccaacctcgcgtggaacgaggagctggtgttcgccgtggctgagccgttcgaagacccggctgtccttatcatcgaggcccgcgtgcaccccggcaaggacgagatcgtcgggcgcgccttgctgccgctcacgatattcgagaagcggttggactgccggccggtccagtcgcagtggtttagcctggagcacttcgggcgtccagctccggccgtcttcgccggccgcgtgcacctccgtgcgtgccttgagggcgcgtatcacgtcatggaggagccaaccatgtacgccagcgacacgcgcccaaccgcgcggcagctgtggcgcccgccgattggcgtgctggaagtcggcgtcctcggcgcgcaggggctaacgccgatgaagactgtcgacggccggggcatgaccgacgcgtactgcgtcgccaagtacgggcagaagtgggtgcgcacgcggaccgtggtggactcttgcagcccccggtggaacgagcagtacacgtgggaggtttacgacccgtgcacggtgctcacgctcgccgtgttcgacaactgtcacctcggcagcgccagcgctggcaacggcgccctcagagaccagcggatcggcaaggtcaggatccgcctctcgacgctagagatggacaagacgcgcactagcgcgcacccgctcgtcgtgctgcacccgtccggtctgcgcaagaacggcgagctctgtctggccgtgcgcctcacctgcctcacgctcggcagcgtcgtgcgcatgtacggccagcctctcctccccaaggcgcactacgtccagccgctcaccgtcgtgcagctcgacagcctacggcggcaggcgatgagcatcgtggcagcgaggctgagccgggccgagccgccgctgcgtcgggaggcggagcaaggccaacttcttccgcgttacggcgctcctctcagcgcggccagcaccgtgcggtggctcgccgacgtttgccgctggaagaacccggcgacgacggtcctggtgcacgtgctcttcgtcaccctcatgtgcttcccggagctcatcctgccgaccatgttcctgtacatgtccacggctggcctctggaactaccgtcgccggccgcgccggccgccgagcatggacgcggggctctcgtgcgccgaggcgacccaccccgacgaactcgacgaggagctggacacgttcccgacgtcgaggcccaacgccgtggtgcggctgcgctacgaccggctgcggagcgtggccgggcggatccagacggtggtcggagacgtggcgacgcagggagagcggatccgatccctgctcacatggagggacccgcgggccacggcactgttcacggcgttctgcctcgtcgccgccgccgtgctctacgtcacaccggtccgggtcgtgtcgctcgtcgtcgggctatacgtgctccgccacccgaggttccggggccggatgccgtcggctgccggcaactttttcaagaggctgccgtcccaggcggacactatgctgtag

SEQ ID NO: 43228 - DNA, 148 bp, Zea mays
  Peptide Sequence Number=SeqID_86603
atggcggcgccggccgccgatgaacgtgcccgcctgttagttaaccggtcggcttccccgtcgccggcaaggaaaggcatgcaaggagctaggatgaggaaagactggaagaggagtgctggtgaagctgactgtatggctgtatgcg

SEQ ID NO: 43229 - DNA, 576 bp, Zea mays
  Peptide Sequence Number=SeqID_86604
atggcccctcctgtgacgtggtcggtccgagccctgggtcgggcgaggcggaggctcctccgaggtcggggtcgagtccgagccccaggtcgggcgaggcggagacagtcgtccaaggtcaaggccgagaccgagccctggggtcgggcgaggcggagttcgtcgtcttccggggccgagcccgagtccgagccctggggtcgggcgaagcggagttcgtcgtcttccggggccgagcccgagtccgagccctggggtcgggcgaagcggagttcgtcgtcttccggggccgagcccgagtccgagccctggggtcgggcgaggcggagtttcttatggcgcccgagggcgcgtgacaggataaggtgtcaggccatccttgcattaaatgctcccgcgattcggtcggtcggtgtgacgatctggccaaggttgcttcttagcgaagactgggtctcgggcgagccgaagggatttgaggttatgggccacaacacgccactaccagtgataccagcaccagaaggagcttctggagaggagggagctactacagaagagactccaaccagatag

SEQ ID NO: 43230 - DNA, 1239 bp, Zea mays
  Peptide Sequence Number=SeqID_86605
atggatccaggaaaatcaatagatgataaattcagcaagttgcatccaagttttccagtagacaccagaattggcatagttggagcagggccaagcggcttatcagcagcatatgcactagctaagctagggtatcacaatgtaaccgtgtttgagagatgtcataatgtttcagggatgtgcgagtccattgatatcgagggaaggacatatgatctgggaggacaagttatagcagcaaacagtgcccctgttataactcatctggcaaaggaactaggttctgaatttgaagacatggatacacacaagcttgctcttattgacagccaaacaggaaacattcgagatcttgaagttgctgagggactatgtatccatggtttctctaacgctaaaattacagggcaagatgaggcaaataggtctggaggagtgggaattcatgcagtcagtggattggcctcagatccaactcttgactttttgatgcaacatggaataagttcaatgccaaaatctgtagtatatggttacactgcttctggctatggttttgttcaagacatgccctatgctttcatacatgagtttactagaacctctatggctggcaagatccgacgtttcaagcatggttacatgagtctgtgggataaacttagtcagtcattaccatttgaagttctttgtggcacggaggttctcagagtcaagcgtaacaactgtgtcgcaagtgtaattatcaagaacaacaatgatgatgtagaagttagggagtttgacaaaattatattgtcaggggctcttcctttcaaaaatgggaaaacatatcgttctttaagtatgactgatggagaaaatgaagtggtagaactgaatgatcttgaaagagagctattcagtaaggtacagacaattgactactatactactgttgttaagattgaaggatttgagcacataccaaagggctttttctacttcggggaatacatggaggatccaacaacagtaggacatccagtggcaatgcaaagattctttgctgacacaaatattttcttgttctggtcttatggaaattcagcggacatcaaggagtcatatgtggctaaatgtgtaaccaatgttgtgacatctatgggaggaactgtccagagagtgcttttacagcgacgatttaaatatttccctcatgtcagcagtgaaggtataggttggcagggttgcctctga

SEQ ID NO: 43231 - DNA, 267 bp, Zea mays
  Peptide Sequence Number=SeqID_86606
atggctgctggccggagctgggggctcggtctgcaacagtgggggtcgggcgccatggagcaagaagcagaggaagccgcgaccaaggggagagaagggggtgccgtggttgggaaaggagatggagcagagagctcgcagggaggggcgccggcgtgctcccagggagctcggccatggctgcactgcgggcgccatggatccagggataccgaacttgctctgccctgcgcgctcaggagcatggggagggcgacgcttgcttga

SEQ ID NO: 43232 - DNA, 330 bp, Zea mays
  Peptide Sequence Number=SeqID_86607
atggggaggaaaaggagcagcggcgctgtggatctcgggcgtgtcatgtggcttgtgctcgcgcgcagggaaatccccggcgccgtggctgctggccggagctggggctcgggcgccatggagcaagaagcagaggaagccgcgaccaaggggagagaagggggtgcagtggttgggaaaggagatggagcagagagctcgcagggaggggcgccggcgtgctcccagggagctcggccatggctgcactgcgggcgccatggatccagggataccgaacttgctctgccctgcgcgctcaggagcatggggagggcgacgcttgcttga

SEQ ID NO: 43233 - DNA, 783 bp, Zea mays
  Peptide Sequence Number=SeqID_86608
atgatcagcttgattcgtttcgagcagtcagacaccaagatcgacttgtcaggctgtccggtcatcgcggcgaagcgctcaagcccggacgtccgtcaagccaccaaggtgacgctggctcggacatggtaccaggcgctctgggccacgctgtgccagccactgctgcagactctcgtgccctacttcgtcgtgggcctagtcatcttcctccccctccgtggcctcctcgccaccatggccgccggcgtgccgctctactggactctgcccatcttctgggccacgtcaggcgtcgccgcgatgggtgcctgtgccgcagcgaagtgggccctggttggcaggcgggccgacggtgacacggtgcacatctgggcgccgcccgtgttcctggacacggtctggcaggccgtgcgcacggcgaccgaggagtacttcgcggagctgacgcccgggtccgtgctgttcgcttggtggatgcgggcgatgggcgcgtccgtggccgtgtccgacggcgtgtacgtggactccacgggggcgctgctgaacccggagatggtgcacctggagcgcggcgcgagcgtggggcgggacgccttgctgttcggccacgtgtacgagggcgagggcggggaggtgaagtttggcagggtccacgtgggcgaggacgggttcgtcggcagccgcgcggtggccatgccgggcgtcagggtcgacgacggtggctgcctcggtgccctgcggctggccatgaaggaggagatcgtgatgaacaggacgtag

SEQ ID NO: 43234 - DNA, 3188 bp, Zea mays
  Peptide Sequence Number=SeqID_86609
atgttgtgatcagaattgttgatccggactatttgacagagcatcaagaggatggtgctgagggtgagatatggatcagcagttctagttctggagttggttattggaacaataaggaaacaagccagagaaccttttgcaattggctcaagaattaccctaacataaagtttacaaggactggtgatttaggacggatcattgatgatgtagagaagacagtggaatgttcttctgatgttcttcgaccaggctgttgtgctgttgttggtgttcctgaggatgttttaacccagaaaggcatctcaatccctgattcttctgatcaggttgggcttgtcgtgatcgctgaggttagggagggtaaagtaatctctgaagagatcgtagacagtatcagaacacgtgtagcggaggagcatggtgtaactattgcatctgtcaagcttatcaagcctagaaccatatccaagacaacatctgggaaaatacggagatttgaatgcatgaagcaatttgtcgataatactcttagcttggcaagtggtagtcgtatatctaataagaagtctctttttcggtctctcactacaggaactggcatggacatcaggagacctttcttgaagcacactgttgatcctaccattcgccctcagcctagaagcaaagtgaaaaatctcatggagattattgagtttttaatgcagttagtatctgatcaaaaagtggtccgagctgcccagaagctctcagattttcttggtattcctgttggagccattgacatttttacagcaagttgtattgctgatcttgccagttttttggagaatttggtgctcaagtcacaaccacagttaaaacctgatgtatctcactccgctgaagatgaaaatccagttatcacagataccactgatatagatcttagcgtgtttgctactgggatcctccaactcctggctcttacttatgtatgttttatcctgttacttccagcatatctcgcaagctcgatgtacaagagcatgatatcttcagtcagtctagtgaaatcatcactactgagctatcttagttctttggtcttggcacctgttgcatggatctgctatgccttgttcacttcattatccctgtctaccttggggaagccattccttcagccaaattatattctaacccctgatatttcaatatggtcagttgactttgtgaaatggtgggcattaaacaaggctcaatcattagcagcaaagatgctagctgtgcatctaaagggcacaatcttcttgaattattggttcaagatgcaaggagctcggattggttcacatgtcgtcattgatacagtagacatcacggacccatccttactagcagtcgcagatggtgcagtgatcgcagaaggtgttctcattcagagccatgaagtccgtaatgaagtgctgagtttcaggcatgtcaagattggtcggaaggcatcagttggcccttatgcggtgatccagaagggaactgttgtgcatggtggcgttgtcattccaccgttgcaaaaaactgagcaagggaaatcagcatatcctcctagcggagcttctgcttacacgaaggacgaagaagggacagcaaacatagcatttgaacacctcgttagcatctatgcagttggcttcttgggtgctttgtcgggtgcaacagtcttcatgttgtacacccgcttttcaggcacgacggcttcgcttcagcacttctcctttgcatgcgttgctggtgccttccattggttgccagctgtccttgccgcttatgccgtgattgtccgggagacaaagacaaccaagagcccagtggaatttgctctcttcattgccttcgcctacttaagttatgggatcatcgttagtcttctcgccagtgtcaccaacaaagctctggctacaaggtcagggaccaagaagaaggatgtagcacgtttgatccagcagcgcataaccatcgctgcacacctcagatttgcaaagatgatatccggtacagaagccttttgcatgtacttgaggcttcttggagcaaagattggcaggcattgctccatccgagccatcaacccggtggcagatcctcagctgatcagcatcggtgatggggtccatctaggtgatttctgcaacattgttccaggattctactcaaaggggtttaccagtgcagagataaaggtccgggacaacactgtggttggcagtggcagcttgctccttcctggctccgtcctccaagagaatgtcatcctgggagcactgtctgtcgccccacagggttcggttctccttcaaggtggcgtctatgtcggggcgcagtctctgaccttggtgaagaacacattgctcgcagaagatgaacggattgtggagatggacccgatgtataagaagattgttgggaaccttgccgcgaacctggccatcactaccatgaacgtcaaatcaagatacttccaccgcactggcgtcagcgggcggggggtcctgaggatgtaccaagacataccttcgctgactgagcacaagatatttggcgctggaaagtctttcccggtgattgtccggcacagcaacagcctcagcgcagatgacgacgccaggctcgacgctcgtggcgcagcagtgcggatcctctcggatgatggcgaggtgcctcttcttgacctcacactgaagagcggcaaggcgttttacgcgcgcacaatcgccgacttcgccacctggcttgtctgtggcctgccggcgagggaagaccaagtgaagcgacggcaggcagatgtatgcaaagttcaagctcgtcctgcggaccaagccatctcagaggactccggccaggtggtgccgcgtggcatcctgccgccggaaactggtgcgatcccgagggacgagggtgacacacgcccgctgctgttcctcgccgacgacttccgccggaaggtggagtctcccgagggggtgcgctatgtcttccagctgcagctcagggacgtccctgctgacagcgccactcgcgagatcgctctagacagcgcacggccttgggacgaggacgagttcccgtacattttttttctgagagataagcattggcagcaatctctcagcagaggagaaagaattcaaagcatgattcttttg

SEQ ID NO: 43235 - DNA, 501 bp, Zea mays
  Peptide Sequence Number=SeqID_86610
atgagcctgacgaggggtggcccacacgacagtggtgcggcgcacgagtcgtgccggcgcagaggaagctgggccgagggcgccagaatcggcccagattcaaaaccagttcaaactttgactcagttttacatgtgcactttaaatccacagtatgaaatctcgggtgaacagtcgagtcccaagttctcgggctggtatgttgacgctgtcaacggtttggctggagccgggtttgcgagagcagcccccgagcctccgcacaaagcgagaggacgggcaacggctacttcggcgccaacggacacctgcaggcgctctgcaggcgcatttaatgcgcgccagagcgcgcagaagtcaggcacgcgcgaacaggcgcaccgaacattctacagttcatgtctggtgcgccaccggtcatctaggcgggcccagcaacagagctccaacggtcggaaccctaacagccgggtgacgtggctgtcgcaccggacatgtccg

SEQ ID NO: 43236 - DNA, 684 bp, Zea mays
  Peptide Sequence Number=SeqID_86611
atgaagaccgaggtgggcgtgaaagatgggaaaaaggcttgggcgtccatgtttttgaagctgctgaccatggtcaacgcagctgggaagaccaagcgtaggtcacggttggtacaggagttggacaccatggcgagttggagaccgacagaaagctcagcgcgcggcaaggaactcgacctgcgcaagcacaaggagcgcgacgcagcggccatggaaggtgctgtttcgtacaagacctcggcttgggttgagcagggcttggctgccggaaacagggagcagcggctgatgctccatgatttaaacggggaagaggcaaggaatcggctggagctcactgcgacgagggaatcgacgtctagaccgagcaccatggtggacgacatccatggcgagcagagcacggcttccagggaactcagccgccagcagagagagccggagagggacgacctgggcgctcaccaagggagctctgcagggcgcggcacaaatccaaggcacgcgagagggagagagctgcacagccgaaggctccatggcaggggctggccgacgcaaggggctgggcgccatgaaaaatccggccgagcagagctcggagcttcgcagcaaaggagatggagcaggagccaaagacgcagtgtgagagagagagagcgcagggagaacgatgccgtg

SEQ ID NO: 43237 - DNA, 506 bp, Zea mays
  Peptide Sequence Number=SeqID_86612
gttggcatgatgctggtacctatgacaagaacattatcgagtggcccaagtgcagtggcgctaatggtagtttgagatttaaagtcgagttgaagcatggggccaatgctgatcttgtgaatgctctgaagctgatccaacctatcaaggacaagttttcaagtgttacctatgcagatctgtttcagcttgccagcgccatagctattgaggaagcaggtgtccccaaaatccctatgatctatggaagggttgacgttattgcccttgacaatgcccgccaaaggggaggcttcctgcttagaatcttagatgaacctacaattaaaggtatacctagcagtggatataggattgctgttgactcgtcttctaagcatggtgaagttgacgtatcacatgagcttgcatcaaccacattagcaatgaactatcagggcaatgatcatgattttgtacacacctttggtgtcgcatcgcctaataaagtgtccacaaacttgtga

SEQ ID NO: 43238 - DNA, 812 bp, Zea mays
  Peptide Sequence Number=SeqID_86613
tccaggccaggtccagtcaccgcggcgacacgagcgtggatccgctccgggttccatatgccgcgcgcgtgttggttttcgcacggccggcactggaccacggggtgccgcgccacctactgggcgggggcgggggccgtggtccgtggacacaggcgcggcaacaatcactgctagacttcgcccaagggttaacagcagcagcgacgtcatcatctatatctatgcctcgccaccatcgatcgacggattcgagagtgtcaggaatggatatggacttcacctccccggctgccacttcgacagcagccgcagcgacgacgactttcgagccgcctgccgctgctgtcgacgtcgcaggcccactttcggcggcggcgtggcgccagctcccgttccccccgttcgcggccgccagctcgacggcacccacaccaccctgcaggtcccctccctctcctcccgccgccgccgccgcactcaaacgcaccgccatggccgcagcgcgacaagggccggcgggggcgggagcagacgccgcggtggaggacaggatggacctgctgtgggaggacttcaacgaggagctggcgcgcggcctgtggccggagtcctcggactactcgtcggacgcggagtcggagcccgcggcggcccgcgggtgcgaccctgcgctgcgcccctcgtccagggccggcgcggcccggcactgccgccgccgcgccggcacgtgggtgctgctcatcaggatcttccggaggctcttcgtcatcgagaagaccgtcgccgcggccacggcgagggcgagctga

SEQ ID NO: 43239 - DNA, 1083 bp, Zea mays
  Peptide Sequence Number=SeqID_86614
atggtgtctgtcgtggtgcctggggtgaagggtagcgctctcagcgctggcggtgagattttggcggtcactgccgtcaaggacgaagcgggcactgtgtcccgccggctgagggaggcatcgcagcggctgagtcaagcggccgacttcgccgaccgcgtggcgtcgggggcccttactgcagatgtgtctgccgaagtccagagactttgggcgcagcatgctgacgccgtctgggaaaagtcggccgcggatagcaagtgccgcaagctggcggagaaggtggccgccctagagggcgagaggacggacctccggcgccagctggtggaggagaggagggaggctaaccaggccatcgccaaggcgcaggcggaggccaacttggcgcaggtggagggtagtctcgccagccagcgcgccgaggaatgggaggtgcggttcaacgccctgcaggcccgcatggagagggccgaggcctctatgcgctcggaagttgagcggacgcgcaaacagctcgtggactcataccgcgagctgggcgcgcggactgctgacttgaagtgcccgaccgagaggcgggccttcgcttcctcgagtggctgcaagaagaattgggcgatgaacgcgctgtcccacgaggggtgcagtcactatgaggtcttcgaccgatctaatgaagattttgagtgcgagattttcaaggtcaaagaccctgtggtgaaggactccgcgggggccctctttgaccggatgtggggcccccacggtcgagaggtggttagggagcggtccgaccgggcgagggatcaggcggcgcgtgccaagaacgtggaggacttcggacccctaaacagcgcgcggcccgaagcggaggcgaacccggtggcagccgaggctgaggtcgacccggcaccgcccccggaaaccggcgaaggctccctcgctgcccctgcggctactgtgtccagtggtggctcatcgccaaccgttgtgccgagggtggaggatcccccgaaggcggcgacggagccggcagcggaggatcccttggcggcggctgggtcttcgcaggtggcttag

SEQ ID NO: 43240 - DNA, 801 bp, Zea mays
  Peptide Sequence Number=SeqID_86615
atggcgcctcctattgacgtggccggtctgcgtcctaggttgggcgatgtggaagctcctccgaagccgaggtcgagtctttcttccgtggctgaggtcgagtccgagcccctgggtcgggcgaggcggaggccaccggccgaggccagggcggagtccgagccctggggtcggcccaagtccgagccctgggtcgggcggagcggagttcgccgtcttccgggacttagcccgagtccgagccctgggtcgggcggagcggagttcaccgtcttccgggacttagcccgtgtccgagccctgggtcgggcgaagcggagtttcctatggcgccttcggcagggcctgactgcctgtcagtctcactctgtcaagtggtaccatagtcggagtggcgcaggcggcgctgtccttctgtcaggccggtcagtggagcggcgaagtgacggcggtcacttcagctctggcggctcggggacgcgcgtcaggataaagggcctcgggcgtgccggaaatatgttcgccgctggaggggggcctcgggcgagacggaaatcctccgggctttatgctgatgggggttaccagctgagaattaggagccttgagggtcttaatgccttgcgtaatgctttggctggtctggtcgttccctcatgcgagctggccatagcccgggtgtacggtcaggtcccaagttctcgggctggggcccagaggcacacccaaaagtacctgcgggtgatctgccggacccggtcccctggtgacggggtccgagggctcgatgcctccctctga

SEQ ID NO: 43241 - DNA, 837 bp, Zea mays
  Peptide Sequence Number=SeqID_86616
atggtgtctccggtgagctgcaagcgggtaatccgagtggacgtccgtgccccgttcgttgggggtcggctaggggcccagaggcacgcccaaaagtacctgcggcaactggcgcgctggttgcgtgacgcgtgggcctgggcctccaagctggcgtgtcagaagtcggagaagcgcgtccacctggcgcggttgcatgccgcctgcatggctgcccgccccttccgcccgttggtctgggcaaaacccccggatggggggtacccaccgtctttccgcctcctcgttggaggaacacaactccgtgggagttggtacctttcagccatcgttcggcttcaaggattttcatcagccagcccggctgcacccccacgctggcggtcacccaggatgatgaccaccagttcctgggtggggaagggcaagccgggctgcgatcttggtcccaccctcagcttcaaggatgttcatcatccttgctggggtgggggccaggctgagccggcgctcgacctcccgtgcgggcctgcgggtcaccttctcccgcagcgttcaggggaggaggcgctcactggccctgcgggcggcgcggacttaaacaacgtggggctgatcgacggcggacgtcgtcacccccagcgtgtcggagtcgtcggctgggttcccggcggcccctccggccggagggcggctgccgcgccgtgtgcacgggaggaccacccacgacgccgcgcgctgctagggcagcgttcgtgttctggggtggccctgcttttgcacggggatggcgccctcgcgcagaggccggtgccccactcgtctgggaggatttga

SEQ ID NO: 43242 - DNA, 459 bp, Zea mays
  Peptide Sequence Number=SeqID_86617
atgccacgccgggacggcggttcctggaacgccatcatctccgcctcgtcccgcgccgggcaccctgcagaggcgttctccctcttcgctgacatgaactctcttggcattcgccccaaggatttcacgctggcatcagtgcttgcctgctgtgctgctgagtgccttgacctgcgtggtgcacaggcagcacagcagctacatggtcatatcgtcacaaaggctcttcaacctggccccaaagaaggatgtggtgatgtccacttcggttgtgtcagggtagagttggctgtttgtgggaggatcgctgatgcaaaactggtgtttgatggcatggaacaacacaatttggtgtcctggaatgctatgttgactggttatgtcaagcccatggatctggccggtgctttagatttgttccagcagatgaggcagaggagacgaaggagcttgatgtag

SEQ ID NO: 43243 - DNA, 942 bp, Zea mays
  Peptide Sequence Number=SeqID_86618
tctttccgccccatcgttggaggaacgcaactccgtgggagttggtacctttcagccatcgtttggcttcaaggattttcatcagccagcccggctgtaccaccccgccggcggtcacccaagacggtgaccaccagcccctgggtggggagaagcaagccgggctgcgatcttggtcccaccctcagcttcaaggatgttcatcatccccgctggggtggaggccgggctgagccggagctctacctcctgcgtgggttcgtgggtcaccctctcctgcggcgttcgagggagagggcgctcactggccctgcgggcgggtcggacttcgacaacgcggggctagtcgacagcgggcgtcgccagcctcagcgtgtcgagctcgacagcttggctcccggtgacccctcctgccggagggcggctgccgcgccgtgtgcacgggaggaccgcccaagatgtcgcacgccgctagggcggcgttcgtgttctggggtggtcctgcctttgcaccggtggaggcggctcgagaagtccccgttgccgacgggatcaccgccaccatccgcgcttcgggcctccggctcttgtacttgtcctcgcccctcgagcgtcggcgtgggcgagggcaagattgcagcagcacccgccctgaggcctacgctgctgcagtccggggcagagttggctcaaaaaggaaacctggttggccagagcctagccgggtcgtccgttagcgggaccgacgccggagttgaccagccgaggcctcgggtcgggctgacgtccttggaggacggttggccgaggccccgggatcctcggaccgtgtcgccgtccgaggctaggtcggacctcgccgaaggtgtcgccgatgccgagggtgctgctgctcccttccagcgtcaagacccgagcctgcaggatcggattgtcttgtag

SEQ ID NO: 43244 - DNA, 506 bp, Zea mays
  Peptide Sequence Number=SeqID_86619
cacagtccaatctcctagaggcaggggaacatggcggcgcagtcccgcgagagcgcgacggtgtctggaaagcgccagaagtcgaggtagagggtgcagagggaggcaaggtggaggacgtctacgaggaggcgaggttgacggaggtcgatggtcgacatagtggacatattatacatgttatgtctgcagttgagactgaatcccctaacggtgataatggagacgcgtccacacaccacggttctgcctcctgcgacatcctccgctccgctcattcccaccgctccctcccacgcccgcgcatggatatctgtcgtgccctcgcccccagagctcgcgcgcgccctcgtcgctcccggccgcaccatctgccgatgatgacgagagcccaaccgggtttggggtgttctactgtgaatgctcccccatcctctgatccaagcgaagatggtgagaagggggtcgatgaaggactgatgatccctatcctgattcctgaataa

SEQ ID NO: 43245 - DNA, 111 bp, Zea mays
  Peptide Sequence Number=SeqID_86620
atggggtccaggcacagtgcttgctctgccgaggctgggtgccgaggtaaagaagaaggcgtcgaggtggatctccaggagttccaggatgttgatgagttcgaggattag

SEQ ID NO: 43246 - DNA, 654 bp, Zea mays
  Peptide Sequence Number=SeqID_86621
atggacgactacggcaacgcgatcgtcgtcacgggcacggcggctccgctcaaatacaactgtcgctccgtgtcgccgccgtcgagcgtgtcgtcgtcgtgctcgccgccaccgcctcctcctcctcctactcctcctgccgccgtccaggtggtggtgggcaacgtggcgccgaccgtcgtcctgagcccgtgcgcggcgtgcaagatcctccggcgccgctgcgccgacggctgcgtgctggctccctacttcccgccgacggagcccgccaagttcaccacagcgcaccgcgtcttcggcgccagcaacatcatcaagctcctccaggacttgccggagagctcgcgcgcggacgcggtgagcagcatggtgtacgaggcggaggcgcggctgcggggacccggtgtacgggcccgacctgcttcagcgcgcaggcgcagcacgccaacaaaaatagccctcttctgcgtcgagatggccaaccgccgcggcaaccggcagcagcagcagcagccgtcgccgccgacgacgacggtggacggcggtggcggaagcgagttcggcggcgcggcgtacgggcagacgttttacgactcggacgacctggactcggccacgtggccggatcacgaagcccagctctggacctag

SEQ ID NO: 43247 - DNA, 450 bp, Zea mays
  Peptide Sequence Number=SeqID_86622
atgactgagaagggtagacctttgcagtgtatttatatctttccttgtctttttcaggacaagcctcagccgccacctgagggccgtcttcctgatgccaccaagggttctgaccacctgaggcaagtctttggcaagcagatgggtttgagtgatcaggacattgttgccctctctggtggccacaccttgggaaggtgccacaaagagcggtctggttttgagggggcctggactacgaaccctttggtctttgacaactcttacttcaaggaacttctgagtggcgacaaggagggccttcttcagctcccaagtgacaaagccctgctgagcgaccctgtcttccgccctcttgtggagaaatatgctgcagatgagaaggcattctttgatgactacaaagaggcccacctcaagctctccgaactggggtatgctgatgcttaa

SEQ ID NO: 43248 - DNA, 464 bp, Zea mays
  Peptide Sequence Number=SeqID_86623
acgacggactcggcgtagcacgaacagggcaacccgggcagcgcaggcaaggcggcctggcaaagcacaaggagtgtgcggctgcccggccgaggcgtgggcgcggcggcccggccatggcgcaaggcagcccggcgagctgcggcctgccccggcgcatgagcacttggtcccggcggccctggctgctcggcgcacgcgggcaggcccccgatggcacggcacagcgcgggcgcaggctcctattcgcgcgggcgggcacacagccccagcaccatggcactggcatgggtcccactgtgtgcgtcgtcggcacggcgaccgagcgtgggcgcagaggccacaagcagcactacacatacatcatcagtgctacaaccgagaactctgtttatatacgggtgaaggggtgcgttctcaagagggtgtcccttgggaattatctgtcgcactccttgaattga

SEQ ID NO: 43249 - DNA, 468 bp, Zea mays
  Peptide Sequence Number=SeqID_86624
atggcgccgagctccccgtcacccaccgcgcccacacgcgtttctgggcggaagtgcgccgccaaggccgaggagatccatcagaaccaggaggaggaggtcgtggtggcgtcctccgccaagcgcagccgcaaggccaagctggggaggaagaagaagggggacgccgagatgaaggagcccgtggaggacgacgtgtgcgctaaggagtccgacgaggaggagttggccatgggcgaggaggaggccgaggagcaggccatgcaggagaaacagaaagaagaagaaaagaaaagaggtgaaaaagacttggctgtgtacagccaagacccagctcagtctggcacaccggactgtccgggcgagagactccaagttgtggagattcctcgcaaacgggaaaagatcaaagtaaagaagaacaccgtggtattcaagttgatcattggatcacttgagaggagttga

SEQ ID NO: 43250 - DNA, 684 bp, Zea mays
  Peptide Sequence Number=SeqID_86625
atgggacccgttcgcagcaggagggtatggattcgaaatttcgctgtcacccgcgactccgcgagggtgcccgccggaaagtgcgcggcgctttcggccattggcgaggatggcggagagcggacgagggcgagaatggtgggggctgccgtagagcgccgcgcggcccagaggccttacgttaggctccgcccgctggctcacatcacgggcagtgggccacgtggcagcatcgagtctccgcctgggcgggaagcagaaaatcccgggaccctgctgagagtgacccggaccccagacagagaggtccgggacccgtgccggggaaatgacgtcacccccgcggaggtcctggactctgcccggaggtccagttcgtatatgcaggggtccggtactttcccatgggggtccggacccatcactgataccttggagtgtatcatcttcttcggccacgtggtggccccggagccgtccacgcggtggggtcgggtgttgtttatcgcgcgtctagagatagacgcgcgggcatcgcgccttcatactatagtaagggtcaccgccaacccgccttcggtcataccgcctgccacgtctgtccccgtagctggtgggcacgtggcccccacgcccggcggttttgtcgggccgcgcgcggggcgtctcgttgccgccgcctaa

SEQ ID NO: 43251 - DNA, 609 bp, Zea mays
  Peptide Sequence Number=SeqID_86626
atgtcatcgaatataccatcggcaacgacagaagacgaggggggcgcgcccagcgccatcctaccgcccattctggaggagtcggagctggaggagcgtaccaaggtcgcgtcctgccagtttgcctcggagcggtccgagcttgagcaggagcgcgaggacctcaaggaggacctggggaaggtgtttgaccgagagcgggaggtgacccgggaggagaaaaggctggccaagaagaaagagcacttggacctgagggaggcagtcaccacagaattccatgataagctgaaaacctataatgtgatgctggagaagcaacaggatgagcagaccgcgactgaggcggctctgcaaaagctgcagcgggagctcgatgacagggctagaaacatctccctcgctgaggaaaacctcaaggcgatggatgcctccctggaggagcgggcgatgaatctcgtccggcaggagaaggacctcgcctggagggaggaaatgcgggaaaggtgggaaacgttactggccgaacatgagcttgaggtggaggagaaggagaagaaactggaggagaaggagcggacactggaggagcgggtccgccggttctag

SEQ ID NO: 43252 - DNA, 462 bp, Zea mays
  Peptide Sequence Number=SeqID_86627
atggggggaggagcgggtgttgcccgtggcgctggcagctgcagcgtgcccggtcttcggacgcgagtggcttcggagccgctcgcggcgccggcgtccgccacggcagctggaagaggttcttccgccggcgcgatagccggggccggccacgggctgacctccaacttctcggccttctgcccgtccttgcctcacaagttttggcatgggcgggggcctcctggcagcggcatccaccctgaggtcagcgttgccgctgtttggcccccggagcagaagtcgtcgtcgtcgccgctgctggagcaggatccgctttccgaagtagtcaagaagcacgaaagaaattctgctaaaaagagatctttcttcgaggaaaaattcgacgcagagagggtctccccccttctagcccccgagggagggtcgggcttcgccgaggcgaggccgacccttccttga

SEQ ID NO: 43253 - DNA, 300 bp, Zea mays
  Peptide Sequence Number=SeqID_86628
atggagcggcggagtgacggcggtcacttcggctctgccgggggcgcgcgtcaggataaagggttgcttcttagcgaagccaaggcctcgggcgagccggagatgtgtccgccgttaaaaggggggcctcgggcgggacggaagtccctcgagctttatgctgatgggggttaccagctgagaattaggcgtcttgaggatgatgatgaggatggttatgatcatgcttatggtaatggtaaacaaggcgtcgaggcggatctccaggagttccaggacgtcgacgagttcgaggattag

SEQ ID NO: 43254 - DNA, 414 bp, Zea mays
  Peptide Sequence Number=SeqID_86629
atggagcgcagcaccatatttcctctccctgatgctcgcaacccacccatgtcttgcgtctggagttccgccgtgccgagcttcgtcccgccgtccacggtcgccgtgaacgcacggcccggtgctcgatccccggcgaagcttgcccctgcgcggcggcccatcgcagcctgctcgtcgcccctgcgtggtggcatgcggctagccagcgcgcggcggcccgctagcgtggcctgctcgcggctagcctggcctagccctgcgcgacgcttccctgcccgatgcgggtctttgcagcgtgggaaagtaggcctcgccgttgggccccaccaggcgatcgacatcctcggccgagttttcccgtggcggttccgttcgtatgcgcggtcgtctccttccgaggaggatgaagag

SEQ ID NO: 43255 - DNA, 450 bp, Zea mays
  Peptide Sequence Number=SeqID_86630
atggaggaaaacgccagaattatatgggctggggatgggaggttgcgagcgaggcgagcgttgagagcaagacgggtgggcctacacgaagcgcgggagtcggcggtagttgcgggctatgcgacgactgcgggatggcgacggcggttgcaggcgatgcgcaggatggcagcggttgttggaggaggtctcaacgatggcaggcgcggcaagaagcaggatgtcgccgccgtgggagcaggagccaccagcgagggaagacaggaggcacgtggcttggcccacgtcgttgtagaaggccttgtcctagtacaacgggtgggcggagaccggcggtcagcgaacccagaagttcacgaacgcgtcgttgtaggcctggcggtggaggtgctctggctccagtatgacatcgtcgcaatcaaagatgagggcctcgagggacgctggtga

SEQ ID NO: 43256 - DNA, 1059 bp, Zea mays
  Peptide Sequence Number=SeqID_86631
atggctgccaagggcggcgccacgccgtcccccggcggcacggggcccgcggcggggaacggccgcctcttcacggtggggctagtcacggcctggtactcctccaacatcggcgtgctcctgctcaacaagtacctcctcagcaactacggcttcaagtaccccatcttcctcaccatgtgccacatgtccgcctgcgccctgctctcctacgccgccatcgcctggctgcgcgtcgtgcccatgcagctcgtgcgctcccgcgtccagctcgccaagatcgccgcgctcagcctcgtcttctgcggctccgtcgtctccgggaacgtctcgctgcgctacctccccgtctccttcaaccaggccgtcggcgccaccacgcccttctttaccgccgtcttcgcgtacatcatgaccgtcaagcgcgagtcgtggatcacctacctcaccctcgtgcccgtcgttactggagtcatcatcgccagcggccactacatcgtccacaaaaagcacacaccaagggatatccccttgtatgtcccatgtgaccttatccatcaccaaggcaaaaagggcgagcctagctttcatctgtttggattcatcatgtgcataggagcaactgcagcaagggcgttgaagacagtactgcaaggaattcttctgtcttctgatggggagaagcttaattctatgaatctgttattgtacatggctccaattgctgttattttcttgcttcctgcaactatctttatggaggataatgttgttggcatcacaattcagcttgcaaagaaggatttcacgattgtttggttgctactgttcaattcttgcttgtcatattttgtcaatttgaccaatttcttggtgaccaaacatactagcgcactgactctacaggttctcggaaatgcaaagggtgccgtggcagtcgtcatctcaatcatgatattcaggaatcctgtgtccataacaggaatgctcggttacactctcacagtttttggcgtcattctttacagtgaatccaaaaagcgcagcaacaagccgtga

SEQ ID NO: 43257 - DNA, 651 bp, Zea mays
  Peptide Sequence Number=SeqID_86632
atggacttccaggtcgtcgtcctcgccggaggcacctccgagaaactctcgcccctcgtttccaaggtggacgttcccaaggcgttgctcccggtcgccaatcgccccgtactctcttacgcgctggacctccttgaggccagcgacctcaaggacctcatcgtggtggttgaggggcaggaggcagcgcagcttgtcgacgcttgggtatccagtgcgtacctggatcggcttcgagtggaggtagttgtggtttctgaagaccttggaagtgctggtgcattacgagctatttcaaagcgactgatggcaaacgatattttggtagttagcggtgacctggtaacagatgtgttgcctggggctgttgctgctactcatagaagaaatggtgctgctgttactgctttactatgttctgttcctgtcagtggtccttcagacacttcttcttctagtgggaaagataaagctaaaaagccaaatcgtttgaacatagtaggactggacaggagtaaacaattcttgttacatattgtgtcaggaactgatgttgaaaaagatattcaagttcataaaagaaaaaatacaggctgttggtcaggtaaggcacctattcctatgattgaagtcagctacatttgtttctga

SEQ ID NO: 43258 - DNA, 639 bp, Zea mays
  Peptide Sequence Number=SeqID_86633
atgccggggaaggcgaactgttgctgcccagctaggatgcaacatttcgtcctcctcctcgctttcgtggcagaggacgagagcgaggacctgccggtgcgctttggagcggcccgcgctcgcaggtgtggcgttggtggaggggtggacgccaccatcggtgctgacgtggtggtagctggagaaagcttccccaccgtcgaagctgtcagcgctgcctacggaccgacctccggctctttggctttaatgtctgaggtcgctggcgagtcgcccggagcttgtcgcctcgcaggctacccggtgtggaggatccctcggccgctcttcgatgagccgaagccggaggcagcggtgtcagcacggacagaggcggagttggctcgaaaagaagacttcgtcagtcggagcctggccgggccgtccactggcgggaccgacgccggagtcgagttgccgaggccacgagccgggctgatgtcctcgggggatagctggctgaggctttggggtgtccggccgagcttgtttgctcgagccggattcctggagaagaccctggcggcgatggcccgggcgcggcgctgctgtcgtccttcggagtggagatcctccgaccgcgttgccgtccgaggctag

SEQ ID NO: 43259 - DNA, 318 bp, Zea mays
  Peptide Sequence Number=SeqID_86634
atgggcgacggtatgccctcatctcccctctcttctctccctttttcttcatctcttctcttggagcaaagcacaaaaggtttaggcaaacataagtgtatattcaaaaagctagggttgggttctatagacttaagagaccaggggcggccacccctctgccccacccttaagaccaacactacttcggaggcgatggaaatgccgagtgcaagcttggacacaacagtcaacgggcgctaccacaacctcggaggtcacaacgtcgacggggaggagggcacgacgaaaatagaggaaggtcgagaggcggtatga

SEQ ID NO: 43260 - DNA, 1257 bp, Zea mays
  Peptide Sequence Number=SeqID_86635
atggcgcttgatcgaagcattactcttctgttcgatgacgtcgtcgtgtttctcttagatgtggcatacaacacgaagaagggagacgatgacatcgaatcttcaaagccgaaaggtggtggctccttcatgccaaggcacctcaggccaggtgatactttcattgcttttgctgggcaccgcattggctacaaagagccatattcttctgctatgttgtgtaaatcatatctgtcactttcgttcttgtcctatgtcgtggatacggtgccatcaatttcgatgggtgttggcctaccgaaccagaggccgcgcaacctcgcccccgcctcgacgcccagagccgcgcgcaagcccgaccccgtccgaccgcgcgctgccgaaccaggacgctgcgaccgagccacccgcccacgaccgttcgtcttcgtcgttaatggggcttcaatgtcgaccgtttctccctcctccattacctccctctcttcatggccgccgcccgccattaatggccaccgaccacatccctcccctcggcgtctctccctctccctcccgctctctataaaagcccggccacaccatggagctctccctcccagccgagccctctccctttctcccactgtcgagctcgctctcttctcgcgcccttcttcctggccgagaccttgccaccggagctcgcccacaccgcctcgccagaactcgtgctcgccggccgggaccgtctgcgcccaccccggccacctcgaccgagctcccttccgctcctctgcctccgtgaccgaccaccaacaccgttgtgccgagcgctcgtcgctgctctacgccctcgtcgggagccgaccgtcgcggccgtggccgtcgttgcccgcgccggagcttgcccgtgcaacacccggtgaccgtgcccacaccattcgtcaatcgtccaccatccgtggagcctcaccgtcgcgccccaccgtccaaacgcatcgtcggagttacgccgttcgtcatcgacgcgatcgcgcagcacaccaactggaccgtccgcacgccgttcaccgcccgtggaactcgccggagttcgtctacgccgtcgccgtccaccccgctgtccgtggaacctcgccggagttccatccgcgcaacacgacgaccgcgcccgttcccctgccgtcgaaccccctgtcccgctcctgctcgtcgacgcacatgagcccctgtcgtcgaaccccctgtcccgctcctgctcgtcgacgcacatga

SEQ ID NO: 43261 - DNA, 222 bp, Zea mays
  Peptide Sequence Number=SeqID_86636
atggaggccgtggatccacacacctaccgatcggacggcgccaacgatgccaacgatgtggggttgggggtgccagaggctggagtcagccagtcaagcacgagcaccgatgccagagccgttgtgtgtagaggcgctggtggacagggttcgggggaagctgcgacgatgaggaggatgtcatgttgtgggagttggagaggacaggtacaattcccctag

SEQ ID NO: 43262 - DNA, 702 bp, Zea mays
  Peptide Sequence Number=SeqID_86637
atgaagatgttgtgtcacaacatcaccgtcgtcgcccaaagccacaggggtctagcccactcaagtgggtctccacccccatcaccttcaacttctgattgtcctgacaatatggctaggcctagagtcctcccagttgttgtctccccaatcgttgccaaagtcaagttacatagggtccacattgatggtggggccagcctcaacatcctcaccacatatgcctttgatgagctacaaatcctctatgataggctaacccttgggggttccttctcaactatctccccaggttgtgtctacttgttgggacagggttgctcagcaacccccttggacaccgcatgcgttgagaacaactccaattcaagtggggaggatgatgaggacatccctcccatacaaacaatgtatggaccgataacacgagcacgtgcacaacaactaaatttccatgttcgttctaacctagttaattgtgttttagagcttacgcatggtgccatggatgttttgatgattagaaaccttggagatgaccagaaaggtcttgggaaagaacaagatgtcaaggaggaaaagctaggacgttcacaacaagagaaagttaggtccgactcaacttcgtctccacctcagactctaggactagtctgcactaaaatggacgcccaggatgcatacaaacttcgattaggttag

SEQ ID NO: 43263 - DNA, 762 bp, Zea mays
  Peptide Sequence Number=SeqID_86638
atgagctgcaacggctgccgcgtcctgcgcaagggctgcagcgacgcctgcgtgctccgccccagcatcgactggatccacggcgcgcagccgcaggccaacgccaccgtcttcgtcgccaagttcttcggccgcgccggcctcgtcgcctccctcgccgcagtcccgctgcaccaccgcccagccctcttccggtccctgctgtacgaggcctgcgggcggaccatcaacccggtgagcggcgccatcgggctcatgtggacgggcaactgggacctgtgccaggccgccgcggacgccgtgctccgcggcgagtcgctgcgcgcgctctccgccgtccccgccgcgttcacggaccgcgacatggacgggctctacggcagcgtcggcggcctggtcgccgccgccgccgccgccgcgtcgcccgagaactcctcctcctccgcgccgtccacaacgaagcgcaggaacgcgaacggcggctccagcaacaacgccgtccctgcggccgcggcctctcaccaccgcccgccgccgccggctgctgccgctgctgggctgctgctgcagtcgtcgtgccaccagctcgacctctgcctgacgccagcgctgtcgccgccgggcgcccgggccgcggggctgcgccgccggcgcgtccgacgagtactcgggcaacgaccacgtgcgaggaccagaccggtgatcacggacacggagagcccaggcctccccgccgctgctaaacctcttcaactgaactga

SEQ ID NO: 43264 - DNA, 267 bp, Zea mays
  Peptide Sequence Number=SeqID_86639
atggcggcggccgaggtgtgtatgcagcagcagctgagaaaccgatggatagatgtatgtgaaggacagcaggacaggatcctccgtgctctgatcccatctcccggcgtcttgctggacctgccacgccatgaggggagaaagggtaacacacggacgcagctgcagaggatccgagcatgtcagtgcggccgttttggcggggctctgggccgcggaaggacaggaggatgtgaatggataggaacaaaggcggaggaggagtga

SEQ ID NO: 43265 - DNA, 96 bp, Zea mays
  Peptide Sequence Number=SeqID_86640
atgcagccaggctccaatgattgtggcttttttgtcaccagcttcatacgatgctacgactttgatgatggtgatgtatcagaaattgttgtaccg

SEQ ID NO: 43266 - DNA, 1589 bp, Zea mays
  Peptide Sequence Number=SeqID_86641
atgccgcgcacgaagaatgtgtcggcgccagggggaggcgatgatgaggatcctcgttgccccttcaggcaggtcaagggaaagaccgtgtacttggaccagcaggaaggccgcaagaagcggccgtgctacagcggcacggagctcagatgtctgcacagattgctctgtgagttcaccggcttctggaccttcctgcatttctgcttgccgctggcctactctgaggtacacctctcctatatgcctagccttctcactcttttgactaccagcggcaggtatgttgaggaatgggtccgagtcttctacgctactgtatggatcgaccctgatcatcactggatgagattccgttttgagcgagaggatgtcactattcatgccagccagattcgccagctctttgaatttcacgagtcatcgactcgtcttcacagcttatgctatggcacctctgaccctcctcgtcgccctcatggcggtgttgctcctagtacagcccacgtcgcggctctgttccgaccgccctttcttagatgggtcgcgacgctctccgacagacttcaccacaacaaaaaaaagtttctatatcagcttatgagacagacacttctgctgcgaatggggtacagggaggctaccactcatatcctgctctggctccttggtgccctggtctctcactcagagtttgatgttgtggatttccttatttgtgagatcgaggacaccgttctgaatggtctgcgtgctcgtcgacagctgccttatgctcactacctgtgtcacatttttgctcagctgattcggcgtccacagttccagggcacacttgaggcctcacgcctcgtctttgggtcctaccgtccagcacctgaggatcctgtgccagcacctgctccagacgcagcagttgatgatgatgatgatgatgatgatgattttgggattccacctccgcctcctatgcctccacgctcacatgatcatgaggctgggagttctcgtgctacccctgctgcccctcctgccattgaccctgctcttgcttcgatcctccagacacttactcagcagcaggctcacttggcagccgagcagacccgtcaggcagtagcccaccagcagttgtccgagagaatgctctcgatgtttcagacgattcaggacaggcaagattctcttcagcagcagcttcttcaggaccgggctgagagcagggccttcatgactcttatgctacaacattctggtatatcgattcccccggttcagtcagtaccgcctccacctcttcacgctcctgttgtgccagcgattcagcctggaccccctctttcttcagttggtccttcttcctctccgctccggccggtcaccctggctttcacgtcaccggtcttcagccccatctgccctcagccgccagtgccaccatcttctgctattcccactactgctgtggcggtgtctgtgaccactttagatccggcagcccctgcagcgcagcctcagtccgagtcagtaccagctccaacttctatagcagatcctagatccgagactgactctgacccccagctggc

SEQ ID NO: 43267 - DNA, 480 bp, Zea mays
  Peptide Sequence Number=SeqID_86642
atgagggcgacgaggagggtcagagtttttaaagaaccgaatttctacaagaaccgaggaaccgaaccgaaccgaaccgaagaaccgaatgcccaggcctacctcagagtcagcaccagcggcaagcagaaatgcaggaaggtccagaagccggtgaactcacagagcaatctgtgcagacatctgagctctgaaaaaggactcctgaatacgggtgctgaagaggtcaaacaaccagggatctgtagccagaggtcgcacctcagtctcatcatgctcccgaaagcgagcaggtgggataggtggagcggaaacgggagcgggaggaggagcagtggaagctggtgtagtggaggtggtggatggcgcagcaggggtgacgggagcaggcaaagtgggtggtggagtggaagcagtggtgggagtggaggagcgaggccgggaggcgaggcgatgaactcggtacgcaatctgatctga

SEQ ID NO: 43268 - DNA, 1119 bp, Zea mays
  Peptide Sequence Number=SeqID_86643
atgcaccagcccagcagcgaggtgttccagctcttccatggcctctgcctcatggcaaatttaataaaagggcacaagcagcttgatttctttgattcgaatggttacccatgtcctatgagaaggaacccttcagaccacttcttgatgatgataaacaaagatttcgagagaagtttggcaataagaaacgaagcattatttatgatgaaacagcagggcgcagctttcacaaagaaaaggcaagctactttcttgaccaaatgtgtggtgttaaccaagagatcagtaatcaacatgcatcgagacatgggctactactggttgcggttcggtatttatatagccatctgtgtgagcattggcaccatcttcttcaacgttggctatggttttgcatcgatccaagcaagagcgtctatgttaatgtttacatcaaccctattgacaatgatgtcaatcgggggattcccctcgtttgtcgaggacatgaaggtgttcagaaaagagcagctgaatgggcattacggtgctactgcatttgtcatcgctaacacggtctcatcaacactgtacctggggatcatctccataataccgggcgcagtatgctactacttgaccgggctccagaggcgcttggaccacttcctctacttcgcggcggtgctatgggcttgcacgatgctggtcgaagggctgatgatgatcgtcgctgcccttgtgcctgatttcctgctgggcataattactggctcagggatacagggcctgctaatgctcaacgctggtttcttcaggcttccacacgacctccccaaacccttgtggaagtacccgacgtactacatctcctaccacaagtacgctacgcaggggctctacaagaacgagttcctaggtttagtgttcgatgatggtgtgttaggaaaggggctcactgttagtggtgactatatactgaggaccagcttgcaggtcgagatgggctactcgaagtgggtggaccttgcaatattgcttgccatggtcttcatctatcgggtccttttcttagtcactattaaagtaggtgaggcggtcaaacccatgattaaatgcatgtcgattaaagtttaa

SEQ ID NO: 43269 - DNA, 318 bp, Zea mays
  Peptide Sequence Number=SeqID_86644
atgcggctcatgacgtggaacgacgcggcgctgtcgagcccgctggtgggctcgtcgaggaacaccagcgcccggcgacgccagcagctcgacgcagatgctcacgcgccggcgctgcccgccgctgatccccttgcacacgcggccgccgatccggtgcccggccaccgcggcgagccccatctgcttgatggcgcggtcggcgcgctcccgcttgtcggccggcggcaccgagtccggcagctgcagctgcgccgagtattgacggcctccgtcaccgtcagcgtcgccatcagcagcgtttcttgggtcacgtag

SEQ ID NO: 43270 - DNA, 1263 bp, Zea mays
  Peptide Sequence Number=SeqID_86645
atggcgccattgatggccgttcatggcgccggttgccgcgcctctccctctcccggcgtcctccctctcttctctctatttaagctcgtcgtgacgcccgtggccgcctcgacgtcatcccctgctccgttcgacgacccgaggccgtccctgcctcccctgggccttcgtgctcgtgctgtgccgtgtcacgcgccaaagccgtctggttgtcccttcttcgtgcccaaagccccacggtcgtggctccctgcttctctgatggttcgcactcttcaaactacccgcgtcaacaccagctacgcccctcagccccggcaggtcccggtctacccagtggtagtcgaggaagctccagcgaatctccctcccgtccgagtagagaacatgatcaacctggaggacagctcggaggagcagctgccgacccccaccccgttggccgagtccctagccttcgcagctgggtcagcgacgtcagcaccagccttccaagcacctgcacctggaggcgacgaccccgacgactccggagacggtgatgacgaggatgacgacgacgaagacgatggagaagacggacacatcaacgaggaagctgactacgcccagcaggaccacttcatggggattggttcagttgtcgaacattacacatcaatgttcgagacaggacacatcccaaacctgctgcaagcagtgctgcacgagctaggagcctacgcccgccccctgtacgagacgaggcgagtgagcgagcctccccgggcttgctattacatcactcgcatccatgtcagggtgatggatgcaggtgacaggggattcaggactctgtgtgctcacgagtccctgataccgctgtccacctacgctgcctcggtcagcgatgctgcccgtcggaccctgtggtcgcttagccacacctaccggcagcagctgcagaacacgaggttcaggcaccttcctcagcgcctacgtggagagagccagaccaacattgtcccaggtgaacctggtgaggatcgcctcaacaccctagctggtgtagtggccggtctcaacaccgacctggacagtgccactctggacctctacagtgtgcacttggagctggagaatgcccacgccaggattgcagccctggaagcccaactgcaaggactgaatccgccagaagctcaggtccccgccgtggcgctgtctcctccccgcaagaggctgcgctatggagagcccggatcagtcactaggctgctttag

SEQ ID NO: 43271 - DNA, 492 bp, Zea mays
  Peptide Sequence Number=SeqID_86646
atggctgaagggtgccaacccctgggaggttgtgctcctccaacagcagcaagacaaaggcaacgcgggtgctccccatccgggggctcagaaggtggaagggcgcgatgcatgaagggagtgcgaagatatggctaccgcccgggggatcaccccccttttttaaaggtggccctccccactcgcgtcctcaggcattgcggaccaagtcttcaccaacatgctccagggccctacccctatgacacgggggctgggtcccacacggaccgggaaaggggatatttcgaaagggatccttctccacgaaggaagcgggccctgagccctcctactgatcaggggttcgaaggctggcccctcggaagggttcgacagccgccccagagcactcgggcttcaggctcattactgatcagaggttcgaaggctggcccctcggaagggttcaacagccgcctcagagcactcaggctctgcgcccactactga

SEQ ID NO: 43272 - DNA, 336 bp, Zea mays
  Peptide Sequence Number=SeqID_86647
atgaaaggcattaagacctcggaggagtcaaaccactcctccgaggcctcgggggctacacccggcgggtgcgctcgtgcacacccactggaacaaagtgtaaccaagaaagcctcaggcacaacaggaagctccgcctcgcccgaccttgggcctcggcctcaggaggaggtctctgcctcgctcgaccctagggctcgcccgccgcctcggcctcagaaggtggtctccgcatctcccgaccccagggctcgggcctcaacctcgacctcggaaggaatcgcgttctcacccgaccccggcctcggcctcaggaggagtctccgcctcgcctga

SEQ ID NO: 43273 - DNA, 330 bp, Zea mays
  Peptide Sequence Number=SeqID_86648
atggcacactcaggctcaaccaggccaaggcctcggtcatcccggcgccaacatgaggcgtcggcatcaatgcgctctccctcggtgagggccgcgctgactgaggacctacgggtggagctcaaccaccgacgagcaggcgaggacgccccagtctctatggagaggtctaatgacctatgggcagaactcaaccgcagacgtgcgagcaaggatgcccgcgtctctctagagagggcgcgtgagcgccgacaaaatgtcgagggtcaaaacctcgactacaacttcgctgtggtgcaaccgcagaccccagcgggtgcctggatctag

SEQ ID NO: 43274 - DNA, 573 bp, Zea mays
  Peptide Sequence Number=SeqID_86649
atggcccccggggaggccgtggagctaggagagtggcgtagcaactctctggctactaacagcgcccccaggcgcagccctagacgtcctggacgtttgtgcgggagtgtgctgccacgcagagtgcacagtcgcgaccacaacaggcgctgggaggttggtggcccgcggtgtggaagaggcagccgcctcttccaccatgaagtcctcgggcaagaaatcatggtgcttgatgatgtggaccatggcatcgagcagaagaacaacattggcgtgcagcggaagcttccctggcaacgtacgagtgatgatgagcacagcgtatgccgcagcacgggcgtacttcctgccaccggaatggacaggcacgccgcctacaggatggcctggtcgctgcccgtcagcagagtggacagggctcatttaatgctgaggcggcacatcgcctgccagtggagtggacatggctcattaaataccgaggcggcacatcgcctgccagtggagtggacaggcggcgcggcttatcctcaattaatgcagaggccgctcaccccagaggccttacgttag

SEQ ID NO: 43275 - DNA, 237 bp, Zea mays
  Peptide Sequence Number=SeqID_86650
atggcagacgaagccatcaggcgaaatgaagaagagtctcatcttgcctcagaagaagcaagaaaagctaaagaggccactgagcgtgaaagacatataaagccatacaaccctgaggccgatccagccctgaagggtactctcgatgtaatcagaagagcaaatgaagcaattgataaagctgtaaatagacttctaaacgaagcagctgagagagtactgaaggaggatgattag

SEQ ID NO: 43276 - DNA, 519 bp, Zea mays
  Peptide Sequence Number=SeqID_86651
atggcgtcttgcattagagtggtacacgaaggaatagaaaccaaaattgttgtgatattgttccttccccactgccttcgtctgataagacaattcatctatattacagaaacaatcgacgtccggttccaacccctggctcctcattgcccaaatgaaaaccctgattttgatcaaagcttcaggggagcttcgtcaccagaaaagcttcaacgtaactctagagaagtacgacgaagcaaacttcatcacggtgaagcaggaggacgacatagggagaaggtgtcattcaagttattgaatacaaatgacgatactgtccttgtgacatttgtaaaccatagtcagggacgcaagctaagacgtccatgtctctcccaccaaaaactgttgcccagtaagatatccgagggctttgacaatgccctcttcttcattggattcctccacatcaagctatttttccatgatatgtttgatgttgaagatcgaccttttcctagtcctgtttcttggtaa

SEQ ID NO: 43277 - DNA, 612 bp, Zea mays
  Peptide Sequence Number=SeqID_86652
atggttgccccgcctcctcctcctgcggcggggaaggtgatgggacaggcccagatgctgcccttccgccatggagggaagacgtcgtcgattccgccgccgtcgggcgggctgacggccgccattgtcgttgtcgcgcggcggaggaaggagtaccatgtcgtagctgccgtcgagggacatgaactcgagactcccaaaacggagcagcatcccgagctggagaggttgctggagactacccatctggagcttgacaggaagctgttcgtcaacacgcagcaggcccctacctgggggctgagaaccgccgtcgtcatgggagcacgcggggtgccatcattacccgtttaccggggcaagccagatgggacgccgtgtggtcgatccgagcccaaggtcgggcgaggcggcgactcctccgaagtcgaggctaagtccgcgccctggggtcaggcgaggcggagaccgccttccgaggtcgaggttgagtccgagccctggggtcgggcgaggcggagaccgtcttccgaggtcgaggttgagtccgagccctggggtcgggggaggcggagtccgtcttctgaggtcgaggcgggggccgagccctag

SEQ ID NO: 43278 - DNA, 1560 bp, Zea mays
  Peptide Sequence Number=SeqID_86653
atgccgcaccttctcgactgtggaaccggtgccgcaactcgaggcaaccctgcgcatggcccaacagtgccaaccaagcacatcggtcacaggtcagtcagccgcgagagaaggcacgacggtcgatatgaccaaaagtgggccggcagtaatggcggcggcaggtgggtggaagcagcagtcaaatcatctgcaggctcacgtcccctcctggagcagcaggggagccctctcccacggcgtgaagacgacgcgcccgtgtcccgttcctcgaacggctcgcgcaacggctgccccgcgaaccacccgtcccgtcgcattaactctgcggcagggcaggcgacacctttggcaaggaccaggaaaggggatactctgaaagggatccttctccgcgaaggaagcgggccccgagccctcctactgatcaggggctcgaaggctggcccctcggaaggccgcctcagagcactcgggctccacgcccactactggtcagaggttcgaaggctggcccctcggaagggttcgacagccgcctcaggccactcgggctccgtgcccactactgatcaggggttcgaaggctggccccccgaagggttcgacagccgcctcagaacacgcagagcgagggatgactctgggtacatccgatacatggccgaggctcgggctacgctcccgaggcaccataggaagctccgcctcgcccgaccccggggctcggcccccgcctcgacctcggaagacggtctctgcctcgcccgaccccagggctcggactcaacctcgacctcggaagacggtctccgcctcgcccgaccccagggctcggactcaacctcgaccttggaagacggtctccgcctcgccccgaccctagggctcggactcagcctcgacctcggaggagtcactgcctcgcccgacctttgggctcggacccgaccacgctacagggggggctcaagtgctcctccgacggccacgacatcacatgcacaggccactaacacctctccgacagccacgtcggcatggccctcgtacgaaaaggtggccgcgtgggaggacgggctgacgagcaggctctccccctctctcgcgaatgcttacacccgggagcagaacttcggctccgacgacaccttcgcgatcctgccgcccaggtccgacttcgccgttcgttgcgtgtgccgcgccgtgcgattgggggcctggccacgggtgccattgccacgtgttgtggccccgctggcataccatgaagcatcgccccgccgtagcgcctgctcactccctcaacgacaccgtcggctgtctcattcgcggcagggattgagggccaccgctttgggggacttcttcagcgacgacgtatgtggcctgggaatcacgccagtgaccaggaggggtggaatttctcaccggtgtgagaagctcgccgcgggatacccccacctcgtgggcagagactcttcggccgccgtcgttggtaagctcacccccgaccgctccgctttcatctacactctgcctggtgtcaattcgagctag

SEQ ID NO: 43279 - DNA, 96 bp, Zea mays
  Peptide Sequence Number=SeqID_86654
atgaatgcgcgcggacgacttggttctgacaagagaaggacggcgggtaacatcttgatcaatgggcgacgagagaaacttgcctttggaacatct

SEQ ID NO: 43280 - DNA, 555 bp, Zea mays
  Peptide Sequence Number=SeqID_86655
atggcagcctcgccgctgccgagatgggcgccgacaccaagcccgaccagaccactcagggtgtcgagcgccggcggccaaacagccgtgtcttcgtcatcatggagctgggcattctgccgctcgttcatcggctccgccgtcgtctacccgccgtggaggcgctctacaccaccgccaccgccaccgccagcgccagcgggtgatccggcggcggccaatgctgctgcggacgatggtcgtcgtcacggccggttttgctctcatccgttggactgtgttggagccagagactgcagccttccagaggacgccggcggcggccgtgaggtgttcctgacatgggaggatctttcggtgacagcgtcgtcgtcgactggcgggaaggcgaaacccgcggtaattctcgacaagatcagcgggtacgcgcgccctggtgaggtgctggccgtcatggggccttcggggtgtggcaagacaaccctacttgatgccctagctgtaacaatgtttcatggagttgcaaaaaaaaggaggaaacgacaaatgatatag

SEQ ID NO: 43281 - DNA, 255 bp, Zea mays
  Peptide Sequence Number=SeqID_86656
atgcggcttcatacccttagaggtaccttcggacttaggtcaaaactacagtgtgaagaagcacaaaggatacgaaggatggcgcagagccgaagctatgcgcaggggagcttcggcgtgataacagaaaagggaaccgacttaaaagggaaaaggctatttagaccccgatggactattatagagttattagcaaatgtaaagggcatgggtgtaattttacatgggctgcgtcccgtgcctataaatagatga

SEQ ID NO: 43282 - DNA, 287 bp, Zea mays
  Peptide Sequence Number=SeqID_86657
gaaaaacagattcgtccatgaaccgagtcttaggttcctacaacagaatcgacatggtggggctcgacctacccaagactgagcttgaaccctataacgcgttgaagactttcatgccgagttgggcagtcaccaacgccataactgggacaatgccaggcatcgagattagaaatatgacggttatgaagctgaacatgatgactcaaactatgaccgagtctagcgggatctggcgcttgaaggcctctcaacatccattgtctagccattcacaggccgcttga

SEQ ID NO: 43283 - DNA, 204 bp, Zea mays
  Peptide Sequence Number=SeqID_86658
atggtggcatctgttatggctcctataatctcgctcagggattttggtacgagcatcgtcccacgactttttcctgagggcggaggtgatgttgaggatgatggttttgattatgattatggtggtccacattgcaaccactgctcaggagaagatgaggtcgtggaggacttccaggagttccaagagtacgatgagttctag

SEQ ID NO: 43284 - DNA, 312 bp, Zea mays
  Peptide Sequence Number=SeqID_86659
atggcgaggggagagcacagggctgggactcgcacggaggctgggctgccgcgctggccgcgccaggacgttgcgccgcgtgacaggagagaagagagggacgcggggaaaggagaagagggaaaggaggagaagaatggggtgctcaccttgatgatcgcggcgagggcaaggtggagcgaggccggcgagctccgacagttcgggcgtggtgcgaggcaaagagggagtgggagagaaatgggggagaggcagtgggtagtttccttcttcctagtggttatggctgcgtgcttattcgttgcggaataa

SEQ ID NO: 43285 - DNA, 681 bp, Zea mays
  Peptide Sequence Number=SeqID_86660
atggacccccaacccggtggtcgcagcttccatgacctcgacgcacgggtggcggaggttcctcgatccggagtagtggcggcggttcctaggtcggtggcggtggctccccgatcccagaaggcgagggacagtggggcccttgtgcaagcaagcgacggcgtccccgaggccccaaggagggcggcacttccaaggcccggcgagcaagcggcgcccgtcgacggggttacaagcgttcgcgagggagagagagagagcctgctcgtcagcccgtcctcccgcgcggccaccctctcgtacgagagccctagaccttccttttataaacgtaaggagagggcccagggtcgggcgaggcggagactgtcgtccgaggtcgaggttgagtccgagccctggggtcgggcgaggcggagaccgtcgtccgaggtcgaggttgagtccgagccctggggtcgggcgaggcagagcttcctatggcgcctaaggccggacttggtggctgtcagcctcaccctggcgggtggcacatcagtcggagcagagcaggcggcgctgttttcctatcaggcgatccttgcattgaatgctcctgcgatccggtcggttgacgaggccatctggccaaggtcgcttctccgtgaagcctgcccgaactgggcctcgggcgaatcgagg

SEQ ID NO: 43286 - DNA, 678 bp, Zea mays
  Peptide Sequence Number=SeqID_86661
atgacttctcacgaatcctcagaaggagaaaacacacattcccacacggacggacttgcacgtgagggctttccccgcattttgtgggaggtactgcagggagccgagtatacgacgcctccccaggctgaagacaccatcgagtccattgctctccacgggctgacgaccttttgtggctttcaccccttggagctgtcaactcatcccattggcttgttccccgctgaaaaggaggaggacccaatgtggaaggatcgagtggagcatgccaacgatgtgtgggctctttacttagggcagactgctcacctgacagtgcgatgcatgaatgccctgtatcgtctgcaagcagtgcaaggtgaggcaatgtcccagctgatgggcttggtggagtctaccaagatcaccctagataacagggaggaccttgtggtagacctgtccactgagctggtggaaaagaacctccaggtagagcagatggccacccagatccaagagcttgaggagcaagtaggagccagggagaacaccatcgaggttctcgaggataagctcctgactacgcaacaacaacttgaggaagccaaccagcacttggatatgcatcatcagtgttggggacttgttctcaagtgctatgagttaagaacaaggcaacacagagaatgttaa

SEQ ID NO: 43287 - DNA, 189 bp, Zea mays
  Peptide Sequence Number=SeqID_86662
atggcggctgagtgctggggaattcctgataggtggccgctgctgggggcgctgatggaggcagcggcggtggtggaggaatgcactcattctgtccacggcgcgctcttcccgccatctgaaattcaggatgctcataatatcatacttgggaaatcaggggttgcacatgttaagagattttcttaa

SEQ ID NO: 43288 - DNA, 402 bp, Zea mays
  Peptide Sequence Number=SeqID_86663
atgcagccggttgatcacgtggtggaatcgggagaattcaaggcagcattcagaggacatcacatatcagcaggcatcatggaccgcaagctcaatgagtttctggcactcacccaggggtgtcatacagtgttacatatgcgggctatcatgctgatacggatgagaagaagagggacaggttcaggaggggcctcagtactaagctccgcgaccgtctcaacagttagtgccaacagctacaatgagttagtcaacatggccatttctcaggaagattgcatcacagctcgccaggcagaaaagaagaggaagacccctatggcaggaccttcagctcagcctcagcgcttcaggattgtgtccgacactcagaatagggggcctcagcagcaaggatga

SEQ ID NO: 43289 - DNA, 231 bp, Zea mays
  Peptide Sequence Number=SeqID_86664
atggtctcccattctggttatggtgggtacaagtgcggtcactgcacgacggcagttggggttagtgaggcattgtacgccaaggcggtgagccctgatctgttgatggggaatcgatggggacagttgatgttctctggaggacatggttgctggcatgacttggtcgtccatcttgccaccggggtggacagtcgagtgggaccctacctcggcagaggaggagcatga

SEQ ID NO: 43290 - DNA, 255 bp, Zea mays
  Peptide Sequence Number=SeqID_86665
atgtggtacgaagagagagcaggggagccccccatagagtctccaagatgggcgctggggccaccagtggcaagcaggctgacaacgagcatgggcggtggggatgacaaggcctctatcgtcatggagacaatcccggcatcccggaacacaaatggaaagctgcatttcattccattaagaagaaaaacagagataatacaaaacagctacctcccgggggccaagtacaggcatactgacactcatccatga

SEQ ID NO: 43291 - DNA, 210 bp, Zea mays
  Peptide Sequence Number=SeqID_86666
atgggggagggagagtcgacacttggcgccggaaagaatgcctcagggaaaacatgctcgccgccgattgaggaagaatgctggtggggggcagccgcttgttataaggagaagtactgtatctggggaaggagaatggtgtttcctccccacgcttcattggttgtgagaatgggccaccccctaatggcaaaggaaaacggtggcgag

SEQ ID NO: 43292 - DNA, 386 bp, Zea mays
  Peptide Sequence Number=SeqID_86667
atggcgggaagcaccgtagggcaacgcacgacgcagcccgcggtgcagaggcccacgaccacggtgaagtatcgttttacggcggtggatcttcttctccagcgagccctgaggaatcctaggacccgaacggcggggcatgatctcggccacttatctcaggttgtttcactcagatccggattaaccggcattcagtacggtaccgtacaagctgatccaacgaaaggggatgaatctgctggttggggcccacgagatagtgtcagacgcgagtgtgcagatgcggggggtgaaaatgggccgatccagtttgttttggcccagtcgcagaaggaggatgggcagggacaagatgggctggactgcatttggctcaggaacag

SEQ ID NO: 43293 - DNA, 326 bp, Zea mays
  Peptide Sequence Number=SeqID_86668
gccggaaggcaaagggacaagaaagaggtgccgccatgctgacgggaaccggcaagcgccccctcgagtcctccttggaggaactacggagactcgagtactcggaggaggtctcctccgacgagggcgacggaggcgagagcaagggcagcagcggtaatgacggcgatgagggcagtggcgacgacggcggcgaaggtggcggcagtggcgacgacggtgacggcaaaggtgacggcaaaggcatcggcataggcggcgacgacaacggcaaaggcggtgacgaaggcggcggtggcgatggcaactgtggcagaaccgcctag

SEQ ID NO: 43294 - DNA, 228 bp, Zea mays
  Peptide Sequence Number=SeqID_86669
atgccgagaaatatggtaaatcggtgcggtcactgcacgacggcagtcggggtcagtgaggcattgtacgccaaggcggtactccttaggatgattggttgctggtgtgacttgtccttcatccctgccaccgggatagatggtcgagagggttactgcttccgcaggagaggaccaggaggagtagcgtggccaggcttcgccatgttactcggttttctccgttag

SEQ ID NO: 43295 - DNA, 320 bp, Zea mays
  Peptide Sequence Number=SeqID_86670
gaaggcgacaagggtgctgttcttgggagatgggctcgagcaggggcgctgcgtcgggttgttgctgcgttccaggcgctgcaacaaggagaggagcagggggaggaaggggaagatttgcaggggcgccatggacagggacgctcggatggggtcggcctgcaccagggaagctcggcctcggccatgggagaggaggagccgagctgcagaggggcgctggccatggagaagcttctgcgcggcgtccattgcagggaggtggagctcgcgcccgcggagcaggaaagggcgcaggctgggaggtgctgcgcagggag

SEQ ID NO: 43296 - DNA, 294 bp, Zea mays
  Peptide Sequence Number=SeqID_86671
atgatcaagacaaggaagatgatgaggatccccgaccgccacacccaagagtccaccaagcgatacaacgagatcaccccggtggaagatgattgggtgttggcaatgcaagaggaactcaacaacttcacgaggaatgaggatttcaagtcaaccaactccaagagggcacctttcatcagccaaacgaagtatattcaagacatactcaccaagtttggaatgaaggatgccaagcccatcaagacaccccatgggaaccaatgggcatctcgacctcgacacgggaggtaa

SEQ ID NO: 43297 - DNA, 303 bp, Zea mays
  Peptide Sequence Number=SeqID_86672
atggaggaggtgggcggcggtgtgcaaggcctctgcccagtagctggcagggagagacgcatggaagagaaggcaacaaatcatattggtggtgccagagaggctgaggacaggggaagtccagagatcacaatagacaagataaaaggcctagatagccctggacgtggaagtggaaaaaggaagacgagagtgatggccgagctgacaagcatgaaagaggtgcttagaggagccctgggtataagagatgtcagaacggttggaaagctgggacatcacgtcaggtctagggtgccctag

SEQ ID NO: 43298 - DNA, 234 bp, Zea mays
  Peptide Sequence Number=SeqID_86673
atgcatccactgcgcgcgcccgaccaggtatgtccttctcgaccttcgtctgaaaggcattatacccgtcaaccaagatgtggcactttcggctacgaagctggtggctcccaatcacaggcggctcaagtttatgaaccagctaccaggagcaggaagaagagagcacagaagaatgggtaccaccttgttggaagttgcagggaccctttctcaaggtccaaatggttctaa

SEQ ID NO: 43299 - DNA, 2634 bp, Zea mays
  Peptide Sequence Number=SeqID_86674
atggagggtggcaagtcatctcgtgctagaggaaataacattattcaagaagctgctgtgggtagtccttcacagattatggaggtagaaagctcacttagtggacaggcctcagaatacgaagaggcagaatcaggaggagctggatacgactctttcacttggatgcaacagcatgaaaatggaactggacccgtgatagattcttctctcttcagctcttacacacctgcttcgtccataggtaattaccaggggcagcatgccacacaaaataaaagcttctatcctgttaaccaacataatggtcctctcattcttaatggatcaagtgacatgcttggaacaaatggccgtgcaaatcaaactgatcttccatcatggaattctgtgatagaactggacgagcctggtcaaatgccccatctccagtttcctgtcccttctgatcaaggtgctaccacggaaggcctgggagttgattacttaacatttgatgaagtatattctgatggcctcagtctcaacgatattggtgcagcaggaactcatgggaagtcatatctgcagttctctagtgctactggtgatttgtctgcaacagagaacagcctccctcaacaaaatgatggttctctggaggaggcagccattggctatccatttttgaagactcagtcatctaatctatctgatatcctaaaagacagctttaagaaaactgacagttttacaagatggatgagcaaagagcttcctgaagtggaagattctcaaattcattctagttctggggggttctggagcactggagaagcaaatgatatcatcgaagcatcaagccatgagccgctggatcagtttactgtttccccgatgctctcgcaggagcagctctttagtatagtagattttgctccaaactggacatatgtgggttcaaagactaagattttagttgctggtaacatcctgaatgacagtcaaatcaccgagagatgcaagtggtcatgtatgtttggagaagttgaagttccagcaaagattttagcagatggtactctcatctgttattcgccccagcataaactcggtcgagttcctttttacattacctgctccaacaggttggcctgcagtgaagtgcgggagtttgaatttcgaccaactgtttcccaatacatggatgctcctagtccacatggtgaaacaaacaaagtttatttccagatacgccttgacaagttgttgtcccttgaaccagatgagtaccaggcaactgtatctaaccccagcctggagatgattgacttaagtaagaagataagttcactgatggcgagtaatgatgagtggtccaacttgctaaagttggctgttgataatgagccttctactgctgatcaccatgatcagtttgttgaaaaattgattaaggaaaaattgcatgtctggcttctaaataaagttggtatgggtggcaagggacccagtgtgttagatgatgaagggcagggcgtgcttcacttagcagctgcccttggatatgattgggctataaggccgacacttgctgctggcgtgaatattaatttcagagatgttcatgggtggactgcactccattgggctgcgatttgtggccgagagcggactgtagttgcgcttattgctctaggagcagctcctggagctttgacagacccgactcctgatttccctggaagtacaccagcagatatcgcatcagctaatggccaaaagggaatatctggtttcttggcagagtcttctctgaccagtcatcttcaggccctcaatctgaaggaagctaatatggctcaaatatctggtctacctggtattggagatgttactgagagagattcactgcatcctccaagcggagattcattaggtcctgttcgaaatgctgctcaagctgctgcgcggatatatcaagttttcagggtgcaatccttccagagaaagcaagcggctcaatctgaggatgataaaggtggaatgtctgatgagcgtgccctctcactcctttctgtcaagccacccaagtcagggcagcttgatcctctgcattctgctgcaactcgcatacagaataagttcagaggatggaaggggagaaaggagtttcttcttattaggcagcgaattgtgaagatccaggctcatgtgcgaggtcaacaagtgaggaagcattatcggaaaatagtttggtctgttggcatcgtggagaaagttatattgcgttggaggcgtagaggggctggcttacgtgggtttcggtctacagaaggttcagtggagagcagcaatggcggaacgagtagcagttcaatccaagataagccttctggggatgattatgattttctgcaagaaggacgaaaacagactgaagaacggctccagaaagctcttgcgagagtgaagtccatggctcaatacccagaagcaagagatcagtaccataggattttgactgttgtgtcaaaaatgcaggagtctcaggctatggaagaaaagatgctggaggagtcagcagggatggacttcatgagtgaattcaaggaattgtgggatgacgacacacctatacctggttatatttag

SEQ ID NO: 43300 - DNA, 2724 bp, Zea mays
  Peptide Sequence Number=SeqID_86675
atgactctcaacgtcaagctcatcctcgacgagtttaataggaggttcgacgagtgggagactcgctgggaccgacgcttctcgtctgccgcgtacatcgaccaaccgcccaccccgcccagcgtcaaccacccctcctccgacgcatctgcccgcgcgccgtccacccgggctgcggccgttggggccgtcgtcatcgccgacaactggggcggatgcttcgatgacggcgagcggtactgcacagcgccatccgtcatcgccgacgactggggaggattatttgatggcgaggtcgcgaatgtcaacaccgagttcgccgaccactggtacggtccatcctccaccgaccccgacgcaccacacgatgcggacgccgacagcttcttcatcaacaccggcgaagggcccgtagagccagtttttggcgatacggccgtaggcgcgcttggtgacgtgggcgctgtcccagatctagtggaggaggaggaggtacctgtcgacacgcccgccaagtgtttgatgagagtcctcaaccgcagcgactactacgtttccaaccgtggcgactactacggtccatacacttcctccaccgtcgacgcggcggcggtgctgctcgccgacgcggccgaggctcgactcgactggcgcttcgccaagctgccgcagccgcaagctgaggaggtggacgagccgttccgcgacgtggcgaaccctccgtcgcatccttccatcgtctacgagtcgtaccgcgacgcggccgaggctcgactcgactggcgcttcgccaagctgctgcagccgcaagctgaggaggtggacgagccgttccgcgacgtggcgaaccctccgtcgcatccttccatcgtctacgaatcgtaccgcgacgaggccatggcgggagccggtgctagagcgcttgctggccgttgcaacgagcggcccgcaaggggacgcaattcctcctccgacgacagatccgagcaatcctacctcacgcccacctgtgaggccaccaacagggcccctgcacccgacaataggttgatggcgtccgtcgaccaccgccgacgccaaactctggacgaagaaggaggtgtcgagcaggaatcgggcggtgccattgccgacaaggtggaggctgtggcgacgcacgaacttcctagagatgagaccggagcagaggtcgcaacccagcagccatggcgcctatgtcgatccacttcgtccctggtgatgatgggttcagatggagcatgcatggggtttgcagctactcaccgtggcgagcttgtcgctggcggacacgctggaggagcactctgctccggagttgtcgcagtttccgttggacacgtgcgagttcacgttcaaccgtgcgtccgttccgcggatggagctgctcaccctgggcatcctcgaggggtgggtggtcgccgacatccctttcccctacatctgctacttcgtggcgcagttctggcaggacgagcgccaggcgatctgcgagcgcgccgtgcagcaccaactacctcaagcattgaggaggatgtacccttcgacacgctcaccaagtgttcgatgagggtcctcaaccgcggcaccaactacggccacaacacggccgcttcactgaagaccagtggaaagagggccgaattcatcgtctccatcgtcaagggccgcggcggctcgctgttccgcgagaagatgatcgtgggcgttggcgctcacttcatcgtcatcgtcgacgcgtccaagctcgtgtcgcgcctcggctgcatgggcgccaaccccatcgaggtcatccccttcgacgcgctccacgcgctgggactcatctgcggcctcttcgacggcttgcctggatcccacaccaggcggaggtctgttcccgccgccgccgccaacgggaaagaagactcgaaacagtacatcatcaccgacaacgacaactacatcgtcgaggacggcatccgcggcgacctgcgcggcatcagtgatcgtctgcttcagatcaccggcgtcatagaacacgacatgttcctgggctacttttcccacgctgaagaaggtggagatgcgaggacgaaggtgcagctgacagaggccgcggagcgttgcttcgacgagctggtcggaagaggcctgctccgtctcacggtcggaagcaatggagccgcgggagccaggatgcccatcatgatctgctccttcgcgaaggacgtgtatgaccatgagaacttctgcactgagtcagcagcgaataatctttccgaagtgcgacggttgtccatcgttgagaacgaggctgacgatcgcattggtgaggggatgacaatggcagcatggacgacgagcatggaaacagtggttaagctagaacaggccggcgagcgcctgtgggtcaagatgggcggccacaaggtgctcaacgtcgacaagtacgacaacatcttcgccaagccaggcggctcattccgcggccccgatgtgcacgtcgagacggccaggagaaatactgtcacctatagcattttggagcagagagacgcacagaaggttcagctcttcaaatccattaatagtggtgctgtttttggctttcccgagaatcttgaggaagctgcaagagctagtctcatgagtggaattaagcaaccatggcctccacctatggagttgagcgattggatttgtgcagggcctccggcaacttga

SEQ ID NO: 43301 - DNA, 534 bp, Zea mays
  Peptide Sequence Number=SeqID_86676
atggtgtctatagagcagcgaggggaggagaagtgggagcagatgatgaaggtgctggaccatttggggaagaagttggaaggggtggaagctggtcaacaatgtctggaaggtcaagctgaacttgcagcaacggtggcaaaaaaggcagaggaggaacacaccatcctggccagccagatagaggaacctgccatgtacatggaaggcaatgttgtgatgtggctacaagtgcacaagatgaagcatggattgggaaattggatgcaattctctagagatgtcaatgcaaaatttggggtggaggagtattcccaagtcgggttgaagggagaggtgcagagtccaatcatgactcatatgcctcaatctatggacaaagcaattgttcttgctcaaatacaacaagaagtgctggagaaaggaagggtgaagttgcaaaaaggtctggctgctaacaaacccatgggaaatactctgaaacttgacatcagaacatggctcaatcccagtgagttgatcaaagaaagatag

SEQ ID NO: 43302 - DNA, 342 bp, Zea mays
  Peptide Sequence Number=SeqID_86677
atgcaaagggacaaatactgcgcacaatcaaccctgcagataacaactcagctacttgcttctctatctctattttgtgtaagagaaaatacatatgacaacccaattaaaggactaaccagtgtgctaagtgttgaacaggtgcttaatgcaaagctaacagggttcaacacaaagataatcgatcaagccaaggatggaggcaagaagagcttcgaggtaccgagtgcacgggagaaggtcaaggagatcaggaacccaaagccaggggtgaagaagaagacttgcaaagtcaaggttgatcgagttaagagttatggtgcatcaaggatcactacataa

SEQ ID NO: 43303 - DNA, 1218 bp, Zea mays
  Peptide Sequence Number=SeqID_86678
atggcgccggagcccttcttcactccgccgcccgcgccgcggcacctcgccgagctccgcatcgaccccgcgcatcacgctgttgccttctccgcgccctgcgccgccgacgcgaggcgcaagcgccgctgcctcctcccggcctcctccgtgcgcaagaggatactcctcgagcttcccccctttgacaccacgccgaacaccccgtcaactccgccgacgcccccgcccccgcccatctcaccgatggtgccgcgcgccgcgttctcgttcgagccgggactccgcccgcgccagccaacctccgcggggggatccgaggccagctgtgcggggaacatgttcgcgttcttggctgcgccggaacggcccaacacgcccacgggtcccacctccaggggtggcttcgtgttcgcggcttcgcccgagggtccgctgacgcccacctccaggggctccaacaccggcaggctcacgttcttgccttcgccgaagcagcctttgacgcccatgtgctccactgccagcggctgcgaggcgtctttgatgctcaccggtagcggcgcagccgcgtccctccactccgcgaagacggcgcgcacggggtctacgacccgaggcgtcgggttcgaattcttccctccgaaggggaccgcgtgcgcgaaactaggctctccatcttccgctgcagccaagaagacgacgctcccctccgtgggcctcggagcaccgtcgttcgtcttctcggcgtcgcagacgctgcctccgcggcgcggcgggagcaggaagcgcccacggcccaacctccgcatcgagacgactgatcgttccatgggtccgcgactctgggaggaagatatgacgccgctacagcagcagctcaccccgtcgccgcagaagctcgcaaagacgaactccaacgtcaaccccgcggcctcgcgctcgtctatcatgtcggagccgtgctgtgcgttcttcgcatcgccgggaaaggcggccaagcaggaagccaagaaagcccccagtgaggcatcccgttcgccagccgggtcacgctgcacgtcgtcgaaggcgaggacttcctcgccagaaaatccgagaaagccggagcaagaggtggaagtgtccagcgcaatctgctccggtgccgagctgctgctgcgcgtgacctgcaagtgcggtgtccacaaagagtttagcttcgaccacggtgtctga

SEQ ID NO: 43304 - DNA, 345 bp, Zea mays
  Peptide Sequence Number=SeqID_86679
atggccacgacggaggcgcgccgcctcgcggtcgtgccgcagctagtgcttcggtcaacgctccggtcgtggtcaatcgggcagccgggagatgcgggtgtcgccaaggcggaaacatctctccgcgtcgctggcgcgggtctgcgggctctgggctttcctcgtaacttatcgggactatggatgtttgttactttgtattggcgtcgggactctgggtgtttgttacttcgtgctgatgccggcacggaggcgtcgatagttacgcagagattggaggcaaatttgggtgttaagcaagtgtttggtagttttggtgcactatggccgggagtttgtgagtag

SEQ ID NO: 43305 - DNA, 624 bp, Zea mays
  Peptide Sequence Number=SeqID_86680
atggctgcggtggcggaggaggaggtgatcgtcgtcggcgcggggcagtcggggctagcggtggcggcgtgcctgtccctgcgcggcgtgcgggcgctggtcctggagcgcgacgactgcgtggggtcgctgtggcggaagcgcgcctacgaccgcctccacctccacctcaccaagaagtactgcgcgctgccgcacgcgccgcacccggacgaggcccccgcgtacctgcaccgcgacgacttcgcgcggtacctggacgggtacgccgcgcggttcgccgtccgcccgcgcctccgccgcgaggtccggtcggcgcggtacgaccccgcgagcgcgcggtgggaggtggaggccgtggacctcggcacgggccaggccgagcggtacgcggccaggttcctggtggtggcgtccggggagaacgccgagaagttcgtgcccgaggtgcccgggctggaggcgttccccgaggtgacattaggaggatggtggaagcgaaggcgagcgaggcgggcgggcttgcgcgtcgccatgggcgcgggcgccggatctgggtgcgcagacatgggcagaatcggatcagagcgtgtggacgaagagcggagcaacgatgaagattag

SEQ ID NO: 43306 - DNA, 1359 bp, Zea mays
  Peptide Sequence Number=SeqID_86681
atggcgcagcagctcccctgcgtctcgtcgccgcgcccgctgctcgccgtgcccgcgggccggtggcgcgccggcgtgcggggccggcccaatgtggcgggactggggcgggggcggctgtctctccacgccgccgccgcgcggcccgtggccgaggcggtgcaggcggaggaggacgacgacgacgacgacgaggaggtggccgaggagaggttcgcgctgggcggcgcgtgccgggtgctcgcgggaatgcccgcgccgctcggcgccaccgcgctccgcggcggtgtcaacttcgccgtctactccagcggtgcctccgccgcgtcgctgtgcctcttcgctcccggcgacctcaaggcggatagggtgaccgaggaggtgcccctcgatcccctgctcaaccgaacgggaaacgtgtggcacgtgttcatccacggggaccagctgcacggcatgctctacggatacaggttcgatggcgtgttcgcccctgagcgcggacagtactacgatgtgtccaacgttgtggtggatccatacgctaaggcagtggtaagccgaggtgaatatggtgtgcctgcgcctggtggtagttgttggcctcaaatggctggtatgatccctcttccctataataagtatcgcgataccgtgcgtcagttcatcaaaggcacagatggatttgctggtgcttttgctgaatgcctatgtggaagtccacagttataccaggaaggagaatttgcaagtctgtcagtccgaagattaaggaagaggcaaatgcgcaatttctttgtttgtcttatggtttctcagggagttccaatgttctacatgggcgatgaatatggtcacacaaagggagggaacaacaatacgtactgccatgaccattatgtcaactatttccgttgggataagaaggaagaacaatcctctgatttgtacagattctgccgtctcatgaccaaattccgcaaggaatgtgaatctcttggccttgaggacttcccgacttcagaacggttgaaatggcacggtcatcagcccgggaagcctgactggtcagaggcaagccgattcgttgccttcaccatgaaggacgaaaccaaaggcgagatctacgtggccttcaacaccagtcaccttccggtggttgtcgggcttccagagcgctctgggttccgatgggagccggtggtggacaccggcaaggaggcaccatatgacttcctcaccgatggcctaccagatcgtgctgtcaccgtctaccagttctctcatttcctcaactccaatctctatcctatgctcagctactcctccatcatccttgtattgcgccctgatgtctga

SEQ ID NO: 43307 - DNA, 993 bp, Zea mays
  Peptide Sequence Number=SeqID_86682
atggccttgctagacccttgcgagcgcttccagcccgaggtggcactcaacttggcgcgcaacccgctcggatggggtgtgctggcatttgccgggaggacttgtgctggtgtctctcctctcggcgaccttgctgtcaaagactgctggaggggcttagcccccagcctctacctgtggtgtcctgcttcatccttcaggcagccatcgtcgcctacctccgcgggatgtccgtggaggcgacgctccttcccgcttcttcctctagcattcggagggaaggatgatcaccagcctcgtgaaggtggacagcgggttgagccacggctccatcccacgcacccccaactctttggggtgggaagcgagccgtgctgcggctccatctctttggctttgatggttttggtgccgcctccaacgctgcctcccaccgccaagcggggcagtggctttccgtccaccgcacgggcgacggtcgcgtcgtgcgcaggtccaccgcatccgtggtgtcccctgcgccgctggccgcactgctccgacgctgcctggggggttgtacaagatgtcatacgctgtggaggtggtggccgcgttcttggatggtcttgtcctcacccccgtaggaggacgggggcgaggacctcttcgcacgcgctgaggtggccaccgtcgccggcaagccaccggtgcaaaggtggccaccgccgctggcgagccgttggtgcagaggtggccgcctccgctggcgagccgcttggagtagaggtggtcgccgccgttgaccaacaggccgggcttatgagggcggacctcaccgggttggcgtacacagatgctccagtgaccaggaagaggcactccttcagtcataacaagatagtcacccccggaagcctggacccgtggggagtccagaagggtttccggaggaaggcaggcttcggccccgtagaccggggagcacggggtccatctggggggtccatctag

SEQ ID NO: 43308 - DNA, 621 bp, Zea mays
  Peptide Sequence Number=SeqID_86683
atggataatattgatgatgtaactggtaaaaggttgatagctctaaaggaggtacaaaaggataaacttgcagttgccaaggcctacaataagaaggcgcgtgtgtcgtggcccgacaggctgggtgggcgcgccgtgtgtgcgggcggccccgacggacacgccgtgtgtcagtggtccggttccaacaattggtatcagaggcaggttggcccagtgcattctcagacaaatctcggctcacaatgtgtgagggggagattgttgggaatagtcccacattgtgtagtgaggaatcagagaaaatacaaaaggaaaaagacttggctggagcagccaagactctgcgcagtctgggtgcaccggactgtccggtggtgcactggacagtgtccggtgcaccaggctggcgtctggtcaactagccgctctcaggaattcgtcggcggtgtacggttaaaattcaccggactgtccggtggtgcagcggactgtacgtgctttcactttgatccttattgtaagggcgagagactccaagttgtggagattcctcgcaaacgggaaagagtaaagaaagaagaacaccgtggtattcaagttgatcattggaccacttga

SEQ ID NO: 43309 - DNA, 1482 bp, Zea mays
  Peptide Sequence Number=SeqID_86684
atgacatcacatagacctgcaggagagatagctgctattgtggaaggtgtggacatcatatcggactccactgttggcgctgctcgtgctcagagtttctctggaaccagtgctagccacacttggccccgtagtactttttattggcagctttcagacccactagttgatcttctcggaagcgttcatgagaatatgtcagaaggaggaagtagacggaatagtttcttcccagtcttcaacagtttttcttttccagagcatgaacatatgaatgaacacagggatggtaacagtgatcaacagactagggagacttattatgctggagaagctaataatggagatggtttaagggcttctctgctttctcaggcagcaaatgttgaagtaaatgatacaaatacctcttttacttctgaagggagctcttcatatttaagaaggcatggaacatcagtgcttgcacaagagtttatggcgtctatacatgattatgacattgaagaagaagaagaagaaatccataggtttgcattgcctcaccagtctgcacctcgtgatatggaaagcaccgggagacatccattcagacatcaaatagtccggttatctgaaacagctgatatgaagtttaaatggcgggtgcttcttcaaccaggaatcaggcatgccttatgttatggcatgttaattcaagcccttcagcaagtacgattatgtgttattgtagattatgtattcaattcagcatggagttcagtttacttgcgcactggctaccatgtatacagaatgctagttagtctgctgacacgttcttttttgcttgtttcttgtttgctcttctcaaaaatacagtctacaggaatcagtggtcttctccgctgcgctcctgaaatatttgagcagtctggagtggctagtttgttttcagacattggactttctcctcattcaacatcaattctcatgagtacccttaatgctttgctgatactcccttgtataactgccgcaatgctgctgatggatgtctgcgggagaagggttcttgtgctggccactactcctgtcctgatactatcattgagtgttatgtctatgtccaccctggtgaatatgggaccgttcgaaagtgccgtcctcttccacttcgcattaaccatttgcttctggtcctatgtcattggtttgggaccgataccaaacattctctgctccgagatattcccaaccaaggcccgtgcgacatgtgcaagtttctgttcgctttccttctggtttgggggcctgctttcagcgtactgcttcccggtgatgttgagcaccatcgggcttggcggagcgtgtgggatctatgcacttgtgtgctgcgctccgctttttctcgtctactatcgaataccagagacgaagatgcttaacctggagctcattgcggagctgttcaagctttcaaggcaggagtatgtacagtag

SEQ ID NO: 43310 - DNA, 501 bp, Zea mays
  Peptide Sequence Number=SeqID_86685
atgactcggacctcgtcaacctcccgaccgattcggccgcggctgttgcgccgtcgccacgacctacaaaactgtgccccgcctcctattcaaccgcctcgcttcgtcgccagagaatccgtgacaccgagaaggagagggagagccaagaaattggagattgaccgctgccgccgtggaagctcaaccacgacgttatctaggggccgaattcaagccggggaggtgcgagtggccccgtgggatgatctattctcaacaattgcgcgcaggaggcggaagatcgtgggcaatcccacgccggggacatcaagctgtcgcgggtccgcctatcgccgtggacctcaccactacccccgcggaaagccggggcgtgggttggggaagctcgtcggcgtttccgccgcggtggccgctcccttcggtggccgcgggatggagctgggagatgcagtggccaccgtccgtagtttgatgaacggtacagatcaacctgggtaa

SEQ ID NO: 43311 - DNA, 513 bp, Zea mays
  Peptide Sequence Number=SeqID_86686
atggcgcaccggacagtccggtgcacaccggacatgtccggtgcccctgccacgtcatcagtaccgttggaatctgaacgttggagttctgacttgtgggccacccttgatgtccggtggcgcaccggacagctcctgttcattgtccggtgcgccagtatgggcaatcctgacgtctgcgcgtgctgcggcgcatttaatgtctctgcaggcccacaaagggatgatcttgcggattattgggcccacgggcccttcgcgaggcatcttgtccttctggtggacccgggggatatatgtcccccacaagcccccgatctttgggttgattttgaaataaccggcccaaagatccaagataatccactcgaaggtctacatttcaagtcttctcagaaattacttttatcttccacctgtgctttcttagaggtcagccttgcattggttttgccgtatgctttagaggtgcacccaatgggtgtagcccccgagcttcgagtggatttttga

SEQ ID NO: 43312 - DNA, 363 bp, Zea mays
  Peptide Sequence Number=SeqID_86687
atggcgagtggtcattgttgtcggaccacctctgctcacctccggtgtcgagatgacgccacaatccttgatataatagtcgtcgaacgcgcacgatataatgagtaccgatcactcttggctaggctgccaaatgaagtgcaccccgggctcatcagcgagaacaacccgagagtcgtcgacattggcgacgactatgaggtccccatgtttgacgatggacagcgcggtgcagccactctggaccgcgtccaagcggtggctgcgccggagcttgccgactacttccagaggtcgaactggcagtcgccaagtttcttctcgtcgtcggtgagcaacgccaacgcgagcgcctcgtgctag

SEQ ID NO: 43313 - DNA, 609 bp, Zea mays
  Peptide Sequence Number=SeqID_86688
atgctggacaactcatctgcatatggttcatcagatggacacatgaatggcgcacgtgagcaggagagccccggccgccgcggcgctctccagccggcggatttggcggtcgtggagggggcgcgaggaggagcctcagcgtccgcggcggtacagcttctggaggcaccggtcgggcgcggcggagtgggcggcggtggtgctgttcatggtgctggcggtcatggtgctgctgggcgccgtggccgtccttgtggtggtactgctgctgcagccccgcgtgccgtacgtggcggtgcgggcgggctggcggtgctccgcgcctacccgttccgcgtgcccgccaggggcgtcctgccactggcgtacgtagcgcgcgcgcagggcgccccgctgggcgacgccggcatcgccgccatggaggccgcgctccgcgacggcgtgctgccgttccgggtggatgggtacgcccggacgcgatggaaggtcgcggggatcgtcggcgtcgaccagtggacgcgcctggcgtgccagctccgcttcttctggcccaacggcactgtgctccccttcagatgcatctccaagtccaagttcttgttcttctga

SEQ ID NO: 43314 - DNA, 315 bp, Zea mays
  Peptide Sequence Number=SeqID_86689
atgccgccggaccgcccgcctctcgcgctcgaggaggacctcgcggaggcgaacgcacgctggacgacatcctcgacgtccagtgcccataccacaaggacatgcgccacaccctccggaactgcagagacttcaagcactccgtggggaacggccgacccttccaacctctacctccacccccaccgtgaggaggaccaggagaaccacgacaaccccagcagcaggaggagggaggaggtggagccttcccgcgcgtcgacagtgttggggacttgttctcaagtgctaagagttaagaacaaggcaacatag

SEQ ID NO: 43315 - DNA, 1152 bp, Zea mays
  Peptide Sequence Number=SeqID_86690
atgccgtccccttcaccgagtccgagcgccgccgagcccttcaccgagctcgagccccgccgtcctcgtccccgagcccgagcgccgccgtccccgagcgcccgagcaacgtcgtccccgagaccgagcccgagcgccgccgtccccttcaccgagcccgagcgcccgccgtccccgagcccgagctcgagccccgccgtcctcgtccccgagcccaagggccgccgtcacggtccccgagcccgaagcgccgtcgtccccaagctcttaaacttcttcctctcgtattttagagatgaaaaagagccacttgacatggttgagagctcagttcgagtcatcgagacacatgttgacatcattcgcagtctagtgactgatggggttgtggatactagtgaaccggaatcagtgtacacacttaagaccactttgtttcaaattggagatgtatgcgacatgcttgagaagtgtgctctgtccatcaaaaagtatgctgactccaagagggctaaaattattcaagatgaagccctgcaatatgctgaagatgatgaagctgcagatgatttggaggaactcccaagcccagatctccttactcaagccgacatattggaaaaatattttggaattgagtatgatagcgaccagtcaagggatagaagtgcactttccaatgcagttagacagagaaggcatggctgtgatgttataatgctgaaggaccccaagaagagattaagtcatgtagtctaccacctcccgttatttgtgggcttcaccgatggctggaaacatttggtgatagcaaacgaccttcgagctgaagacgtctgcgagcttgttaaggggccagacgatgccgacataagagaagagaagcgcacagatgaagccggggcggctttaaattttatgaccacacatccggacagagtacaccggctcaccatcgtctggccccttaacaagctcgcagacgtccccagcccgaagcattataacatcacagccattggaaagtgcccttctatctgcgagcttgcttcccgacccgatcctgccccggaggttcctaaatccaagatcaatgctgaatggttagaaagagatatggtttccgtcggcgttgctaaggttgaactttag

SEQ ID NO: 43316 - DNA, 333 bp, Zea mays
  Peptide Sequence Number=SeqID_86691
atgggggcgcacacgggccgcgtcgaggcagagcgccgaggccgggtcaaaccggggggaagagaggcggcgacatggggcgccgaaggaggggaaggragragktggtggccggagcaggagcagccggcggcggaaaatctggcgcgggcggccctggcagcaggggcggcgcgggcgggatgcgcaccagggagggggttcggcgtkggcgccggcggcgccatccgacatcgagcaatagcagccggcggccggagcagtagcagagtcgaggaggcgcgggcgccggagaagggggagaagcgggcctactggtcggggcgcgcttga

SEQ ID NO: 43317 - DNA, 252 bp, Zea mays
  Peptide Sequence Number=SeqID_86692
atggttgagggcgacagttgcgaggaagcgaaagaggcaacgatagggtcatcgacgtaccttggcgacgtcgatggggttgatgggaatggaggacacgacgacggcgccgaccgccaccagagcccgcttggtgaatccatggctggccggccgaggcaggggaagggaccggaaggaggaggggcgctaaccatctcaggtgggagcggcgggcatggggaggacaggggcggcggggaggcacgttga

SEQ ID NO: 43318 - DNA, 1512 bp, Zea mays
  Peptide Sequence Number=SeqID_86693
atggcgcccgccgacggcgagtcctccccgccgccgcacgtggccgtggtcgccttcccgttcagctcccacgcggcggtgctgctctccatcgcgcgcgccctggctgccgccgcggcgccgtccggggccacgctctcgttcctctccaccgcgtcctccctcgcgcagctccgcaaggccagcagcgcctccgccgggcacgggctcccggggaacctgcgcttcgtcgaggtaccggacggcgcgcccgcggccgaggagaccgtgccggtgccgcggcagatgcagctgttcatggaggccgcggaggccggcggggtgaaggcctggctggaggcggcccgcgccgcggcgggcggcgccagggtgacctgcgtggtgggcgacgcgttcgtgtggccggcggcggacgcggccgcctccgcgggggcgccgtgggtgccggtgtggacggccgcgtcgtgcgcgctcctggcgcacatccgcaccgacgcgctccgggaggacgttggcgaccaggcagcaaacagggtggacgggctactgatctcccacccgggcctcgccagctaccgcgtccgtgacctcccagacggcgtcgtctccggcgacttcaactacgtcatcaacctcctcgtccaccgcatggggcagtgcctcccgcgctctgccgccgccgtggcactcaacacgttcccaggcctggacccgcccgacgtcaccgcggcgctcgcggagatcctgcccaactgcgtcccgttcggcccctaccacctcctcctcgccgaggacgacgccgacaccgccgcaccagccgacccgcacggctgcctcgcctggctgggccgccaacccgcgcgcggcgtcgcgtacgtcagcttcggcacggtggcgtgcccgcggcccgacgagctccgcgagctggcggccgggctggaggactcgggcgcgccgttcctgtggtcgctgcgcgaggactcgtggccgcacctcccgccgggtttcctggaccgcgccgcgggcaccgggtccgggctcgtggtgccctgggcgccgcaggtggccgtgctgcgccacccttccgtgggcgcgttcgtgacgcacgccgggtgggcgtcggtgctggagggcttgtccagcggggtgcccatggcgtgccgccccttcttcggcgaccagcggatgaacgcgcggtccgtggcgcacgtgtgggggttcggcgccgcgttcgagggcgctatgacgagcgccggagtggccacggccgtggaggagctgctgcgcggggaggaaggggcgcggatgagggcaagggccaaggagctgcaggccttggtggccgaggcgttcgggccaggcggtgagtgcaggaagaacttcgacaggttcgtcgagataattgttccgattaaatctacgattagcattttagcccagcagtccagcccattgaaggcttattcagttatttttaatccatataaatcaaaaaagattgatatagattag

SEQ ID NO: 43319 - DNA, 948 bp, Zea mays
  Peptide Sequence Number=SeqID_86694
atgcagcccggctgcacccctccgccggcggtcacccaagacggtgacctccagtttgatggcgggggaaagcaagccgggctgcggcctctgcccctccctcagcctcaaggattttcatcatcagtgctggggaggggagtgtgccgagctggggtcggcccctgcgtgggcggtggcccgctccttccctcagtgatcggggggaagggcgttcgccgttcgtggcgctggcagctgccgcgtgcccggctctcggacctgagtggctttggagccgctcccggcaccgccttccgccacggcagctggaagagcgtccgccctgaggtcatcgctgctgctgttcggccccccggagcagaagtcgtcgtcgccgccgctgctggagcgggtgacggcgtgtcgttcgtcggtcttctgtcgctccgcaggccccccgatcgagtggggttgttcgtacttgcggaggagtccctcggctcggtcggccttgctgtccgaggcttctcttgcttagttaaaggaaccccttggtcgctcttcgatgagccgaagccaggggtagcggcgtcagcacggacagaggcagagttggctcgaaaagaagacttggtcggccggagcctggccgggtcgtccgttagcgggaccgacgtcggagttgatctgccgaggcctcgggtcgggctgatgtcttcgggggacaactggccgaggcctcggggtgaccagccgagccgcctgctggagccggattcttgggggagaccctggcggcgatggcctgggcgagatgatgacgtcgtccttcagaatggagatcctcggaccgcgtcgccgtccgaggctaggtcgaacctcgccgaaggtgtagtcggcgccgagggtgctgctgctcccttcagccgtcaagatccgagcctgcaggatcggattatcttgtag

SEQ ID NO: 43320 - DNA, 480 bp, Zea mays
  Peptide Sequence Number=SeqID_86695
atgagcttgccaacctcacccaccttgttgcgctcgttgtccgtttgcttttcggacctcggcctccccgcgctctggttcctcaacctctccaacaaatgcctcgacgggactgtgtcgtcgtccctcctccggttcaccgacaccgccttcgtcggcaacaacctcgcacgcccggctccggcgccaccgtccctctgccttctgacctcgccacaccttacgctgcgaggaggcgggctaggttcagtgaggcaggctaggctcagagaggcagccatcctcgccgttgccgtgggcgggtgcgtcattgggttcgccgtcgctgcgctgctgctcctcgccttctgcaacagcaccagggagagggctatactgatgatgcagacagcagcgggctgtaggaaggttcctccggagttgcccgagccggcattcgacatcaactttgcgtgtgatggcatacaacaccgcggctag

SEQ ID NO: 43321 - DNA, 216 bp, Zea mays
  Peptide Sequence Number=SeqID_86696
atgcaggcggcgctgtcttcctgtcaggataaggtgtcaggcatccttgcattaaatgctcctgcgatacggtcggtcggtgtggcgatctggccaaggttgcttcttggcgaagactgggcctcgggcgagccgaagctttgtgctgatgggggttaccagctgagattaggagtcttgggggtacccctaattatggtccccgataatttttaa

SEQ ID NO: 43322 - DNA, 1170 bp, Zea mays
  Peptide Sequence Number=SeqID_86697
atgggcacgggaggcgtagcgctggtcgccgccgccctcgccgtggtgttggtgacgaggctgtggacggcgctggcccacctggtgtggcggccgtacgccgtcgcgagggcgttcgcgcggcagggcatccgcgggccgccgtacagggtcttggtgggcaacggcaaggaggtccaggcgatgcgggcggcgacgagcggcgacacgctggacctcgcctcccacgactacatcgcgcgcgtgatgccgcagtaccgcgcgtgggtgtcgctctacggcaaggtgttcctgacgtggtccggctcgactccggcgctgttcgtgggcagccacgacatggtgaagcgggtcctgttcgacaaggcggggctgtacggcaagacggacccggggcccaccatactgtccctcatgggcaggggcctcgtgttcaccgacggcgacgactggtcgcgccaccgccgcgtcgtgcacccggcgttcgccatggacaagctcaagtcgatgacgggggccatggcggcgtgcgcggcggaggtgatccgggggtgggaggcgcgcgccgcggcgtcgggggacaggggggaggtgacggtggaggtggggcagcagttcacggagctcaccgccgacgtgatctcgcacaccgcgttcggcagcagctaccgtcaggggaaggaggtgttcctggcgcagcgggagctccagttcatcgccttcgcctccatcaacagcggcatgcgcgtgccgggcacgcagtacgcgcccaccaaggccaacgtgcgccggtggcagctcgagcgcacggtgcggggcacgctcatggccatcatcgacgagcgcctcgccgccgcgaaggaggcgaaggggtacggcagcgacctgctcggcctcatgctggaggccaacgccggcgacggcggcggcaagaggcagcagcaggccatgagcatggacgagatcatcgacgagtgcaagaccttcttcttcgccggccacgacacgacctcgcacctcctcacctgggccatgttcctcctcggcacgcaccccgagtggcagcagcggctcagggaggaggtggtccgagagtgcggcggcgccgaggtgcccctcagcggcgacgccctcaacaagctcaagctcgtgagcccccttccgccttaa

SEQ ID NO: 43323 - DNA, 462 bp, Zea mays
  Peptide Sequence Number=SeqID_86698
atgggtaaaagtaagaagggtagcggttcttctcctcgctctggtgacaaacgcaaacgtgatctgactcctccttcggaggacttcggcgactcggagtactcggaggaggagttctcctccgagtccaagggatccccagctcccgtctctcccccgtcgtctgatgattcagacgactcccaggggattgtcacggaggtctggacctacatccgggccgtcgagcgctccgggctcgaaggctcggatgagtcggagtactcctcggatgaggaggactcctcggatgaggaggactcatcggattcgtccgaggaggacaacggcggcgatggtggtgatggcggcgacgacgggggcaacggtgacgacggcagcgacaggggtaggggcggcgacggcggcagcaagggcgaccacggcagcggcagcaagggcagcaacaagaccagtggctag

SEQ ID NO: 43324 - DNA, 483 bp, Zea mays
  Peptide Sequence Number=SeqID_86699
atgtattccaagtcaccatggggaggtgcttcgggagcaggagatttagacttgtcaggaacactctcttccaccagccctattggcgtagctttcgaagattctaaaacagcatctaagacgctagccattcttctcttccttggagttgctgttgtaggactcgatagcttcgacagccctgttacagctggagggctcagcacctttggctattctactggcttttctgattctggctcatttgtcgggcctgtactagcttcgatcgacatcgcaggagctgtttctgtggctgaggggacaccctctgcattttcaataagcttcaacacctcggtcgtcccaataggtttcggcctacgtgtcaagaccttggccctcttcggcttcggcgtgctggaagaggttgaagcaacaactttcctttccccccttgccttcggacaggaaaacagtaatgagggtaaacaaatccaataa

SEQ ID NO: 43325 - DNA, 882 bp, Zea mays
  Peptide Sequence Number=SeqID_86700
atgagcggggatgagtgtgggccgaggacagtggccgaggaaggcgtaggcgtgggggccgagggcgcggcgactgaggacgccgacggtgtgggggcaggggtgcggcggcgtggggctgaggacgggcgagtgcaggggcgcggcagcattggccggcactcggcgtcgggcgcggcggcgttgggctggggcgcggcggcgttggccggcactcagcgtcgggcgtggcggtgtgggggcaggggcgcggcggcgtgggcccgagggcgcgaccgccgagggcacgagcacgacggtgtcgggcgcggcggcgtggacagggcagcggcggcgcggagtgatgagagtgagagaggctcggactcgggctcagccccggaagacagcgaactccactccgcccgacccagggctcggactcgggctcagccccggaagatggcgaactccgctccgcccgacccagggctcggactcgtgcttagccccggaagacggcgaactccgctccgcccgaccaagggctcggactcgggctcagccccggaagacgacgaactccgctccgcccgaccccagggctcggactcaggcttagcccctgaagacgacgaactccgcttcgcccgaccccagggctcggactcagccctggcctccgccgacggtctccgcctcgcccgacccaggggctcggactcgacctcgacctcggaagacagactcgacctcgacctcggagaagcctccacatcgcccaacctagggcacggaccgaccacgtcaacaggaggcgccatcattaccctaccccaagctgactcaggctacggggaacaagaccggcgtcccatctggctcgctccgccagacaagtaa

SEQ ID NO: 43326 - DNA, 996 bp, Zea mays
  Peptide Sequence Number=SeqID_86701
atgaccagcgtttcgcgcctgttcccgatcaccgaccggctggggttgctcgccacggggatcgcaggtgaggggagatcattggcacatgaggcaaggaatcaaactgcagaatttcgtttcaattggggatatgaaatgcctcctgatgttttggcacaatggccaaaaaatcttcgaaagatcctaggtggtggaatgaggcaggttggagttctgtgtgctggtgctcatacactatgggaaagcttgctgggagccacaatagttgatatggctgtaatcgtcacaccagccaatgattatgagctaccagcttctgttttagctgctcttgagcctaaagacacaaaaccttatgcccttcaaaaggccgaggacattgttgggaccatgctggcaaagggatttatccttggtagagatgcactggacaaagcaaaagctttggatgaaaagcaccagctcacgtcaactgccacagctagagtgtcctcctttgacaagagaataggcctaagtgagaagatcagtgttggcacttcagttgtaaatgataaagtgaaggaaatggatcagaaataccaagtctctgagaagacaaagtcagcgctggcagctgctgaacagagtgtcttgaccgttggatctgctatcatgaagaacatgtatgttctcaccggagcagcatgggtaaccggtgctttcagcaaggtcaccagtgctgccaacgatgttggtgcaaaggctaaggagaaaatagcagtcgagcaggaggacaagaatgccgagggtgggcctggacaagcaaacatctcagagatccctgcagcacacagggagttggactgcgaattcgcaaacatacatgtctctgaaacctctgaagatgttcccatgtcttccgtgactgtcccgctgttacagatgaggagcccagcatggccactccaccagctgaagtttctaaaaaaccagaagctgcacagggattaa

SEQ ID NO: 43327 - DNA, 276 bp, Zea mays
  Peptide Sequence Number=SeqID_86702
atgggcgagggcctcatggcagcagcatccgccctgaggtcatcgctgctgctgttcggcccctcggagcagaagtcgttgtcatcgctgctgctggagcgggcgacgacgagccgttcgtcggtcttctgttgctccgcaggccccccaaccgtgtgggactcgcctgttggttatctgaaccgcttcaccaagcgtgagtcgccccgtgcaaaggtgacgagtgaggaggctagtaaacacatttatacatcagatgattccagatctgcttaa

SEQ ID NO: 43328 - DNA, 750 bp, Zea mays
  Peptide Sequence Number=SeqID_86703
atggaggcccgggtccacgcgtcatgcaacaggcgcgccggttgctacgtgcaagcaactgcaccgccactcgcaccactaccacgcctcctcgactgcggaaccagtaccgcaactcgaggcaaccctgcgtacgacccagcagtgccagcctggcgcgacggtcaatacggcccaaaatgggccggcagtaatggcaacggcaggcgggcaggagcagcggtcacgtcgagaagcaagcgacgcttcgccttcgccataatgaccgcgtcaaaaaagggactgggaaagggggataccccgaaaaggatccttctccgtgaaggaaacaggccccaagcctccctactgatcagaggttcgaaggcttgcccctcggaggggttcaacagccgcctcagagcgcttgggttctgcgcccactactggtcagaggttcgaaggccggcccctcggaagggttcaacggccgcctcaggccactcgggctccgcgcccactactgatcagggagtgaggctgacagcagccaagtccggccctaggcgccatgggaaactccgcttcgcccgaccccagggctcggactcgggctcagccctggaagacgacgaactccgcttcgcccgaccccacggctcggactcgggctcagccccggaagacgatgaactccgcttcgcccgaccccagggctcagactcaggctcagccccggaagacgacgaactccgcttcgcccgaccctag

SEQ ID NO: 43329 - DNA, 288 bp, Zea mays
  Peptide Sequence Number=SeqID_86704
atggggagtagctctctccgggcagaaagggaatcacggcttgtgggtggcgatgagactgatggttttggttatgactatggtgctggtaagtggtattctttccgtttggaaagggttgtcagcattgcaaccactgctcaggcgaagatgaagctgtggaaggagactttcaggagttccaagactacgatgagttctaggcgtgggttagcggcaacccccagtcggctgcctgtgaaggccgcggttatctacgtttcgttttcgcactttgatgtattgtaa

SEQ ID NO: 43330 - DNA, 414 bp, Zea mays
  Peptide Sequence Number=SeqID_86705
atggccggctcggcccgccccgcccggccgcgccctggccggctcggccagcccccggccgtgccccccgccggcgcgccccctggccgcccagccgtccgcccgcccggccccttggccgcctggccgccctggccggcgcgccccctggccgccttggctgcgcgctcgcctggccgtttggccggctcggccgcctggccagcccgacccccccgcgcgctcgcctggccgccggttcaaccgggccggctcagccgccccgccgcccagctcgccgcccagccggccggttcaaccgcccctagggccggtggttatgagattgatggttttggttatgactatggtgctggcgaagatgaagctgtggaaggagacttccaggagttccaagattacgacgagttctag

SEQ ID NO: 43331 - DNA, 192 bp, Zea mays
  Peptide Sequence Number=SeqID_86706
atggatgagtctgaaaaaggagatcggcctcctgggactagtaattgtatcacatttgagtcccagaggattagggacgcttcagacagcaaggccgaccgagccgagggacttctacgcctccgggatacggatacctcactcgtcacctttgcacggggcgactcacgcttggtgaagcggttcagataa

SEQ ID NO: 43332 - DNA, 864 bp, Zea mays
  Peptide Sequence Number=SeqID_86707
atggaggtccgctgccaaactagcttttgccagaatgaagatggtttccccaagttgctgagagcatgcatagttcacctcagaatcagaagccaaccagagtatgatggtcgtgaattcgtcgagaatggcacagagaaatgtgttgtgactatatacattggatccagtccgcaccatgtggaatggagtgtcactgctgctgggcacagattcaaagacacctctcaagtcatcgctcgcaaggcattgagggccctatgccagatttatgaagaagaagtggccgacaccccgctcagattcttaccgccctttcagagagatcgtcctgtttggatggccaggatgcgtgcattggaagggcagcagctgcttgaggacgaccccacagtcgtgtacctcaccgcatacctgctcaccctggatgcgcaatatgatttcttggctcggcaccaccctcaagcccatgcaattgccttgaaaagtcgtgaagtcattgctgttgaagccctgaagcaagccaaggatgagcatgtccagaagttggaggcctacttggtaacccataaccaacatagagccctgcggatccaagaacccgcttcatccaaccaagttcaacccatgagagctgaagatccccagattcttgaaggtcacccggtctctatcagaggagagaagaaggcttgggaactcccgaaaggagccatagtcttggaaggaattccagtcttccctcaggctatggataagcaagagcactccgagtcctcccaagatcccccaccagagttgtttgaccccctcactgaaagggaaatgtgcccttgggccatttctaagtattttggtgattaa

SEQ ID NO: 43333 - DNA, 636 bp, Zea mays
  Peptide Sequence Number=SeqID_86708
atggtggagtacaacagtcctaactcccaagcgcccctaaatctttcttgtgtcactatagaacttgtaacagagaacaagaaactgacagctccaacagaagccctgctacagcggctagcaggcagctcacggagtcactggagatctgactcccatctgcaacgacgacgagtccgagtcctcctctgcgccacgatccccaacacctggtccagcaacgctcacctcccgcccctgccactaccgcccctcagatctagatcacacctgtccccgctgcaagagccatacctcgacatctacgatggtagagtcgagtcagagtcatggtcgtccttcgacatctgtgatgacagcggagagtcggagtcgggctcgtcctttgacatctgcgacgacggcggctcccacctgtccggcatgcgagacgcggaggaggaggaagagaagggcgagccagaggacgtcatgggtgggggatctagggaggggaggcgcggttggggtggaggacgactggggactggggagtgcaaggggcgggcgactttgccgcgtggaaaagggagaggcggacgtgacgaagctcaagctcaacgcacgacgaacggaaatttcgggtccgagctgtag

SEQ ID NO: 43334 - DNA, 840 bp, Zea mays
  Peptide Sequence Number=SeqID_86709
atgcaaattgaagataacatcaatgtgggcctcatgttgcacttggatcgaaccatccttgatcctgcttttgaagatttcttggccagaaagcgttcctcctcttgggctgatttgttccctgacaatgacggctcagtttctgttccaaagatttgggctgctttcttcatgggccttttaatgaggccagattcgtttgattgggccaggaaattccttttgtcgagagctatctcggcattcgtcgcacccagcatggacaccatttcaatcagaattccccctccacccagtcaggattcccctgctaagcctcaactctctccccagtcagaggcaactcccagaaaaaggcagcctatctcagtcgacacgacagtcagaaggagtgccaggcttagggcaaaggccaagggcttcaaaaattgcactgggattggcaagaaaaattgctcatgctgcactcaatatacccctccttctatgcatcttgacgtcatcaagaaattgggtgctgagttctgtaaaatgaccccttccaagctaagtccggaggacttgaacagatccaaggccactggtactgccattcagaggccggttgcttccaccgacagcaaggatgaggaatctgacttctctgatgaacaggtgggggacccttacttcaataatgacaatgatgatgaagccaatacctcggcggggttattatgtggccctttcaattctactgcttatggatttatactggaagaaggatctattggtgtatgctatgcataccagaattccttaattttaagactgatagtttaccatgacgtctggctgtag

SEQ ID NO: 43335 - DNA, 222 bp, Zea mays
  Peptide Sequence Number=SeqID_86710
atggtgacctctagttcgacggtggggaaagcgggccaggccgcggcctctactcctccctcggcctcaaggattttcgtcatccaggccaagatggaggatgaggcgagtcgggggccgcccccgcgtgggtcggctgcccttttcttccccccgcgcccgggggtgaagggcgtccttgagccccacggagacttcctccagccatgccgggataggtag

SEQ ID NO: 43336 - DNA, 270 bp, Zea mays
  Peptide Sequence Number=SeqID_86711
atggcgctccacaagctctatgacgacggcggcccccagctctcttacggaagcaggacgacgtcagcagggactcgaccgctccaacagctgtccctccgccaggctccgccgcacctccaacagccacgacatcacgccagcaggaataaagccccgactgtgcaacactgcaaaaatgagtttgcaagggaacttcatcttgtcatgctgagggctaaaggccgttttgattcgacaattcctgcatggcttcagctctggcagtag

SEQ ID NO: 43337 - DNA, 753 bp, Zea mays
  Peptide Sequence Number=SeqID_86712
atggcgcttcctgttgacgtggcggtctgtgccctaggcagggcgacgtggggggcggagtccgagccctggggtcgggcgaagcggagtttcgtcgtcttccgggtcttagcccgagtccgagccctggggtcgggcggagcggagttcgccgtcttccgggtcttagcccgagtccgagccctggggtcgggcggagcggagttcgccgtcttccgggtcttagcccgagtccgagccctggggtcgggcggagcggagttcaccgtcttccaggtcttagcccgagtccgagccctggggtcaggcggagcggagttcgccgtcttccgggtcttagcccgagtccgagccctggggtcgggcggagcggagttcgccgtcttccgggtcttagcccgagtccgagccctggggtcgggcggagcggagttcgccgtcttccgggtcttagcccgagtccgagccctggggtcgggcggagcgaagttcgccgtggcgcctttgtcaagacctgactgccggtcagactcaccctgtcgagtggcgctgcagtcggagtggcgcaggcggcgctgtccctctgtcagactgcaactggcgcgccggttgctcgacgcgtgggcctgggttcccaagctgacgcgtcagaagttggagaagcgcgtccacctggcgcggttgcatgccgcctgcatggctgtccgccccttctgcccgttggtctgggcgagaatggggggtcgtttgtaa

SEQ ID NO: 43338 - DNA, 459 bp, Zea mays
  Peptide Sequence Number=SeqID_86713
atgggcaagaacaacaagtgcaagcgtgagccaactcctccatcggaggattttggtgactcggagtactcagaggaggagttctcctctgagtctgaggggtctccggctcccatccccctgcgtgagtcgtctgacgactcagacgactcccaggggctcgcggcggaggtctggacgtacatccgggtcgtcgagcgctccgggctcgagggctcggatgagtcggagtactcctcggatgaggaggactcggacggtggcggcgaggacgaggacggcgacaacgacgacgacgacgatgaaggcggtggcggcgatgacggtgacggcagcggcaggggcggcagcaaggacggtgacggcggcggcagcaggggcggcagcgacggtggcggccgcagcaggggcagcagcatgggcggcagcggcggcggcagcaacagggccagtggctag

SEQ ID NO: 43339 - DNA, 1113 bp, Zea mays
  Peptide Sequence Number=SeqID_86714
atggcgtcgtggttggagcagctgcagcgcgagctcgccgcccgcggcctcacagtcgcctccatccccggcaagggaaggggtctcatcgctacttgcaccttcttcccaggggatgtcattctcaatcaggaaccttacgcttctacacctaacaagattttagttggatcgagctgtgaccattgtttcacctctggcaacctgaggaagtgctctatgtgtcgagttacttggtactgcagcagcaactgtcaggtgctggcaaaacctactctatatagcacttacatttccatcgattgtgcaatcaaagaagaatggaaactacatcagctggagtgtagagcaatggcagcacttacagaggatagaaagaagatgcttactcctacaattcggttgatggttcggctggcactcaaaaggaaattacaaaatgagaagatggccaatcttgtgagcctgattcttccttttattgagcttgaccttaaggaaattgcacaaactttttctaagtttgcctgcaatgcgcataccatatgtgaccctgaacttaggcctcttgggactggactgtaccctgtcatatccattattaaccacaggtcttgtgtaccaaatgcagttttgatatttgatggtaggacagcatatgttcgtgcattgcaaccgataaataaagatgaagaggtatctataagctacattgagactgcgacagtcaccaagaagagaaacaatgatctgaaacagtacttcttcacctgcacatgtccacgctgtgtaaagggttttgatgaggatgcactacttgaggggttcaggtgcaagaaccaagcatgtgatggctttttgctgcccaactcaggtaaggcctggcgcttaaagatacccttccccagaccccgcacagtgcgggaagcctacggcactgggttgcttgagttcacagaggatgcactaaaatctttaaccagagcagcagatatacttaaagtaacacatggcgtaaaatcccagttcatgaaagagctctttggcaagttagaggaagcaagagctgaagtttcgtttagactatcctcgagacatggacatgatgagtaa

SEQ ID NO: 43340 - DNA, 774 bp, Zea mays
  Peptide Sequence Number=SeqID_86715
atgcgcccacgtttctgcgcgcacacgcgcagcgcagcgcagggtgccatcattactgcggccggagggccaccaacgtctctgatgagtgtctactacatactcctaaactctgcaaaacgtccccgtcctggcggtccaaatatttccattcccgccgctgcattgcccgctgcctgtctggcgtctgaggcaacaggggatgacacgcatggatcgcaggtcgcggccgcagtcgatcgaccgacggatcgactcagcaaaccagaaacaggtcaggcaaggcagctacgcgcgcacggcgagggcggaaggctggcaacaggcagcagcccggtccaagaaacaaagccctttcacatcggcgtgcacgccgccgatccactgttggagcgccctgcatctatccgtctcaggacgcaggcgtcgcggccggctgctttctcgctctcgggttgccttgcctcccagtcccacctgccttgcccttccccgttgccttgcgcctgcagtgcagaacttgcactgtttgggtttgccgatgtagggagttgttacatgataatagatagtaaaaaatttgtaaacggcccatgggctctcttcgccgaacactacagtacacaggctcccgccgagacgtacgctgcagcaatccaaacagctgcaacagtgtcggcttgcagccagccgaacacgcccaatgatttcgggccgggacttgagcaaacgatccccaacgtcgcgtcatcgcggccgtcgagagatgtgtaa

SEQ ID NO: 43341 - DNA, 369 bp, Zea mays
  Peptide Sequence Number=SeqID_86716
atgtgcatggatctaggctgtatacaaagaacatggctcctcacatacggaccaggatatcaccgtgcagcaaccaaacagaccgagtatgcaggcagccagagacagccatcgcgattgcaaaagcttctcgcgaaagcgtgcggtggctttgccaaccctgcagtgtccattggacgcgatttggccctatgggtgttggtggtcataagagttgttgagcttccagaccagagttccatgttaacctgttctctttacaccggatacgttgttcaaccgtggaaagatcagaaggatgatgccctacaggcggagtcacactccagcccatactcggtagtcggtaccatgcgcatacgtgcctag

SEQ ID NO: 43342 - DNA, 1578 bp, Zea mays
  Peptide Sequence Number=SeqID_86717
atgaccgagcaagaaactccaaagcattattatttgttaacttgtaaaaaggcagagggaaagcagagcatggttgatgcaaacagctcagagacactagctccagagtcaggactaactactagccaaagccaagatcacacaacttccattccaagaccaagagcgcttccaaattgcgggcttctcctcgcggtgcaacagtgtgtatgctctgcctgctattctgatcttagggggcaagcgcgactgccacttcacaccttcctcaaggcggcgaagatgtcggtggccgtgtaccgtggcccagctgctgttccggcgttcgaggcgccctgctggctgcgccctgctgagccgtacaagcagccggaggccgtcgtcgacgaccggcctgcgcaggtggacatatggaacgccatccaggccgacgtggacagggcgtccgccggcgctaagaaggcgtcgaagccgtacgtgcaccggtcgcggagcctgatgagccagaagagcctcgaggtctgcacagagagcctgggcaacgagaccggctctggcgacttcacgtcgtccctggacatggccttcctgttcgactcgccgctgccggcgggtgctgccgcagaggaggagtccttctggcagcacgacgggtctcgccgctgcgaggaggagcagtgggaaagcgaggacctcgcggcggtgaactaccactgctcggccgggacgcggccgctgaaccgccgctcgttcccgccgccgctgccgtccatgtcgcgccgcgacgggccgtgcctgcagatgcgcccacgccgccaggacgggcgcctcgtggtcgaggccgtggcggtgaggccgcgcggctacctccacgcgaagcgccagggcgggcgcctccgcctctccttcgtcgagtgctctgctcgcgcccagagcgcggcgagcaggatcaccgcggcggcagctgaggcgccgtatttccccgccgtggagcccaagaacgcgcaagaggaagaggcggccgtggaagtggtggacgacgacgacgaggaggtgatggaggaggaggaggaggaggtggaggtgctggacaggggcaccgtcgttgaggtcaaggtgagcacgcagccgcaggcgcccaccgcgggcaaggtgcaccgctcgaggctcgtgatcaacaagttcgtcggcagcacgccgctgtccgtggaccagccccggtgcgatgacggcgcgagacagcccgaggcgaacacccgcgacgacgagacgacggcggcggcacagccgtcacgcccgaccatgcgacgggtgccgtcgtctacgacgacgctggcggccgcggtcgccgcagcctcgacagggaccgacgtcccgccggctccggaggacgacgacgagtgcggcgggctgcaccttcccgccccggccgcggccgagaccaaacagcttctgctgctgtcgttcacgtcgcggaggggggacaagcaggacctgctgcagagcgtgcggcggtgccggcagctgcggcagaagaagctcttcatcctggagccctactgcattgccacctcctga

SEQ ID NO: 43343 - DNA, 174 bp, Zea mays
  Peptide Sequence Number=SeqID_86718
atggttaaaaattttggcagcaaaacagtgcaaatagcagtaaatgctgtgtgccgcagaaagggagaagctcaaaagatacaaaggttgacacagcgccgaagctgtgaagcagaaaagcttcggcatgttcgcagaaaagggaaccgacttaaagatgataaggccatttag

SEQ ID NO: 43344 - DNA, 912 bp, Zea mays
  Peptide Sequence Number=SeqID_86719
atgtttggttgcttatatgccaaatctgaaaggctgtcacacttgaaaacatctcagacaaagtgcgtacacaatcttttggtgcacggttctgtcgatacgccatcaacgtgcacgtggccgtcaaggaaggttgtcgcgccgcgaatcccccaccctcctccccctctgctccccgccatcaacgtgcacgcgtcgcatcgagccgcagatcccccaccctcctccccctctgcacgccgcccgtggttggaccacttcagctttccaggggtcgaggacgaggatgaggcggtagtgttcttccagcagcggtacctgcatcgctactacagagagtccatgcctttcggtagcaaagccaaggcgtacagtgactccaagttcccgacgtatctcacagccgagcaggcgcttgctgacttcgttgtgctgctcactgacctcaagaggaacctatcggcagagggtagccccgttgtgctctttgggggctcatatggtggaatgctagctgcttggatgagactcaaatatccccatattgctattggggtcttgcatcatcagctccgatcctgcagtttgaggacattgttccttctactatattctatgatctcgtatctgatgattttagggaccctgaaaacaagtggagacctttcagattggttgagctcagcgtacagttatctggccatggtggattacccacttccatcagaatttctcaggcctttgccagccaatcctattaaagaagtatgcggaaatatcgacagtcaacctaagggcattggtactctggaacgtatatatgcaggagtaaatgtatattacaattatactgacattgttgactgctttgatctaaatgatgatccccatggaatgggtggatgggactga

SEQ ID NO: 43345 - DNA, 1842 bp, Zea mays
  Peptide Sequence Number=SeqID_86720
atggagcaccaagacgccgccatctgcaagctgctcgatgaaatgcgactcatggaggcgcgtctgtccgagcgcatcagcggacgctgcgacgacgtcgagcaccacctggacgagcaccgtgaagagccctgtgacgagacgtctcgcttcgacaagggcatccgcagaccgcaggaggacagagaacttgtccagcccccgcgacgagtcgagtcggctacttgcgtcgagtcaagcgttcccagggcctccagcaccgagctggacagggagttcatcgccgcctccgccttcgtcacagcatcagttgcctccagcaccagtgccctcgaggcaggcgcacacgtggacgtggctggcgaaccggagtttccgcctcgtgtcaccctcgatggccaccccgacgacgaactcctccatgtcgaaggggcggtggtccggccacttctcgaagagcgtgagcagcagcacggcacggcccagagggtcatcgttgcgcggggacaatcggtcctccaccgtcagtaccagctggactcgtccccgctcgactcctgcaacatcttcgctcctgaaagaccggccgaccgggagatggtcgaggcgtcagccgtcatggtggtgtgggcgtacgacgccgcgtgcgaccgcgtcggcgtgcaggaggtgaagcacgcgtgcgaggtcggatgcagcggtggcgagatgtgccttttcacggacctcctcggcgacttgctctgccgcattcaccgctcgccggactccctcatgttggtcgtggagacaacaatcggcaccaacagcacggagatcgccggaatcgttcgcggctgcgccaagaccgccgtctctgttggcaccacccagcaggccaaagacgaccccatctacaccaaggttggctccatccttggcctccgcgtctcgcccagccactggaggaagggcatggggaagaagctagcggatcgggaggaggacgaggttgtccaagcctcatacacgtacaacatctacaacaactgggctccattggaggatgcactcagactgtttgatagaatgtgcatggagcatgactcgcccaggacaagtgctgtgaaccttgggagctttaatgtgatggttgatgcatactgtcatgctggaagaggtcaatatgcgattaaggtgtttgggaagatgccgagaagaggcctgtgccagatgtactcctccaataatctgattgactggctagggaagaataaacttgttgggaagtctgaaggatggtacatggaggaagctgcaagagctgtattgggtgagtggaataaagcaatcatggccaccacctgtgcaaacggaaagatagctacgatttgccatgatgcaagtattgcccactctgagcatcagtacgttgctactgggatgcctacagaagttgttctggaggttttggttgagaacatgggacttcctggtggttataccccatctttcgattcatctgatttgcgaaggagttgtcagtggtggaataatctggccaagagagtagcaactctggaatttgatcgcactcgaaagtcaatgggagttattgtgaaagcaaactctgggaagaactcactgcttgttaagggagctgtagagaatctgctagagagatgtacctacattcagttgctcgatggatctgttgtgctattggatgatggtgccaaggcactcatattatttacactccatgacatgtctgccagtgccttgagttgtttgggttttgcttacaaccctatgaaggtcaaactggcatggtccggcatggatcctgccttgcccacctag

SEQ ID NO: 43346 - DNA, 237 bp, Zea mays
  Peptide Sequence Number=SeqID_86721
atggcggccgacggcccgcccgccggcggcggaatcgacgacgtcttccccgcgtggtggaagaacaacgttcgaggtcaccccgtcccctcccccgtcgacggaggaggaggcggggcaaccaaggccaagcaggaggcgacacctcgtcggctgtcgagcaggtcgacggcgccggctgtacttaactcagttatgaagctcacaaacaagtttgaattcaaaatggagatttaa

SEQ ID NO: 43347 - DNA, 750 bp, Zea mays
  Peptide Sequence Number=SeqID_86722
atgtccggtgcacaccggacagtccggtgcccccttctagccgttggctcggccacgtgtcccacgcagatcgcgcggccgaccgttggcccggccgaccgttggctcaccggacagtccggtgcacaccggacagtccggaggtcgttctccgaggctccaacacggcgaggaggcgaccccgatctcttgcgacgcgtcgagtatgcctcagagggagcgaaccccgaagaggagcaggcgctgcagccgagagggagcggaccccaaagaggagcaggcgctgcagccgagctgaggggcgcgcggtggcttatcgggggcgcacagggggagcgtgcggaagtggcagagctagcggcggttgaggtcgtgggggaggaggtcacgggagtggagctcgtgcgtgcggcgccgtcgcagaagcaaaggttgccgaagaggatgacaggcatcgttcgcatagggaagctggaagacgagggtgtcgcgttgggccaaggtgaccatgagctcgcagtacctgtttacgacatgagctcgcagtaccatctgctaccttgccatccgggcgagcacatccaagttcaggtgctccaagtgggcatgctgcaaccacggctcctcgttgtgccactgccacgccaccaagcacactggcagtggctgcacaatgttcagatcaaccatgtacagtacaggtgtaagaaccctcacagcacacacccgtaccctctaaaaccagactaa

SEQ ID NO: 43348 - DNA, 1404 bp, Zea mays
  Peptide Sequence Number=SeqID_86723
atggccaccaccctcgccaggagcatcagcaacagcaacgggcacgaacgccgccacgaggcctccaccacctcgtcttcgtcgtcctcctccacggcctcggctcagaaacgaaggggggagtcgcagcagcaggccgccgtcgtcccggcgacgccggggccgggtccggcgctgcagttcctcgcgagccccgccgcgcaccaccaccacccccagacccagctcgtcgccccgaggaggtcggtgccgtccaagtgggaggacgcggagaagtggctgcggcagtcgtcgtcgtcctcgggttccgaccaccacctccacggcaacgcgagggccgccttctccaggcagcggagcggcgggctcggacaccgaggcggcgccggaggcgggggtggggacgagaagagcgcggcggtggcggtgaggaggtcggtggacgcgctccgggacgcccactcgctcgcgctgtacgcggcgccggcagcggaggtgctcctcaaagacaagttcaccgacaatgaggagccgtccaaggagagcttcgtgttccggagctcgtgctgcgaggctgctgaaccggcgaagggcgccgacgacgacgacgacggtcgctgccagcggaggagggacgtcggcacggagatgacgccgctgggcagctcgtgccacacgccgctcaagagcgcgtccccggcgcggcacaacacgccggcgagccggtcgtcgggcccgctggtgccgtacaccggcggcggcggaacggacatctcggagctggcgggattccgcctcgccaagctggacctgggcgcgcggttcggcgcccacgccacgctcgtcggctggagctccaaggaggaggaggaggacgacgacgaggacgtgtccaagagcctcaggcacttcgaggccaccgtcggcgggacagcctgcgatagacgcggcggcggcggcgactgccgttgggatgacgacgacagggccaagagctgcatcaggtatcagagggaagaggcgaagatccaggcctgggttaacctggagagcgccaaggctgaagcgcagtcaagaaagctggaggtgaagatccagaagatgcggtgcaacctagaggagaagctgatgcggcggatgacgacggtgcagcggcgcgcgggggagtggcgcgccacggcgcgggcgcagcacctccagcagctgcggcgcgcggccgcccacggcgacggcgacggacggcggctcagggccacggccacgtccacggcccaccaccaccaccgccacctgccgggcagcagcgacgcgccctcctgcgcctgcttcccctgcagcaccagcaccagcggcggcggcggcggtaacaacgtcgtcagcggcggcctcctcagctactactag

SEQ ID NO: 43349 - DNA, 1386 bp, Zea mays
  Peptide Sequence Number=SeqID_86724
atgccaccccttgttcgaagacacaaggacgacagggatgtactgttgcgcccgtgcctgcctcaactggaggatgcagccaccggcccgcaccgccatgcgaactcttctttcccccgtcgtcgaagcaaaaagctccgcagagaagagatgggtccacaaatcccagtggggggcaatccccaaaaacccttcgtaaatcgccgcgaagatggctgcttgcgcgatggagttggggctaagattgtgcagctccaccccgtagaagtgcagaatcgcccgcatgaaacgacttgtcggcactccgaacccctgctcgtgaaaagagacgaagctcagcacataccccggcggcggggacggggcggctccgctcggaggggccatccactccggctgcgggtcactggagagaggacgaagcaaaccatcggcaacaagagcctccagatcgtccgtcgtgacggtggagaaaggccacgggtcgcgcggcgaaacaacggttacccggacaggcgacacctttggcaggcaaagcaggcgacgcttcacctccgccatgatgaccgcgtcaaaaaagggactgggaaaggggatactccgaaagggatccttctccgcgaaggaagcgggccccgagcccccctactgatcagaggttcgaaggctggccccttggaagggttcaatagccgcctcagagcactcgggatccgcgcccactactggtcagaggttcgaaggctggcccctcggaagggttcaacggccgcctcaggccactcgggctccgcgcccactactgatcaggggttcgtaggctggcccccaaagggttcgacagccgcctcagagcacgcagagcgagggatgaccctgggtaccctaggacatttccgagaccgacgagaacgattttgtaacagaatcccaccagaggggggcatcgagccctcggaccccgtcaaaaggggaccgggtccggcgaatcacccgcaggaatacagcaccgcctgccctgctccgactgtcgtgccactcgccagagtgaggtcgacagcggctaagtccagcctcgggcgacataagaagctccgcctcgcccgaccccagggttcggtccccgtatcggcctcggaagatggacttcgcctcgcccgactccagggctcagactcaaccacgactccggaagacgatggactccgcctcgcccgactccagggctcggactcaacctcggccccggaagacgatgaactctgcctcgcccgaccccagggctcggactcaacctcgacctcggaggaatcgccacctcgcccaaactcgggcccgaaccggccacgtcgccagggggaccatcattaccctgcccctagctag

SEQ ID NO: 43350 - DNA, 474 bp, Zea mays
  Peptide Sequence Number=SeqID_86725
atggtgactagggtttgccttttgagtccgctggattgggcctgggaacgaggattcattaccgggccgggcccttcatatttggtctctgtccttgaaaccctctggattcattccgccgcagccggcagcggcgcgccgtgtgctgacgcggccgcattttcgggttggggtctttgcaggacggagtatgaccgtcgcggccggcgagctcgaagacgaagacggcgtgcgcgggcggagccgtggcccgtgtcgtcagagcaggagcgggagcgggtggcgttgcgtgggcgccgctcgccctgggtgttcagcagccgagacgtcgctgttgctgccgcgcccaagccgcccgcggacccgagcagcgggcgccgggccgaggacgaggtgcagctggccgccggtgcgcggcgcgggaacgcgaccgcggcgcgcttgaagctcaggctgcgcaggctttgcgcgtag

SEQ ID NO: 43351 - DNA, 735 bp, Zea mays
  Peptide Sequence Number=SeqID_86726
atggattctgccgccgagctttgtgcccagaagttgtccttggcggctgttgcagcccgtgacacactgaatgcttctgttgccgcgagtattgttgctggtgattattgcgccacattttcgttaggtaacaatgtggtttctactcttgatgttcttgaattcgctgtggcggcggaaaatagtgctttgcgttcttacaaacaggcgagtgcagccgtcgattgtgctaaggagacagtggccaaatattctgagaactgcctagtacatatgatgattttaaaaaaaactgagggctgtccatatgtggttcatattagtagttgccatgtgtcagccagtttggttcagttcatggtgaaccgaaaactagcgcaagcactcagatatgccatgtctcaaatgagtgatacggctaagaaacttcaagatactgcctctttgtgctacacagatgaagaagttgtagacggtttcaagctgactcaagtagctcgttcaatggacgagttagctgaaatgcttgaagtaactgcaattgactgccaggtctcgatgatggatccaactactatgttagaagctggctatgctagtgaagatactgcggtgtgggaggacgtattccgtgaccgagaaataatgaatcaaccattagaagcggagacacttgctgagcactgtgctaagtgggggcttaattacaatgagatctgggatagatcagtgtaa

SEQ ID NO: 43352 - DNA, 597 bp, Zea mays
  Peptide Sequence Number=SeqID_86727
atgggggcgcagcatcccgagaatgcggtcgtggggtgggggcgggggcacgttatggagtcaaaggatggaaccatctcatttgcttctgcgtttgctgctcatcaggaagctgtgcaagacagggatcacaaattcttgacaaaagcagtggaagaagcataccgaggagtcgattgcggtgacgaaggtccatttggagcagttgtcgtccgcaatgatgaagtggtagttagctgccataacatggttctgaagcacactgaccctattgcgcatgctgaagtaactgcaattagagaggcttgcaaaaagcttgggaaaatcgagctctctgactgtgaaatttacgcgtcctgcgagccatgcccaatgtgctttggtgcacttcatctctcccgaatcaagaggctggtttatggggccaaggcggaggctgccatcgccattggattcgacgacttcattgcagatgctctgagaggcactgggttctaccagaaggccaacatggagatcaagaaggccgacggcaatggcgcgctgatcgccgagcaggtcttcgaaaagactaaggagaagttccagatgtactga

SEQ ID NO: 43353 - DNA, 666 bp, Zea mays
  Peptide Sequence Number=SeqID_86728
atgtcgtgccctcgcatcctcgcccgtcgtcggcgtcgcccaaaatacgcgttgtcgttccgccccgacctcctcccctctgtgtcgttaatcacccagctcgcctcctgcctcgtcaaggcaatctccgcgctgtcgagcgccttccccacccgcgccgcgaggagcttgttgcgagtgccaccctcgacgaccgacgcgatgccgcctccagtccgcgtcccttcggccatctgctcgcctgctctaggccttcgaatgtctttgtgccactggctcagctgttccgacatccacgcgctgcctgctgctaacctgctccagctatctgctacccctccgccgcccacatggcacgcggcgtgctattgttgcgttgctgctggcctgccgtcgtcgcccaaccctagcagcccccgaccagcggtcaaattacgttttgagaaactactatatgccttgagatatttccctgaggaggcaatagatccagatgtgtcattgtcacttgccttctcatttaaggatgaggtgttgattgctggatttgggcgtaagggtcatgctgtgggagacattcctggtgtcaggttcaaggttgttaaggtttctggtgtgtcgctgcttgcactcttcaaggagaagaaggagaagccaaggtcttag

SEQ ID NO: 43354 - DNA, 1920 bp, Zea mays
  Peptide Sequence Number=SeqID_86729
atgcaccatcagcagcggatgaagcaggcggcggcggccgcggccgcggcgcagcagcagcagctgatgcagcaggcactgctcctgcagcagcagcagcagtcgcaggcgcagccgcccttgttccccgggcaccacccgcaccccggcctcctcgccgcaccacaggtggggcaattctctgtgattcctctttctcgtctctccggtgacggagctttatgggatgcagaaagggattccattgcaaaacacattgggcatttcaatgttaacagttttggtgcaaattgccctaagatagagcccatagtcagtggaaacctgcctcctgggtttgattcaagtacatgccgcagcgtgtatgttggcaatatccatcttcaagtgacggacacagtactgcaggaagtcttccaaagcattggtccagtagaagggtgcaagctcatcagaaaagaaaagtcatcctttggtttcattgactactatgaccgcagatatgctgcactggcaattttatctctcaatggcagacaactgtatggtcagccgattaaagtcaattgggcatatacaagtactccgagggaggacacatcaggtcattttaatatttttgttggggatctttgcccggaagtcactgatgctactttgtttgcatttttctctggatactctacttgctcagatgctagggttatgtgggaccagaaaacaggacgatccagagggtttggttttgtttctttcaggaaccagcaggatgctcaaagtgcgataaatgacttgaatgggaagtggcttgggaaccgtcaaattcgttgcaattgggcaacgaaaggtgctaatgctggtgaagagaaacaaattctggacactaaggttgacctgtcaaatggttcatcagaatctggaaaagagaatccaaatgatgatggtcctgaaaataaccctcagtttactactgtttatgttggcaatcttcctcacgaggctaccatgaatgatgtgcacctgtttttccattcactgggggctggttcaattgaggaagtccgtgtaactcgtgataaaggctttggctttgtgaggtacagcacccatgaggaggctgcattggcaattcagatgggtaatggccaacttattggcgggaggcagataaagtccagcaagcacgaactgcagatcctgccaaccttgagtgccacctttagatcgtgcacctggacatcaacccatctcaaccaccgtctacgagactacgatggtgcctatgagcttaggacagccgaggaatctgaccgctgcgaggggtcgtcttctgtggagttcctgctggagggcaacgatgctgtcaggcagggtggtgacctgtacgatgctggcaccacgtgtatgccctgcacccacatctatgtcattccaatcaagtgcttcctccagaccctgtcggctgtcagggtgctcggtttcatcatgaaggacgagagtttattgccggatgaaggacgctgctgcgacacatgcgaggtgatcatccgccagggcgagccatgcagcagtggcgtagcagagagcagcgaggataaggttgtgggcaaggtggctcggtgttcctggggaagcaagccgactccacaagggacagcatccttgcctctgcctcccccagcactggcaccattctccactggagtgtcggccaccgacttgctggcctaccagcgcctgactctgagcaagatggcctcgaacccagccctaatgggtcagcacgccttgaagcaggtcgctgcattggggattggcggcggagccagccagtccatctatgatggcggcttccagggcatcaatactgccaccggcacaacttccgtccagcagcagcagcagctcatgtactactag

SEQ ID NO: 43355 - DNA, 1701 bp, Zea mays
  Peptide Sequence Number=SeqID_86730
atgaacaagacaccggcactcaaggtgccatcacaaacggaactccggttctgtccccgcgggtacgaacaaccccccacattggagggcccgcggggcgacaaggcccctggtcgcccgccgccgcacgctccagcagcagcgacaacgacctccgctccgggtggccgaactgcagcagcgatggcctcgaggcggacgccgctgcaacagtgccctcgcccacgtctacactcgaggggcgaggacaagtacaaagagtcggaggcccggagcgcggatggtggcggtgatcccgtcggcgatgaggacttctccagccgccgccacctcggcaccgacgaaggtggaaagacacgatgcataagccatcgcgggctgagtcttctccaacacgctcctcctccccctacgacacaggggctgggtcccacgcatcatgcaagctggcccaaggcggaagaagccaaactgccacgcgcggtgcatgcaactgcccagcggttacaagcattcctccgttttcgcccaaaccagctggtgaaagggcggacatccatgcagtcggcaggcaaccgcaccaggtgggcgcaccccttcgactccaacgcgcccagcatggaggcccaggcccacacgtcatgcaaccggcgcgccagttgctacgtgcaagcaaccgcaccgcccctcgcgccactaccgcgcctcctcgactacggaaccagtaccgtgactcgaggcaactctgcgtatgacccaacggtgccagccaggcgcatcggtcacgggccagtcagccgcgggagaaggcgcgacagtcgatgcggccaaaaatgggccgacagtaatggcggtggcaggcgggcggaagcggcgggaccggaaaagggggataccccgaaagggatccttctccgcgaaggaaacgggccccgagcccccctactgatcagaggttcgaaggctggcccctcggaggggttcaacagccgcctcagagcgctcgggctccgcgcccactactggtcagaggttcgagggccggcccctcggaagggttcaacggccgcatcaggccactcgggctccgcgcccactactgatcaggggttcgtaggctggccaacgaaggccaagtccggcctcaggcaccataggaaactccgcatcgccctaccccagggctcagactcgggctcagccccggaagacgacgaactccgcttcgcccgaccccagggctcggactcgggctcagccccggaggacgacgaactccgcttcgcccgaccccagggctcggactcagccctggcctcagccgacggtctccgcctcgctcgacccaggggctcggactcgacctcggcgttggaagacagactcgacctcgacctcgaaggagcctccacctcgcccaacccagggctcggaccgaccacgtcacaggaggcgccatcattaccctaccccaagctgactcaggctacggggaacaagaccggcgtcccatctggctcgctccgccaaacatggccctcttacagagggttggccgcgcggggaaggacaggacggcgctcgcgtaaggccgctcgctcccacccgcgtggacgcttggacccccccgggtttgaaacgccgacaactggcctctcggttagcttctgcgagggcacatttttctttggcttcggctag

SEQ ID NO: 43356 - DNA, 318 bp, Zea mays
  Peptide Sequence Number=SeqID_86731
atgatgaaggtcgatgcttgccgaaggtgttcgaaactcaaaaagtggaaaagaataggaatgatgttgggttacaaatatacctttgacttgaaagaagcaattttgacttgtccgaagggttcatgtccgaaggagctttgtcaccagaaaagcttcgacataacacaagagaagtacgacgaagcaagcttcataaacaagcttcatcacgatgaagcaggaaggcagtgcagggagaaggtgttgttcaagttgttgagtacaaatgataatgatgtccctgtgacatttgtaaaccctatatgtaattgttga

SEQ ID NO: 43357 - DNA, 840 bp, Zea mays
  Peptide Sequence Number=SeqID_86732
atgaccgcgtccaaagagccgcctcagagcgcgtgggccccgcacccactactggtcagaggttcgaaggccggcccctcggaagggttcaacggccgcctcaggctactcgggctccgcgcccactacttatcaggggttcgtaggctggccctcgaaaggaatgatcttgtaatggaatcccatcagagggaggcatcgagccctcggactccgtcgaaaggggaccgggtccggcagatcacccgcagtcacttcgccgctccactgaccggtctgacaagaggacagcgtcgcctgcgccgctccgactgctgtgccactcgacagagtgaggctgacaggcagccaggcccggcctcaggcaccataggaaactccgcttcgcccgacccagggctcggactcgggctcagccccggaagacggcgaactccgctccgcccgacccagggctcggactcgggctcagccccggaagacggcgaactccgctccgcccgacccagggctcggactcgggctcagccccggaagacgggctcggactcgggctcagcccctgaagacgacgaactccgcttcgcccaaccccagggctcggactcagccctggcctcagccgacgttctccgcctcgcccgacccaggggctcggactcgacctcggcctcggaagacagactcgacctcgacctcggaggagcctccacatcgcccaacctagggcacagaccgaccacgtcaacaggaggcgccatcattaccctaccccaagctgactcaggctacggggaacaagaccggcgtcccatctggctcgctccgccagacaagtaa

SEQ ID NO: 43358 - DNA, 492 bp, Zea mays
  Peptide Sequence Number=SeqID_86733
atggtgtgtttgggcctcggcggccgcaaaaaacacacactacaagataatccgatcatgcaggctcagatcttgacagttgaaggaagcagcagcaccctcggcgtcaactacaccttcggcgagggtcttctccaagaatccggctcgagcaggcggctcggccggtcaccccgaggcctcggccagctgtcccccgaagacatcagcccggcccgaggcctcggcaactcaattccggcgtcggtcccgccagtggacgacccggccaggctctggccgaccaagtcttcttttcgagccaactctgcctctgtccgtgctgacaccgctacccctggctttggctcatcgaagagcggccgaggggttcctttaactgagcaagagaagcctcggacagcaaggccgaccgagccgagggactcctacgcctccgggatacggatacctcactcgtcacctttgcatggggcgactcacgcttggtga

SEQ ID NO: 43359 - DNA, 441 bp, Zea mays
  Peptide Sequence Number=SeqID_86734
atgggcaagaacaacaagcgcaagcgcgagccaactcctccatcggaggattttggtgactcggagtactcagaggaggagttctcctctgagtctgaggggtctccggctcccatccccctgcgtgagtcgtctgacgactcagacgactcccaggggttcgcggcggaggtctggacgtacatccgggccatcgagcgctccgggctcgagggctcggatgagtcggagtactcctcggatgaggaggactcgtccgaggaggacggtggcggcgacggtgaggacaacgacgacgacgacgacgacgaaggcggtggcggcggtgacggtgacggcagcggcggcagcagcggcggcaagggtgacgacggcggcagcagcaggggcggcagcggtggcggcggcagcagcaggggcagcaacagggccagtggctag

SEQ ID NO: 43360 - DNA, 495 bp, Zea mays
  Peptide Sequence Number=SeqID_86735
atgggttcgaaaacccttagtacgaagtgtacgttcgcaagtcttacccgtctaaggaaaaagactctcaaggatatgctggctattgggaatcaagggatatcaagggtaatcaatttttcaaggaagaaaatgcatcaattgtttagcacacaacttctatcacctaatgcatcaaacaaggcgataaagattttaaaacagcaaggaggtggcaaatgcactgggacttgcctagataacactaggttagtgttgttaggtggcaaccagccttttgtgttggcacttattcagtctgccatcttcaggttgatcccccagcatcaccttggggagaagcccacgcttaacatcatcttgtggtcgactcagctctggtcctccatatcacgtgatcaactagcgtacctcataagatgcacgatgcacatgtatgagtatcaagacgaatatcgcaagataatattacgattttacagaatgaagaattaa

SEQ ID NO: 43361 - DNA, 795 bp, Zea mays
  Peptide Sequence Number=SeqID_86736
atggcgctcagctttcttcctctccctccgcgcgctcctggcccctgctcgtatttcacttggccgcgcctcctggtgattgaggtcgccgagtccctttccccagctcgagttcccatctccctgctccccagcgccgactgctcatcttccatggccggcactcgcccccaacgccgagctcggccctgccctctgctccagctcgcccctctctgcttgtcctcgctgttgggccggtctacagatcgcagtcactgcgttgcccgagtccctggtcgcgcgcgctttctccctgcgcaggacgccgtcgacccttctccatttttccccttctcagtttctgcagatcggacgccctcgcttactccagcttcaacgtcgaggttcctcaccggtggccgcgtctgtgtggttgtgttctttcgtgggagcgctcactttgccgtggtcctgcgctctctgctcggtaggtgcccgtgcgatgccacggaacataaattgcgaacctccaatggacttcatttgagatgcccaaaaaatgggggtaaactgacacagctatcacttgcattacttgccctatgcgcggaagaatctgacacagctatcacccatgaagatttccgattaacttgtggaagcggacttcatttgagacaagacaacaataccagtgttgagcttgccactcggcaatggcacacacgagaacacgggatgatcaagaattttaagaattttcgtgtgcgcacaatgctgtcgattctgaatgttcatgttcagagaatataa

SEQ ID NO: 43362 - DNA, 585 bp, Zea mays
  Peptide Sequence Number=SeqID_86737
atgggcgtcgccgtcgccgagactttcgcccaagagcccccagcacagcctgccgatgcaccaacgccgaacaccaccccggcacatgcgctggcccgggaccaacctgccggcgcctctgatggctggcacgcggaggccgccaacctcgcgcgcacccgattccagccctccgcgcgcggcgcaggggcgaccaacaacactgtctccgcgcctgcgacccaccaccggccgcatgcccccttgctgcgcgggcacctagccaggacacgcaacccccggatgtgtcgtactctgccgccaaaataccgccgaggccctggccaacccaggcgcgccggcgaagggtcgccgtcccacacgcgccgctgccatctcctgcccaaccgcttctgcgacgtcctcccccgcgcgcttcatcgcctccgcctcctccacgagctcgacctcagcaacaaccgcttcgtcggcccgttcccggacgtcgtcctggacctcctggtgtgggacgcgctctccaatgaagagacaatgcaaatcgtggcatatatcgaagtctgcatgatactgatggttgcaatgtag

SEQ ID NO: 43363 - DNA, 213 bp, Zea mays
  Peptide Sequence Number=SeqID_86738
atggccgaggctcgggctacgctcccgaggtaccctaggacattttcgagaccagcgggaacgatttataatggaatcccaccggagggaggcaccgagccctcggaccctatcgaatgggtccaggtccagcaaagcacctgcagaggctcgggggctgctctcgcaccaggctacggccaaactgttgacagcgtcaacaaaccggcttaa

SEQ ID NO: 43364 - DNA, 567 bp, Zea mays
  Peptide Sequence Number=SeqID_86739
atggtacaaagactaacatctgcttctactgtactaaggagggtgttggataatccagcactccaggactgtcaagagaataatggatttggacacatgatggatgaagatgttataaacaatatttcagttcgcttgaagttaagccttactgtttgggacttcactctcccagtgacaccttctttacctgttgtttttggtgtgcaagacagggatcacaaattcttgacaaaaacagtggaagaagcataccgaggagtcgattgcggtgacggaggtctatttggagcagttgtcatccgcaatgatgaagtgatagttagctgccataacatggttctgaagcacactgaccctactgcgcatgctgaagtaactgcaattagagaggcttgcaaaaagctcgggaaaatcgagctctctgactgcgaaatttacgcgtcctgcgagccatgcccaatgtgctttggtgcagttcatctctcccgaatcaagaagctggtttatggggccaaggcggaggctgccatcgccattgacctgcaatgcactactctcttatga

SEQ ID NO: 43365 - DNA, 1971 bp, Zea mays
  Peptide Sequence Number=SeqID_86740
atggagcaagatcagagcgcggattctggttttgattttgcgactggcattgtgaccagcggaagcgccgtggcccctcacagtggagaacaggcagaggcctctgcctaccaggccgacgaccgcatggcattcaatgagacgtattgggaagaaaaggggggcaacagtctgcgcgtgcttgtggcgacagattgtcaccttggctacctcgagaaggacgaggtgcgcggatttgactccttcgacacgtttgaagagatctgctcattggctgtaaaaaacaaggtggatttcctactcctttgtggcaatttgtttcatgagaacaagccttccaattcgacgttggtgaaggccattgagatcctgcggcgctattgcatgaacgactgcccagtccagtttcaggtgattagtgatcaagcagccagcctccagaacaggttttgtcaagtgaattatgaagacccaaactacaaaattggcttgcccgtgttcaccatccatggggaccaagattatcctactggaactgataacctgtcagtgaacgatatattgacagcaggaaattttttgaattatttcggcaagacagatcttggatgcaccggcgttggcaaagtaacagtttatccagtagtaatcagaaagggtgaaacttatattgccatgtatggacttggcaacattaaggatgggagactgaaaagaatgctacatgagcctggtgcagttaactggatgcaacctgaattccaagatgagacaccatcctctgactggttcaacatcttggtccttcaccaaaagaggacacggggaagtcctggagacgctatcagtgagctccttctgccacgttttgtggacatggtaatttggggccatgagcatgaatgtctgattgatccacaggaggttcctggaatgggtttccatatcacccaaccaggttcctcaattgctacctcactgatcaatactgaagcaaatccaaaacatgcgctctttctggaaatcaaggggagagagtacaggacaaccaaaatacctctgcagtctgttagaccttttgagtatgcagaggttgtactggaggaccaggttgatgttgatcctggtgatgaagcatccattcatgagcatttgcacaaagttgtgagcaaccttattgataagagtagggaagaagcatccagtagtggatcaaagcccaagcttccactggttagaataaaggtgcatcacactgggctttcaacgataaattcaaagcaatttggtcagcactacgtgggcaaggttgtaaacccacaagacatacttcttcttacaagatcaaggcaaaggcatcaaactatgcaagaaagctgcaacatttctgaagatctttgtccaaatgagctcaaccagcagacggttgaagcacttatcgcagacagtaacattgtacccaacttcctcctgatcctttcctttctaaaaccgcaggtccttcctatagacgatttcaacagcgcactccatgagtttgtcgagggggacgacaagagggcatttcacgcttgcgtgcagcaaaatatcgaggaagcgatactccaggaaaagaaaagcctgaccagggaaagaacaagctcggagaatctgcagactgatgcactcggcgtgtttgagaagcagaagcgttcgacgacgacggaggagcagcgggcccttgactcggatgatgaacccatcgagtcttccgaccccgaggagagtggtggcagccagcaggcaggaaagaagaggcgagctgcaccaggcggcgggtctgcggctgccggtgcgaggaggaagacggacctggctgcgttccagagggttccggtgaaggaagacgacgccgccacggccaggaaacgccggcctcccgttgccgccgggaggtacggcgctgtgatcaggaggaggatgccgaagtag

SEQ ID NO: 43366 - DNA, 222 bp, Zea mays
  Peptide Sequence Number=SeqID_86741
atgggctacgaagcggctgcggctgttgctgcgagaggccagctgcgtggagaagagaagcgcggcgcgagaagccatggccagcgagagaaggagaaggagaagaagaaggcagcgacgaggtgcagcgttgtgtggatgcttaggagagtcctgccgcttcgtagaggagcaaatgctttatacaatacaagctcaccatacaacacgaccacgggatga

SEQ ID NO: 43367 - DNA, 969 bp, Zea mays
  Peptide Sequence Number=SeqID_86742
atggcgccgagctatgttggctatagcgccgagatgaaagacatgtaccgggaggccttgtggcagaagagaggccgttctcgggatttatatccggatgtatctagtaaggatgctcttgttcctcctgaacttcctgtgcctaactgtgactgtggcagaccgacttggagccagcggcaaagaaaaagaaaaaatgagtgggcgcaagagttgaagtttgatccagtactctgcaaacatggtattgaagctaagtatggattagttccttccgagcttggtgttggctatttttgtggacatatggtagattacgatgagagatcgaggaaatgcggttgggagagttacgacgacaaaggagagttgatgcgtacaataaagtccaagagactaaagggacagaagatgcattgtggatctcagctcgtcgattcgtacattaacgatcgcatacaggatatgcgtaggttcgcaaaatcaatgagttttgacatcccgatgcgtgcagagcagaggagattgaaggcggcaaatgagaagagagcacaggatgcaagggaatgggaggcggctagagccgagaaacatatgttggggaatcttgttgatcatctcaagggaaagattggatgtgtcgtgaactatctcacagatgaggcacgtgcaagatacgttctggaaaaaatggcgacggtggagctgatggaggaggaacatcaaggactacatgaggaagaggaggacgacacatcaaggttgagtgagctcatcgcactagctgaggcaagatacgtgctcaagaggaggatgacgagttatgtctcaagccgtcgaatagatgaagcagaagccaattattacaagagaaatgcggaaaagtgtgatgcaggacaatgcagcaagtggaacgagatgtcgttgaggattgcgcgacggatgactctgaagatgaattacttatag

SEQ ID NO: 43368 - DNA, 564 bp, Zea mays
  Peptide Sequence Number=SeqID_86743
aatcccgcgaaccatcgagtttttgaacgcaagttgcgcccgaagccttctggcggagggcacgtctgcctgggcgtcacgccaaaagacactcccaacacccccccgcggggcgagggacgtggcgtctggccccccgcgccacagggcgagcgtcccggcgcgcggccgccattcggccctaaggacccatcgagcgaccgagcttgccctcggaccgcgaccccagcgacggaccgggcccaagttctctggaaagggacgcctgggagggtgagagccccgtccggcccggaccctatcgcaccacgaggcgccatcaacgagtcgggttgtttgggaatgcagcccaaatcgggcgggttcgagttggagcactcctgtcgggacccgaaagatggtgaactatgcctgagcggggcgaagccagaggaaactctggtggaggctcgaagcgatactgacgatagctggagcccacacgagttctatcgggtaaagccaatgattagaggcatcaggggcgcaacgccctcgacctattctcaaactttaaataggtag

SEQ ID NO: 43369 - DNA, 2607 bp, Zea mays
  Peptide Sequence Number=SeqID_86744
atggaggttacgcagttgctcattaatgctcagtcgattgatggaactgtacgtaagcacgcggaagaaagtcttaagcagtttcaggagcaaaaccttgcgggtttcttgttgtcgcttgctggagagcttgcgaatgatgagaagccagtagatagcaggaaattagctggtttagtccttaaaaatgctcttgatgctaaggaacaacacaggaagtatgagcttgttcagagatggttggctctagacatgtcaacaaagtcgcagatcagagctttcttgttgaagacactgtcggcacctgtgcctgatgttcgttcgactgcatctcaggtcattgctaaggttgcaggtattgagttaccacagaagcagtggcctgagctcatagtgtctcttctctcaaatattcaccagttacctgctcatgtcaagcaagccactttggagactcttggatacctatgtgaagaagtgtcacctgatgttgttgaacaggagcatgtaaataagatactcacagctgttgttcagggtatgaatgctgctgaaggtaatactgatgttagacttgctgcaacccgtgctttatacatggctctcggattcgcccaagcaaatttcaacaacgacatggagcgtgattatatcatgagagttgtgtgtgaagcaaccctgtcccctgaggtgaaaattaggcaggcagcttttgagtgtttggtatctatcgcttccacatactatgagaagttggcgcattacatgcaagatatattcaacatcacagctaaggctgtaagagaagatgacgagtctgttgctctacaggcaattgagttctggagttctatttgtgacgaagagattgacatcttagaagaatatggtggtgagttcgctggggattctgatgttccatgcttttattttactaagcaggctctccctggtcttgtgcctctactgctggagactcttctgaagcaagaagaagatcaagatttggatgaaggggcttggaatattgcaatggcaggtgggacatgcctcggtttggttgctagggcagttggagatgacattgttccacatgtcatgccgtttattgaagagaaaatatcaaagcctgattggagagagcgagaagctgcaacttatgcttttggttccattttggaaggcccttctgccgataagttgatggcaattgttaacgcagcgttaacatttatgctcaatgctctaacaaatgacccaagcaaccatgtgaaagacacaaccgcatggacccttggtcggatatttgagttccttcatggttcaacaatcgagacacctattattaatcaggcaaactgccagcagataatcacagtactcatccagagcatgaatgatgcgcctaatgttgccgagaaggcttgtggggctctgtacttccttgctcaaggctatgaggatatcggtcccagttctccgttaacacccttcttccaggaaattattaagtcacttttagctgttgcacacagagaggatgcaactgaatcacgcttgcggactgcagcatatgaggcattgaatgaagttgtcaggtgttcaactgatgaaacgtctaccatggttctgcaattagtaccagtgataatgatggagcttcacaatactttggaaggggaaaagctttcattggatgagagggagaaacaaaacgagttgcagggacttctatgtggatgcttgcaggtcatcatacagaaattaggatctgaaccaaccaagtctaagttcatggagtatgcagaccaaatgatgggacttttcctgagggtgtttggttgtagaagtgcaactgcacatgaggaagccatgcttgccattggtgctcttgcttatgcagcaggtcccaattttgccaaatacatgcctgagttttataagtacttggagatgggtcttcaaaactttgaagaataccaagtgtgtgctgttactgttggtgttgttggggatgtctgcagagcattggaggacaagattttaccttattgcgatgggattatgacacagcttctgaaagatttgtcgagcaaccaattgcaccgatcagtgaagccaccgatattctcctgttttggtgacatagcacttgctatcggtgaggattttgataagtactggaggtattcaatgccgatgcttcagagtgccgcagagttatctgctcactcggctggagctgatgatgaaatgacggagtacacaaactcattgagaaacggaatccttgaggcttattcaggcatatttcaaggtttcaagaactccgccaaaacccagctcctgattcctttcgcaccccatatcctccagtttttggacagtatatacatggagaaagacatggacgaggtggtgatgaagacagcgattggggtcttaggagatttagcagatacactagggagtcatgtgggtggtttgatacaacagtcagtgtcaagtaaagagttcttaaacgaatgtttgtcttctgaagaccacacaattaaagaagcagccgaatgggcgaagcatgccataacccgtgccatatctgtttga

SEQ ID NO: 43370 - DNA, 597 bp, Zea mays
  Peptide Sequence Number=SeqID_86745
atggcgatggcaacatcgatgagtttgaatctaattggggcattcaaaggcttgtctctttcttcgacttcgtcttttcttagaggcgatttgagtttttcccccaaaacctctttcacggtgactcttcctctggaaaatcttcaagctccgattccgttgacaattgaatcggcccataagaaaggagctggtagcaccaagaacggtcgtgattctcctgggcaacgactcggcgtcaagatctacggtgaccaagttgctaaacctggtgctatcattgttcgtcaacgtggcactaagttccatgctgggaaaaatgttgggattggtaaagatcataccatcttctctttaatcgatggattagtcaagttcgagaagtttggtcctgacaggaagaagataagtgtgtatccaagagaaattgtaccagagaatcccaatagctacagagcaagaaagagagaaaacttcagattgcaaagggagaagaagaaggcgagacgcgagaattactcgtacacacttcctacaccagaacttgttcttgcatctgcctcagtcgatgatgctgaagccaatccggagtgctag

SEQ ID NO: 43371 - DNA, 1401 bp, Zea mays
  Peptide Sequence Number=SeqID_86746
atgccgccttccaaagcacgccgaaagaggtcacttcgtgatatcactgccaccgttgccactgggcctgttgccaactcgaaacctggctcatcatcgacgaacgaggggaagcaacatgacaagaaaaaggagggtccacaggaaccggacatcccaccattaccgccggtggtggtgaatatagtcccacgacaaggattaggatgtgaagtagtggaagggctactcgtgcctagtcggaagcgagagtacaagcccaatagcaagtatactgtgggaaatcacccgatctatgccatcgggttcaatttcattgacatgcgctactatgatgtctttgccatcgccagttgcaatagtgtgataatttaccgatgccttgagaatggtggttttggtcttctacaaaattatgttgatgaggataaggatgagtcattctacactctaagctggaccatcgatcaagttgatagctcaccgctgttggtggccgctggaagcaatcggatcattcgggtcatcaattgtgctaccgaaaagttagataagagcttagttggccatggtggttcaatacatgagataaggactcatgcctcgaagccatcactcatcatttctgccagcaaggatgaatctattaggctatggaatgtccatactgggatttgcatcttagtctttgcaggggctggaggccatcgacatgatgtgttgagtgttgacttccaccctaccgaggttgggatttttgcaagttgtggcatggacaatactgtgaagatttggtcaatgaaagaattttggatatatgttgaaaaatcatattcatggactggccatccatcaaagtttccaacgaggaatatccagtttccggtcttgactgctgcagtacactctgactatgttgattgtacaagatggcttggtgacttcatcctatcaaaagaaaaagtagccttgaccgcgtatcttaattgtcaccatgccgccacaaccaaaccgtgcaaatatggtttttggagaatggaccaaagtgtaaagaatgcagttttgctttgggaaccaaaaccagacaagcgtaggcctggggaggggagtgttgatgttcttcagaagtacccggtgccaaagtgttcattatggtttatgaaattttcatgtgatttttactccaaccagatggcaataggcaacaataaaggcgagatctatgtctgggaagtgcagtccagcccgcccgtcttaattgaccgcacgatccttggagccgccgacgacggcgcgatctggcggtgggacgaagtggaccctgctgcttccagctccaaacctgatcaagctgctgcgcccgccgccggtgcgggtgccgacgccgacgccgacgcctga

SEQ ID NO: 43372 - DNA, 1272 bp, Zea mays
  Peptide Sequence Number=SeqID_86747
atgtcggtggcggtgtgccgtggcccagctgttccggcgttcgaggcgccctgctggctgcgccctgctgagccgtacaggcagccggaggccgtcgtcgacgtcgaccggcctgcgcaggcggacatatggaacgccatccaggccgacgtgggcaaggtgggcgccggcgccaagaaggcgtccaagccgtacgtgcgggacccattcgtgcgccggtcgtcgatcctgatgagccagaagagcctcgaggtctgcacggagagcctcggcaacgagaccggctccggcgacttcgcgtcatccctggacatgtcctgcctgttcgacgcgccgctgccggcggcggcggatgagtccttctggcagcacgacgcggatcgctgctgcgaggagaaggagcagtgggggagcaaggacctcgcggcggtgaactaccactgctcggccgggacgcggccacggcgccgctcgttcccgccgccgctgccgtccatgtcgcgccgcgacgggccgtgcgtgcagatgcgcccgcgccgccaggacgggcgcctcgtgatcgaggccgtggcggtgcggccgcgcgggtacctccacgcgaggcgccagggcggacgcctctgcctctccttcgtcgagtgctctgcccgcgaccagagcgcggcgaccagggtcactgcggcggcggcggcagaggcgccgtatttctgcgccgtggagcccaggaacgcgcaagaggaagaggcggccgtggaaatggacgacgacgaggtgatggaggatgatgaggaggaggaggaggtggaggtgctggacaggggcaccgtcgttgaggtcaaggtgagcacgcagccgcaggcaccaaccgcggccaaggtgcaccgctcgacgctcgtgatcaacaagttcgtcggcagcacgccgctgtccgtgtatcaaccccggcgccacgccgccaacgcggcacagcccgaggcggaaacctgcgacgagacggcggcgcagtcaccgcgcccgacggccctgcgccgggtgccgtcgtccacgacgactctggcggccgcggtcgccgcagcctcgacggacgacgacgacgagtgcggcgggctgcacctctccgcctccgccgcggctgagaccaagcagctgctgctgtcgttcacgtcgcggaggggcgacgggcaggacctgctgcagagcgtgcggcggtgccggcagctgcggcagaagaagctcttcatcctggagccctactgcattgccacctcctga

SEQ ID NO: 43373 - DNA, 2043 bp, Zea mays
  Peptide Sequence Number=SeqID_86748
atggtggagggcggcggcgctggtgctggcagagctgaggaggagctagatggacagttcgtgatgtccatgacttgtgtcctcctgggcactgttcctgctttgatgcttatgtgctacttgggttttccatcttgtacagaggcctgctctcttctccccaagatctttagcaaggaaacacatccaaagatagcacaagttcttctggaacgccagagacctgatatggcacttcttgtgctaaagtgcacagggcgtgatagcttctctgctacagagaacttcgaaaaggatggcatttcatctcttagcgaggcagtgactgcggtccgtgttagaattgaatgtggcctcctaacagaggcatttatgtatcataggagctactgctctaaggtgaaagagcaacactcagcaaatatgacacacacggaggatgcattcgaaggctcttggatttatcatgttgagatgatgatggtcgaattttgtactatctgcattgaaagaaatttagttgataaaatgattgatctgccctgggattctgaggaagagaaacatcttcacaagtccctcttcgagtctgctcatgaagcgcccatggatccaattggtagtctgcttgttgtctactaccttcggcgttatcgatatttggaggcatacggggttgatcgtagtcttcagaaatttgagcaaaaggaattggaaaatgccactgaagagattgcttcaaaaattagagcaattgctcaatggagagaaagtttggttcttcggccccacgagcgtgattatgagctctggcctgctgccatgtgggtgagcgcgtggggggacctccagccgctccgcaagatccgtccgccgccatgcgagcgagctcacaggggagctctaggcccgccacctgccgctcccatgtggctgacctctgacccagcgtcacgcgggcgggttggagcccctgccaccgcatgggcgaggcctagccccgccagccgctgctgcgaggaccatcttcaccccggcgctaccctgctgcaatgctggcggcttgatgcatgcataggaaaggagaaagtggaagaaaggaaaaaagaggctgacaggtgggccccacatgctaaatgccttgacatgcttccagaggttcagagagagaatgtgaaagccatcaacagtggagaacaaattcagtttgctcgaactgctcaaatatcttctccagctcatgtgggcaaatcacaaaatcctgtaatggacttgagcacaacttttaccagtgttcttcaaaataagtcaagcctcttctcaaaaaacaatgcattgactgattctagtggtctgatccgaagcagccactcagagagaaaggtcccatctgctctgcagaccagggcaccaccccatgggtcacctatatccaatatgagatcaactgtagggggtaagttccccacagtgggccagaatgttgacagtccatttttgaggggggctaaaggtatcagttctagaaaaggagagacgggattcaaagaagggattaaatatgctgatcacgatccactgcctatgtatttgaacttgagttctggtgatacacccaccaaagactaccgaacaagtttgttgaaggccgaggctaacaaaaccacttattttcaaggacaagattctgttggaaaaggagagttccactttggttcacgtgctgtgaagcctttcaacttaaatggaactggcgcaggtcaaaatggcctcgctaagatctcgggatatgctggttttcgtgaggattataaagtaccaactaaggagaacatcttgagcaagaaatcttcagttggtggagcagaagccagcaaaggtgtgtcaaggtggagatccgatgagtctagtgaagaagagagaacaaaccgggagagcggagctcctcttctatgccctaatgtgacaacaattgttttaagggaatgtgtatgcgggatgcggctatcatgcataatctacattgccatggccgagatgtag

SEQ ID NO: 43374 - DNA, 2841 bp, Zea mays
  Peptide Sequence Number=SeqID_86749
atggatattcttcgcagtgcctttggatgcttctcagaaaccgcctctttccactggctatatgaaattccaaatgagacttccctgcgtcgccaaaggaatgggaaacttcttggttcgaaacctttgatcctatgccgcctgtctgaaaataaatataagcaaggcacctatgactacgaatccgaaggccaagcatgcggatttgacatggtttcccacttttctcagagtcactgggcaatagaaaagtatacaagcacatttccaatctacataaagataccaaccagggtttacccatcaatccagggttccgcgaagttcacactccaatatcgattgaatatagatggtaatcccattaatattactttatcaaaagcaattaagcttacatatgctgatggaacccgcattgctaatgagttcatattaaaagaaataataaatgtgttgaataagtacgcagaaaacaaccaaagttgcgatgttgaagcaatcagtgtcagggcttattcagagggtagtatagatttgaatcaagcttcaattccaactaaagatgaatctttgaactatctgaagggagcacttattaaatacagcgacataaataatttagaaatacccaagatgggtcgacgttcaaaaagacgctatcagtcatatatccctgtcgataaaacagaaatgaaaaacaaaactctattttttgttgctgatctagaaactcttttattaaaaagacgagacacggatgtcgacaaaactcacgtgccctacgcaggggggtatatgatggttgatatggaaaagcgggttaacgcggaccatattacgacgttctatgcacatgactactcaaaagtgtgccaggattttcacgatatgagtgaaaagatgctcacagagatgattaatagaatagtaaaggatgttcaaagaacaggaagttcaatggttgtatactttcacaatttatctcagttcgacggtattatgatactctcttttttaactaaaagttataaaaactgtcatatagagcccatcatgagaaacgactgtatttattccataaaactgtataaggtatccaaaaatggggataaaaggcttgttttaacgttcatggattcgtacctcctgttgaaagtaaagctcgctgatctagccaatagtttttgcccagaattgggggggaagggatctttcgatcaccagaatgtcaccgttgataaactacctagtattagggaagactctttaacttatcttaaacaagatattctaataacagctgctgttatgcaacgcgctaaagccattatttgggaagagtatgggattgatatcctgaaagtattaacaatatcagcattggccctaaaaatatttagacgtgtttactataaggatgatgatgataatcgcatctacattcctgacgataatgaggctcaatttattagggaaggctactacggtggtcacacggacgtgtataagccatacggggagaatttgtattattatgatgtaaattctctatacccctcatctatgctagatgatatgcctataggcaagacccgctgggttagtgatctaggatcaaagaaatcaaagattgtgttgaatgatatgtttgggttcattagagcttttataatttgtcctaagcatattaaaaagcctcttctaccttataaaaaggatgatggtacgataatcttccccacggggagatttctcggtgtttatttttctgaggagcttaagtatgcagtaagtttgggctacaaagtatacccgatctgtggatatatctttgatagaaaggaatcaccattcaagcgttttgtgtacgacatctacagcaaaaggcttgatgctaaggctaaaggggagaaagctctggatttcatctataaaatcaccatgaacagtctctacgggaggttcgggatcagccccgaaagcacaacgactcaaattgtttctacagaagaaagtagaaaattagctctctataatgatgggtttgttcaaagttatgagcttagttcagacaagtgcctagtaacatgcaaaaatgtcagaagtttggatttactgaagcttagttcagaccgccctacttatgctgctgttcaaatatcggccgctgtcacgggttatgcccgcataagaatgcacccattcatttcgagggatgactgctattacacggatacggactcagtcgttgttgagagggaacttcctgaagaagaggtatcacctaccgctttgggtaagtttaagcatgagcactttgtcgaatatggcatctttttagcacctaagtcctatatgcttaaggcatctagtgtggaccaacccataataaagtttaaaggagcgggtaaagatgaggctgatgaagaatggttcatcaaccagctagctgaccctagggctaaaaaagtgatttcatatgtccgaaagttcagtagaaacttccgtgaactgttggttcaagagaaaatgtgtaagtataccatggggttagaaagtaaaaagagggagtatgtgttcgacaaaaatggagtatgggttgatactaagccctgccatataggtgactttgatgtgaaaagtatcaatccgacctcctatcggataattatgaatttgttagaggagaatgaagatctccgaaatgaattttctaattcggaaatcatgattgctaatcgggagattcaagctgatgctgctaaaaagaggaaagcctctaagctaagaggaaagcctctaagagggggagacaccccttctcatattgaagaatag

SEQ ID NO: 43375 - DNA, 258 bp, Zea mays
  Peptide Sequence Number=SeqID_86750
atgaaccgtacgagcacatcctctgtcacccccaccgcgcttacggctctataccccaacccaacttgctctggccctgggtcctcccgcatctcttcctcggcaggaagggcgcggaagctaccgtttaacgaatgcaagcaaggtagcttgcttactctccatctagcgtgcgttggcggcaaggaaagaggcattggaaagactagaccatacacattaattagtacaagaaagaggcattcgggaagcgactag

SEQ ID NO: 43376 - protein, 91 aa, Zea mays
  Coding DNA Sequence Number=SeqID_1
  Subcellular localization annotation: CTP_CleavageSite=61; ConfidenceScore=5.42e-01
MNTKAAGFPPLSRRSPAASLLPPFALALALDPSGLGHTATLTRRPKGPPGLGTPTIVIRFRASRDRRSSIGDQVIKLSEFYEAEDLEHLFV

SEQ ID NO: 43377 - protein, 94 aa, Zea mays
  Coding DNA Sequence Number=SeqID_2
LIHTCPLSPVKCLTARPNSLNCISRVGEVLNSPLSDPGLFHLTCIRFAKDVEAWKRVLLSGSTMPKGLVSSALKAAAKIFSLIIPPFRWMVTER

SEQ ID NO: 43378 - protein, 52 aa, Zea mays
  Coding DNA Sequence Number=SeqID_3
  Gene Ontology: Mol. function=two-component response regulator activity; Cellular component=intracellular; Biological process=two -component signal transduction system (phosphorelay)
  Homolog annotation: Hit_ID=P03029; Match level="QueryCoverage=100%, HitCoverage=11%, E-value=5e-13, Identity=73%"; Hit description =Nitrogen assimilation regulatory protein
  Pfam annotation: Domain name=HTH_8; Domain location=9-49; Score=65.0; E_value=2.6e-16; Accession=PF02954.10; Description=Bacterial regulatory protein, Fis family
HQNLLSEAQPELERTLLTTALRHTQGHKQEAARLLGWGRNTLTRKLKELGME

SEQ ID NO: 43379 - protein, 116 aa, Zea mays
  Coding DNA Sequence Number=SeqID_4
  Gene Ontology: Mol. function=endopeptidase inhibitor activity; Cellular component=plasma membrane
  Homolog annotation: Hit_ID=P76578; Match level="QueryCoverage=98%, HitCoverage=6%, E-value=7e-59, Identity=100%"; Hit description =Uncharacterized lipoprotein yfhM precursor
MADLVYTGRFDLNPARNTREKLLLPLGDIKPLQQAGVYLAVMNQAGRYDYSNPATLFTLSDIGVSAHRYHNRLDIFTQSLENGAAQQGIEVSLLNEKGQTLTQATSDAQGHVQLGK

SEQ ID NO: 43380 - protein, 273 aa, Zea mays
  Coding DNA Sequence Number=SeqID_5
MDESGVKKEIENSDGGSLPKPAFCENEDGFPKLLRACTVRLRIRSQPEYDGREFIEHGTEKYVVTVYMGSSPHHVEWSVTAAGHRFKDTYQVVAHKALRALCQIYEEEVADTPLRFFPPFQRNRPVWMARMRALEGQQLLEDDPLVVYLTAYLLTLDARYDFLARHHRRMIARVEDVENLNPLKQAKDEHVQKLMEAYLVTHNQQGAIVLEEIPVFPQAMDKQEHPKSSQDPPPELFEPLTMKKILAPSLEVKEEAASTPPALPPSEELQELV

SEQ ID NO: 43381 - protein, 208 aa, Zea mays
  Coding DNA Sequence Number=SeqID_6
  Gene Ontology: Mol. function=protein binding; Cellular component =integral to membrane
  Homolog annotation: Hit_ID=P16916; Match level="QueryCoverage=98%, HitCoverage=18%, E-value=1e-103, Identity=75%"; Hit description =Protein rhsA precursor
QLPDKTPAPVGSLGPGWKMPADIRLQLRDNTLILSDNGGRSLYFEHLFPGEDGYSRSESLWLVRGGVAKLDEGHRLAALWQALPEELRLSPHRYLATNSPQGPWWLLGWCERVPEADEVLPAPLPPYRAQRAEEARQQAISGGTEPSAFPDTLPGYTEYGRDNGIRLSAVWLTHDPEYPENLPAAPLVRYGWTPRGELAVVYDRSGKQ

SEQ ID NO: 43382 - protein, 110 aa, Zea mays
  Coding DNA Sequence Number=SeqID_7
  Homolog annotation: Hit_ID=Q75HB0; Match level="QueryCoverage=29%, HitCoverage=8%, E-value=7e-09, Identity=84%"; Hit description =Expressed protein
MDRNHTHLVKQRRNINNVIFVSKLLLCLVKNHGIVYITNKGARSTIFLKEAYENCIFGVRLRVYKSMVKTKLDWGGKRPQRRIRRSRSYVQKSFGMTAERRNRLKDKKSS

SEQ ID NO: 43383 - protein, 177 aa, Zea mays
  Coding DNA Sequence Number=SeqID_8
  Homolog annotation: Hit_ID=Q5JLD2; Match level="QueryCoverage=94%, HitCoverage=75%, E-value=1e-48, Identity=49%"; Hit description =Putative uncharacterized protein P0413C03.32
MAIGSSTFPDIIVKEFEEGKETLQAKRRRMLQFCPENVEMTRSMTEEGLLESLQEMDFSAHQNASPSQQSIVVNNNRAQARPTPLKAGKSIIGAKKARTSVAFPFELIKPSSIRGDVTLSDINEKLHAPPPYKIRHKSDEEPSSLQASAISGKPVVHKTKIHTEGGKGSITITRTRG

SEQ ID NO: 43384 - protein, 54 aa, Zea mays
  Coding DNA Sequence Number=SeqID_9
MGFLFQRQKVKKEGLIRVLPASQPVLPPGVFLPPGGIFDRLTAAARYALRDVFP

SEQ ID NO: 43385 - protein, 86 aa, Zea mays
  Coding DNA Sequence Number=SeqID_10
  Gene Ontology: Mol. function=oxidoreductase activity
  Homolog annotation: Hit_ID=Q83QQ8; Match level="QueryCoverage=100%, HitCoverage=17%, E-value=3e-38, Identity=72%"; Hit description =UPF0209 protein yfcK
AQWAKEVDVSDKEARCGVRCATRDHLPMVGNVPDYEATLVEYASLAEQKDEAMSDEPIPMDASTLAALNPNRLWVRKLLKGKAVKA

SEQ ID NO: 43386 - protein, 118 aa, Zea mays
  Coding DNA Sequence Number=SeqID_11
  Gene Ontology: Mol. function=hydrolase activity, acting on ester bonds; Cellular component=membrane; Biological process=biosynthetic process
  Homolog annotation: Hit_ID=Q8XBV9; Match level="QueryCoverage=100%, HitCoverage=9%, E-value=4e-56, Identity=95%"; Hit description =Enterobactin synthetase component F
  Pfam annotation: Domain name=PP-binding; Domain location=34-98; Score= 47.4; E_value=5.1e-11; Accession=PF00550.16; Description =Phosphopantetheine attachment site
LPLSANGKLDRKALPLPELKAQAPGRAPKAGSETIIAAAFSSLLGCDVQDADADFFALGGHSLLAMKLAAQLSRQVARQVTPGQVMVASTVAKLATIIDAEEDSTRRMGFETILPLRE

SEQ ID NO: 43387 - protein, 134 aa, Zea mays
  Coding DNA Sequence Number=SeqID_12
  Gene Ontology: Mol. function=dTDP-4-dehydrorhamnose reductase activity; Biological process=extracellular polysaccharide biosynthetic process
  Homolog annotation: Hit_ID=Q46769; Match level="QueryCoverage=100%, HitCoverage=44%, E-value=1e-59, Identity=86%"; Hit description=dTDP -4-dehydrorhamnose reductase
  Pfam annotation: Domain name=RmlD_sub_bind; Domain location=1-130; Score=-54.6; E_value=2.3e-09; Accession=PF04321.8; Description=RmlD substrate binding domain
MLRLAKEREELAVINDQFGAPTGAELLADCTAHAIRVALNKPDVAGLYHLVASGTTTWYDYAALVFEEARKAGIPLALNKLNAVPTTAYPTPARRPHNSRLNTEKFQQNFALVLPDWQVGVKRMLNELFTTTAI

SEQ ID NO: 43388 - protein, 168 aa, Zea mays
  Coding DNA Sequence Number=SeqID_13
  Gene Ontology: Mol. function=transferase activity, transferring phosphorus-containing groups; Cellular component=integral to membrane; Biological process=two-component signal transduction system (phosphorelay)
  Homolog annotation: Hit_ID=P77510; Match level="QueryCoverage=100%, HitCoverage=30%, E-value=3e-90, Identity=100%"; Hit description =Sensor kinase dpiB
MLQLNENKQFAFFQRLAFPLRIFLLILVFSIFVIAALAQYFTASFEDYLTLHVRDMAMNQAKIIASNDSVISAVKTRDYKRLATIANKLQRDTDFDYVVIGDRHSIRLYHPNPEKIGYPMQFTKQGALEKGESYFITGKGSMGMAMRAKTPIFDDDGKVIGVVSIGYL

SEQ ID NO: 43389 - protein, 134 aa, Zea mays
  Coding DNA Sequence Number=SeqID_14
  Homolog annotation: Hit_ID=Q6UAS3; Match level="QueryCoverage=56%, HitCoverage=31%, E-value=6e-21, Identity=65%"; Hit description=Gp59
MGHKIITLSGAATDVLYALFFRGALLSGDLPSKSGTAELRELGFAETRHTATEYQKENHFTFLTSEGQKFAVEHLVNTRFGEQQYCASMTLGVEIDTSAAQKAIDELDQRIRDTVSFELIRNGVSFIKDAAIAN

SEQ ID NO: 43390 - protein, 170 aa, Zea mays
  Coding DNA Sequence Number=SeqID_15
  Gene Ontology: Mol. function=deoxyribose-phosphate aldolase activity; Cellular component=cytoplasm; Biological process=deoxyribonucleotide catabolic process
  Homolog annotation: Hit_ID=Q8ZJV8; Match level="QueryCoverage=100%, HitCoverage=65%, E-value=3e-79, Identity=90%"; Hit description =Deoxyribose-phosphate aldolase
  Pfam annotation: Domain name=DeoC; Domain location=10-170; Score =106.8; E_value=6.4e-29; Accession=PF01791.10; Description =Deoxyribose-phosphate aldolase
MTDLKASSLRALKLMDLTTLNDDDTDEKVIALCHQAKTPVGNTAAICIYPRFIPIARKTLKEQGTPEIRIATVTNFPHGNDDIDIALAETRAAIAYGADEVDVVFPYRALMAGNEQVGFDLVKACKEACAAANVLLKVIIETGELKDEALIRKASEISIKAGADFIKTST

SEQ ID NO: 43391 - protein, 61 aa, Zea mays
  Coding DNA Sequence Number=SeqID_16
  Subcellular localization annotation: CTP_CleavageSite=26; ConfidenceScore=5.60e-01
MTLGQNQCKNTSFHYGLSGGKAKTVRALARTVRPQARTVRSGRTVRTWLADRPRSAEWPNG

SEQ ID NO: 43392 - protein, 357 aa, Zea mays
  Coding DNA Sequence Number=SeqID_17
  Pfam annotation: Domain name=MAP7; Domain location=195-352; Score= -81.5; E_value=0.069; Accession=PF05672.2; Description=MAP7 (E-MAP -115) family
MPTSSSSAAATPPADASSEEMLSTVAAEELRADDTVDFVMNKDRQGAAQKRQAVVRLPEARPKRSRGTAKAAASSGSQPTLAAKSVVPGSSRVPEAVKAASAGGTKPAPAGAAKARELPPPGKRVADFATEISVDDYLVGSGEGQLVVVPPVVATAAAAVVPGERGSALSAGGEIPALTAVKDEAGAVSRRLKEALSQAADFADRVASGALTAVVSAEVERLRAQHADVVREKSVVDSKCCKLAEKVAALEGERTDLRRQLAEERREANEAFAKAQSAQAEANLARVEGSLARQRAEEWEERFNALQTRVERAEASTRSEAERTRKQLMDSYHELGARTTDFEVPDQEPGLRCLEWL

SEQ ID NO: 43393 - protein, 169 aa, Zea mays
  Coding DNA Sequence Number=SeqID_18
  Gene Ontology: Mol. function=peptidase activity; Cellular component =integral to membrane; Biological process=intracellular signaling cascade
  Homolog annotation: Hit_ID=P46474; Match level="QueryCoverage=100%, HitCoverage=13%, E-value=9e-94, Identity=100%"; Hit description =Uncharacterized protein yhdP precursor
GEADNATLVYGGNPQLFPYKHNEGQFEVLVPLRNAKFAFQPDWPALTNLDIELDFINDGLWMKTDGVNLGGVRASNLTAVIPDYSKEKLLIDADIKGPGKAVGPYFDETPLKDSLGATLQELQLDGDVNARLHLDIPLNGELVTAKGEVTLRNNSLFIKPLDSTLKNLS

SEQ ID NO: 43394 - protein, 153 aa, Zea mays
  Coding DNA Sequence Number=SeqID_19
  Gene Ontology: Mol. function=[citrate (pro-3S)-lyase] ligase activity; Biological process=biosynthetic process
  Homolog annotation: Hit_ID=P77390; Match level="QueryCoverage=100%, HitCoverage=43%, E-value=5e-82, Identity=100%"; Hit description =[Citrate [pro-3S]-lyase] ligase
  Pfam annotation: Domain name=Acetyltransf_1; Domain location=23-94; Score=26.7; E_value=8.3e-05; Accession=PF00583.15; Description =Acetyltransferase (GNAT) family
MAEIAQFLHENDLSVDTTVEVFITVTRDEKLIACGGIAGNIIKCVAISESVRGEGLALTLATELINLAYERHSTHLFIYTKTEYEALFRQCGFSTLTSVPGVMVLMENSATRLKRYAESLKKFRHPGNKIGCIVMNANPFTNGHRYLIQQAAA

SEQ ID NO: 43395 - protein, 160 aa, Zea mays
  Coding DNA Sequence Number=SeqID_20
  Gene Ontology: Mol. function=transporter activity; Cellular component= integral to membrane; Biological process=response to stress
  Homolog annotation: Hit_ID=Q01605; Match level="QueryCoverage=93%, HitCoverage=42%, E-value=1e-73, Identity=87%"; Hit description=Outer membrane pore protein E precursor
  Pfam annotation: Domain name=Porin_1; Domain location=1-160; Score =38.0; E_value=2.1e-10; Accession=PF00267.12; Description=Gram -negative porin
MATRAMRVWANNTESSKNQSWTRLAFAGLKYKDLGSFDYGRNLGALYDVEAWTDMFPEFGGDSSAQTDNFMTKRASGLATYRNTDFFGVIDGLNLTLQYQGKNENRDVKKQNGDGFGTSLTYDFGGSDFAISGAYTNSDRTNEQNLQSRGTGKRAEAWAT

SEQ ID NO: 43396 - protein, 248 aa, Zea mays
  Coding DNA Sequence Number=SeqID_21
  Homolog annotation: Hit_ID=A2XFR6; Match level="QueryCoverage=54%, HitCoverage=38%, E-value=5e-10, Identity=33%"; Hit description =Putative uncharacterized protein
AFSEHYSITERDTVKAAMQDAARRALSQYCSLFSGVADGLDLKYYPRRSIGSAGGVIVSPVSEGNPRLNSMVNLAAVLNIELDHALDELGKVRAKVVELRAECAARHYLDGGSPAPIGIQHPYCSPPHGRFDYGTPRQQDPDRFGSIDRQSQKSDLMCVCFLQMSENIRRGARRAQPEQRAPQEDAAQQQQLPLPPPMTVEQMFMMQTQAVQAFGQTLAAMQQVQQQPPLPQPLVQVQMPQVPRDKRA

SEQ ID NO: 43397 - protein, 174 aa, Zea mays
  Coding DNA Sequence Number=SeqID_22
  Gene Ontology: Mol. function=cysteine-type peptidase activity; Biological process=proteolysis
  Homolog annotation: Hit_ID=Q5NKP7; Match level="QueryCoverage=95%, HitCoverage=19%, E-value=5e-32, Identity=47%"; Hit description =Putative uncharacterized protein 9C20.3c
EEISLNSSSYTQDLVHRHRLGFIEKLSHYDTEVGKACSVIKQTLQQIVEKQYNISDIFGELIDEVLRAESGDNEDGYDVQKTTTKSDDIQGCTCPAPQTIPDMSTLASQQDTQLTDTQVHELLLRQQHIRVLLESCPDEADIHPLTSGVQQAAETDLPDSGPCFDQTPSEYVSS

SEQ ID NO: 43398 - protein, 86 aa, Zea mays
  Coding DNA Sequence Number=SeqID_23
MKKGDVTIIHRTVRWCIGLSGEPTVANSNGRPRNLRATRGLLQRSAGAPDCPGERLQTVEIPRTREKTIKEKTMVFKLIIGSLERG

SEQ ID NO: 43399 - protein, 186 aa, Zea mays
  Coding DNA Sequence Number=SeqID_24
  Gene Ontology: Mol. function=4 iron, 4 sulfur cluster binding; Cellular component=cytoplasm; Biological process=lipoate biosynthetic process
  Homolog annotation: Hit_ID=A7ZJ15; Match level="QueryCoverage=100%, HitCoverage=57%, E-value=1e-105, Identity=100%"; Hit description =Lipoyl synthase
MALIPVKNVATEREALLRKPEWMKIKLPADSTRIQGIKAAMRKNGLHSVCEEASCPNLAECFNHGTATFMILGAICTRRCPFCDVAHGRPVAPDANEPVKLAQTIADMALRYVVITSVDRDDLRDGGAQHFADCITAIREKSPQIKIETLVPDFRGRMDRALDILTATPPDVFNHNLENVPRIYRQ

SEQ ID NO: 43400 - protein, 185 aa, Zea mays
  Coding DNA Sequence Number=SeqID_25
  Gene Ontology: Mol. function=nucleotide binding; Biological process =DNA packaging
  Homolog annotation: Hit_ID=P03707; Match level="QueryCoverage=93%, HitCoverage=95%, E-value=9e-91, Identity=98%"; Hit description =Terminase small subunit
  Pfam annotation: Domain name=Phage_Nu1; Domain location=1-161; Score =400.4; E_value=2.7e-117; Accession=PF07471.3; Description=Phage DNA packaging protein Nu1
NKKQLADIFGASIRTIQNWQEQGMPVLRGGGKGNEVLYDSAAVIKWYAERDAEIENEKLRREVEELLQASETDLQPGTIEYERHRLTRAQADAQELKNARDSAEVVETAFCTFVLSRIAGEIASILDGIPLSVQRRFPELENRHVDFLKRDIIKAMNKAAALDELIPGLLSEYRTVRLTGCGILS

SEQ ID NO: 43401 - protein, 104 aa, Zea mays
  Coding DNA Sequence Number=SeqID_26
  Homolog annotation: Hit_ID=P64579; Match level="QueryCoverage=100%, HitCoverage=100%, E-value=5e-55, Identity=100%"; Hit description =Uncharacterized protein ygjN
MHLITQKALKDAAEKYPQHKTELVALGNTIAKGYFKKPESLKAVFPSLDNFKYLDKHYVFNVGGNELRVVAMVFFESQKCYIREVMTHKEYDFFTAVHRTKGKK

SEQ ID NO: 43402 - protein, 179 aa, Zea mays
  Coding DNA Sequence Number=SeqID_27
  Gene Ontology: Mol. function=transferase activity, transferring pentosyl groups; Cellular component=peptidoglycan-based cell wall; Biological process=peptidoglycan-based cell wall biogenesis
  Homolog annotation: Hit_ID=P02918; Match level="QueryCoverage=100%, HitCoverage=21%, E-value=1e-93, Identity=94%"; Hit description =Penicillin-binding protein 1A (PBP-1a) (PBP1a) [Includes: Penicillin- insensitive ...
  Homolog annotation: Hit description=transglycosylase (EC 2.4.2.-) (Peptidoglycan TGase); Penicillin-sensitive transpeptidase (EC 3.4. -.-) (DD-transpeptidase)]
  Pfam annotation: Domain name=Transpeptidase; Domain location=2-177; Score=-37.0; E_value=0.00061; Accession=PF00905.13; Description =Penicillin binding protein transpeptidase domain
MALVGGFDFNQSKFNRATQALRQVGSNIKPFLYTAAMDKGLTLASMLNDVPISRWDASAGSDWQPKNSPPQYAGPIRLRQGLGQSKNVVMVRAMRAMGVDYAAEYLQRFGFPAQNIVHTESLALGSASFTPMQVARGYAVMANGGFLVDPWFISKIENDQGGVIFEAKPKVACPECDIP

SEQ ID NO: 43403 - protein, 147 aa, Zea mays
  Coding DNA Sequence Number=SeqID_28
  Gene Ontology: Mol. function=RNA-directed DNA polymerase activity; Biological process=RNA-dependent DNA replication
  Homolog annotation: Hit_ID=O48967; Match level="QueryCoverage=97%, HitCoverage=33%, E-value=7e-60, Identity=75%"; Hit description =Putative uncharacterized protein
  Pfam annotation: Domain name=Retrotrans_gag; Domain location=3-93; Score=52.1; E_value=1.9e-12; Accession=PF03732.8; Description =Retrotransposon gag protein
MATYFHVALSGPARTWLMNLAPGSIYSWGELCAWFTANFVSAYQQHGVEAHLHAARQEPRETLRTFISCFTRVRAFRQGVCDEKMLEKLAMHDVEIVSTLFALADKCARAAKGRAWHSAPQTRAAQTGGSGAVAQDGKKKKKNEPRP

SEQ ID NO: 43404 - protein, 141 aa, Zea mays
  Coding DNA Sequence Number=SeqID_29
  Gene Ontology: Cellular component=integral to membrane; Biological process=cellular response to starvation
  Homolog annotation: Hit_ID=P15078; Match level="QueryCoverage=100%, HitCoverage=20%, E-value=1e-55, Identity=78%"; Hit description =Carbon starvation protein A
  Pfam annotation: Domain name=CstA; Domain location=1-141; Score= -53.6; E_value=2.9e-10; Accession=PF02554.5; Description=Carbon starvation protein CstA
MGPTAGVIALVACFLIMVIILAVLAMIVVKALTHSPWGTYTVAFTIPLALFMGIYLRYLRPGRIGEVSVIGLVFLIFAIISGGWVAESPTWAPYFDFTGVQLTWMLVGYGFVAAVLPVWLLLAPRDYLSTFLKIGTIVGLA

SEQ ID NO: 43405 - protein, 148 aa, Zea mays
  Coding DNA Sequence Number=SeqID_30
MRVVRIVTTAPEKAKPWKETSRSSKTTTNSRWLVLDTLHLEAPPAPPRDAPAVGGATGGGPGGDPDDDDSDHSTESSEPQEAEGWVARPITRDAARGCHFHDALDTLLRQAFDRHTWSIEYRCVVYQHSRGRYPDPLGGYLPSSPSGG

SEQ ID NO: 43406 - protein, 146 aa, Zea mays
  Coding DNA Sequence Number=SeqID_31
MGKSKKGGSSSHHSGDKRKREPTPPSEDFGDSEYSEEEFSSESEGSPVHASPPASSDNSDDSQGIAAEVWTYIRAVERAGLEGSDESEYSSDEENSSDSSEEGGGDDDGGDGDGGSDDGEGGDGSGKGGSGDGSKGSSRGGNKASG

SEQ ID NO: 43407 - protein, 221 aa, Zea mays
  Coding DNA Sequence Number=SeqID_32
  Gene Ontology: Mol. function=metal ion binding; Cellular component =nucleus; Biological process=regulation of transcription, DNA -dependent
  Homolog annotation: Hit_ID=Q0JGI1; Match level="QueryCoverage=48%, HitCoverage=30%, E-value=5e-16, Identity=46%"; Hit description =Squamosa promoter-binding-like protein 2
MEQPKWSVVKTEADVFQDQYYPAVHLNGAGGGAIGSHFHGKEQKHFPFLTSHSNGGGGGDVATAAALGCQPFTITTTASSESDSKQSNGNCALSLLSDNPTSAQTAMIPTTAQSLAAAMQYGGRLPGSVSVSGGGGGDVSLTGMSYMRVGDSRQASILTASSPGHAAVASPVPATTAAATPPPPPQLLQYHHGYGYYHVTAASRATTPTAPPFTALPFSSW

SEQ ID NO: 43408 - protein, 108 aa, Zea mays
  Coding DNA Sequence Number=SeqID_33
  Gene Ontology: Mol. function=exonuclease activity; Cellular component= intracellular
  Homolog annotation: Hit_ID=P45956; Match level="QueryCoverage=79%, HitCoverage=91%, E-value=1e-42, Identity=100%"; Hit description =Uncharacterized protein ygbF
  Pfam annotation: Domain name=Cas_Cas2CT1978; Domain location=25-108; Score=183.8; E_value=4.3e-52; Accession=PF09707.1; Description =CRISPR-associated protein (Cas_Cas2CT1
MHSLLPFRFLFHWEMQAIGVAEMSMLVVVTENVPPRLRGRLAIWLLEVRAGVYVGDVSAKIREMIWEQIAGLAEEGNVVMAWATNTETGFEFQTFGLNRRTPVDLDGL

SEQ ID NO: 43409 - protein, 166 aa, Zea mays
  Coding DNA Sequence Number=SeqID_34
  Homolog annotation: Hit_ID=Q6J9V9; Match level="QueryCoverage=94%, HitCoverage=52%, E-value=1e-43, Identity=60%"; Hit description =Putative uncharacterized protein
FSLLQQGPGKGDTPKRTLLREGNRLRASLLIRGSKAGPSGVQPPQSAWAPHPLLVRGSKAGPSEGFNGRLRPHRARDDPGHRARDDPGYVRYITKARATLPRYPRTFSRPAGMICNGIPSEGGIEPSDPVKGDRVRQITRRKLRIARPQGSDSGSAPEDDELRFAQ

SEQ ID NO: 43410 - protein, 186 aa, Zea mays
  Coding DNA Sequence Number=SeqID_35
  Gene Ontology: Mol. function=iron-sulfur cluster binding; Cellular component=cellular_component; Biological process=metabolic process
  Homolog annotation: Hit_ID=P0AEI5; Match level="QueryCoverage=94%, HitCoverage=39%, E-value=1e-88, Identity=93%"; Hit description =UPF0004 protein yliG
  Pfam annotation: Domain name=TRAM; Domain location=111-176; Score =13.5; E_value=0.028; Accession=PF01938.11; Description=TRAM domain
HASPRILKLMKRPGSVDRQLARIKQWREICPELTLRSTFIVGFPGETEEDFQMLLDFLKEARLDRVGCFKYSPVEGADANALPDQVPEEVKEERWNRFMQLQQQISAERLQEKVGREILVIIDEVDEEGAIGRSMADAPEIDGAVYLNGETNVKPGDILRVKVEHADEYDLWGSRPLIRQHFQAFD

SEQ ID NO: 43411 - protein, 120 aa, Zea mays
  Coding DNA Sequence Number=SeqID_36
  Gene Ontology: Mol. function=metalloendopeptidase activity; Biological process=proteolysis
  Homolog annotation: Hit_ID=P37690; Match level="QueryCoverage=95%, HitCoverage=27%, E-value=2e-55, Identity=100%"; Hit description =Uncharacterized protein yibP
MTGPSYASVLSAGVLLCAFSAHADERDQLKSIQADIAAKERAVRQKQQQRASLLAQLKKQEEAISEATRKLRETQNTLNQLNKQIDEMNASIAKLEQQKAAQERSLAAQLDAAFRQGEHT

SEQ ID NO: 43412 - protein, 176 aa, Zea mays
  Coding DNA Sequence Number=SeqID_37
  Homolog annotation: Hit_ID=Q6J9V9; Match level="QueryCoverage=37%, HitCoverage=23%, E-value=9e-07, Identity=51%"; Hit description =Putative uncharacterized protein
  Subcellular localization annotation: CTP_CleavageSite=82; ConfidenceScore=5.50e-01
MQTACNRAKWTRFSDSRHAQHGGPGPRVTQPARQMLHASNCTATCATTTPPRLRNQYRGSRRPSSASLARRRSGRRFAFAIMTASVKGPGKGDTPKRILPREGTRLRASLLIRGSKAGPPKGSTAASDRVGPTPTTGQGSKAGPPKGSTAASGYSSSVPITDQGFEGWPPKGSQPP

SEQ ID NO: 43413 - protein, 369 aa, Zea mays
  Coding DNA Sequence Number=SeqID_38
  Homolog annotation: Hit_ID=A2YV67; Match level="QueryCoverage=47%, HitCoverage=35%, E-value=8e-33, Identity=52%"; Hit description =Putative uncharacterized protein
MAPWPRRPVLTLVLLLLLALLCSHVALCSSAEPGKPKPKPKVSGSRKALLADNDGDEVPAAKPGKSAAAGKTKKKLLAGDATSKNQTKVAKAKKPESAAAAKGAAKKPAGKAAAAAGGDAAIAKVSKAPKTPKADKAKVPKPDKAATAAAAGAKTKGADSAKPAKVSKTGAKAVKPPKTAKSEAATAVGKAKKPPPANSTVDAGAKTAKSGKKAPVVVDAEVKANATVVSKEKSAATETVEMEDEEEVVLAKEAGEGTDDLISEFRDLPSRLQETLMPDLARLSHHSKAYLSAANAGIADGVRPILGGRWAAVAASAASVAVLLLPLFMLTALVRRMGPYLPLLHRALLLAQAYLAIYFATLALAAAAL

SEQ ID NO: 43414 - protein, 213 aa, Zea mays
  Coding DNA Sequence Number=SeqID_39
  Gene Ontology: Mol. function=transferase activity, transferring alkyl or aryl (other than methyl) groups; Cellular component=cytoplasm; Biological process=aromatic amino acid family biosynthetic process
  Homolog annotation: Hit_ID=Q92SV5; Match level="QueryCoverage=100%, HitCoverage=69%, E-value=1e-71, Identity=81%"; Hit description=3 -phosphoshikimate 1-carboxyvinyltransferase
  Pfam annotation: Domain name=EPSP_synthase; Domain location=1-198; Score=-181.2; E_value=0.00025; Accession=PF00275.11; Description =EPSP synthase (3-phosphoshikimate 1-carboxyvinyltransferase)
MGVQVKSEDGDRLPVTLRGPKTPTPITYRVPMASAQVKSAEMGADIEVINPRLAGGEDVADLRVRSSTLKGVTVPEDRAPSMIDEYPILAVAAAFAEGATVMNGLEELRVKESDRLSAVANGLKLNGVDCDEGETSLVVRGRPDGKGLGNASGAAVATHLDHRIAMSFLVMGLVSENPVTVDDATMIATSFPEFMDLMAGLGAKIELSDTKAA

SEQ ID NO: 43415 - protein, 250 aa, Zea mays
  Coding DNA Sequence Number=SeqID_40
MDIAKVILGCVARKQLIKPRTEARRASRYQVHGRRSRRLRNPKPRDVGAKKCQSRSSQANLMIYKSNIKAQACEMLRDSAQSGTPDCPVVHRTVSGGAPDSVRCARLTLVKRPLSGIRRRCTAKIHRTVRCAPDCPVSQRSAGPTVGRAICAGHVAEPTVIWGHRTVRCAPDSVRCANGSKTATVDCATYGRRSAPDSVRCANGSKTATVDCATYGRRSAPDSVRWCTGLSGAPPDRKKVLPSKWDSNGS

SEQ ID NO: 43416 - protein, 460 aa, Zea mays
  Coding DNA Sequence Number=SeqID_41
  Gene Ontology: Mol. function=aspartic-type endopeptidase activity; Cellular component=small subunit processome; Biological process=DNA integration
  Homolog annotation: Hit_ID=O24587; Match level="QueryCoverage=94%, HitCoverage=43%, E-value=0.0, Identity=80%"; Hit description=Pol
  Pfam annotation: Domain name=rve; Domain location=179-342; Score =189.0; E_value=1.2e-53; Accession=PF00665.17; Description=Integrase core domain
MTREKKMFTSYVKNKDSQDSIIFGDGNQGKVKGLGKIAITSEHSISNVFLVESLRYNLVSVSQLCNMGYNCLFTNVDVSVFRRSDGSLAFKGVLDDKLYLVDFSKENVDLDACLIAKTNMGWLWHHRLAHVGMKNLHKLLKGDHVLGLTDVCFEKDKPCAACQAGKQVGSTNHSKNVMTTSRPMELLHMDLFGPVAYLNIGGSKYGLVIVDDFSHFIWVFFLQDKSETQGTLKRFLSRAQNEFELKVKKIRSDNRPEFKNLQVEEFLEEEGIKHEFSAPYTPQQNSVVERKNRTLIDMARMMLGEFKTPERFWSEAVNTACHAINRLYLHRLLKKTSYELLNGCRRVLLGYDSNTKAYRVFNKSLGLVEVSSDVVFDETNGSPREQVDLDDIDEDEVPTGAMRTMAIGDVQPQELQEQDQPSSSTLVHPPTQDDVQGRRGLTGSGLSVGHAGRAQQLQKE

SEQ ID NO: 43417 - protein, 136 aa, Zea mays
  Coding DNA Sequence Number=SeqID_42
  Subcellular localization annotation: CTP_CleavageSite=58; ConfidenceScore=5.66e-01
MPTPSLISPLSKPSPTTASPSHVPVSAPLSRAEDDWSTTVDATTPRSPPARVDRTSPSATHRAKTTVKLAFVDRTCLPPRLAIFTASQVGYRKNMEEVLVGIVKELPGILVEEGEPEAEAQECPDHSPSSFEKGES

SEQ ID NO: 43418 - protein, 34 aa, Zea mays
  Coding DNA Sequence Number=SeqID_43
MASCLPVLPSMESAMSNSANVIAMSDGSFDNLYS

SEQ ID NO: 43419 - protein, 157 aa, Zea mays
  Coding DNA Sequence Number=SeqID_44
MQDAARRALSHYCLVLGGVADGLNLKYYPRRPSGSTRGVVVSPVDEDNPRLSSTVNLAAVLNTELDHALDELSRARAEIAQMRAERGASSPRDGSPAPVGTQHLYHSPQRGHHAYECGYPLHLGLLVNVNKISYLVDVKQQAQRRKVCSTGAGSTAG

SEQ ID NO: 43420 - protein, 217 aa, Zea mays
  Coding DNA Sequence Number=SeqID_45
  Gene Ontology: Mol. function=C4-dicarboxylate transmembrane transporter activity; Cellular component=integral to membrane; Biological process=C4-dicarboxylate transport
  Homolog annotation: Hit_ID=P0ABP4; Match level="QueryCoverage=100%, HitCoverage=47%, E-value=2e-99, Identity=87%"; Hit description =Anaerobic C4-dicarboxylate transporter dcuC
  Pfam annotation: Domain name=DcuC; Domain location=1-217; Score=27.5; E_value=7.4e-10; Accession=PF03606.6; Description=C4-dicarboxylate anaerobic carrier
MGHKVLPSSQASTGYSATDIVEYVKILLMSRGGDLGMMIMMLCGFAAYMTHIGANDMVVKLASKPLQYINSPYLLMIAAYFVACLMSLAVSSATGLGVLLMATLFPVMVNVGISRGAAAAICASPAAIILAPTSGDVVLAAQASEMSLIDFAFKTTLPISIAAIIGMAIAHFFWQRYLDKKEHISHEMLDVSEITTTAPAFYAILPFTPIIGVLIFD

SEQ ID NO: 43421 - protein, 166 aa, Zea mays
  Coding DNA Sequence Number=SeqID_46
MEKQSCSLTHPDRGPPEPDKREKTIRLGVGAWLRLLRGEQAVAGLIIAFPAETWRHEVCRLRAAIRAEEAEHADRGGGREHGPHGVAGARCRGIWTIMRAGGIQPASAWAWPRLGRTREDDARTGNGTESEAGGNDTPRDGTPCAMCWHNTSPREQGPMAAGNQSR

SEQ ID NO: 43422 - protein, 409 aa, Zea mays
  Coding DNA Sequence Number=SeqID_47
  Gene Ontology: Mol. function=aspartic-type endopeptidase activity; Cellular component=mitochondrion; Biological process=DNA integration
  Homolog annotation: Hit_ID=Q9XEJ4; Match level="QueryCoverage=44%, HitCoverage=17%, E-value=1e-98, Identity=96%"; Hit description=Copia- type pol polyprotein
  Pfam annotation: Domain name=RVT_2; Domain location=1-165; Score =197.0; E_value=4.5e-56; Accession=PF07727.5; Description=Reverse transcriptase (RNA-dependent DNA pol
MDVKSAFLNGPIKEEVYVEQPPGFEDSEYPNHVYRLSKALYGLKQAPRAWYECLGDFLIANGFKVGKADPTLFTKTLDNDLFVCQIYVDDIIFGSTNESTCEEFSRIMTQKFEMSMMGELKYFFGFQVKQLQEGTFICQTKYTQDILNKFGMKDAKPIKTPMGTNGHLDLDTEGKSVDQKVPKVHNKPIKRPRMGSIKENKGTTEGTLVWHTGLSGVPPDSVRRCDSELASFGNPLRYNSPDMSGAHRTVRSQMEVHYQTSFCQNEDGFPKLLRACTVRLGIRSQPEYDGREFAEHGTEKSAAQSSKAPSSKPPLDHLPPGRLVLAARKNPIGNVLARAAKTLLSLGAPDCPVRQAGSSEVAALGNSPATYGYNSPDCQVCTGLSGEPTVGRANGRPRDLRGTRGRANG

SEQ ID NO: 43423 - protein, 131 aa, Zea mays
  Coding DNA Sequence Number=SeqID_48
  Homolog annotation: Hit_ID=Q7XBD3; Match level="QueryCoverage=71%, HitCoverage=18%, E-value=3e-44, Identity=87%"; Hit description=Zeon1 gag protein
MALRGNWPEAPHEALSPSSGPGGYLSPTAHAQGWARPNMEMLHQQVQRKKEKMARLADLQRQIDEASEEVRHLMQDEQNRRPQYRELHQEGFVNEDDWYDDFHHGNFAFDDASPLSVELQATPWPPSYKPP

SEQ ID NO: 43424 - protein, 253 aa, Zea mays
  Coding DNA Sequence Number=SeqID_49
  Gene Ontology: Mol. function=protein binding; Cellular component =integral to membrane
  Homolog annotation: Hit_ID=P16919; Match level="QueryCoverage=100%, HitCoverage=19%, E-value=1e-122, Identity=80%"; Hit description =Protein rhsD precursor
  Pfam annotation: Domain name=RHS; Domain location=181-221; Score =90.2; E_value=6.5e-24; Accession=PF03527.5; Description=RHS protein
LTEKTDRIPAGVIRTDDERTHHYHYDSQHRLVFYTRIQHGEPLVESRYLYDPLGRRMAKRVWRRERDLTGWMSLSRKPEVTWYGWDGDRLTTVQTDTTRIQTVYEPGSFTPLIRVETENGEREKAQRRSLAETLQQERELEEEIRADRVSSESRAWLAQCGLTVEQLARQVEPEYTPARKAHLYHCDHRGLPLALISEDGNTAWSGEYDEWGNLLNEENPHQLQQLIRLPGQQYDEESGLYYNRHRYYDPLQG

SEQ ID NO: 43425 - protein, 170 aa, Zea mays
  Coding DNA Sequence Number=SeqID_50
MSGAPEDSGFKLVTFGNFQGPLRYNSPDCPVCTGHVRCSKEGRPQELASLGFSFQPLRYNSPDCPVCTGLSGASGEQWLLQAPTATCSAFIARQRAQRSGTPMLAHRTLYSTCPVRHRTSRRAQKSELQRSISNGTCDVAGAPDCLVCTGLSERERVEKDPSLSGLLNGD

SEQ ID NO: 43426 - protein, 674 aa, Zea mays
  Coding DNA Sequence Number=SeqID_51
  Gene Ontology: Mol. function=aspartic-type endopeptidase activity; Biological process=DNA integration
  Homolog annotation: Hit_ID=Q8H6I0; Match level="QueryCoverage=97%, HitCoverage=50%, E-value=1e-157, Identity=55%"; Hit description =Putative gag-pol polyprotein
  Pfam annotation: Domain name=DUF572; Domain location=80-386; Score= -119.9; E_value=0.073; Accession=PF04502.4; Description=Family of unknown function (DUF572)
  Pfam annotation: Domain name=zf-CCHC; Domain location=330-347; Score =30.9; E_value=4.8e-06; Accession=PF00098.14; Description=Zinc knuckle
  Pfam module annotation: Pfam domain module=DUF572::zf-CCHC; Domain location=80-386::330-347
MSGAHAKKEMVTSEKPTTSHGKAPSGESDNKREESPPRVKSHRSGDKKKKMKKLVNYETDSSLPSTSGSDTSSVTSKRHERKKFSKPPVFDGEDYCMWSDKMRHHLTSLHASIWDIVEFGAQEPSVGDEGYDSDEEYNKVQGLKSAKEIWDVLKTTHEGDEVTKTTKRETIKGELGRFMLNQGEEPQAMYNRLKTLVNQLRNLGSTKWDDHEMVKVILRSLVFLNPTQVQLIHGDPRYKLMSPEEVIGKFVSFELMIKDSKQIIERGATSTPEVQPITFKATEEKEESTSSRLPIDASKLDNEEMTLIIKSFHQILKQRREKDYKPHSKKVCYKCGKPGHFIAKCPLSSDSDKGDDKKGKRREKKRCYKKKGGNAHVCWEWDSDESSTDSSSDEDAANIAINKGFLFPNVGHKCLMAKDGKKKDELLDSQDDFLIKENKKHAKVKNAYAQEIEKCENLTSELSTCHDVISNLRNENAKLFAKVEKCRDINVDAIHDHLALIKQQNDHIAELSANINEHDLENKKFKFARSMLYSGRRPGIKDDIGFQQGDNVKLNATKRLSNFVKGKAPMPQDNEGYVLYPAGYPEDKIRRIHAKKTHSVSHHAFIYKNETSSSRRSTHVKMPKNKSPIASNDHNISFKTFDASYVLTNKSNKVVAKYVGAKHKGSKTCVLVPK

SEQ ID NO: 43427 - protein, 87 aa, Zea mays
  Coding DNA Sequence Number=SeqID_52
MAAITKMEMSRRDTDFPLSLSPANVKPYAPWPALSEHEEEVEATEEQVPPPLETQAENCFYFDICGSEPDSPINKGKPRCIRHPLVF

SEQ ID NO: 43428 - protein, 192 aa, Zea mays
  Coding DNA Sequence Number=SeqID_53
  Homolog annotation: Hit_ID=Q6J9V9; Match level="QueryCoverage=25%, HitCoverage=25%, E-value=4e-07, Identity=50%"; Hit description =Putative uncharacterized protein
MAERYQLPRSCVPPTTRRKDCGRPPSGGSEGGKTRCIRERGDMVASQGGHPPFKGDSPYLRPQPMRAESSPSRSKVLPLRHGGWAPCVMQAGPGQKEPNRRAQGMQLPSVTSIPPLLPRPAGGASGRRSKRRFAFAIMTASKKGPGKGDTPKRILLREGNRPRASLLIRGSKAGPSKGFNGRLRALGFCAHY

SEQ ID NO: 43429 - protein, 188 aa, Zea mays
  Coding DNA Sequence Number=SeqID_54
MESHDLRAEWESRLVGKVYNLCRVLKTGISAELTMARLRCTARKSVIPFLPSRLADRPLRRTVLGQSSHQERLHRRLHEEQERRHQEQEQQDSSPSPQQEVEFERPPSPAPQPEMPPAPPQGISFAGGDPDGDGDRDDDDAGGSLSHGTELSEELEPDGWIPRPITRDAARGCHFHDALDTLLHRAFE

SEQ ID NO: 43430 - protein, 241 aa, Zea mays
  Coding DNA Sequence Number=SeqID_55
  Homolog annotation: Hit_ID=P37325; Match level="QueryCoverage=100%, HitCoverage=81%, E-value=1e-126, Identity=94%"; Hit description =Uncharacterized protein ybcH precursor
VTDTQWQGLMSQLRLQGFDTLVLQWTRYGDAFTQPEQRTLLFKRAAAAQQAGLKLIVGLNADPEFFMHQKQSSAALESYLNRLLAADLQQARLWSAAPGITPDGWYISAEIDDLNWRSEAARQPLLTWLNNAQRLISDVSAKPVYISSFFAGNMSPDGYRQLLEHVKATGVNVWVQDGSGVDKLTAEQRERYLQASADCQSPAPASGVVYELFVAGKGKTFTAKPKPDAEIASLLAKRSSC

SEQ ID NO: 43431 - protein, 83 aa, Zea mays
  Coding DNA Sequence Number=SeqID_56
  Gene Ontology: Cellular component=outer membrane; Biological process =cell adhesion
  Homolog annotation: Hit_ID=P77199; Match level="QueryCoverage=100%, HitCoverage=8%, E-value=3e-38, Identity=94%"; Hit description =Putative uncharacterized protein yaiT precursor
NNGSEWDTTGRSIVDTLTVNNGSQVNVSESKLTSDTIDLTNGSSLNIGEDGYVDTDHLTINSYSTVALTESTGWGADSYPRNT

SEQ ID NO: 43432 - protein, 587 aa, Zea mays
  Coding DNA Sequence Number=SeqID_57
  Subcellular localization annotation: CTP_CleavageSite=44; ConfidenceScore=5.40e-01
MADPRCEAKRAWGSTKAAKPATPGSSKPSAGAKTATAGVTKSPLAEAAKGRELPSPGKRVTDFSTNISMEDYFVRSSEGQMVVVPPSVATALPSAEVRARGTTQDPWAAFYVSGEILTAAAAKDVAGTMSQWLREASQRMSQQLSQQLSQAADFADRVASGVLTADVAAEVERLRAQHADAVREKSVAESKSHQLAEKVAALEAEKTDLRRQMAEERREAEAKVVQAEGSLASQRAEEWEARFNALRGRVDKAEASTRSEVKRTLAQFVSSYRELGARTADFKVPDREAGLRFLEWLREELLADESFEREIFKAEDPIVKQSAGGLFDRMWGAHGREAVRERSDRAREQMERAEDVEDFGSLVGAPPEAVEANPVLPLDVGEGPSAVAVPAMTGGEDPLSAPTPTIEGALEVADEPPAEDPTAAAGPSQVQGFGPAHATATDTANFVTASTVVDGDVSDDSVSKFFESGDSGGSVVSTEESSDEDLDYFAALDVAAVGASLRVVGAEVIPSASARRRRRRAVAKRRVSEVEGSHLRVDGAGKRELLSSPAGTSVGEGELRNLFEGQELRIMLFNYREIGIIPKVEPM

SEQ ID NO: 43433 - protein, 101 aa, Zea mays
  Coding DNA Sequence Number=SeqID_58
MPTGVRDDHRLGAWYRMYWMAAACYVVSSSPARTGELWLFSASNLGWLVRASMDDACPHTGHSHRRSLFRGERRPAARVACALSQRQIRPSHHGLVVSRPV

SEQ ID NO: 43434 - protein, 277 aa, Zea mays
  Coding DNA Sequence Number=SeqID_59
  Gene Ontology: Mol. function=aminoglycoside 3''-adenylyltransferase activity; Biological process=response to antibiotic
  Homolog annotation: Hit_ID=P0AG05; Match level="QueryCoverage=93%, HitCoverage=98%, E-value=1e-142, Identity=99%"; Hit description =Streptomycin 3''-adenylyltransferase
  Pfam annotation: Domain name=NTP_transf_2; Domain location=13-113; Score=56.8; E_value=7.6e-14; Accession=PF01909.14; Description =Nucleotidyltransferase domain
MREAVIAEVSTQLSEVVGVIERHLEPTLLAVHLYGSAVDGGLKPHSDIDLLVTVTVRLDETTRRALINDLLETSASPGESEILRAVEVTIVVHDDIIPWRYPAKRELQFGEWQRNDILAGIFEPATIDIDLAILLTKAREHSVALVGPAAEELFDPVPEQDLFEALNETLTLWNSPPDWAGDERNVVLTLSRIWYSAVTGKIAPKDVAADWAMERLPAQYQPVILEARQAYLGQEDRLASRADQLEEFVHYVKGEITKLRFPTIKASYMIPHVVQKS

SEQ ID NO: 43435 - protein, 112 aa, Zea mays
  Coding DNA Sequence Number=SeqID_60
  Gene Ontology: Mol. function=beta-lactamase activity; Cellular component=nucleus; Biological process=beta-lactam antibiotic catabolic process
  Homolog annotation: Hit_ID=P62593; Match level="QueryCoverage=46%, HitCoverage=18%, E-value=1e-22, Identity=100%"; Hit description=Beta- lactamase TEM precursor
MATTLRKLLTGELLTLASRQQLIDWMEADKVAGPLLRSALPAGWFIADKSGAGERGSRGIIAALGPDGGRSLWKNASNAAFLRFLAFCWPFAHMFFPALSPDSVDNRITAFE

SEQ ID NO: 43436 - protein, 16 aa, Zea mays
  Coding DNA Sequence Number=SeqID_61
MEDVPGGDRWIPGIPD

SEQ ID NO: 43437 - protein, 217 aa, Zea mays
  Coding DNA Sequence Number=SeqID_62
  Gene Ontology: Mol. function=nucleic acid binding
  Homolog annotation: Hit_ID=Q6YW21; Match level="QueryCoverage=69%, HitCoverage=42%, E-value=2e-30, Identity=51%"; Hit description =Putative mec-8
MPPLAPSPARNNRRLYLVPRRPQPLATPPVPTVAIHGGCATPARVHDLGHQPTASPVPGASDIVAADEVCTIFMDLPADVKERELHNLLCWLLGFETSEMNFKGNQPMGFALFSTVHQAITAKAMFQDTVFDAETKVALQTDMAKKNLFVKRSSEKTKAEKIHQIKRAEGEEESKHHAKGIMDMILVTQYFGTMRLGPPPSHLFIPHGLGAVKDVLA

SEQ ID NO: 43438 - protein, 158 aa, Zea mays
  Coding DNA Sequence Number=SeqID_63
  Gene Ontology: Cellular component=integral to membrane
  Homolog annotation: Hit_ID=Q10S69; Match level="QueryCoverage=92%, HitCoverage=52%, E-value=1e-42, Identity=54%"; Hit description=HVA22- like protein i, putative, expressed
  Pfam annotation: Domain name=TB2_DP1_HVA22; Domain location=1-96; Score=5.4; E_value=0.00022; Accession=PF03134.10; Description=TB2DP1, HVA22 family
LICAFLSYKLVLGYANPGYECYKMVGLNGEVKRLRFCQYWFVAAFLTVLERVGESIVSWLLMCSEAKLVFIVYLWYPKTGTAYVYKFFKPYMAKHEIEIERNMLELKARVVDMTVLYFRVANYAQTKCYHWLSPILLGATSVPKRWESRDLRVRPVQV

SEQ ID NO: 43439 - protein, 76 aa, Zea mays
  Coding DNA Sequence Number=SeqID_64
  Homolog annotation: Hit_ID=A6ATB1; Match level="QueryCoverage=39%, HitCoverage=81%, E-value=5e-08, Identity=90%"; Hit description =Putative uncharacterized protein
MSRPGGRLNALAPEATPQGHNLQVDIVYGVDYQVFVQGAAFATGIPPDLYAFHRYTWNSTPLYETQACQYQMQFPG

SEQ ID NO: 43440 - protein, 255 aa, Zea mays
  Coding DNA Sequence Number=SeqID_65
MASAMVLVWHRKLEGERAQREEKMRKRNCCTRGESLFKEDSPACAHLAQAHTKATQPLTRGPGPQVIQLVCGSLSAEKANRHVRSEPPPVVVRLSISTGSKGPVSDMGARAHESSSLGAGSWVLGSRATTHASTALPRGHRRRQRRHGAHATISSGVENSTRRHHVDGSKATTWPEKTISSEVSTAGLDPHEKVSPHAYTDRTSGQGPNLCGYRPDPRDGSQISLCGVRATLSRVPRFWDKEYPDLTQGQAGVRS

SEQ ID NO: 43441 - protein, 346 aa, Zea mays
  Coding DNA Sequence Number=SeqID_66
  Gene Ontology: Cellular component=integral to membrane
  Homolog annotation: Hit_ID=P77658; Match level="QueryCoverage=78%, HitCoverage=79%, E-value=1e-129, Identity=91%"; Hit description =Uncharacterized protein ynaA
  Pfam annotation: Domain name=Ail_Lom; Domain location=203-346; Score =53.6; E_value=6.7e-13; Accession=PF06316.2; Description =Enterobacterial AilLom protein
MTQAGETAANSAGKVTKATEDEKNALAKLKAAIDPVGAAIDTVGRRYSELKKFFDKGLIDKEEYEFLVRKLNETTEELSGVAQAQREAEKAGKLAAAQQEAQAQAFQRMLDKIDPLAAALRNLEQQHDELNAAFASGKINGSQFENYSRKIQETRRELTGEAQAEREAAKAHDEQVVALQRLIAQLDPVGTAFNRLVEQQKQLNEAKAKGMLSPEMYEELSGKLRAMRSELEVTQSQLSKTGMSAKQTAFAMRMLPAQMTDIVVGLSTAGRPFSYAGDKNRQLTRYSDTRWHEDSVRNRWFSVMVGPSVRVNEWFSAYAMAGMAYSRVSTFSGDYLRVTDNKGRCE

SEQ ID NO: 43442 - protein, 215 aa, Zea mays
  Coding DNA Sequence Number=SeqID_67
  Gene Ontology: Mol. function=racemase and epimerase activity, acting on amino acids and derivatives; Biological process=cell wall organization and biogenesis
  Homolog annotation: Hit_ID=P22634; Match level="QueryCoverage=100%, HitCoverage=75%, E-value=1e-107, Identity=93%"; Hit description =Glutamate racemase
  Pfam annotation: Domain name=Asp_Glu_race; Domain location=2-170; Score=158.2; E_value=2.3e-44; Accession=PF01177.13; Description =AspGluHydantoin racemase
RVVAIVTAVQERYPLALAVVACNTASTVSLPALREKFDFPVVGVVPAIKPAARLTANGIVGLLATRGTVKRSYTHELIARFANECQIEMLGSAEMVELAEAKLHGEDVSLDALKRILRPWLRMKEPPDTVVLGCTHFPLLQEELLQVLPEGTRLVDSGAAIARRTAWLLEHEAPDAKSADANIAFCMAMTPGAEQLLPVLQRYGFETLEKLAVLG

SEQ ID NO: 43443 - protein, 77 aa, Zea mays
  Coding DNA Sequence Number=SeqID_68
MENVKVTEEPKSKVKKRLCRSQEREVSKLEPRSDPKEEENLCIKADLNLGGKLVLRVKVFCVLKSSKPNLVMMMRST

SEQ ID NO: 43444 - protein, 63 aa, Zea mays
  Coding DNA Sequence Number=SeqID_69
MKARDLRGNRAREKVKVTEEHKANVKKRLTEVKFDQLRKVMCIEDCLEPFEPVWEQGVCLIVK

SEQ ID NO: 43445 - protein, 1365 aa, Zea mays
  Coding DNA Sequence Number=SeqID_70
  Gene Ontology: Mol. function=RNA-directed DNA polymerase activity; Cellular component=exocyst; Biological process=RNA-dependent DNA replication
  Homolog annotation: Hit_ID=Q1KSC2; Match level="QueryCoverage=99%, HitCoverage=89%, E-value=0.0, Identity=43%"; Hit description =Putative non-LTR retroelement reverse transcriptase
  Pfam annotation: Domain name=RVT_1; Domain location=891-1154; Score =66.9; E_value=6.7e-17; Accession=PF00078.18; Description=Reverse transcriptase (RNA-dependent
ATALIKIVEGSMNADLVKTNLERMIPMKWDWVVRQHNENSFIFPFPSKVELQRMVAISHPIDHNEGIMSFEEWNSKIKPKKRLDQVVFVHGVPYESRDFLSLWALGSILRATQKVDMIYLKKTRVLRILVPCLDACGILESQDLVVDDCMYESSFLIDEVVRWEDSNHENFDKVDNLDEDHSNDDVAKKEAEDEGNRHLRGGGELGLLKPLNATNKSLAKSIQTNNLECANVLSKCCYLYLNVVSILNNISIKTDTNSVVTVSQDSRLTRYNYNGSCKSGVVWFSKLTQLTRVHLEQALKQSNPKHFTKHLRSPSDSIKHLGVALGNVYTTLVCCLGSHTLKWPVGVVVALRHTGQSGAPVRSKPLVVALRHTGQSGAPVRSKPLDLTCRSSALQAFTPDGPDTVASLHQCHQELAIGLQFLSAPCLISFLLLQSLKLLPLWHQPPKRTFKSMEANKTCPHKRFTMIPIETAKIITPRRRNTPSDRDLLLRKKHVRNRGATPRRRNTPSDRDLLLRKKHVRNRGAGHAHNIHPKFAKSPKLNLRRYHFRSISKGDFYIKFTLGFKNDGFKWVLYTVYGPAQQDNKEAFLKLAYSCSHETLPYIVGGDFNITRYPEENNKDNFNTRPNLFNAIIEVLDLKEIGMSVHFTWDGPRDDPIYEKLDGALVSTNWEEKFPLSIMEARDRSQSDHTLILLSIGTIDKAEISSLNDNEINFKHYLKEHLVLLLWEEEIKWYERAKVKTLLEGDSNTKLFHLVANSNHCKQHIFKLEEEEGAIVGDEQLKSYITTYYKGTLEETNFALCEHQIDDIPQVIIAENILVSPFLEEEVKFVVFMEYNKALGPDGFLAEFYQVWEITKDDLLRLFKDFHDEHLPLFSLNFGIITLLPKTTEANQINYRLIFLRNVRFKIFTKVGTNRIIKVESIVVSPSQVAFMPGRNITEGAIILHEIHELHKKHNGVIFKIDFEEYDKVKWSFLQTLRTNCFSSKWCRWIDNYVKEGSVRIKVNDDIGHYFQTNKGLRQGDLMPPILFNIVADMLAILIKRAKADGQINRTNPHLVEDGLSILQYVDDTILFLDHDLEQAKNMKLLLIVFQMSGLKINFHKNEIFCYGATKDFEFHYTELFRCNLGLYPFRYLGIPMHHRKIQNNDWRVIEDRFGKKLNYWKAKYLSYSGWLILLNSVLSSLSMFMVSIFEILKGVIKKLDQYRSYFFQGGNDKKKYCAKWDILCRPKDQGGLGIADLAIKNKCMLSKWLFNLLNGDGMWQTLIRNKYLASKPLSQVEIKPHGSQFYKGLLKVKDQLKCGYFIMNNGSQARFSEDIWLAMSGKHWQMWLMLKNKSHEFKLIEKIDQNMELLKSVINKNWMHFVIM

SEQ ID NO: 43446 - protein, 190 aa, Zea mays
  Coding DNA Sequence Number=SeqID_71
  Gene Ontology: Mol. function=protein serine/threonine kinase activity; Cellular component=nucleus; Biological process=protein amino acid phosphorylation
  Homolog annotation: Hit_ID=Q75KS7; Match level="QueryCoverage=85%, HitCoverage=22%, E-value=3e-75, Identity=82%"; Hit description =Putative receptor kinase
  Pfam annotation: Domain name=RNA_pol_Rpb7_N; Domain location=31-104; Score=52.8; E_value=1.2e-12; Accession=PF03876.8; Description=RNA polymerase Rpb7, N-terminal domain
WYRSGIPGIAATPGAEAFVGIFVGKHSPEMSWNVLISPSQLDRKGLLLRKAIIVRLLEDVTNRRASKEHGYYIAVNQLKAISEGKVRELTGDVLFPVSFTCITQKPMKGEVMVGHVDRILKHGVFLKSGPVESIFLAEKSMSNYKYIGGENAMFMNDHSKLEKDTAVRFKVLGFRWMEADRQFQLLATIA

SEQ ID NO: 43447 - protein, 155 aa, Zea mays
  Coding DNA Sequence Number=SeqID_72
MALLVDVAGLCPRLGDVEAPPKPRSSLSSMAEAESEPLGRARRRSSAEARAPESEPWVGRSGVRRLPGLSPSPSPGVGRSGVRRLPGLSPSPSPGSGGASYGAFGKDWLPVSITLSSGAAVGVAQAALSFCQTGQWSGEVTTVTSALPEGACQDK

SEQ ID NO: 43448 - protein, 255 aa, Zea mays
  Coding DNA Sequence Number=SeqID_73
  Gene Ontology: Mol. function=exonuclease activity
  Homolog annotation: Hit_ID=P15032; Match level="QueryCoverage=100%, HitCoverage=29%, E-value=1e-145, Identity=100%"; Hit description =Exodeoxyribonuclease 8
  Pfam annotation: Domain name=Exonuc_VIII; Domain location=1-178; Score=459.4; E_value=4.8e-135; Accession=PF06630.2; Description =Enterobacterial exodeoxyribonuclease VII
MSTKPLFLLRKAKKSSGEPDVVLWASNDFESTCATLDYLIVKSGKKLSSYFKAVATNFPVVNDLPAEGEIDFTWSERYQLSKDSMTWELKPGAAPDNAHYQGNTNVNGEDMTEIEENMLLPISGQELPIRWLAQHGSEKPVTHVSRDGLQALHIARAEELPAVTALAVSHKTSLLDPLEIRELHKLVRDTDKVFPNPGNSNLGLITAFFEAYLNADYTDRGLLTKEWMKGNRVSHITRTASGANAGGGNLTDRGE

SEQ ID NO: 43449 - protein, 158 aa, Zea mays
  Coding DNA Sequence Number=SeqID_74
  Gene Ontology: Mol. function=DNA binding; Biological process =regulation of transcription, DNA-dependent
  Homolog annotation: Hit_ID=P76062; Match level="QueryCoverage=100%, HitCoverage=100%, E-value=2e-86, Identity=100%"; Hit description=Rac prophage repressor
MLSGKDLGRAIEQAINKKIASGSVKSKAEVARHFKVQPPSIYDWIKKGSISKDKLPELWRFFSDVVGPEHWGLNEYPIPTPTNSDTKSELLDINNLYQAASDEIRAIVAFLLSGNATEPDWVDHDVRAYIAAMEMKVGKYLKALESERKSQNITKTGT

SEQ ID NO: 43450 - protein, 159 aa, Zea mays
  Coding DNA Sequence Number=SeqID_75
  Gene Ontology: Mol. function=DNA binding
  Homolog annotation: Hit_ID=P76064; Match level="QueryCoverage=84%, HitCoverage=96%, E-value=3e-52, Identity=77%"; Hit description =Uncharacterized protein ydaT
  Pfam annotation: Domain name=DUF1019; Domain location=36-159; Score =222.9; E_value=7.6e-64; Accession=PF06254.2; Description=Protein of unknown function (DUF1019)
MARLLGVSPPSVNQWIKGVRQLPAERCPAIERATRAEKGQAWVANAITEEYLRQGGGELPLVPGKDWNNQQNIYHRWLKGETKTQREKIQKLIPAILAILPRELRHRLCIFDTLERRALLAAQEALSTAIDAHDDAVQAVYRKAHFSGGGSSDDSVIVH

SEQ ID NO: 43451 - protein, 156 aa, Zea mays
  Coding DNA Sequence Number=SeqID_76
  Subcellular localization annotation: CTP_CleavageSite=28; ConfidenceScore=5.40e-01
MQSACNRAKWAHPSDSNAPSMEAQALTSCNRRAGRYVRATAPPLAPLPRLLDCGTSTATRGNPTYDPTVPARRIGHGPVSRGRRRDGRCGQKWAGSNGGGRRAEAAVTSSAKLTHPRTGKGGYPERDPSPRRKRAPSPPTDQMFEGCNTHFVNCYK

SEQ ID NO: 43452 - protein, 129 aa, Zea mays
  Coding DNA Sequence Number=SeqID_77
  Homolog annotation: Hit_ID=P03740; Match level="QueryCoverage=65%, HitCoverage=43%, E-value=1e-38, Identity=92%"; Hit description=Tail fiber assembly protein
  Pfam annotation: Domain name=Caudo_TAP; Domain location=5-129; Score =119.0; E_value=1.4e-32; Accession=PF02413.8; Description =Caudovirales tail fibre assembly protein
VMHIFRLIQVCQQTVPILHRQIFRLASWLFSTVMSHRGISLKIIGKWNGTAWVKDTEAEKLFRIREAEETKNNLMQVASEHIAPLQDAADLEIATEEEISLLEAWKKYRVLLNRVDTSTAQDIEWPALP

SEQ ID NO: 43453 - protein, 149 aa, Zea mays
  Coding DNA Sequence Number=SeqID_78
  Gene Ontology: Mol. function=siderophore-iron transmembrane transporter activity; Cellular component=cell outer membrane; Biological process=siderophore transport
  Homolog annotation: Hit_ID=P13036; Match level="QueryCoverage=100%, HitCoverage=19%, E-value=8e-84, Identity=100%"; Hit description =Iron(III) dicitrate transport protein fecA precursor
MGLFLINFNNQYDSNQTNDTVTARGKTRHTGLETQARYDLGTLTPTLDNVSIYASYAYVNAEIREKGDTYGNLVPFSPKHKGTLGVDYKPGNWTFNLNSDFQSSQFADNANTVKESADGSTGRIPGFMLWGARVAYDFGPQMADLNLAF

SEQ ID NO: 43454 - protein, 185 aa, Zea mays
  Coding DNA Sequence Number=SeqID_79
  Homolog annotation: Hit_ID=P52127; Match level="QueryCoverage=100%, HitCoverage=34%, E-value=1e-103, Identity=99%"; Hit description =Uncharacterized protein yfjL
  Pfam annotation: Domain name=DUF1837; Domain location=1-185; Score =202.1; E_value=1.4e-57; Accession=PF08878.2; Description=Domain of unknown function (DUF1837)
DDKSYLRPDLLEWFKQRVEDDQSRSGRKIYVKRDLPHILTPFRAPMASVCAKRKGQVLHQQYSLKKYRYKHIADNVCQWLDEVFLRPKEMSDIHKLTFIEKRERLKNSVFKSLHDVSEFGRVLLHATIRQHHESQPIPCMLYVEKAGAEKILENVHIVRRDPEGDQLWIGFSELVTDINIAVRLP

SEQ ID NO: 43455 - protein, 107 aa, Zea mays
  Coding DNA Sequence Number=SeqID_80
  Gene Ontology: Mol. function=two-component response regulator activity; Cellular component=cytoplasm; Biological process=two -component signal transduction system (phosphorelay)
  Homolog annotation: Hit_ID=P21866; Match level="QueryCoverage=100%, HitCoverage=47%, E-value=2e-56, Identity=100%"; Hit description=KDP operon transcriptional regulatory protein kdpE
  Pfam annotation: Domain name=Trans_reg_C; Domain location=29-105; Score=75.9; E_value=1.3e-19; Accession=PF00486.19; Description =Transcriptional regulatory protein, C ter
HSATTAPDPLVKFSDVTVDLAARVIHRGEEEVHLTPIEFRLLAVLLNNAGKVLTQRQLLNQVWGPNAVEHSHYLRIYMGHLRQKLEQDPARPRHFITETGIGYRFML

SEQ ID NO: 43456 - protein, 170 aa, Zea mays
  Coding DNA Sequence Number=SeqID_81
  Gene Ontology: Mol. function=P-P-bond-hydrolysis-driven protein transmembrane transporter activity; Cellular component=type II protein secretion system complex; Biological process=intracellular protein transport across a membrane
  Homolog annotation: Hit_ID=P0AG91; Match level="QueryCoverage=100%, HitCoverage=27%, E-value=5e-86, Identity=100%"; Hit description =Protein-export membrane protein secD
SGKKDANGRAVLVKQEEVINIANIQSRLGNSFRITGINNPNEARQLSLLLRAGALIAPIQIVEERTIGPTLGMQNIEQGLEACLAGLLVSILFMIIFYKKFGLIATSALIANLILIVGIMSLLPGATLSMPGIAGIVLTLAVAVDANVLINERIKEELSNGRTVQQAIDE

SEQ ID NO: 43457 - protein, 127 aa, Zea mays
  Coding DNA Sequence Number=SeqID_82
  Gene Ontology: Mol. function=aminoacyl-tRNA ligase activity; Cellular component=cytoplasm; Biological process=tRNA aminoacylation for protein translation
  Homolog annotation: Hit_ID=Q3Z2Q4; Match level="QueryCoverage=100%, HitCoverage=21%, E-value=4e-55, Identity=87%"; Hit description =Arginyl-tRNA synthetase
  Pfam annotation: Domain name=DALR_1; Domain location=12-126; Score =172.3; E_value=1.3e-48; Accession=PF05746.6; Description=DALR anticodon binding domain
MLAFEGNTAPYMQYAYTRVLSVFRKAEIDEEQLAAAPVIIREDREAQLAARLLQFEETLTVVAREGTPHVMCAYLYDLAGLFSGFYEHCPILSAENEEVRNSRLKLAQLTAKTLKLGLDTLGIETVE

SEQ ID NO: 43458 - protein, 93 aa, Zea mays
  Coding DNA Sequence Number=SeqID_83
  Subcellular localization annotation: CTP_CleavageSite=86; ConfidenceScore=5.28e-01
MERGWRAGAEKFTSPLAPVHFKTPSGCWISTPRVSPAIVPTPVPTPPSPPRAPAPPSGFFLFLFPLCRTAAVNRAGTAAVNHAGTAAAAFSKP

SEQ ID NO: 43459 - protein, 223 aa, Zea mays
  Coding DNA Sequence Number=SeqID_84
  Gene Ontology: Mol. function=metalloendopeptidase activity; Cellular component=membrane; Biological process=proteolysis
  Homolog annotation: Hit_ID=P66948; Match level="QueryCoverage=82%, HitCoverage=37%, E-value=9e-98, Identity=100%"; Hit description=TPR repeat-containing protein yfgC precursor
  Pfam annotation: Domain name=Peptidase_M48; Domain location=126-223; Score=-30.5; E_value=0.0021; Accession=PF01435.9; Description =Peptidase family M48
ETEKSFEWANLRRYTQRRRGGNDISQYRSNDYLQKYRIEVMFRQLKKNLVATLIAAMTIGQVAPAFADSADTLPDMGTSAGSTLSIGQEMQMGDYYVRQLRGSAPLINDPLLTQYINSLGMRLVSHANSVKTPFHFFLINNDEINAFAFFGGNVVLHSALFRYSDNESQLASVMAHEISHVTQRHLARAMEDQQRSAPLTWVGALGSILLAMASPQAGMAALT

SEQ ID NO: 43460 - protein, 87 aa, Zea mays
  Coding DNA Sequence Number=SeqID_85
  Gene Ontology: Mol. function=glutamate-ammonia ligase activity; Cellular component=cytoplasm; Biological process=nitrogen compound metabolic process
  Homolog annotation: Hit_ID=P0A9C7; Match level="QueryCoverage=62%, HitCoverage=11%, E-value=4e-23, Identity=100%"; Hit description =Glutamine synthetase
MDKNLYDLPPEEAKEIPQVAGSLEEALNELDLDREFLKAGGVFTDEAIDAYIALRREEDDRAWDRWQAHHAGCDANASYPAYTVMMW

SEQ ID NO: 43461 - protein, 240 aa, Zea mays
  Coding DNA Sequence Number=SeqID_86
  Gene Ontology: Mol. function=protein binding; Cellular component=cell outer membrane; Biological process=cell adhesion
  Homolog annotation: Hit_ID=P52143; Match level="QueryCoverage=98%, HitCoverage=58%, E-value=1e-127, Identity=43%"; Hit description =Uncharacterized outer membrane protein ypjA precursor
MVAHRNINNYGIATGTNINSGTQNIKSGGKADTTIISSGSRQVVEKDGTAIGSNISAGGSLIVYTGGIAHGVNQETGSALVANTGAGTDIEGYNKLSHFTITGGEANYVVLENTGELTVVAKTSAKNTTIDTGGKLIVQKEAKTDSTRLNNGGVLEVQDGGEAKHVEQQSGGALIASTTSGTLIEGTNSYGDAFYIRNSEAKNVVLENAGSLTVVTGSRAVDTIINANGKMDVYGKDVGT

SEQ ID NO: 43462 - protein, 554 aa, Zea mays
  Coding DNA Sequence Number=SeqID_87
  Gene Ontology: Mol. function=nucleoside-triphosphatase activity; Biological process=conjugation
  Homolog annotation: Hit_ID=A1WDP5; Match level="QueryCoverage=94%, HitCoverage=61%, E-value=0.0, Identity=95%"; Hit description=Type IV secretion/conjugal transfer ATPase, VirB4 family precursor
  Pfam annotation: Domain name=CagE_TrbE_VirB; Domain location=216-431; Score=289.1; E_value=9e-84; Accession=PF03135.5; Description=CagE, TrbE, VirB family, component of type IV transporter system
MIEAIAIAIAVLGAVLLLILFARIRAVDAELKLKKHRAKDAGLADLLNYAAVVDDGVIVGKNGSFMAAWLYKGDDNASSTEEQREMVSFRINQALAGLGNGWMVHVDAVRRPAPNYSERGVSSFPDSVSFAIDEERRRLFEGLGAMFEGYFVLTVTWFPPVLAQRKFVELMFDDDAVAPDHTARTTGLIAQFKREITSLESRLSSAVKMTRLRGQKVVSEEGREVTHDDFLSWLQFCVTGLHHPVMLPSNPMYLDAVIGGQELWGGVVPKIGRKFIQVVAIEGFPLESTPGVLSALAELPSEYRWSSRFIFMDQHESLKHLDKFRKKWKQKIRGFFDQVFNTNTGSINQDAAAMVGDAEAAIAEVNSGLVAAGYYTSVVVLMDEDRERLAASALLVEKAVNRLAFAARIETINTLDAYLGSLPGHGVENVRRPLINTMNLADLLPTSSIWTGSATAPCPMYPPLSPALMHCVTVGATPFRLNLHVRDLGHTFMFGPTGAGKSTHLGIIAAQLRRYAGMSIYAFDKGMSMYPLAAGIPRGHEGQERPAFHGGRRR

SEQ ID NO: 43463 - protein, 312 aa, Zea mays
  Coding DNA Sequence Number=SeqID_88
  Gene Ontology: Cellular component=integral to membrane; Biological process=unidirectional conjugation
  Homolog annotation: Hit_ID=Q0B102; Match level="QueryCoverage=96%, HitCoverage=63%, E-value=1e-135, Identity=84%"; Hit description =Conjugation TrbI family protein
  Pfam annotation: Domain name=TrbI; Domain location=252-311; Score= -79.6; E_value=0.0052; Accession=PF03743.5; Description=Bacterial conjugation TrbI-like protein
MPMYILGGVLLSFVLVMALVAADRAAKQNAPADGPKEKAGNTSMFAKEIAGDKTGGLIEPASPLKVPDMPTGPASAPLEIARPSNPDAPPAPPANPGNPGQPVNDDEAQRIRMAKMQMFGEAVKAKTTVRVDAPRSNGSAPGGPSTYTGTPQTRDEMLNRIAAVQQQIDAQRSNDPTAAYQARLAQIRGMGVGGGGAAPAAGGMGAGGAPQLLQTSTSGGGRNSMAQFGQGGQGDRWKLDSQPEAPRTPFELRAGFVVPATLISGINSDLPGQIMAQVAQDVYDTPTGKHLLIPQGSRLVVSIRATWPTAKR

SEQ ID NO: 43464 - protein, 239 aa, Zea mays
  Coding DNA Sequence Number=SeqID_89
  Homolog annotation: Hit_ID=A1WAD8; Match level="QueryCoverage=20%, HitCoverage=45%, E-value=5e-22, Identity=96%"; Hit description =Putative uncharacterized protein
MARGDFWCCNAKLVAKVAPQGYWNYPKGTEQTPTHAQETNMERQTKLVGITSACIDCVALGTIEGDPERVTFETQKQAQAVRQELEQATALANTQAKVVDAERQVSISEFNARAAVKQAEGEAQAKTINAEADAKVVRLVGEAEAAKVEAIGTAEASVIKQKIDSMESGNYAVVQVAEALAGSGMKLVPDVVATGGSGSGGGTLVEVLLANLIRDGMHKGSGLPLNGESAVKPEALPAP

SEQ ID NO: 43465 - protein, 229 aa, Zea mays
  Coding DNA Sequence Number=SeqID_90
  Gene Ontology: Mol. function=aspartic-type endopeptidase activity; Cellular component=chromatin; Biological process=chromatin assembly or disassembly
  Homolog annotation: Hit_ID=Q8SA91; Match level="QueryCoverage=99%, HitCoverage=9%, E-value=3e-93, Identity=68%"; Hit description =Putative gag-pol polyprotein
  Pfam annotation: Domain name=rve; Domain location=1-121; Score=36.3; E_value=1.1e-07; Accession=PF00665.17; Description=Integrase core domain
AHFIPLLHPYTAFKVAQSFMSSVYKLHGMPEAIISDRDRIFTSSLWQELFKLAGTHLQMGSAYHPQSDGTERVNQCLETYLRCFVHFCPNKWSLWLSLAEFWYNTSFHSALGRSPFEVLYGRPPRHFGLAPEDSVTDVDLATWLSNRELMTRVVRHHLHRAQSRMKYQADKSRSDREFAVGDRVYLKLQPYIQTSVAHRANHKLSFKYFGPFNVLKRVGLVAYKLELPS

SEQ ID NO: 43466 - protein, 188 aa, Zea mays
  Coding DNA Sequence Number=SeqID_91
  Gene Ontology: Mol. function=transferase activity, transferring glycosyl groups; Cellular component=chloroplast; Biological process =purine base biosynthetic process
  Homolog annotation: Hit_ID=A9PE93; Match level="QueryCoverage=100%, HitCoverage=31%, E-value=3e-96, Identity=93%"; Hit description =Putative uncharacterized protein
  Pfam annotation: Domain name=GATase_2; Domain location=1-130; Score= -0.6; E_value=3.4e-09; Accession=PF00310.12; Description=Glutamine amidotransferases class-II
  Subcellular localization annotation: CTP_CleavageSite=46; ConfidenceScore=5.27e-01
MAIGHVRYSTAGSSMLKNVQPFVAGYRFGSVGVAHNGNLVNYRALRAMLEDNGSIFNTSSDTEVLLHLIAISKARPFLLRIVDACEKLEGAYSMVFVTGDKLVAVRDPYGFRPLVMGRRSNGAVVFASETCALDLIEATYEREVYPGEVLVVDKKDGVQSLCLMPHPEPKQCIFEHIYFALPNSLVFG

SEQ ID NO: 43467 - protein, 97 aa, Zea mays
  Coding DNA Sequence Number=SeqID_92
WYRSGIPGITASRNHLSPVHLYHRPPTASTPALDHHRTLRRKNELTRQSHGGDLRLPVRSLADRQRGSGPCFPHAQACALRTHLSCSSGLGKEKKPA

SEQ ID NO: 43468 - protein, 68 aa, Zea mays
  Coding DNA Sequence Number=SeqID_93
  Subcellular localization annotation: CTP_CleavageSite=52; ConfidenceScore=5.56e-01
MGNCVDKAVPGDNTSYQSKAGSKSISSSNPSTVKTGSTRSTWTNCVEELQIRQSSWGRRIWLCVQRLD

SEQ ID NO: 43469 - protein, 88 aa, Zea mays
  Coding DNA Sequence Number=SeqID_94
VSDLVAAWVLAQVLDLVAAWVLAQVEALAWVSALGLVVAVALAWVLALGLVVVKVLGLAVRRFELRFDVDYPTTSKARNTCSQCDGQG

SEQ ID NO: 43470 - protein, 26 aa, Zea mays
  Coding DNA Sequence Number=SeqID_95
MARGQAQKEAAAMACEEGGGSREFRT

SEQ ID NO: 43471 - protein, 137 aa, Zea mays
  Coding DNA Sequence Number=SeqID_96
  Homolog annotation: Hit_ID=Q6K9T7; Match level="QueryCoverage=67%, HitCoverage=19%, E-value=1e-12, Identity=46%"; Hit description =Putative uncharacterized protein OJ1124_D06.12-1
  Subcellular localization annotation: CTP_CleavageSite=37; ConfidenceScore=5.01e-01
MSTFPPPPPSAARSPVARVRLDHLVPFDGAFTPAYARAVEAVAASLTRHGAAAVDLPAADAAVVRCALESARAFFCDRSGLYVYRAGRALDDGELSPACMSDAFRCLGFSFRIDGVIFSWAPPKQPGTYGGPQAING

SEQ ID NO: 43472 - protein, 27 aa, Zea mays
  Coding DNA Sequence Number=SeqID_97
  Homolog annotation: Hit_ID=P12009; Match level="QueryCoverage=100%, HitCoverage=16%, E-value=2e-07, Identity=100%"; Hit description =Putative protein livX
MPKLNVLNWKVIIPIISPITKKAQNAS

SEQ ID NO: 43473 - protein, 130 aa, Zea mays
  Coding DNA Sequence Number=SeqID_98
  Homolog annotation: Hit_ID=P36682; Match level="QueryCoverage=78%, HitCoverage=16%, E-value=8e-45, Identity=88%"; Hit description =Uncharacterized protein yacH
  Subcellular localization annotation: CTP_CleavageSite=76; ConfidenceScore=5.63e-01
MAVIVTVMAGNTTATTSISTSTISTVSPDMAKRFHQTDVNGGMSATQLPAPTRDSQRQAAANQFQQRTHAAPVITRDTQRQAAAQRFNEAEHYGSYDDFHDFSRRQPLTQQQKDAARQRYQSASPEQRQA

SEQ ID NO: 43474 - protein, 182 aa, Zea mays
  Coding DNA Sequence Number=SeqID_99
  Gene Ontology: Mol. function=pyridoxal phosphate binding; Cellular component=chromoplast; Biological process=cysteine biosynthetic process from serine
  Homolog annotation: Hit_ID=P0A1E4; Match level="QueryCoverage=100%, HitCoverage=56%, E-value=1e-88, Identity=91%"; Hit description =Cysteine synthase A (EC 2.5.1.47) (O-acetylserine sulfhydrylase A) (O- acetylserine (Thiol)-lyase A)
  Pfam annotation: Domain name=PALP; Domain location=1-181; Score =129.0; E_value=1.4e-35; Accession=PF00291.16; Description=Pyridoxal -phosphate dependent enzyme
GNGRILAKVESRNPSFSVKCRIGANMIWDAEKRGVLKPGVELVEPTSGNTGIALAYVAAARGYKLTLTMPETMSIERRKLLKALGANLVLTEGAKGMKGAIQKAEEIVASNPEKYLLLQQFSNPANPEIHEKTTGPEIWEDTDGQVDVFIAGVGTGGTLTGVSRYIKGTKGKTDLISVAVEP

SEQ ID NO: 43475 - protein, 147 aa, Zea mays
  Coding DNA Sequence Number=SeqID_100
  Gene Ontology: Mol. function=transcription regulator activity; Cellular component=intracellular; Biological process=regulation of transcription, DNA-dependent
  Homolog annotation: Hit_ID=P31453; Match level="QueryCoverage=100%, HitCoverage=61%, E-value=1e-75, Identity=100%"; Hit description =Uncharacterized HTH-type transcriptional regulator yidP
  Pfam annotation: Domain name=GntR; Domain location=2-65; Score=93.4; E_value=7e-25; Accession=PF00392.12; Description=Bacterial regulatory proteins, gntR family
  Pfam annotation: Domain name=HTH_11; Domain location=6-64; Score=7.0; E_value=0.038; Accession=PF08279.3; Description=HTH domain
  Pfam module annotation: Pfam domain module=GntR::HTH_11; Domain location=2-65::6-64
MIYKSIAERLRIRLNSADFTLNSLLPGEKKLAEEFAVSRMTIRKAIDLLVAWGLVVRRHGSGTYLVRKDVLHQTASLTGLVEVLKRQGKTVTSQVLIFEIMPAPPAIASQLRIQINEQIYFSRRVRFVEGKPLMLEDSYMPVKLFRN

SEQ ID NO: 43476 - protein, 129 aa, Zea mays
  Coding DNA Sequence Number=SeqID_101
  Gene Ontology: Cellular component=cellulose and pectin-containing cell wall
  Homolog annotation: Hit_ID=Q2QP50; Match level="QueryCoverage=64%, HitCoverage=65%, E-value=5e-17, Identity=54%"; Hit description=Rapid ALkalinization Factor family protein, expressed
  Pfam annotation: Domain name=RALF; Domain location=62-129; Score =107.5; E_value=4e-29; Accession=PF05498.2; Description=Rapid ALkalinization Factor (RALF)
AGTGPEFPGSLVLLLLLAVAASAGAGAGASHLDLGLGFLSSGDRRRECRGTGAECLDESEGLDLGAGPASVESHRRALYGGGGGYIIYGALRRDNVPCSRRGASYYKCRPGGQANPYHRGCSRITRCRG

SEQ ID NO: 43477 - protein, 125 aa, Zea mays
  Coding DNA Sequence Number=SeqID_102
  Gene Ontology: Mol. function=phosphoglycolate phosphatase activity; Biological process=metabolic process
  Homolog annotation: Hit_ID=P0A8Y2; Match level="QueryCoverage=100%, HitCoverage=55%, E-value=2e-68, Identity=100%"; Hit description=5' -nucleotidase yjjG
MKWDWIFFDADETLFTFDSFTGLQRMFLDYSVTFTAEDFQDYQAVNKPLWVDYQNGAITSLQLQHGRFESWAERLNVEPGKLNEAFINAMAEICTPLPGAVSLLNAIRGNAKIGIITNGFSALQQ

SEQ ID NO: 43478 - protein, 175 aa, Zea mays
  Coding DNA Sequence Number=SeqID_103
  Gene Ontology: Mol. function=drug transporter activity; Cellular component=integral to membrane; Biological process=pathogenesis
  Homolog annotation: Hit_ID=P37169; Match level="QueryCoverage=100%, HitCoverage=33%, E-value=7e-81, Identity=90%"; Hit description =Virulence factor mviN
  Pfam annotation: Domain name=MVIN; Domain location=1-175; Score= -119.1; E_value=6.5e-06; Accession=PF03023.5; Description=MviN-like protein
  Pfam annotation: Domain name=MatE; Domain location=7-173; Score= -19.3; E_value=0.021; Accession=PF01554.9; Description=MatE
  Pfam module annotation: Pfam domain module=MVIN::MatE; Domain location=1-175::7-173
VVKQMGPAILGVSVSQISLIINTIFASFLASGSVSWMYYADRLMEFPSGVLGVALGTILLPSLSKSFASGNHDEYNRLMDWGLRLCFLLALPSAVALGILSGPLTVSLFQYGKFTAFDALMTQRALIAYSVGLIGLIVVKVLAPGFYSRQDIKTPVKIAIVTLILTQLMNLAFIG

SEQ ID NO: 43479 - protein, 180 aa, Zea mays
  Coding DNA Sequence Number=SeqID_104
  Gene Ontology: Mol. function=two-component response regulator activity; Cellular component=intracellular; Biological process=two -component signal transduction system (phosphorelay)
  Homolog annotation: Hit_ID=Q06065; Match level="QueryCoverage=100%, HitCoverage=39%, E-value=3e-92, Identity=95%"; Hit description =Acetoacetate metabolism regulatory protein atoC
  Pfam annotation: Domain name=Sigma54_activat; Domain location=1-175; Score=368.8; E_value=8.8e-108; Accession=PF00158.17; Description =Sigma-54 interaction domain
RAKGPFIKVNCAALPESLLESELFGHEKGAFTGAQTLRQGLFERANEGTLLLDEIGEMPLVLQAKLLRILQEREFERIGGHQTIKVDIRIIAATNRDLQAMVKEGTFREDLFYRLNVIHLILPPLRDRREDISLLANHFLQKFSSENQRDIIDIDPMAMSLLTAWSWPGNIRELSNVIER

SEQ ID NO: 43480 - protein, 132 aa, Zea mays
  Coding DNA Sequence Number=SeqID_105
  Gene Ontology: Mol. function=inorganic phosphate transmembrane transporter activity; Cellular component=plasma membrane; Biological process=phosphate transport
  Homolog annotation: Hit_ID=Q5PKW4; Match level="QueryCoverage=100%, HitCoverage=51%, E-value=5e-63, Identity=90%"; Hit description =Phosphate import ATP-binding protein pstB
  Pfam annotation: Domain name=ABC_tran; Domain location=1-103; Score =54.6; E_value=3.5e-13; Accession=PF00005.18; Description=ABC transporter
MDERVQWALTKAALWNETKDKLHQSGYSLSGGQQQRLCIARGIAIRPEVLLLDEPCSALDPISTGRIEELITELKQDYTVVIVTHNMQQAARCSDHTAFMYLGELIEFSNTDDLFTKPAKKQTEDYITGRYG

SEQ ID NO: 43481 - protein, 118 aa, Zea mays
  Coding DNA Sequence Number=SeqID_106
  Gene Ontology: Mol. function=hydrolase activity, acting on glycosyl bonds; Biological process=cell wall catabolic process
  Homolog annotation: Hit_ID=P0AEZ8; Match level="QueryCoverage=100%, HitCoverage=26%, E-value=8e-63, Identity=100%"; Hit description =Membrane-bound lytic murein transglycosylase D precursor
  Pfam annotation: Domain name=MLTD_N; Domain location=1-92; Score =155.3; E_value=1.6e-43; Accession=PF06474.3; Description=MLTD_N
MKAKAILLASVLLVGCQSTGNVQQHAQSLSAAGQGEAAKFTSQARWMDDGTSIAPDGDLWAFIGDELKMGIPENDRIREQKQKYLRNKSYLHDVTLRAEPYMYWIAGQVKKRNMPMEL

SEQ ID NO: 43482 - protein, 236 aa, Zea mays
  Coding DNA Sequence Number=SeqID_107
  Gene Ontology: Mol. function=protein serine/threonine kinase activity; Biological process=protein amino acid phosphorylation
  Homolog annotation: Hit_ID=Q94K14; Match level="QueryCoverage=28%, HitCoverage=29%, E-value=7e-19, Identity=68%"; Hit description =Putative uncharacterized protein T1N24.12
MVNKIFSENAFDVVMHFVTVAYVGVMEARCMTKARRLGVPTPVLYDVDPVLHTLTFEHVDGLSVNDILLRFGSNGVNEERLNDIATQIGNAMANYMMEALFMQTYMGNNTDLDDEPDGENPCGVQKGFEAMVLYPEQVGSSPASTWTPASLPRSPRSRPAPMSRTRARAPAVLPRLVRHARPGCPRRCSVKGLGFDLFIIRGGNSAFNACWRCDRYYPCLINDDKVDSHDIWSILY

SEQ ID NO: 43483 - protein, 89 aa, Zea mays
  Coding DNA Sequence Number=SeqID_108
MEHRPGLERLVETAYLELDGKLFVNTQQAPTWRANCRRSETGGSLGPTSECRRVPQPRWVEHEGEREGGKERKERIQVYNGGCSRVLRV

SEQ ID NO: 43484 - protein, 313 aa, Zea mays
  Coding DNA Sequence Number=SeqID_109
MVLGFIISKRGIEANPEKTPTIAQHPEPLLGAPGGYTHPRERPLVNAEVLEPGTYKLANSQGEPRLTEPRDSYASGIRIPHSSPSAISNSRSDKVIPRTEQVFTFGSSSAEEILRAFPTESVTGPHGRVKVRVSGKADRAEGLPRLRDTDTSLITFREKQLSLAQTSIRHTLQDTLILQARVLTLEGGSSTLGIDDTFSEVRPSLGRRRGGSAGYPWDLGQPSSKGASPTRGLGWSTPASVPLTDNPARLRPTRSHFRANSASVHADIAAPGPGLSKSGQGVPLTKLEEPQTTRPTEPRDYYASGIQIPHSSP

SEQ ID NO: 43485 - protein, 100 aa, Zea mays
  Coding DNA Sequence Number=SeqID_110
  Subcellular localization annotation: CTP_CleavageSite=48; ConfidenceScore=5.72e-01
MAVAVRPRTPVGACACASASASASVPVPVPAPLHCGVLSRVPSPSDARASNVTETSSTVCSRQYVTEGRGAVQPKEPGRERDRGGEELFCFPSSSSTISK

SEQ ID NO: 43486 - protein, 302 aa, Zea mays
  Coding DNA Sequence Number=SeqID_111
  Gene Ontology: Mol. function=zinc ion binding; Cellular component =nucleus
  Homolog annotation: Hit_ID=Q9FYF9; Match level="QueryCoverage=78%, HitCoverage=59%, E-value=4e-46, Identity=43%"; Hit description=F-box protein At1g67340
  Pfam annotation: Domain name=Sel1; Domain location=25-63; Score=18.0; E_value=0.035; Accession=PF08238.3; Description=Sel1 repeat
  Pfam annotation: Domain name=Sel1; Domain location=64-99; Score=17.3; E_value=0.056; Accession=PF08238.3; Description=Sel1 repeat
  Pfam annotation: Domain name=zf-MYND; Domain location=190-231; Score =40.1; E_value=7.9e-09; Accession=PF01753.9; Description=MYND finger
  Pfam module annotation: Pfam domain module=Sel1::Sel1::zf-MYND; Domain location=25-63::64-99::190-231
IRFYCLGSRSGGAGKQTRAAVGGHAAALYSLAVIQFNGSGGAKSDRDLRAGAALCARAASLGHVDALRELGHCLQDGYGVRRDPAEGRRLLVAANARELTLALSAAASRHAVAALPFAAAAGVVGGGGGCPLLSDFGWSLPEAEPHAANQFMVDWWASRCAAQAGGKKDGDGSGVDGDGDGAELRLCSHVRCGRRETRRHEFRRCSVCGAANYCSRACQALDWKRAHKAQCVPMDRWLLAGVAVGGGVEAQQHQQSLSLLVLQSLLLASPGPEEPCLELELYAAAERSKWHQQAARQPARQL

SEQ ID NO: 43487 - protein, 93 aa, Zea mays
  Coding DNA Sequence Number=SeqID_112
  Subcellular localization annotation: CTP_CleavageSite=22; ConfidenceScore=5.35e-01
MRFGLTPGVTPIISAKGSSTPSARLRSSDQDPGIPAPNVGGASPPRSWFDDLWPSLGSGLRPSRAAMSSSSSSSSSGVSGDGSNRSPSLAEST

SEQ ID NO: 43488 - protein, 133 aa, Zea mays
  Coding DNA Sequence Number=SeqID_113
VPKVHTKPIKRPRKGFNKREQGITEGCPGLAHRTVRCATGQCPVHHRTLSGAPGNSTPNSSPSGIFRGLRYNSPDCPVHHRTVPSAPRESDSELASFGNSLRYNSPDCPVSQRSNGYFAPTVVCNALNARLRA

SEQ ID NO: 43489 - protein, 184 aa, Zea mays
  Coding DNA Sequence Number=SeqID_114
MPGCIMFKIAPLENEDDLKIMFGPIVCTNETTLVPGVEDANSSSDGHEEEILGGGDNSTPDPSSIVKGKRKVLHDSPKPKKKRDVKEEYMKRLVKAYESRSLCSNMSITSFENDPVRKEVAAQLQQVIEDGSPEGSDLHFFATHLLMEKRYRDMSEPDTDSYDDERDGELLVALFAVDIWGSSP

SEQ ID NO: 43490 - protein, 88 aa, Zea mays
  Coding DNA Sequence Number=SeqID_115
MDESCTQLLSSDPMINLNTTVFFFVYSFPFARNLHNLESLALTIRIKVKALDVRCTKGLQAELNTFGNSQRRSAIIHRTVRCSKEERL

SEQ ID NO: 43491 - protein, 279 aa, Zea mays
  Coding DNA Sequence Number=SeqID_116
MLQGPPPTTWGLGPTRHASWPRTEGAKPPRAERVTAQRLEALLHFRPDQRVKGRTAMQAACNRTKGAHPFDFDASSMEAQAHTSCNWRAGYYVRETAPPLAPVPRLLDCGTGAATRGNTAHGPTVPTEHIGHGSVSRGRRRDGRYGQKWAGSNGGGRRTEAAVKSSAGSRTEKGDTPKGILLREGSRPRALLLMRGSKAGPSEGFDNRLRALGLRAHYWLAPEGIDSRLRARRARDDSGYVRYMAEVRATLPRLGGYSRKPDSGQTVDSVNIPARELGT

SEQ ID NO: 43492 - protein, 22 aa, Zea mays
  Coding DNA Sequence Number=SeqID_117
MELGPVCKGMSGKPSRVLPTST

SEQ ID NO: 43493 - protein, 37 aa, Zea mays
  Coding DNA Sequence Number=SeqID_118
MANRCTGGMQPPGGDQEGGYFRKGSFSVKEMGLEPSY

SEQ ID NO: 43494 - protein, 349 aa, Zea mays
  Coding DNA Sequence Number=SeqID_119
MNKRPAFKVPLQTELRFHPRRTDAATGRLSFASPLKGREPDIKAKEPEAGPNSSPSPAWLEDASSAELEDGFHHQKLEEEVASRLVREVEPQLASLSAPARMGLVVTVLGDHRRGGAARPRRGLSLLQHAPRSSPYGAEAGSHASCKLAQGRRSQTAARGACNRPAVTSIPPLSPRPTGERADSRAGDMQLRQVGAPLRLPTHPAWRPGPTRHATGAPVATCEQLHRHSHHHHASSTAEPVPRLEATLRTTQQCQPGVTVNTAKNGPAVMAVAGGQEQRSRRQPSSRHLVGQRENPLSQREDCAPMFRSSNGSRMRNGRLVNHSPCRINSTAGQAAPQAREASDASPSP

SEQ ID NO: 43495 - protein, 30 aa, Zea mays
  Coding DNA Sequence Number=SeqID_120
MSRTEGLNKKTFIRRASSMKMTGYTLASVL

SEQ ID NO: 43496 - protein, 458 aa, Zea mays
  Coding DNA Sequence Number=SeqID_121
  Subcellular localization annotation: CTP_CleavageSite=51; ConfidenceScore=5.36e-01
MSSSSLKRRVFPSSKPPDGGYPPPFRLLVGGTQLHGSWYLSAIVRLQGFSSAGPAVPPCRRSPRMVTVGFWVGKSKPGCDLGPTLSFKDVHHPRWGGSHAEPALYLPRGSAGRPFPWRLGVEAFAGPADGADFDNVGLNDGERRHLQRVGVVGRASGGPSCRRAAAASVPRAIRAAFVFWGGPAFALERRPCTEAGAPLIWEDLSGDLPGGWCPLPSALMQRRLEKSSSPTGSLPSPAPRATAPVCLSSPPRASARARARSQQRRPTVVVVGTSGGEPAIGLPWFRRGLGSGWRPWEPVDRGPRGNRLSRLLGPDSRRSPWTAAPPEAGSGFAEDVVDAEGATAPFGVKTRACRIRSSCSVCFLRPPRPEENTLAALAKLRLFSSCFEHLDFVGNRDVCVSKSCFSRKGRVSVAVDLALIAGQLVCSGLQNFGDDEWPFPGGRELVPPSGVLSQPKHQ

SEQ ID NO: 43497 - protein, 601 aa, Zea mays
  Coding DNA Sequence Number=SeqID_122
  Homolog annotation: Hit_ID=O48967; Match level="QueryCoverage=24%, HitCoverage=31%, E-value=2e-36, Identity=57%"; Hit description =Putative uncharacterized protein
  Pfam annotation: Domain name=zf-CCHC; Domain location=31-48; Score =25.8; E_value=0.00016; Accession=PF00098.14; Description=Zinc knuckle
  Pfam annotation: Domain name=zf-CCHC; Domain location=336-353; Score =13.0; E_value=0.016; Accession=PF00098.14; Description=Zinc knuckle
  Pfam module annotation: Pfam domain module=zf-CCHC::zf-CCHC; Domain location=31-48::336-353
MGMIRKINLMGVPLQVEDLLFNIDRKKQKKRGCFACGEKGHFRDNCPNMAEPKKGRSKGKALTSVRTWDDSSSEDEPPRTRSNWSSSRSSRSSHKCLMARGKMSIPSSSDESSSDDEGEGKPSIDELEEDVKFFQDVCTKQKAQLKTLKNKLISSQNDYKGLLEKFETFANLNSELSTKIELLESSVPSTATDDGLIKKNEKLKAKLASSQEAIENLLEKMEILSIHNNELTTKLENIGSTPAASLVEIPEIIKKDASTSCFDLIDDSNPCNQVLVENIVVETCLHEVAKENEQLKQEVARLGKTLYDKKGKAKQIRPPQDNTTPGVNKPMEGETVICRLCHMEGHKSFQCKAMTGDKQRHKHKQKPTSKISNTYIKKVDKKDATPYVGTLKLGYPLLLYKRSIHVAIFSHVVKELYVGPGHDSPQPRATTLGQQQHLTPPHGRVWYRHIIEHHYLSPEDFLMEEGVASSVPRGSNRPAPGAAAMHAAQQHTPAETSRAPSRAAPSGVLSAARELLRNPLSSTASPGVMRQWREDVVRLLGMAHPGSARSRPRSFRHQHEASASVRSPSVRGARTDDLQAELNHRRAGKDARISLERADDL

SEQ ID NO: 43498 - protein, 102 aa, Zea mays
  Coding DNA Sequence Number=SeqID_123
AATWPEKTISSKVSTVGPDPHGKVSDPCIHGPDLRAGSRTSAGGDPMLPRGPTTRDAMYRLSIKMSPVHSTGRDLVGDTGIGYFICSPAVLPLSPHVGASAL

SEQ ID NO: 43499 - protein, 213 aa, Zea mays
  Coding DNA Sequence Number=SeqID_124
  Homolog annotation: Hit_ID=Q8H6I5; Match level="QueryCoverage=89%, HitCoverage=21%, E-value=2e-58, Identity=61%"; Hit description =Putative RIRE2 orf3
MQQRRLELGQVLGELDQSWSQAAEAVSRAEALKGQLAEAAGRLAEASARTEGLETALSESVKDCKALAQAAEQKEVDRVAMSEAISAFCRAFGLDDVPSGSSPRSHLRALGGHVRSRLRGALHHGVRRAFAVLASHYDVDLERVSEGYCLPDEDEAALAEVQRLDAAVAGPSAVLASSFEVEILSPESPSEARPNSTEGGNDAAGAAPPPADA

SEQ ID NO: 43500 - protein, 368 aa, Zea mays
  Coding DNA Sequence Number=SeqID_125
MVVCINREQHYSDDRKKVSPSRSRTVGQVVSLADLERLVVCPEADARYIRGAPGVVYGSGEKNSHLPINQHYLLVVSHNAFNGGHQNEQRHYAAQQDSRAPPPHGQPPRSKKGDANEGGPEGGAPEGGKGEDIGTRGPREKDGGFRARSLPRRPIAEPGRLGAGNASDREPRRGKRKAVAWEGERDRKERRQGPGWRGRVFGVESSEQSFDVEAPRRQTSSRGPFCLFFVQAALAEQHPPRRAQKPSPDSFFHALVRRRVELLNVDVSSFCIAVSTLVSPNTAVAYCAYYSLYSSSPSPWKFPSHRPASLLRRFVVVVVICLKLPIEILSFVRHHLMQFVASSSLLSHGVALLTLRFLLVNDACGNPK

SEQ ID NO: 43501 - protein, 97 aa, Zea mays
  Coding DNA Sequence Number=SeqID_126
  Homolog annotation: Hit_ID=Q5NKP3; Match level="QueryCoverage=45%, HitCoverage=17%, E-value=2e-09, Identity=75%"; Hit description =Putative uncharacterized protein 9C20.7
MSCAFDEYYIKDYGVISVLEVTQRKTDDNDQFVILATVGDSFCVGSPTLSHVGCVAVDDKLRHSRRLDAVQSGCTALSIVNQGTSWLSLTSATPGLF

SEQ ID NO: 43502 - protein, 24 aa, Zea mays
  Coding DNA Sequence Number=SeqID_127
MASRYHARGQHFAPYNIAGLIGVL

SEQ ID NO: 43503 - protein, 42 aa, Zea mays
  Coding DNA Sequence Number=SeqID_128
LPTNRPPCALIVDTGRARNVLHATTSLTPFPLSTSNDVAPPG

SEQ ID NO: 43504 - protein, 300 aa, Zea mays
  Coding DNA Sequence Number=SeqID_129
MVKFVNESEEEEEFGIGEGTTDPSESDCGNDDDGIHGDCDGSHEDGGGDAGAHGAGGSHAGTYGAKSEAYGDGAYGVGDNHSSQYSGYGAPYLQRRHLVCRPVDDGSYSSVNSTYSYLPRRDHNLYGAWAPSPDPMPQSGMYGYEQPSPPPAYTYSHMAPDPTYGQPFYGVINLNPYVSRLQLFKFSPSRQHNHSLDLLLASHVVVLQESDAHELPPSDSHAARPTISWRLATSSDEMGGGAGTVPAMLWDADSEDEVHVVDHPTKHHAATHAEKGKTMADANTSSSGADVVGVSRPGGP

SEQ ID NO: 43505 - protein, 289 aa, Zea mays
  Coding DNA Sequence Number=SeqID_130
MAERYQLPQSCVPPTTRRKDGGYPPSGGLEGGKTRCIREREDMVAFQGGHPPFKGGSPYLRPQPSGAESSPTHSKVLPYGAGAGSHTSCKPAQSRRSQTAVRGAYNRPAVTSDSPLLPRPTGERGGQPCRRHATAPSGRTSPTPNTPSIEAQAHASCNRRTECFVHTTAPPLAPLPRLLDCGTNTAGRSSGHVDRQAYIPSRGDERTLSHGVKTTRPRSGRRFAFAIMTASKKAGPSEGFDSRLRSRGLYTHYWSEVRRPASRKGSTAASGYSGSAPITDQGFEGWPPK

SEQ ID NO: 43506 - protein, 204 aa, Zea mays
  Coding DNA Sequence Number=SeqID_131
MQIQREGWTSHTLPAQGGHLAKAYFAQRPAMRQAPYPIPDKILNYIVPATHAARAPKGSFVFIILCHLKLRDLRHKAMCRQTKVSGGKRLKNDQFALGLGNLLRPGTRPTPLPKYPSCCISCTWTEEIRETPNSTVSPGRRSSAATLLKVSSDDASAGGVFAADEEEDGMATYRRRRRAVCLTRARSPTSKSKEGRQAGERFQK

SEQ ID NO: 43507 - protein, 977 aa, Zea mays
  Coding DNA Sequence Number=SeqID_132
MVALAKYVWAMTSYGGQPSVEVFAKHYCLHWQKRKIGHKIAQFGSCTFTLRTGKTSIKVVELVPCARNKWGNWWDFWFYVSEGEVEDHPGLPVAMMCSHYYVAYPQFEVAEDDEDEGALRCAGRMSSGHDVVEDFIGYGVWRLAHGWALGEVCLREMPSLGGQRVRSPAFALDLHGRDPAAFVREAKDGAARIVGRYVPRTEGLRSWDIRGSNVRLNRVFELNCLPYGGYPGEDAADRHGKKPVDVTEEGPSQEAAPATKKRKFGIAVGVGVSESFVVDLMGTCAALGGRMSSPELRESSTRMMEVIEGRWPKNVMIPRAAGKDFFTSHMARDLKVFPYGRNIAAVVSAVMEKDRQDVAQKRRAIVRIADPMREAKRARGSAKAAASGGSKPVPAAKTVAPGHGQAPTSTKAAASGGSKPPPGGVVKGRRPLSPARRITDFGTDISVDDYLVGSGKGQLAVVPPPVVTTSPTAMVGTKGAARGPWATFCASGEILSAAAAKDVAGSMSQRLREASQQLKQAADFADLVASGALTADVAAEVECLRAQHADVVREKSAAESKNRRMMEKAEAKVARAEGSLARQHAEELEARFNALRSRVDKAESSTRAEVERTHAQFVDVYYELGARTADFEVLGQEAGLRFLEWLQEELLVLPTIVTGFMSFASLVTCEGAMNALSREGCRHYEVFDQADENFEREIFKVEDPVVKQSAGALFDMMWGPHGREAVRDRSDRTIEQMAYAEDVEDLVGLDGALPEAAKVGPMPPLDAGEGTSVISAPVAAGEDPAPASATTGEAAPKVLGSGPAHATATDDDIFVAASTVAADDDSFDSVSKCFESDDSGSSIAWTEESSDEDLDYFAALDVAAADYFAALDVAAAEPSPRAEGSEELPGGSTGYRWRRAVAKWRVGELSRSGRRCRSEVERGRLRVDGTGKRELLSSPIGVSVGEGELRNLFEGEELRIMLFNYREIGIIPKVEPM

SEQ ID NO: 43508 - protein, 93 aa, Zea mays
  Coding DNA Sequence Number=SeqID_133
  Homolog annotation: Hit_ID=Q5JLD2; Match level="QueryCoverage=86%, HitCoverage=25%, E-value=4e-24, Identity=65%"; Hit description =Putative uncharacterized protein P0413C03.32
MDFDGAIGDQGELWEWQSQEYGLQKDLLAAGLAAPCSGLAAPCSSLWAEAPNNMGDDWSMFDEQTPIKHCTDFEFQFCDIGGKVLFSWFNLQS

SEQ ID NO: 43509 - protein, 211 aa, Zea mays
  Coding DNA Sequence Number=SeqID_134
  Gene Ontology: Mol. function=DNA binding; Cellular component=nucleus; Biological process=regulation of transcription
  Homolog annotation: Hit_ID=Q8W149; Match level="QueryCoverage=100%, HitCoverage=22%, E-value=2e-74, Identity=72%"; Hit description=CDC5 protein
RTEIRLNLLFAFYIRAGKLWSQVQDTFKQMDTAATELECFQELQKQEHLAASYRIQNLSEEVSKQKALERTLQSRYGELVSGFQRIQEQVEEHKRQLKVQEAVEAESHAQEEEAAASNHAAAEEEDERKEDDERKEEDGRKSLSSEEKPQQTSTATDEEPAGSKGTTEDQMDVDSGNGEGGVVGPVPPAPDTEGGNDEVSVQEISEAQPLP

SEQ ID NO: 43510 - protein, 191 aa, Zea mays
  Coding DNA Sequence Number=SeqID_135
  Subcellular localization annotation: CTP_CleavageSite=90; ConfidenceScore=5.53e-01
MQAACNRAKWVRFSDSQHAQLGGLGPRVMQLARRMLRACNCTSTCATTAPPRLRNQYRDLRRPSARPSSASLTRRRRLWQEKQATLRLIMIASKKGLGKGDTPKRILPCEGTRLRASLLIRGSKAGPPEGFDSRLRSRGPYTHYWSEVRRSAPRKGSTAASGYSGSALITDQGFEGWPPTGSDSRLEGGGE

SEQ ID NO: 43511 - protein, 154 aa, Zea mays
  Coding DNA Sequence Number=SeqID_136
  Gene Ontology: Mol. function=kinase activity; Cellular component =ornithine carbamoyltransferase complex; Biological process=amino acid metabolic process
  Homolog annotation: Hit_ID=Q6QP54; Match level="QueryCoverage=99%, HitCoverage=54%, E-value=2e-37, Identity=55%"; Hit description =Putative kinase
  Subcellular localization annotation: CTP_CleavageSite=49; ConfidenceScore=5.20e-01
HSRLGPQSSWGLRAAVVTEYAGRHHCLSSRASQMGRRSCSLRPESARGRVMMAPPVDVAGLRPRLGDVEAPPKPRSSLSSVAEVESEPLGRARRRSSSRAEPKSEPWRAERSSPSSGTPESEPWVGRSGVRRLPGLSPSPSPGSGGAEFVVFWD

SEQ ID NO: 43512 - protein, 127 aa, Zea mays
  Coding DNA Sequence Number=SeqID_137
  Subcellular localization annotation: CTP_CleavageSite=64; ConfidenceScore=5.68e-01
MNKNTGIQSAITNGTPVPPPQVLKVHSQPIKRSSFGFNQGAKGQPKAPLVWRTGLSGVPPDSVRCTTGHVRCTRGLQLELATFGNFQRHSRYNSPDCPVYTGQCPVHQGEAASGTRQLRESPTASPL

SEQ ID NO: 43513 - protein, 114 aa, Zea mays
  Coding DNA Sequence Number=SeqID_138
  Gene Ontology: Mol. function=nucleotide binding; Cellular component =mitochondrion; Biological process=cell division
  Homolog annotation: Hit_ID=Q5JJJ5; Match level="QueryCoverage=93%, HitCoverage=13%, E-value=1e-49, Identity=91%"; Hit description =Putative dynamin like protein 2a
  Pfam annotation: Domain name=Dynamin_N; Domain location=2-107; Score =69.0; E_value=1.5e-17; Accession=PF00350.14; Description=Dynamin family
MQAETDREAGGNKGVSDRQIRLKIFSPNVLNITLVDLPGITKVPVGDQPTDIEARIRTMIMSYIRHKTCIILAVSPANADLANSDALQMARVADPDGSRTIGVITKVFSFFPSP

SEQ ID NO: 43514 - protein, 387 aa, Zea mays
  Coding DNA Sequence Number=SeqID_139
  Gene Ontology: Mol. function=aspartic-type endopeptidase activity; Cellular component=mitochondrion; Biological process=DNA integration
  Homolog annotation: Hit_ID=Q8W0X5; Match level="QueryCoverage=80%, HitCoverage=92%, E-value=1e-150, Identity=83%"; Hit description =Putative pol protein
  Pfam annotation: Domain name=RVT_2; Domain location=1-165; Score =200.2; E_value=5e-57; Accession=PF07727.5; Description=Reverse transcriptase (RNA-dependent DNA pol
MDVKSAFLNGPIKEEVYVEQPPGFEDERYPDHVCKLSKALYGLKQAPRAWYECLRDFLIANAFKVGKADPTLFTKTCDGDLFVCQIYVDDIIFGSTNQKSCEEFSRVMTQKFEMSMMGEVNYFLGFQVKQLKDDTFISQTKYTQDLLKRFGMKDAKPAKTPMGTDGHTDLNKGVATPCFGIWYPKGSNFDLIGYSDSDYAGCKVDRKSTSRTCQFLGRSLVSWNSKKQTSVALSTAEVEYVAAGQCCAQLLWMRQTLRDFGYNLSKVPLLCDNESAIRIAENPVEHSRTKHIDIRHHFLRDHQQKGDIEVFHSPRRIEREKVDLDHARLPLHSDEKSELVALGNSSSTYGYNSPDCPVCTGLSGEPTVGRANGRPRDLRGTRGRANG

SEQ ID NO: 43515 - protein, 137 aa, Zea mays
  Coding DNA Sequence Number=SeqID_140
  Homolog annotation: Hit_ID=A5BKB8; Match level="QueryCoverage=94%, HitCoverage=46%, E-value=5e-23, Identity=47%"; Hit description =Putative uncharacterized protein
GSGYTLIDTTLGNGYLGSRIDEERSKMRYLVVPARGRPFGPKDPSSDRACPRTATPEGVLSDGPGLQVLWKGTPGRVRAPSGPDPVAPRGAVNESGCLGMQPKSGGERPIAYKFREEIDVKGLLKNRGKSAWIFAGR

SEQ ID NO: 43516 - protein, 130 aa, Zea mays
  Coding DNA Sequence Number=SeqID_141
  Subcellular localization annotation: CTP_CleavageSite=34; ConfidenceScore=5.30e-01
MAKLNFNFNWGPGRFNRGPGQVQPGSREVQPVSRESSAGVFSPDLTAELQLQLGSRQVQQGSRASSTGVQRGSTGVQGKFSWGIFPGPHWSKPVEPVIGEVQPVSGSPDQSDLLTGRLTASVTPRRLNRP

SEQ ID NO: 43517 - protein, 136 aa, Zea mays
  Coding DNA Sequence Number=SeqID_142
  Subcellular localization annotation: CTP_CleavageSite=59; ConfidenceScore=5.49e-01
MGAPDSPVRQPRHPTVRVLTQTTVGALTFGGTGQSGAAPDRHCSLSGVPLTSTLTSAVNCSSVRETLERTSKDLGKAEVLRRSSKGVHNRKEIKSDSDASPSRVPVPVYTKMGVQDASGLPIAMDHDMVVKNKEII

SEQ ID NO: 43518 - protein, 40 aa, Zea mays
  Coding DNA Sequence Number=SeqID_143
SGGKKGMNVIVNRYNNNLYADARRPRRLRPKTKASALPKE

SEQ ID NO: 43519 - protein, 90 aa, Zea mays
  Coding DNA Sequence Number=SeqID_144
MSVSRPKETDREPVRSLGVLSSPTTAPPLGTGQCACEKAQLSVKPSTSELPRPPWLSAAITGSLAPPAGPPGNIRRSTSNHRQHLQIARA

SEQ ID NO: 43520 - protein, 463 aa, Zea mays
  Coding DNA Sequence Number=SeqID_145
  Gene Ontology: Mol. function=nucleic acid binding; Cellular component= nucleus; Biological process=RNA metabolic process
  Homolog annotation: Hit_ID=Q5JLB5; Match level="QueryCoverage=91%, HitCoverage=89%, E-value=0.0, Identity=76%"; Hit description=Zinc finger CCCH domain-containing protein ZFN-like 2
  Pfam annotation: Domain name=zf-CCCH; Domain location=119-145; Score =42.4; E_value=1.6e-09; Accession=PF00642.15; Description=Zinc finger C-x8-C-x5-C-x3-H type (and similar)
  Pfam annotation: Domain name=zf-CCCH; Domain location=165-191; Score =38.0; E_value=3.3e-08; Accession=PF00642.15; Description=Zinc finger C-x8-C-x5-C-x3-H type (and similar)
  Pfam annotation: Domain name=zf-CCCH; Domain location=317-343; Score =46.8; E_value=7.6e-11; Accession=PF00642.15; Description=Zinc finger C-x8-C-x5-C-x3-H type (and similar)
  Pfam annotation: Domain name=zf-CCCH; Domain location=396-422; Score =47.0; E_value=6.4e-11; Accession=PF00642.15; Description=Zinc finger C-x8-C-x5-C-x3-H type (and similar)
  Pfam annotation: Domain name=zf-CCCH; Domain location=74-100; Score =42.6; E_value=1.4e-09; Accession=PF00642.15; Description=Zinc finger C-x8-C-x5-C-x3-H type (and similar)
  Pfam module annotation: Pfam domain module=zf-CCCH::zf-CCCH::zf -CCCH::zf-CCCH::zf-CCCH; Domain location=119-145::165-191::317 -343::396-422::74-100
  Subcellular localization annotation: CTP_CleavageSite=16; ConfidenceScore=5.19e-01
MDDAGRPPPHAPVAVTASASASATAAPAPPQPSATAAVDRSSPDPDALYEEGMWQQMAMDSGATMQPGSYPERPGEPDCTYYLRTGLCRFGMSCRFNHPPDRNLAIASARMKGEYPERAGQPECQYYLKTGTCKFGPTCKFHHPREKAGIAGRVQLNTSGYPLRPNEKECAYYLKTGHCKYANTCKFHHPELFNVVPSSRGSPIYTSVHSSASAGPQSYTGTMPSWAFPRASFIPSPRWQSPSNYAPMIVPQGLVQMQSWNSYTGQLQSPGAQQTYGSSQQGEASTGNQGMLSPYRPSSFPVPQYALQRENVFPERPDEPECQYYMKTGDCKFGAVCKFHHPRVRSLPPPDCVLSPMGLPLRPRAVQQISLWLAGIVVDTWTLIRAMSKVTNLLGQGEELCKFYSRYGICKFGANCKFDHPTVVAPMVYAYGFSASASPASASTNVPMARRLLGSPPGSGYTS

SEQ ID NO: 43521 - protein, 261 aa, Zea mays
  Coding DNA Sequence Number=SeqID_146
  Gene Ontology: Mol. function=nucleic acid binding; Cellular component= intracellular; Biological process=transport
  Homolog annotation: Hit_ID=A7R1L9; Match level="QueryCoverage=54%, HitCoverage=28%, E-value=6e-39, Identity=62%"; Hit description =Chromosome undetermined scaffold_363, whole genome shotgun sequence
  Pfam annotation: Domain name=RRM_1; Domain location=81-151; Score =49.2; E_value=1.5e-11; Accession=PF00076.13; Description=RNA recognition motif. (a.k.a. RRM, RBD,
VPPISSPPVPLKEAPKKSYASIVKVMKEHRPLAPAVPSRPAPPITEKQASPAPTPVTEAPAFSPNPQSGGFQDPEVDAHAIYVRSLPLNATPQQLEEEFKRFGTIKHEGIQVRSNKIQGFCYGFVEFEDASAVQAAIEASPVTIGERQCFVEEKRTTGSRGGGSRGGRFPPGRGGNFRGEGIRGRGTYNGGRGYGRGEFSYRSDYGGRGGGRGGSLHGGDVGYQRVDYSGTSSGRGARAPSAAIPGIPDRYQPAFLYKLVL

SEQ ID NO: 43522 - protein, 38 aa, Zea mays
  Coding DNA Sequence Number=SeqID_147
MEEDDLQEEDMAPLATFAAPAHAQTIWHVRQGTLALRQ

SEQ ID NO: 43523 - protein, 127 aa, Zea mays
  Coding DNA Sequence Number=SeqID_148
MKENAIASNPDQTTTIKELLQQKEAEPDLDKSKNSSDPIPATVEDNSENTTISESTHNDESIVVGANTENATSETVKKKSSNTNASDSSHQNENIIVEAKEDNATSDLVVLDKSESNNGSVPVTAEE

SEQ ID NO: 43524 - protein, 138 aa, Zea mays
  Coding DNA Sequence Number=SeqID_149
  Gene Ontology: Mol. function=protein serine/threonine kinase activity; Biological process=protein amino acid phosphorylation
  Homolog annotation: Hit_ID=Q5JK11; Match level="QueryCoverage=93%, HitCoverage=22%, E-value=5e-49, Identity=74%"; Hit description =Putative cell cycle dependent kinase C
RHCGRKKMVNKMCNFNLQVPRKTSTSTTKLERFPPPHLDASIGYSLDSSVDGATEEFFSSSVVELKKMPSLIFGHVKSYLNSPKKGMHSKARPSLNMAPPTVLIGAFRPYSFGQPMEVRRKNREQFRSKGRNAVGAVK

SEQ ID NO: 43525 - protein, 178 aa, Zea mays
  Coding DNA Sequence Number=SeqID_150
  Homolog annotation: Hit_ID=A2WYK1; Match level="QueryCoverage=49%, HitCoverage=41%, E-value=2e-14, Identity=57%"; Hit description =Putative uncharacterized protein
MGCAASAADGAELRRRGWARAGEPGHSEASTSGLLAPPHQQEGQEAESSSGGRRRGCKVAPEPKELEEGTAALPSMPGSPSFRYYCQKKTAAVDRIVADAIDADTTVKDQRSLNLKGGPNGLGSVACRSSLPLGTSTTCSAAKEASLRRLLLPLQMQAPNPDQAALYGIFYILLRLSL

SEQ ID NO: 43526 - protein, 94 aa, Zea mays
  Coding DNA Sequence Number=SeqID_151
MSGAHRTVRCPLLAVGSATCHAQIARPTVGPADSWLTGQSASPLQPNGTFAEYVDVYSSLLYHKTPGCPHCNHCSGEGEAVEGDFQEFQDYDEF

SEQ ID NO: 43527 - protein, 183 aa, Zea mays
  Coding DNA Sequence Number=SeqID_152
  Gene Ontology: Mol. function=protein binding; Cellular component =chloroplast; Biological process=cell redox homeostasis
  Homolog annotation: Hit_ID=A2WY84; Match level="QueryCoverage=85%, HitCoverage=85%, E-value=3e-53, Identity=69%"; Hit description =Putative uncharacterized protein
  Pfam annotation: Domain name=AhpC-TSA; Domain location=69-165; Score=- 15.2; E_value=0.021; Accession=PF00578.12; Description=AhpCTSA family
  Pfam annotation: Domain name=Thioredoxin; Domain location=78-180; Score=114.5; E_value=3.2e-31; Accession=PF00085.11; Description =Thioredoxin
  Pfam module annotation: Pfam domain module=AhpC-TSA::Thioredoxin; Domain location=69-165::78-180
  Subcellular localization annotation: CTP_CleavageSite=70; ConfidenceScore=5.07e-01
VTLEQVCTKKQAGTGPESRDPPAALVAVAIRWASASASQKRGLLLTTARGGGVLAPVRSSGIETTTTSVGAEAVTGQVTEVNKDTFWPIVEAAGDKVVVLDMYTEWCGPCKVMAPKFQEMSEKNLDVVFLKLDCNQDNKPLAKELGIKVVPTFKILKGGKVVKEVTGAKIDELAEAIEIANKK

SEQ ID NO: 43528 - protein, 102 aa, Zea mays
  Coding DNA Sequence Number=SeqID_153
RGRVRALGSSEAEFVIFRGRGRVRALGSGEAEFVVFRGRVRALGSSEAVFVVFRGQGRVRALGSSKAELPMAPEAGLGCCQPHSIEWHDSRSDAGGAVLLSG

SEQ ID NO: 43529 - protein, 104 aa, Zea mays
  Coding DNA Sequence Number=SeqID_154
  Homolog annotation: Hit_ID=P64452; Match level="QueryCoverage=100%, HitCoverage=54%, E-value=2e-47, Identity=82%"; Hit description =Uncharacterized lipoprotein ydcL precursor
MKEAIAQRKPLVTTAGPRSLIFRGAITGVDTSKEGLQFYEVVPVALVVAGTQMATGHRTMDTRLILKGEGKDLNNESTPMAFENIKQVIDDMATDATMFDVNKK

SEQ ID NO: 43530 - protein, 340 aa, Zea mays
  Coding DNA Sequence Number=SeqID_155
  Homolog annotation: Hit_ID=Q6QP51; Match level="QueryCoverage=85%, HitCoverage=90%, E-value=7e-28, Identity=35%"; Hit description =Putative growth-regulating factor 1
MMTASKKVCHVVQFRILFLFPFLSLATGIGKGGYSERDPSPRRKWAPSPPTDQRFEGWPLGRVRQLPQSTRAPRPLLVRGSKAGPSEGFDSRLRPLGLRAHYWSEVRRLAPRKGSTAASGHSGSAPTTDQGFVGWPPDGFDSRPRARRVRDDSGYVRYITKARATLPRGSGATLANPAPVKPLTASTYQLENSEPDYAPGQRPENSAACAALTAVPPARVRLVAAKSSLGRHRNLRLARPSDSDSTSTPEGGLRLARPQGSNSTSTRKTVSASPDPQAQTQPRPPDDGLRLARPPGSDSTSGRRSPPRPTPGLGLSLDLGGVTTSLGPTMPQGGPSLPYP

SEQ ID NO: 43531 - protein, 152 aa, Zea mays
  Coding DNA Sequence Number=SeqID_156
  Gene Ontology: Mol. function=transporter activity; Cellular component= integral to membrane; Biological process=sodium ion transport
  Homolog annotation: Hit_ID=P32136; Match level="QueryCoverage=84%, HitCoverage=27%, E-value=4e-68, Identity=99%"; Hit description =Uncharacterized symporter yihO
CVAFFGTAFVNSLNWALVPDTVDYGEWKTGIRAEGSVYTGYTFFRKISAALAGFLPGIMLTQIGYVPNIAQSDATLQGLRQLIFIWPCALAIIAALTMGFFYTLNEKRFALIIEEINQRKNKEMATEKNGFRNVINVNSRYFHPGGWRPPYV

SEQ ID NO: 43532 - protein, 118 aa, Zea mays
  Coding DNA Sequence Number=SeqID_157
  Gene Ontology: Mol. function=transferase activity
  Homolog annotation: Hit_ID=P0A6G6; Match level="QueryCoverage=100%, HitCoverage=64%, E-value=3e-61, Identity=100%"; Hit description=Apo -citrate lyase phosphoribosyl-dephospho-CoA transferase
  Pfam annotation: Domain name=CitX; Domain location=11-118; Score =127.1; E_value=5e-35; Accession=PF03802.5; Description=Apo-citrate lyase phosphoribosyl-dephospho-CoA transferase
MHLLPELASHHAVSIPELLVSRDERQARQHVWLKRHPVPLVSFTVVAPGPIKDSEVTRRIFNHGVTALRALAAKQGWQIQEQAALVSASGPEGMLSIAAPARDLKLATIELEHSHPLG

SEQ ID NO: 43533 - protein, 429 aa, Zea mays
  Coding DNA Sequence Number=SeqID_158
  Homolog annotation: Hit_ID=Q8S473; Match level="QueryCoverage=94%, HitCoverage=53%, E-value=6e-67, Identity=41%"; Hit description =Putative RIRE2 orf3
  Subcellular localization annotation: CTP_CleavageSite=70; ConfidenceScore=5.17e-01
MARSDKRRHGSTGLAPRKVLKTTATSAASAAPGLGGQLTPPQDAPKRGAQAAPVSVGLAPEADSPVEAVVASGEAAGAAVALGPPDVLPTLAPASAKSVAVLAVEPPVAADVQMAEASLPVASEEGVWNRDPFWGAGRSQDPPGNEFKHNFRVIKAFFVTPRFLSSGSDGSERRQVVVHPSQGRCLGSLRSLRTTLAGATERLSQRSAEVADLRLLCVDLGAEAAAARVEAQRQRSELGQLAEVSARAGALAADLVVAQAASSEQRARAEELESALDESTKALAQAAEQREADHAAMSEAIFAFFRVFGSDDVPSGSSPQSRLQALGDHARGRLREAMHHGVRRAFAVLASHYDVDLERVSEGYCLPDEDEAALAEVQRLDAATAGPSAVLATTFEAEILLLAPSSEAGADLAEGGDEAEGATPSPGDT

SEQ ID NO: 43534 - protein, 24 aa, Zea mays
  Coding DNA Sequence Number=SeqID_159
MARSAQWTDDKCADSTQEIPGIPD

SEQ ID NO: 43535 - protein, 92 aa, Zea mays
  Coding DNA Sequence Number=SeqID_160
  Homolog annotation: Hit_ID=P69857; Match level="QueryCoverage=80%, HitCoverage=31%, E-value=2e-37, Identity=97%"; Hit description =Probable N-acetylneuraminic acid outer membrane channel protein nanC precursor
MDGGQAWKVIPGIPFMIIKRKNAALNDVQVEVNYAIKLDDQWTVRPGMLTHFSSNGTRYGPYVKLSWDATKDLNFGIRYRYDWKAYRQQDLS

SEQ ID NO: 43536 - protein, 143 aa, Zea mays
  Coding DNA Sequence Number=SeqID_161
  Gene Ontology: Mol. function=oxidoreductase activity; Cellular component=periplasmic space; Biological process=cell division
  Homolog annotation: Hit_ID=Q8X947; Match level="QueryCoverage=96%, HitCoverage=26%, E-value=5e-66, Identity=91%"; Hit description=Blue copper oxidase cueO precursor
  Pfam annotation: Domain name=Cu-oxidase_3; Domain location=56-142; Score=74.7; E_value=3e-19; Accession=PF07732.6; Description =Multicopper oxidase
NKEITMQRRDFLKYSVALGVASALPLWSRAVFAAERPTLPIPDLLTTDARNRIQLTIGAGQSTFGGKTATTWGYNGNLLGPAVKLQRGKAVTVDIYNQLTEETTLHWHGLEVPGEVDGGPQGIIPPGGKRSVTLNVDQPAATC

SEQ ID NO: 43537 - protein, 472 aa, Zea mays
  Coding DNA Sequence Number=SeqID_162
  Gene Ontology: Mol. function=sequence-specific DNA binding; Cellular component=nucleus; Biological process=regulation of transcription, DNA-dependent
  Homolog annotation: Hit_ID=Q6IEM8; Match level="QueryCoverage=90%, HitCoverage=90%, E-value=1e-134, Identity=60%"; Hit description=WRKY transcription factor 53
  Pfam annotation: Domain name=FAR1; Domain location=367-425; Score= -29.9; E_value=0.093; Accession=PF03101.6; Description=FAR1 family
  Pfam annotation: Domain name=WRKY; Domain location=199-258; Score =143.4; E_value=6.5e-40; Accession=PF03106.6; Description=WRKY DNA -binding domain
  Pfam annotation: Domain name=WRKY; Domain location=364-423; Score =153.7; E_value=5.1e-43; Accession=PF03106.6; Description=WRKY DNA -binding domain
  Pfam module annotation: Pfam domain module=FAR1::WRKY::WRKY; Domain location=367-425::199-258::364-423
  Subcellular localization annotation: CTP_CleavageSite=52; ConfidenceScore=5.04e-01
MASSTGSLEHGGFTFTPPPFITSFTELLSSAGDMLGAGADQERSSPRGLFHRGARGVPKFKSAQPPSLPISPPPMSPSSYFAIPPGLSPAELLDSPVLLHSSSNILASPTTGAIPAQRFDWKKAADLIASQSQQDGDSRAAAGGFDDFSFHTATSNAVRAHTTTTSLPSFEEEQQQQVEKAAVPSSNRASGGGNGNTKLEDGYNWRKYGQKQVKGSENPRSYYKCTYHSCSMKKKVERALADGRITQIVYKGAHNHPKPLSTRRNSSGGGAAEELQAGNSSLSAVAAAGCTGPEHSGATAENSSVTFGDDEAENGSQRSDGDEPDAKRWKQEDGENEGSSAGGGGKPVREPRLVVQTMSDIDILDDGFRWRKYGQKVVKGNPNPRSYYKCTTAGCPVRKHVERASHDKRAVITTYEGKHNHDVPVGRGAASRAAAAAAAAGSGALMATGGGQLGYHHQQQQQPYTLEMLSSG

SEQ ID NO: 43538 - protein, 141 aa, Zea mays
  Coding DNA Sequence Number=SeqID_163
  Gene Ontology: Mol. function=protein transporter activity; Cellular component=integral to membrane; Biological process=protein transport
  Homolog annotation: Hit_ID=P0ABU8; Match level="QueryCoverage=100%, HitCoverage=57%, E-value=2e-73, Identity=100%"; Hit description =Biopolymer transport protein exbB
  Pfam annotation: Domain name=MotA_ExbB; Domain location=71-141; Score= -31.2; E_value=0.0053; Accession=PF01618.7; Description=MotATolQExbB proton channel family
MQTDLSVWGMYQHADIVVKCVMIGLILASVVTWAIFFSKSVEFFNQKRRLKREQQLLAEARSLNQANDIAADFGSKSLSLHLLNEAQNELELSEGSDDNEGIKERTSFRLERRVAAVGRQMGRGNGYLATIGAISPFVGLF

SEQ ID NO: 43539 - protein, 230 aa, Zea mays
  Coding DNA Sequence Number=SeqID_164
  Gene Ontology: Mol. function=catalytic activity
  Homolog annotation: Hit_ID=A2Y3P0; Match level="QueryCoverage=100%, HitCoverage=67%, E-value=2e-52, Identity=51%"; Hit description =Putative uncharacterized protein
  Pfam annotation: Domain name=PP2C; Domain location=2-213; Score= -52.5; E_value=0.007; Accession=PF00481.12; Description=Protein phosphatase 2C
QEALALSSLIDDEKKLSDCQSDLKQSYVVACAAVYDKLPSRRLDAVHSSCTALSIVKQGGLMVVANVDDSRVVDTASNDRHHAVLIVHLKPNLPRKSLRIRIRWCNGQGYYLADEPGVHFVWQPNQESSVLVMSRAFDDYYIEDCGVILAPEVTQKRIDNSDQFVILATRHVWNMLSNDETIQIVAYIEERERERERERERGEREREREMRGVLVGACMRVLFFFHKHPS

SEQ ID NO: 43540 - protein, 230 aa, Zea mays
  Coding DNA Sequence Number=SeqID_165
  Gene Ontology: Mol. function=transporter activity; Cellular component= integral to membrane; Biological process=transport
  Homolog annotation: Hit_ID=P42915; Match level="QueryCoverage=76%, HitCoverage=21%, E-value=1e-71, Identity=77%"; Hit description =Uncharacterized outer membrane usher protein yraJ precursor
  Pfam annotation: Domain name=Usher; Domain location=1-230; Score= -508.2; E_value=0.067; Accession=PF00577.11; Description=Fimbrial Usher protein
  Subcellular localization annotation: CTP_CleavageSite=77; ConfidenceScore=5.07e-01
MAINGVRSTSKISRKPTPISLSATIAIPTMAILVLMKPIPAIGTITVAKKVKFNSTSARQYLMGIPLERWLPRSRVSYQMTSQKDRPTQHEMRLDGSLLDDGRLSYSLEQSLDDDNNHNSSLNASYRSPYGTFSAGYSYGNDSSQYNYGVTGGVVIHPHGVTLSQYLGNAFALIDANGASGVRIQNYPGIATDPFGYAVVPYLTTYQENRLSVDTTQLPDNVDLEQTTQF

SEQ ID NO: 43541 - protein, 64 aa, Zea mays
  Coding DNA Sequence Number=SeqID_166
MSFSDNEQNVTPEKAEGTALIYSVVANSPHKSFFNHYLSHPDFGAPRPGCEHNHQVCWDQVSHI

SEQ ID NO: 43542 - protein, 157 aa, Zea mays
  Coding DNA Sequence Number=SeqID_167
  Gene Ontology: Mol. function=transcription factor activity; Biological process=regulation of transcription, DNA-dependent
  Homolog annotation: Hit_ID=P39334; Match level="QueryCoverage=100%, HitCoverage=79%, E-value=7e-86, Identity=99%"; Hit description =Uncharacterized HTH-type transcriptional regulator yjgJ
  Pfam annotation: Domain name=TetR_N; Domain location=21-67; Score =52.6; E_value=1.4e-12; Accession=PF00440.14; Description=Bacterial regulatory proteins, tetR family
MVTKKQSRVPGRPRRFAPEQAISAAKVLFHQKGFDAVSVAEVTDYLGINPPSLYAAFGSKAGLFSRVLNEYVGTEAIPLADILRDDRPVGECLVEVLKKAARRYSQNGGCAGCMVLEGIHSHDPQARDIAVQYYHAAETTIYDYIARRHPQRAQCVT

SEQ ID NO: 43543 - protein, 111 aa, Zea mays
  Coding DNA Sequence Number=SeqID_168
  Gene Ontology: Biological process=ethanolamine metabolic process
  Homolog annotation: Hit_ID=P63747; Match level="QueryCoverage=100%, HitCoverage=100%, E-value=8e-56, Identity=100%"; Hit description =Ethanolamine utilization protein eutS
  Pfam annotation: Domain name=BMC; Domain location=39-108; Score=69.5; E_value=1.1e-17; Accession=PF00936.10; Description=BMC domain
MDKERIIQEFVPGKQVTLAHLIAHPGEELAKKIGVPDAGAIGIMTLTPGETAMIAGDLALKAADVHIGFLDRFSGALVIYGSVGAVEEALSQTVSGLGRLLNYTLCEMTKS

SEQ ID NO: 43544 - protein, 102 aa, Zea mays
  Coding DNA Sequence Number=SeqID_169
MATTAAATIVGALPTARGRCGAFWFPWRGVEEGTGRPNAAGYYGVVTRAVGGDGGRASISISSSRRWATEQGKDHLAITDWIAEFGERRCHCLKTTTKIGDR

SEQ ID NO: 43545 - protein, 129 aa, Zea mays
  Coding DNA Sequence Number=SeqID_170
  Gene Ontology: Mol. function=hydrolase activity; Cellular component =periplasmic space; Biological process=defense response to bacterium
  Homolog annotation: Hit_ID=P77551; Match level="QueryCoverage=85%, HitCoverage=74%, E-value=2e-55, Identity=100%"; Hit description =Putative Rz endopeptidase from lambdoid prophage Rac
  Pfam annotation: Domain name=Phage_lysis; Domain location=3-128; Score=229.4; E_value=8.2e-66; Accession=PF03245.4; Description =Bacteriophage lysis protein
IGISALVICIVVCLSWGVNHYRDNAIAYKEQRDKNARELKLANAAITEMQMRQRDVAALDAKYTKELADAKAENDALRDDVAAGRRRLHIKAVCQSVREATTASGVDNAASPPTWQTPLNGIISPSERG

SEQ ID NO: 43546 - protein, 166 aa, Zea mays
  Coding DNA Sequence Number=SeqID_171
  Gene Ontology: Mol. function=receptor activity
  Homolog annotation: Hit_ID=Q83IY2; Match level="QueryCoverage=100%, HitCoverage=34%, E-value=3e-92, Identity=99%"; Hit description =Protein viaA
WREKVIERPVVHKDYDEQPRGPFIVCVDTSGSMGGFNEQCAKAFCLALMRIALAENRRCYIMLFSTEIVRYELSGPQGIEQAIRFLSQQFRGGTDLASCFRAIMERLQSREWFDADAVVISDFIAQRLPDDVTSKVKELQRVHQHRFHAVAMSAHGKPGIMRIFDH

SEQ ID NO: 43547 - protein, 167 aa, Zea mays
  Coding DNA Sequence Number=SeqID_172
  Gene Ontology: Mol. function=transferase activity, transferring glycosyl groups; Biological process=lipopolysaccharide biosynthetic process
  Homolog annotation: Hit_ID=P27129; Match level="QueryCoverage=100%, HitCoverage=49%, E-value=1e-95, Identity=100%"; Hit description =Lipopolysaccharide 1,2-glucosyltransferase
  Pfam annotation: Domain name=Glyco_transf_8; Domain location=1-105; Score=-28.5; E_value=9.6e-05; Accession=PF01501.11; Description =Glycosyl transferase family 8
  Pfam annotation: Domain name=Glyco_transf_8N; Domain location=107 -163; Score=116.4; E_value=8.5e-32; Accession=PF08437.1; Description =Glycosyl transferase family 8 C-termi
  Pfam module annotation: Pfam domain module=Glyco_transf_8::Glyco _transf_8N; Domain location=1-105::107-163
PELLGQYFNSGVVYLDLKKWADAKLTEKALSILMSKDNVYKYPDQDVMNVLLKGMTLFLPREYNTIYTIKSELKDKTHQNYKKLITESTLLIHYTGATKPWHKWAIYPSVKYYKIALENSPWKDDSPRDAKSIIEFKKRYKHLLVQHHYISGIIAGVCYLCRKYYRK

SEQ ID NO: 43548 - protein, 150 aa, Zea mays
  Coding DNA Sequence Number=SeqID_173
  Gene Ontology: Mol. function=DNA binding; Biological process =regulation of transcription, DNA-dependent
  Homolog annotation: Hit_ID=P06615; Match level="QueryCoverage=98%, HitCoverage=55%, E-value=2e-57, Identity=79%"; Hit description =Resolvase
  Pfam annotation: Domain name=Phage_integrase; Domain location=10-130; Score=43.0; E_value=1.1e-09; Accession=PF00589.13; Description=Phage integrase family
  Subcellular localization annotation: CTP_CleavageSite=34; ConfidenceScore=5.02e-01
ERRRVTGRITQRPAFSSGRHQIGSLLTISPQSISPMERRNRRTGRTEKARIWEVTDRTVRTWIGEAVAAAAADGVTFSVPVTPHTFRHSYAMHMLYAGIPLKVLQSLMGHKSISSTEVYTKVFALDVAARHRVQFAMPESDAVAMLKQLS

SEQ ID NO: 43549 - protein, 238 aa, Zea mays
  Coding DNA Sequence Number=SeqID_174
  Gene Ontology: Mol. function=nucleoside-triphosphatase activity; Cellular component=cytoplasm; Biological process=response to DNA damage stimulus
  Homolog annotation: Hit_ID=A7PE62; Match level="QueryCoverage=53%, HitCoverage=30%, E-value=8e-23, Identity=50%"; Hit description =Chromosome chr11 scaffold_13, whole genome shotgun sequence
MEPRSPVNWSINFGSHHRGRGGDQQEWHALLRPASSQPTTAWGMKLYNKNYLLLSTYMISIKYKNVYYNFMPGQAQLLQTWMNKNVIRLLPQAIHKTGTDKRKPHLLLILNWKHYTTSEIKAKVATFGFGGPTEVLLVATYAFKLYASACLNIRRIGLVKKGEKLLNDDSFHLHTIGSQIVVKIVKNKHAQPFKTSQFELEFGKWICHSPELFEQNFWSSCSCKTISWVLKPPPFGST

SEQ ID NO: 43550 - protein, 42 aa, Zea mays
  Coding DNA Sequence Number=SeqID_175
MTMRGAAVVVPRPVGTGDGGVMNCPTQVPKCKKVDKVQIKNQ

SEQ ID NO: 43551 - protein, 106 aa, Zea mays
  Coding DNA Sequence Number=SeqID_176
  Gene Ontology: Biological process=response to stress
  Homolog annotation: Hit_ID=A6T681; Match level="QueryCoverage=75%, HitCoverage=56%, E-value=3e-32, Identity=86%"; Hit description =Putative uncharacterized protein ybdQ
HLQHEAQERLQTMVSHFTIDPSRIKQHVRFGSVRDEVNELAEELGADVVVIGSRNPSISTHLLGSNASSVIRHANLPVLVFWCESGSQKHSERAFGTFASGDDDLL

SEQ ID NO: 43552 - protein, 115 aa, Zea mays
  Coding DNA Sequence Number=SeqID_177
  Gene Ontology: Mol. function=4 iron, 4 sulfur cluster binding; Cellular component=cytoplasm; Biological process=cellular respiration
  Homolog annotation: Hit_ID=P32176; Match level="QueryCoverage=100%, HitCoverage=16%, E-value=6e-50, Identity=61%"; Hit description =Formate dehydrogenase-O, major subunit
GNPWDPKRQLLKWDGTKWTGWDIPDYSAAPPGSGVGPFIMQQEGMGRLFALDKMAEGPFPEHYEPFETPLGTNPLHPNPEQFVEISETLAAAKGINNGDRVTVSSKRGFIRAVAV

SEQ ID NO: 43553 - protein, 203 aa, Zea mays
  Coding DNA Sequence Number=SeqID_178
  Pfam annotation: Domain name=zf-CCHC; Domain location=61-78; Score =20.6; E_value=0.0011; Accession=PF00098.14; Description=Zinc knuckle
  Pfam annotation: Domain name=zf-CCHC; Domain location=86-103; Score =18.4; E_value=0.0025; Accession=PF00098.14; Description=Zinc knuckle
  Pfam module annotation: Pfam domain module=zf-CCHC::zf-CCHC; Domain location=61-78::86-103
MKKLEEGETAERVKLLEKDVLKAISEAINMRQEKGNDSISHVICTNNLSMSSKSKKRRGKRRCFKCKRLGHLIASCPYKDKDEGIRRCFECNEKDHMITSCPVIKNQGRAPSKMTLTKENDKQQASCRVERRFCNMCGEHGHPPESQGGKGKMSKKWSNQDLGTSMSLDIILCSCWNMVLVFDVKGGEICALKLISTERKSYP

SEQ ID NO: 43554 - protein, 149 aa, Zea mays
  Coding DNA Sequence Number=SeqID_179
  Gene Ontology: Mol. function=transporter activity; Cellular component= integral to membrane; Biological process=transport
  Homolog annotation: Hit_ID=P77468; Match level="QueryCoverage=53%, HitCoverage=14%, E-value=1e-33, Identity=61%"; Hit description=Outer membrane usher protein sfmD precursor
RSELKLTESSDNIRANYENTHYYGYSAENGTSVADLSRFERGNHQPAGVYRVDLWRNDEFIGSQDIVFESTTENTGDKSAMRLNITIPQIALLSSAHGYIPPEEWDEAGLILARGVYATMVPGTIFAEMDIIQNSGIILAPGYSAPLFR

SEQ ID NO: 43555 - protein, 119 aa, Zea mays
  Coding DNA Sequence Number=SeqID_180
MRLMVLGIDSGNVDCKGHKCNFTQAAPNSTLTLFTESCNRYHIALELLLSAKTKVVIIATTAQEKMKPWKETFKSSKITTSSRRGLAATPSRLPMKAAFIYVSFSHFDYCKDYVDVSDV

SEQ ID NO: 43556 - protein, 135 aa, Zea mays
  Coding DNA Sequence Number=SeqID_181
  Gene Ontology: Mol. function=sequence-specific DNA binding; Cellular component=intracellular; Biological process=regulation of transcription, DNA-dependent
  Homolog annotation: Hit_ID=P0ACI8; Match level="QueryCoverage=100%, HitCoverage=88%, E-value=2e-70, Identity=100%"; Hit description =Regulatory protein asnC
  Pfam annotation: Domain name=AsnC_trans_reg; Domain location=53-127; Score=79.1; E_value=1.5e-20; Accession=PF01037.12; Description=AsnC family
MGNARTAYAELAKQFGVSPGTIHVRVEKMKQAGIITGARIDVSPKQLGYDVGCFIGIILKSAKDYPSALAKLESLDEVTEAYYTTGHYSIFIKVMCRSIDALQHVLINKIQTIDEIQSTETLIVLQNPIMRTIKP

SEQ ID NO: 43557 - protein, 123 aa, Zea mays
  Coding DNA Sequence Number=SeqID_182
  Gene Ontology: Mol. function=hydrolase activity, acting on carbon -nitrogen (but not peptide) bonds; Cellular component=integral to membrane; Biological process=nitrogen compound metabolic process
  Homolog annotation: Hit_ID=Q820C8; Match level="QueryCoverage=100%, HitCoverage=30%, E-value=3e-59, Identity=79%"; Hit description =Apolipoprotein N-acyltransferase
MGVEAINFLLMMVSGLLALALVKRNWRPLVGDIPQSLKWDEGQLLNTLKIYYNATAPLMGKSSLIIWPESAITDLEINQQPFLKALDGELRDKGSSLVTGIVDARLNKQNRYDTYNTIITLGK

SEQ ID NO: 43558 - protein, 132 aa, Zea mays
  Coding DNA Sequence Number=SeqID_183
  Gene Ontology: Cellular component=integral to membrane
  Homolog annotation: Hit_ID=Q8XAZ3; Match level="QueryCoverage=74%, HitCoverage=32%, E-value=2e-50, Identity=97%"; Hit description =UPF0187 protein yneE
  Pfam annotation: Domain name=UPF0187; Domain location=1-129; Score= -23.8; E_value=6.5e-09; Accession=PF05249.2; Description =Uncharacterised protein family (UPF0187)
MDSFQISCLLASTIGLMIFQRSWQDASALPIRQFPLAYTLILHRTVYLFCIMLPFALVVDLHYMTPFISVLISYTFISLDCLAEELEDPFGTENNDLPLDAICNAIEIDLLQMNDEAEIPAKILPDRHYQLT

SEQ ID NO: 43559 - protein, 135 aa, Zea mays
  Coding DNA Sequence Number=SeqID_184
MEKKMPWISGLTKGTNHVGAALVDRQEQSAGCLFARGSRGPDAWAHGRAAARLPAAYRVALGKLCWLPCTLAAALAGCRAGCAELARTRAETPRPGTSSLATPRRRPRKTEGARRGGSHGLKTPCRMGHGHGTAA

SEQ ID NO: 43560 - protein, 98 aa, Zea mays
  Coding DNA Sequence Number=SeqID_185
  Gene Ontology: Mol. function=aminoacyl-tRNA ligase activity; Cellular component=cytoplasm; Biological process=tRNA aminoacylation for protein translation
  Homolog annotation: Hit_ID=A7ZJW2; Match level="QueryCoverage=100%, HitCoverage=22%, E-value=7e-52, Identity=100%"; Hit description =Seryl-tRNA synthetase (EC 6.1.1.11) (Seryl-tRNA(Ser/Sec) synthetase)
MGFGACKTYDLEVWIPAQNTYREISSCSNVWDFQARRMQARCRSKSDKKTRLVHTLNGSGLAVGRTLVAVMENYQQADGRIEVPEVLRPYMNGLEYIG

SEQ ID NO: 43561 - protein, 190 aa, Zea mays
  Coding DNA Sequence Number=SeqID_186
  Gene Ontology: Mol. function=aminoacyl-tRNA ligase activity; Cellular component=cytoplasm; Biological process=tRNA aminoacylation for protein translation
  Homolog annotation: Hit_ID=A4W827; Match level="QueryCoverage=100%, HitCoverage=21%, E-value=1e-113, Identity=98%"; Hit description =Leucyl-tRNA synthetase
  Pfam annotation: Domain name=tRNA-synt_1g; Domain location=35-189; Score=-298.4; E_value=0.08; Accession=PF09334.2; Description=tRNA synthetases class I (M)
MQEQYRPEEIESKVQLHWDEKRTFEVTEDESKEKYYCLSMLPYPSGRLHMGHVRNYTIGDVIARYQRMLGKNVLQPIGWDAFGLPAEGAAVKNNTAPAPWTYDNIAYMKNQLKMLGFGYDWSRELATCTPEYYRWEQKFFTELYKKGLVYKKTSAVNWCPNDQTVLANEQVIDGCCWRCDTKVERKEIPQ

SEQ ID NO: 43562 - protein, 95 aa, Zea mays
  Coding DNA Sequence Number=SeqID_187
  Gene Ontology: Mol. function=serine-type endopeptidase activity; Cellular component=integral to membrane; Biological process =proteolysis
  Homolog annotation: Hit_ID=Q83PV6; Match level="QueryCoverage=100%, HitCoverage=34%, E-value=3e-48, Identity=98%"; Hit description =Rhomboid protease glpG
MLMITSFANPRVAQAFVDYMATQGVILTIQQHNQSDVWLADESQAERVRAELARFLENPADPRYLAASWQAGHTGSGLHYRRYPFFAALRERAGP

SEQ ID NO: 43563 - protein, 63 aa, Zea mays
  Coding DNA Sequence Number=SeqID_188
MRLASRIIKPECSIQNQVKISAAIDQKNHAPDMTTGRENIPAPIMVPPIITTPPSSDGDVWVV

SEQ ID NO: 43564 - protein, 118 aa, Zea mays
  Coding DNA Sequence Number=SeqID_189
  Gene Ontology: Mol. function=methyltransferase activity; Biological process=metabolic process
  Homolog annotation: Hit_ID=P36566; Match level="QueryCoverage=100%, HitCoverage=45%, E-value=4e-66, Identity=100%"; Hit description =Protein smtA
GVLSLMFYNAHGLLMHNMVAGNFDYVQAGMPKKKKRTLSPDYPRDPAQVYLWLEEAGWQIMGKTGVRVFHDYLREKHQQRDCYEALLELETRYCRQEPYITLGRYIHVTARKPQSKDK

SEQ ID NO: 43565 - protein, 101 aa, Zea mays
  Coding DNA Sequence Number=SeqID_190
  Gene Ontology: Mol. function=transporter activity; Cellular component= integral to membrane; Biological process=transport
  Homolog annotation: Hit_ID=P08006; Match level="QueryCoverage=87%, HitCoverage=39%, E-value=7e-25, Identity=58%"; Hit description =Oligopeptide transport system permease protein oppC
AWFPGWIWLVLCVGKPLSLKRKEFIEAAQVGGVSTSGIVIRHIVPNVLGVVVVYASLLVPSMILFESFLSFLGLAGFLVVTLFCFNFIGDGLRDALDPKDR

SEQ ID NO: 43566 - protein, 102 aa, Zea mays
  Coding DNA Sequence Number=SeqID_191
  Gene Ontology: Mol. function=C4-dicarboxylate transmembrane transporter activity; Cellular component=integral to membrane; Biological process=C4-dicarboxylate transport
  Homolog annotation: Hit_ID=P0ABP4; Match level="QueryCoverage=100%, HitCoverage=22%, E-value=1e-33, Identity=76%"; Hit description =Anaerobic C4-dicarboxylate transporter dcuC
  Subcellular localization annotation: CTP_CleavageSite=57; ConfidenceScore=5.13e-01
MLAAVTTGSGNAPFYAFVEMIPKLAHSSGINPAYLTIPMLQASNLGRTLSPVSGVVVAVAGMAKISPFEVVKRTSVPVLVGLVIVIVATELMVPGTAAAVTG

SEQ ID NO: 43567 - protein, 136 aa, Zea mays
  Coding DNA Sequence Number=SeqID_192
MEVDIKMVVDEDDDETLDDLIDVLDPKLGAISYGAEPTRFGATCLGAELADAAADVASYLSQTVVFFLLFSPCPPLLSHASSPAPAFSAAALGHSTPAAATPTTTSARATPPTAHSTSAAACSPPPATLPPAFQLT

SEQ ID NO: 43568 - protein, 162 aa, Zea mays
  Coding DNA Sequence Number=SeqID_193
  Homolog annotation: Hit_ID=P0A1U5; Match level="QueryCoverage=100%, HitCoverage=82%, E-value=6e-83, Identity=93%"; Hit description =Uncharacterized protein yjaG
  Pfam annotation: Domain name=DUF416; Domain location=1-160; Score =396.0; E_value=5.6e-116; Accession=PF04222.3; Description=Protein of unknown function, DUF
MFCQQTGFGDGQIYRRILDLIWETLTVKDAKVNFDSQLEKFEEAIPSADDFDLYGVYPAIDACVALSELVHSRLSGETLEHAVEVSKTSITTVAMLEMTQAGREMSDEELKENPAVEQEWDIQWEIFRLLAECEERDIELIKGLRADLREAGESNIGIIFQQ

SEQ ID NO: 43569 - protein, 49 aa, Zea mays
  Coding DNA Sequence Number=SeqID_194
MVVLTLQLFALMLGILNFLRHFSNTSNDIVIPLLNCKALMDKNPRPDYR

SEQ ID NO: 43570 - protein, 441 aa, Zea mays
  Coding DNA Sequence Number=SeqID_195
  Subcellular localization annotation: CTP_CleavageSite=40; ConfidenceScore=5.46e-01
MQGSCLTAIAAKSTKDLPTLTTPLLPLPLSGRVGPSPRVVGEDLGACWRRLSPRWLRTQVGRVAFKRRVTPLKGDHVFALPYASRLSTFRAPDGEHPQSFRLVVGGTQLRGSWYLSAIVRLQGFSSGSPARIPSPVVTQDGDHQLLGGEKQAGLRSLPLPQLQGCSSSVLGRGVRRVGVGLRAGSGPLLPSAIEGKGVRRSWRWQLSHVWLSSLGGFGAASGATFRRGSRKSIRPEVIAAAVRPLRAEVVVVVVGTGGGEPPVGLLLLRMPSNHSPVGYLNRFTKRESPRVKVTSEVSVSRRDPRPLFDEPKPEVAMSARTEAELARKEDLVSRSLAGPSTGGTDAGVELPRPRAWLMSSGDSWMRLWGGRPSRLLEPDSWRRPWRRWPGRGADVVLRSGDPPTASLSEARPDLAKGVVDAEGAAAPFNCQDPSLQDRVIL

SEQ ID NO: 43571 - protein, 168 aa, Zea mays
  Coding DNA Sequence Number=SeqID_196
  Gene Ontology: Mol. function=protein binding; Cellular component =outer membrane-bounded periplasmic space; Biological process=cell wall organization and biogenesis
  Homolog annotation: Hit_ID=P75856; Match level="QueryCoverage=100%, HitCoverage=72%, E-value=9e-91, Identity=100%"; Hit description =Uncharacterized fimbrial chaperone ycbR precursor
  Pfam annotation: Domain name=Pili_assembly_N; Domain location=31-149; Score=134.0; E_value=4.3e-37; Accession=PF00345.11; Description=Gram -negative pili assembly chaperone
MKTCITKGIVTVSLTAILLSCSSAWAAGKGGIGLAATRLVYSEGEEQISLGVRNTSPDVPYLIQSWVMTPDNKKSADFIITPPLFVLNPANENLLRIMYIGAPLAKDRETLFFTSVRAVPSTTKRKEGNTLKIATQSVIKLFWRPKGLAYPLGEAPAKLRCTSSADMV

SEQ ID NO: 43572 - protein, 87 aa, Zea mays
  Coding DNA Sequence Number=SeqID_197
  Gene Ontology: Mol. function=acetolactate synthase activity; Biological process=branched chain family amino acid biosynthetic process
  Homolog annotation: Hit_ID=P00892; Match level="QueryCoverage=56%, HitCoverage=8%, E-value=3e-21, Identity=100%"; Hit description =Acetolactate synthase isozyme 2 large subunit
  Pfam annotation: Domain name=TPP_enzyme_N; Domain location=1-79; Score=13.1; E_value=2.4e-09; Accession=PF02776.9; Description =Thiamine pyrophosphate enzyme, N-term
MPVYDALYDGGVEHLLCRHEQGAAMAAIGYARATGKTGSLEELPRIMAEAFDVACSGRPGPVLVDIPKDIQLASGDLEPWFTTVENE

SEQ ID NO: 43573 - protein, 242 aa, Zea mays
  Coding DNA Sequence Number=SeqID_198
  Gene Ontology: Mol. function=L-ribulose-phosphate 4-epimerase activity; Cellular component=cytoplasm; Biological process =carbohydrate metabolic process
  Homolog annotation: Hit_ID=P37679; Match level="QueryCoverage=52%, HitCoverage=44%, E-value=6e-63, Identity=92%"; Hit description =Putative L-ribulose-5-phosphate 3-epimerase sgbU
  Pfam annotation: Domain name=Aldolase_II; Domain location=126-242; Score=90.7; E_value=4.7e-24; Accession=PF00596.12; Description=Class II Aldolase and Adducin N-terminal domain
LAWAVEQAAASQVMLAVEIMDTAFMNSISKWKKWDEMLASPWFTVYPDVGNLSAWGNDVPAELKLGIDRIAAIHLKDTQPVTGQSPGQFRDVPFGEGCVDFVGIFKTLHKLNYRGGWIYMLEQLKADVLAANLALPAHHLVTFTWGNVSAVDETRQWMVIKPSGVEYDVMTADDMVVVEIASGKVVEGSKKPSSDTPTHLALYRRYAEIGGIVHTHSRHATIWSQAGLDLPAWGTTHADYFY

SEQ ID NO: 43574 - protein, 138 aa, Zea mays
  Coding DNA Sequence Number=SeqID_199
  Homolog annotation: Hit_ID=P77759; Match level="QueryCoverage=100%, HitCoverage=58%, E-value=2e-77, Identity=100%"; Hit description =Putative uncharacterized protein ylbH
VALIRRKDQLNHQRAWDILSDTYEDMKRLNLGGTDQFFHCMAFCRVSKLNDAGVSRSAKGLGYEKEIRDYGLNLFGMYGRKVKLSHSEMIEDNKKDLAVNDHGLTCPSTTDCSDRCSDYINPEHKKTIKALQDAGYLK

SEQ ID NO: 43575 - protein, 152 aa, Zea mays
  Coding DNA Sequence Number=SeqID_200
MGKNNKRKREPTPPSEEFGDSEYSEEEFSSEPEGSLAPASPPASSDDSDDSQGIAAEVWTYIRAVERAGLEGSDESEYSSDEEDSDGGDEGEDDDDDDGDGSGRGGGDGSRDSTKGDSSRGSTKGSSSRGSTKGSSRGSTKGGGGGRGRASG

SEQ ID NO: 43576 - protein, 52 aa, Zea mays
  Coding DNA Sequence Number=SeqID_201
MAPKRKTANSSAAVIPAIDPNSQLPFAEHSAAEGQGLSGISLPRAGRLNPSY

SEQ ID NO: 43577 - protein, 396 aa, Zea mays
  Coding DNA Sequence Number=SeqID_202
  Subcellular localization annotation: CTP_CleavageSite=94; ConfidenceScore=5.30e-01
MSSCSLMHRVFPPSEPPDGGHPQSFRLVVGGTQLRGSWYLSAIVRLQGFSSVSPTASPRRWSPKTVTTSPWVGRSKPGCDLGPTLSFKDVHHPRWGGGRAEPELYLCAGSWVSLSLSVRQRGAGRRRASSASARWVRRLGSQSPLLPQGRLSRRAHGRTAQDVARCQGGVRVLRRPYLCTGTAPPRGGRCPARLGGSEWGSAGGLTAPVVGAKAEAAREVPVADGITATIRASGLRLFVLVLAPRASAWARAGLQRRTPRPLFDEPKPVVAVSARTEAELARKEDLVGRSLAGSSVSGTDAGVELPRPRAGLMSSGDSWLRPRGDQPSHLLEPDSWRRPWRRWPGRDDDVVLQSGDPRTASPSEARSDLVEGVVDAEGAAAPFSHQDPSLRDRIIL

SEQ ID NO: 43578 - protein, 143 aa, Zea mays
  Coding DNA Sequence Number=SeqID_203
MARSAMGHRMLLNDLHIILIVKVIQEIKDTLNLAILLRGVGARHAEGNTMREKEGASGGIVKLTTVVALYTFDGGAELGGNKSEKLCNSGECIGFKTERKSPQEVRAVIKNSKLEIAKGKKGDGHGDRVDRHYRGRHVSHYYR

SEQ ID NO: 43579 - protein, 217 aa, Zea mays
  Coding DNA Sequence Number=SeqID_204
  Subcellular localization annotation: CTP_CleavageSite=30; ConfidenceScore=5.14e-01
MSSRSLMHRVFPPSKPPDGGYPPSFRLIVGGTQLRGSWYLSAIVRLQGFSSCSPVAPPPPPPAVTQDGDLQFDGGGKRAGLRPLPLPQPQGFSSPGMGRGVCRDRVGPRVGGGPLLPSVIGGKGGCRPWRRQLQRAWLSDPSGFGAALGAGFRHGSWKRFFRRRDSQGRPRTDLQLYGLLPVLAVAEPPELFQLKCLSHASGAVTHLNRNNPSVLQI

SEQ ID NO: 43580 - protein, 241 aa, Zea mays
  Coding DNA Sequence Number=SeqID_205
MVRERRTQTNTMSKNTRDTRFIPRFGHTTKVPYFLVEAPTKSRVSFNPNPPFADHKVQAHTIIFAQTSGNMVKPIHDSSYLIHFGLTNPLNHFNLYQYHADICHDLHGLIIEEHVSHLPVEVPSYIVSHQNNPRVAGVGDDHEVPLFEDGQRGAATLDRVQAAAAPELAEHSDACGHVVLLPEVELAVAKLLFVVDERRQCERLLPVVFVRGFQVRNMDSFLALVYENDSQVRAMEKYYGK

SEQ ID NO: 43581 - protein, 172 aa, Zea mays
  Coding DNA Sequence Number=SeqID_206
  Gene Ontology: Mol. function=carboxyl- or carbamoyltransferase activity; Cellular component=ornithine carbamoyltransferase complex; Biological process=amino acid metabolic process
  Homolog annotation: Hit_ID=Q8SA97; Match level="QueryCoverage=58%, HitCoverage=18%, E-value=3e-27, Identity=67%"; Hit description =Ornithine carbamoyltransferase
MEPGGGTAVGAVESLLTSSCFRKGVESRRRHRVCRAPSLPIWQSEPDGTPVLFPAARVSSGLGDVEAPPKPRSSLSSVAEVESEPLGRVRRRLPAEARAESEPWGRAERSSPSSGAEPKSEPLVGRSGVRHLLGLSPSPSPGSGGAEFAVFRDLARVRALGRAERSSPSSGT

SEQ ID NO: 43582 - protein, 175 aa, Zea mays
  Coding DNA Sequence Number=SeqID_207
MAERYQLPRSCVPPTMRRKDGGYPPSGGLEGGKTRCIREREDMVAFQRGTGGASGRRSGRCFAFAIMTASKKGPGKGDTPKRILPCEGTRLRASLLIRGSKAGPPEGFDSRLRLRGLYTHYWSERLGAALANPAPAEPLIASTYQPENLGPDRTPGLWPARMRERPEQPKHYARH

SEQ ID NO: 43583 - protein, 42 aa, Zea mays
  Coding DNA Sequence Number=SeqID_208
MAGGNKLAGAKERWLAGEEIWSQEIWSVSLPKPEANPRFCHV

SEQ ID NO: 43584 - protein, 172 aa, Zea mays
  Coding DNA Sequence Number=SeqID_209
  Gene Ontology: Mol. function=carboxyl- or carbamoyltransferase activity; Cellular component=ornithine carbamoyltransferase complex; Biological process=amino acid metabolic process
  Homolog annotation: Hit_ID=Q8SA97; Match level="QueryCoverage=58%, HitCoverage=18%, E-value=2e-23, Identity=61%"; Hit description =Ornithine carbamoyltransferase
MEPGGGTTVGAIESLLTSSCFRKGAESRRRHRVCGAPSLPIWRSEPDGTPVLFPAARVSSGLGDVEAPPKPRSSLSSVAEVDSEPLGRARRRLSAEARAESEPWGRAERSSLSSGAKPKSEPWVGWSGVHRLPGLSPSPSPGSGGAEFAVFRDLARVRALGRAERSSPSSGT

SEQ ID NO: 43585 - protein, 288 aa, Zea mays
  Coding DNA Sequence Number=SeqID_210
  Gene Ontology: Mol. function=heat shock protein binding
  Homolog annotation: Hit_ID=Q10ML4; Match level="QueryCoverage=30%, HitCoverage=14%, E-value=6e-37, Identity=85%"; Hit description=TPR Domain containing protein, expressed
MAALDAGLPAEAVRHFTKILEARRGVLPHPFAAAFQAGGRPADAIADCNRSLALDPAYIPTLHARADLLQSVGAVADYLRDLDHLKLLQGGVRGLPVPPDLGFEEAPSRASGMEHCYLRQPISRAEAVPERRSRLWQMDALPLPPRAEVLCPQPRRAARIPFAVSVNKAIPRSNCALPPYRPASACDILDDLILSKNDFSDGADSSSGQAGFLCGSPPVRANNPVVHDPQFGKRALPSMSPLGSSSHVKLKVEAGSPSCGVSSSPKVRIEGFACGNSETHYAVTPLLV

SEQ ID NO: 43586 - protein, 85 aa, Zea mays
  Coding DNA Sequence Number=SeqID_211
  Homolog annotation: Hit_ID=A2XG91; Match level="QueryCoverage=90%, HitCoverage=20%, E-value=7e-08, Identity=32%"; Hit description =Putative uncharacterized protein
MDPPSEPADIESGVGDVTSPERGRPTMKEKYDKADWSSMNTRTFCEICVEEVEAGTVIASDEYWKKNTKRHPDWKKLKYGCHTRF

SEQ ID NO: 43587 - protein, 35 aa, Zea mays
  Coding DNA Sequence Number=SeqID_212
HWGPGGYEIDGSGYDYGEDEAVEGDFQEFQDYDEF

SEQ ID NO: 43588 - protein, 52 aa, Zea mays
  Coding DNA Sequence Number=SeqID_213
MPLIKVYNNDSDPYGLKDNEQSDVPECVVGDLPEQQPGEGKCPLTYYVLHTL

SEQ ID NO: 43589 - protein, 148 aa, Zea mays
  Coding DNA Sequence Number=SeqID_214
MARIRCTTRKYVIPFLPSCLAEHPLRRTVPGQSSHLERLHRHLHEEQERRCQEQKEEQQDSSPSPQREVESERPPSPAPQPEMPLAPPQGTPAAGGDPDGDDDDAGGSSSHGTELSEEPEPEGWIARPITRDAARGCHFHDALDTLLH

SEQ ID NO: 43590 - protein, 154 aa, Zea mays
  Coding DNA Sequence Number=SeqID_215
MGKNNKRKREPTPPSEEFGDSEYSEEEFSSESEGSPAPVSPPASSDDSDDSQGIAAEVWTYIRAVERAGLEGSDESEYSSDEEDSDGGDEGEDDDDDDDDDDDDDGDGDGSGSGRGGGDGSRDSTKGDSSRGSTKGSSRGSTKGGGGGRGRASG

SEQ ID NO: 43591 - protein, 186 aa, Zea mays
  Coding DNA Sequence Number=SeqID_216
MTREAGQGSGSSERMGGGLCTKRTAWAQAAGAGLVSLCSWAGPSQQNCIVPIKFSCKICAAAKHLEEEFKVEVKEEPFPQSEASPIEGVPEGPYKGAPKGRPQLEWRNGKSIVYPPGKRLDGGVLSSRMAGTRSGLEKPRCELTYARFKCYICRVVRDPQLGINRFRSLYFLDMKTGSLTLIVDKK

SEQ ID NO: 43592 - protein, 559 aa, Zea mays
  Coding DNA Sequence Number=SeqID_217
  Gene Ontology: Mol. function=oxidoreductase activity; Cellular component=endoplasmic reticulum; Biological process=electron transport
  Homolog annotation: Hit_ID=A2XB72; Match level="QueryCoverage=87%, HitCoverage=92%, E-value=0.0, Identity=73%"; Hit description =Putative uncharacterized protein
  Pfam annotation: Domain name=p450; Domain location=67-546; Score =194.9; E_value=2e-55; Accession=PF00067.13; Description=Cytochrome P450
MSEQHAVAAVHGVVAHAVQKASISMDGAVAIAAAAVLLLCAFIYAAWLAPAAARRRLRGAGFDGPRPSFPFGNLPEITASLQAQAQANNNKSSAVASGDIHAAVFPYFARWRESFGKVFVYWLGTEPFLYVAHPEFLKAATAGALGKRWGKPDVFRRDRMPMFGRGLVMAEGEEWTRHRHIIAPAFSATNLNDMIGLMQETTAKMLAEWGDAVAASGDQQDGAVVDVERGVVRNAAEIIAKASFGVTDDEAGARVFRKLQAMQAMLFQSNRLVGVPLARLLHVRKTYDAWRLGRQIDALLMDIIHDARRRRRQGKDLLSLLLAGTEEATDRRLTTRELVDECKTFFFGGHETTALALSWTLLMLAAHPDWQDALREEVERELGNKDDQGQKLDAAALGRLTKMGWVMSEVLRLYPPSPNVQRQALEDVQVAEGKGAAVVIPRGTNMWVDVVAMHHDVDLWGDDAHEFRPERFARDPMQGGCRHRMGFLPFGFGGRICVGRNLTAMEYRVVLAMLLRRFRVSVAPEYRHAPKIMLSLRPSNGIQLRLTPLVTADAKSSSA

SEQ ID NO: 43593 - protein, 118 aa, Zea mays
  Coding DNA Sequence Number=SeqID_218
MEETKLEERTKAASRLFASERSKLERDSKDYKKDLQKVYARKLEASRKEKRLAKKEEHLNQREEVITELQAKLNAFNKILEEQRVEQTVAVENLQRLQRELEGKARDAALAEEKLKER

SEQ ID NO: 43594 - protein, 412 aa, Zea mays
  Coding DNA Sequence Number=SeqID_219
  Gene Ontology: Mol. function=DNA binding; Cellular component=nucleus; Biological process=regulation of transcription, DNA-dependent
  Homolog annotation: Hit_ID=A2XB73; Match level="QueryCoverage=100%, HitCoverage=100%, E-value=1e-116, Identity=59%"; Hit description =Putative uncharacterized protein
  Pfam annotation: Domain name=AT_hook; Domain location=122-134; Score =17.5; E_value=0.023; Accession=PF02178.10; Description=AT hook motif
  Pfam annotation: Domain name=AT_hook; Domain location=183-195; Score =12.6; E_value=0.16; Accession=PF02178.10; Description=AT hook motif
  Pfam annotation: Domain name=DUF296; Domain location=213-346; Score =154.4; E_value=3e-43; Accession=PF03479.6; Description=Domain of unknown function (DUF296)
  Pfam module annotation: Pfam domain module=AT_hook::AT_hook::DUF296; Domain location=122-134::183-195::213-346
MDGRESTVASGPNFSSFYTQHRGIGAPGVPGHSAVLHDPPPAGYRQHLDAVSAGYAFQTPQVGGSHIGQGYHHVEASPHVAQYSSGGGTSSGGDMDIGMGSAVCTNVKGELGSGPAQDEQVKKKRGRPRKYKPDGAVTLGLSPSSSLTPHSASLGMGTMISAPGSGFGSEGSGASGLGAPSEKRGRGRPPGSGKMQQLASLGKWFLGSVGTGFTPHVIIIQPGEDVAARIMAFSQQGPRAVCIISATGAVSAATLHQDSESGSVVTYEYKHLPTMQIKQKGRFEILCLSGSYLVVDEGGGARTRSGGLCIALCGPDNRVIGGSVGGVLMAAGAVQVIVGSFMYGGGSKKNKVKAELDAEPEEANAGDQEVALAEHSSMAPHPAMSGGGGWASGMMRQMESRTPNIDINSIRE

SEQ ID NO: 43595 - protein, 136 aa, Zea mays
  Coding DNA Sequence Number=SeqID_220
MAPEAGLGCCQPHSVEWHSSRSNTSGAVFLSVGVAIWPRLLLGEDWASSEPKQQGMTTNIPPPPQWSQFAFTPAPPPQFNTPPTYIPTPGDRVTPDAGGSGSDPAAGTGFVDSLFAFPPPGGGSGQSSNHPSGSYL

SEQ ID NO: 43596 - protein, 354 aa, Zea mays
  Coding DNA Sequence Number=SeqID_221
  Gene Ontology: Mol. function=methyltransferase activity; Cellular component=Golgi apparatus; Biological process=metabolic process
  Homolog annotation: Hit_ID=A7Q816; Match level="QueryCoverage=82%, HitCoverage=73%, E-value=5e-94, Identity=55%"; Hit description =Chromosome undetermined scaffold_62, whole genome shotgun sequence
  Pfam annotation: Domain name=Methyltransf_11; Domain location=204 -299; Score=36.5; E_value=9.6e-08; Accession=PF08241.3; Description =Methyltransferase domain
  Pfam annotation: Domain name=Methyltransf_12; Domain location=204 -297; Score=25.2; E_value=0.00024; Accession=PF08242.3; Description =Methyltransferase domain
  Pfam module annotation: Pfam domain module=Methyltransf _11::Methyltransf_12; Domain location=204-299::204-297
MEGATLDFLPQMEGGREEQREAAAGGLWQWELKLGGELKLVVGPHKGWGADAVTFLLLGQACHRYRDELERYINYTVGGECPSDKASAQRLMLKGCEPLPRRRCRPRTPAEYVEPTPLPASLWAVPPDTSIMWDAYTCKSYGCLARHGKAKGSYDCKDCFDLGGREKDRWVRHDKEKGDECNSLNYSIDDVLGSLPRGSVRIGLDIGGGSGTFAARMRERGVTVVTTSMNFDGPFNSFIVSRGLVPMHLSVASRLPFFDGTLDVVHSMHVLSSWIPDGMLESALFDVNRVLRPGGVFWLDHFFCLGTQLDATYLPMFDRIDFKKLRWNADRKLDRGIHMDEWYISVLLQIWYNY

SEQ ID NO: 43597 - protein, 230 aa, Zea mays
  Coding DNA Sequence Number=SeqID_222
  Gene Ontology: Mol. function=catalytic activity
  Homolog annotation: Hit_ID=Q2HW33; Match level="QueryCoverage=37%, HitCoverage=26%, E-value=1e-09, Identity=43%"; Hit description =Protein phosphatase 2C-like
MAVGEGFCRMAHRTLSGALATSPSRWGSTVGASDMWAIGQSGGAPDRSCSLSEAVLRGCMCRYVRQAPVQPPLGRGAERLLRAVYRQAGGPYGRRRLSGCSGHHIRRRRHHVVQLIVHLKPNLPRKSLLTGHEFLYAETMVVADVPSQESSVLGMSRAFNDYYIEDYGVILAPEVMQRRTDNNDQFIILGIVGVQSVINEGRLSFPKMQVDKQPLHVNMIDLNDDRVENK

SEQ ID NO: 43598 - protein, 120 aa, Zea mays
  Coding DNA Sequence Number=SeqID_223
  Subcellular localization annotation: CTP_CleavageSite=48; ConfidenceScore=5.09e-01
MVGLQVAMRMMVLIMIMVMVVSIATTAQAKKKLWKETSRSSKTTTSSRCGLAATPSRLPVKAAFIYVSFPHFDLLFELQVTRKMKNHECKNDIHVRISYGGYDKNLRMFREGCDTLCVET

SEQ ID NO: 43599 - protein, 396 aa, Zea mays
  Coding DNA Sequence Number=SeqID_224
  Homolog annotation: Hit_ID=A2X8W6; Match level="QueryCoverage=12%, HitCoverage=10%, E-value=1e-10, Identity=63%"; Hit description =Putative uncharacterized protein
MRVVVPIATTAQENTTTTRRTFRRIRQVLSIKPCTHVYELFDRLAIFINHAKRDELLQFAQGAILGLKINADIARFCLFCWAVEGVCSSIFIETEKLLAQLVETEMNRRLLPDWMDNGYMATVRNLKNPVNKWRCGVTPISYYYFIRLMGHKASHVALECALQSHPNMLIFCESFHGSTPLVPWPADDASGRWQPTSCFHSTNATESKVFYLKMKGDYHRKDAAGSTMNPYKAAQVSSDCSPLLEAGQAESLGTELLEMVPSREEEIKLKEYREDAVSTFVVDDYVRLQFKGTTFTGSWKSFSSPKISSTFLVVIAIVSNGIVIYVWMMKTVLLDVKSTNTIVQIKYKIGALEGIVDSPIFLVNDAYQRMFERKIGRLSTLFMAMEEGFLVLVSSL

SEQ ID NO: 43600 - protein, 360 aa, Zea mays
  Coding DNA Sequence Number=SeqID_225
MRDPAPESQGRALERVGEDPARGAWGRTNATPWELVPLSHRSASRIFITQPGRTPSPAVTQDGDLQLDGGGKRAGLRPLPLPQPQGFSSPRLGRGECRVGVGPCVGGGPLLHSVMGGEAGIAHGVRQLQRAWSSAASGFGATCGVGVCHGSRKRFFRRRGGRDRPRADLQLLRPSARPCLTSFGMGGGLLAAASTLRSALPLFGPPEQKSSSLPLLEGNRLSRLLGPDSRRSPWTAAPPEAGSGFAEDVVDAEGATAPFGVKTRACRIRSSCSVCFLRPPRPEENTLAALAKLRLFSSCFEHLDSVGNRDDLLSEVVKKHERNPAKKRSFFEEKFDAEGVSPLLAPEGGSGFAEARPTLP

SEQ ID NO: 43601 - protein, 248 aa, Zea mays
  Coding DNA Sequence Number=SeqID_226
  Subcellular localization annotation: CTP_CleavageSite=18; ConfidenceScore=5.35e-01
MAASGACSWSSSWTAPCSAMSTYSPSARLQSNECNNGFLLVYKSLSQNLELNKQGDVGFPPKPRLSLPSVAVAEPEPRGRVRRKSFSRGQGGVRALGSGEAEFEPWGRARRSFVVFRVLARVRALGSGGAEFAVFRVLARVRALGSGGAEFAVFRVLARVRALGSGGAEFAVFRVLARVRALGSGGAEFAVFRVLARVRALGSGGAEFAVAPLARPDCLSDSLCRVALQSEWRRRRCPSVRLASGAVE

SEQ ID NO: 43602 - protein, 26 aa, Zea mays
  Coding DNA Sequence Number=SeqID_227
MQLHTLRDDVVLYPQRCLLLIKGSGK

SEQ ID NO: 43603 - protein, 721 aa, Zea mays
  Coding DNA Sequence Number=SeqID_228
  Gene Ontology: Mol. function=amylo-alpha-1,6-glucosidase activity; Cellular component=membrane; Biological process=carbohydrate metabolic process
  Homolog annotation: Hit_ID=Q2QLP9; Match level="QueryCoverage=98%, HitCoverage=98%, E-value=0.0, Identity=80%"; Hit description=Early -responsive to dehydration protein, putative, expressed
  Pfam annotation: Domain name=DUF221; Domain location=253-715; Score =528.8; E_value=5.9e-156; Accession=PF02714.6; Description=Domain of unknown function DUF221
MKISALLTSAGINIGLCVLFLSLYSVLRKQPANVRVYFGRRIAEEHDRLRGAFILESIRIFSLAAVLCVFGILPLNYFGQDIHHVRIPSESLDIFTIGNVEVKSRWLWVHCVTLYIISAVACILLYIEYKHIARLKLLHLTSATPKPNHFTVLVRGIPKADKESCSDVVDNFFTKYHSSSYLFHQVVYKVGKVQKIMTGAKKAYKKFKHFTDETVDQGCRTVTYRCCLCGASSNSFKLLNTECEQNKGKADNKSILDLDDEECTTAFVFFKTRYAALIASEILQTSNPMKWVANLAPEPEDVYWSNLWLPYKQLWARRIATLLGSIFFMFIFLIPVTFIQGLSQLEQLQQRLPFLRGILKKKYYMTQLVTGYLPSVILQIFLYIVAPIMMLFSTLEGPTSHSERKRSACCKVLYFTVWNIFFANVLSGTVISQLNVLSSPKDIPVQLAKAVPGQATFFITYVLTSGWASLSSEVMQLFGLIWNFIIKYVLRMREDTEFVPSFPYHTEVPKVLLFGLLGFTFSVLAPLILPFLLVYFCLGYVVYRNQLLNVYRTRYDTGGLYWPIAYNTVIFSLVLTQIICLGVFGLKESPVAAGFTVPLIILTLLFNQYCRNRLLPLFKTFPAQDLIDMDREDERSGRMDEIHHGLHSAYCQFADTVDVPLDKIEIVGGDEEQGSSSGQSSVKETCEDPKKHLAHPTLKGLPVNRLRHAVRFSYPNLSLAR

SEQ ID NO: 43604 - protein, 171 aa, Zea mays
  Coding DNA Sequence Number=SeqID_229
MAYRIARSTCGRGRPNSGEDDLGSPVKFCRVRGLGKLHGLLAKLTEWLARLGSDWRELATVAEAQVVMAGGGVACSRRSPVNLARAGLESARGGTAEVWGCFIGTTWCMGSRGPASARRRAMRSAGARTGVNWACQPRSNTWNRCFFPSSNANWAQIFTNLGKIAVKDLFP

SEQ ID NO: 43605 - protein, 93 aa, Zea mays
  Coding DNA Sequence Number=SeqID_230
GYEIDGFGYDYGAGEDEAVEGDFQEFQDYDEFWVWVSGNPQSAACEGRGRVARSSVQDLLRLILPSFGFRDLLLLLNGDLAHSCGMALVLTTE

SEQ ID NO: 43606 - protein, 115 aa, Zea mays
  Coding DNA Sequence Number=SeqID_231
  Homolog annotation: Hit_ID=Q53NN3; Match level="QueryCoverage=30%, HitCoverage=15%, E-value=2e-08, Identity=80%"; Hit description=SNF7 family, putative
  Subcellular localization annotation: CTP_CleavageSite=23; ConfidenceScore=5.09e-01
MAVTPLGIFSVLVLGWLGDHICVSSVQMSPTLLQSGLSTAAMWILPKTSLANLWMELLGIRRFSQGCGTSPSSPSGRMKIMREFEMQNEKMEMVGELMNDAFDDALEGDEEEKME

SEQ ID NO: 43607 - protein, 122 aa, Zea mays
  Coding DNA Sequence Number=SeqID_232
MAPLHGGSSAGKSDLCCDHSLDVVDRPGLHQFGLMSFYFAGCLSPGPRKNDLTIYWALGPFVRSFTLLVDPGDIYPPHPRPPLVPRPREYRRCELQAARVLPSSRVRVPPVKIWNGRTSVET

SEQ ID NO: 43608 - protein, 148 aa, Zea mays
  Coding DNA Sequence Number=SeqID_233
MGKNNKRKCEPTPPSEEFGDSEYLEEEFSSESEGSPAPIPLRESSDDSDDSQGLAAEVWTYIRAVERSGLEGSDESEYSSDEEDSDGGGGDEDDDDDDDDNGGDGDGDGSGRGGGGGSKDGDGGGSRGSNRGGSTRGGSGGGSNRASG

SEQ ID NO: 43609 - protein, 155 aa, Zea mays
  Coding DNA Sequence Number=SeqID_234
MESHDLRAEWESRLVGKVHNLCRVFENWYISRARGYERPRELQRLVVLDQRYFGTGGDEIDGFGYGYGAASPLQPNRILAEYVDVYSPLLYTPNPPHPQVVSIATTAQEKMKPWKETSRSSKTTMSSRRGLAATPSRLPVKAAVIYVSFSHFDLL

SEQ ID NO: 43610 - protein, 138 aa, Zea mays
  Coding DNA Sequence Number=SeqID_235
MGGRPQGYWGRAATLVCVPNGPNSIHDPLGQNRVTQHHGQKRCISSVDVFITCQYFYRGIKDHARFLLTLVGVPMKREAHIRAKHLEQASFPPVHGGGHTTNVIGVVSQDVAPHGTIPKAHVRAEGLRVSNLTQSTRN

SEQ ID NO: 43611 - protein, 151 aa, Zea mays
  Coding DNA Sequence Number=SeqID_236
  Gene Ontology: Mol. function=kinase activity; Cellular component =ornithine carbamoyltransferase complex; Biological process=amino acid metabolic process
  Homolog annotation: Hit_ID=Q6QP54; Match level="QueryCoverage=67%, HitCoverage=39%, E-value=4e-11, Identity=41%"; Hit description =Putative kinase
MEREGGKRSRRATCVQRGNPRPSCLSRAQVGRKERIQGNDDASYDMVGLSPGLGEVEAPLRSRSSLSSKAEVESEPLGRARRRPSAEARAESEPWGRVKRSSSSSGAEPESEPWGRAKRSSSSSGAEPESEPWGRAKRSSSSSGAEPESEP

SEQ ID NO: 43612 - protein, 400 aa, Zea mays
  Coding DNA Sequence Number=SeqID_237
MTPTPGGRTAAAMASGRTPLQPCPRPRLRSRGEDKYKEPEAPSADGGGDLAGDEDFSSRRHLRTDDRSRLPTGRSPLGSSQMSGAPISTQRCRTGAKAGQPQNTNAALAARDVLGGPPPGSLLPAIELEVTVLVTTGEGMQPGCLMKILEAERWLKGANFREVALLQRQGGRIADQRVKGRTAMQSACNRAKWAHPFESNTPSMEAQAHTSCNRRAGCYVLATAPPLAPLPPLEATLRMTQQCQPGASVTGQSAAGEGATVDAAKNGPAVMAVAGGQKQRSRRTEKGDTPKGILLREGNGPRAPLLIRGSKAGPSEGFNSRLRALGLRAHYWSEVRGPAPRKGSTAASGHSGSAPTTDQGGNDLVTESHQKEASSPRTPSKGDRVRQITRRYFWSAPPGL

SEQ ID NO: 43613 - protein, 157 aa, Zea mays
  Coding DNA Sequence Number=SeqID_238
  Homolog annotation: Hit_ID=Q67VD5; Match level="QueryCoverage=91%, HitCoverage=45%, E-value=2e-07, Identity=30%"; Hit description =Putative uncharacterized protein OSJNBa0052G07.38
MIWEKCTKNQLNRENVRLHQRTGSRCYIAQAHVVDDMEGIMSEPVQDGQEPKSAKEAVSQVVKSTTFLRVAGVCSASKSTSRGAISSQVHDLQVELENEKQEKKELRQELDNLKMESETSRVKHSEEIEGLKKTSQEMHGLLRQLLSFNQGQHNPGS

SEQ ID NO: 43614 - protein, 190 aa, Zea mays
  Coding DNA Sequence Number=SeqID_239
  Gene Ontology: Mol. function=DNA-directed DNA polymerase activity; Cellular component=epsilon DNA polymerase complex; Biological process=nucleobase, nucleoside, nucleotide and nucleic acid metabolic process
  Homolog annotation: Hit_ID=Q0E0Y5; Match level="QueryCoverage=65%, HitCoverage=5%, E-value=1e-63, Identity=95%"; Hit description=DNA polymerase
MTALPEIGFQCDNNQGECRAKFSCHLDCFAWVKRDSYLPQGSQGLKAVTKAKLRYDPLEVNPEDMVRFAMEQPQTMASYSVSDDVATYYLYMTYVHPFIFSLATIIPMLPDEVLWKGSGTLCEILLMVQPALLTKSASSSACPIVIQILIWDVEVQPNRHAVLGASESRPDLIYGFNEMLVLAHLLSDDR

SEQ ID NO: 43615 - protein, 132 aa, Zea mays
  Coding DNA Sequence Number=SeqID_240
  Subcellular localization annotation: CTP_CleavageSite=61; ConfidenceScore=5.72e-01
MQAACNRAKWAHPSDFQRTQHGGPGPRVMQPARRLLRASNCTATRTTTTPPRLRNRYLRTRIGTTVGEAQRIRRLTKRRSCEQESFNVIAEKETDLKMKTLFRPRRITIELLPNVKGMGVILHGLCPVTINR

SEQ ID NO: 43616 - protein, 234 aa, Zea mays
  Coding DNA Sequence Number=SeqID_241
MGFAPIPAVVEPPKVLGPPTDVPVLGTSYSHAGAHNGSVGPSICISITTPKSAYPITQTLHTIKVGLSFLPPPLEPPWNRNNRTQQFHHLQQHGFENPKYGVYFRKYYPSKEKDSQGYAGFWEVRAMTVGVLGPTAHPGLPLKLKAGLLILSHALEVGTILAWNDNPWGAPEVHPMGVAPDLQMDFRGNWHEAIRIMLWRCDRFEKYTDNSWASPPMGVGKGRLGTLSVLAGCF

SEQ ID NO: 43617 - protein, 109 aa, Zea mays
  Coding DNA Sequence Number=SeqID_242
MRRDIGYSGPHDHEQTTEIRSRSRAHGCGSAASTDRPLDLGRTPEIQQPATGHGCGGAARPRGEVSSETRGTLGAWGKAQAHLWRHGELDRGHHTGVGAPKSVEHGEAG

SEQ ID NO: 43618 - protein, 54 aa, Zea mays
  Coding DNA Sequence Number=SeqID_243
MGKPGPSLLMLLLCRVTTLVPTITGMGDHVSGCMRDKVCCQVHSVVNIDLCGLS

SEQ ID NO: 43619 - protein, 97 aa, Zea mays
  Coding DNA Sequence Number=SeqID_244
MEAKSHHQPKSGGTCKNYATSKAEYTNTQLDLPGHGSSSLISCEKQTIRIEFLNLARQRISMDRCPQTTIITISKWIQPIPDLERVQEKSLDFYRDP

SEQ ID NO: 43620 - protein, 114 aa, Zea mays
  Coding DNA Sequence Number=SeqID_245
  Homolog annotation: Hit_ID=Q6ZGG6; Match level="QueryCoverage=92%, HitCoverage=53%, E-value=3e-08, Identity=32%"; Hit description =Putative uncharacterized protein OJ1132_G05.2
MVTTTVEDGQQQKSPMEVVSEVLGGSSLFLHNIGLQDNSKKSSTTTVSAKFQELQNQLESERLEKDELWEEVETLKAQAQASKETMDNMKRSMEENNSLLHQLLSFNRSQAPPS

SEQ ID NO: 43621 - protein, 229 aa, Zea mays
  Coding DNA Sequence Number=SeqID_246
  Gene Ontology: Mol. function=kinase activity; Cellular component =ornithine carbamoyltransferase complex; Biological process=amino acid metabolic process
  Homolog annotation: Hit_ID=Q6QP54; Match level="QueryCoverage=44%, HitCoverage=29%, E-value=5e-22, Identity=63%"; Hit description =Putative kinase
MAPPVDVAGLRPRLGDVEAPPKPRSSLSSVAEPESEPWVGRSGVRRLPGLSPSPSPGSGGAEFAVFRDLARVRALGRAERSSPSSGTLPESEPWVGRSGVRRLPRFSPSPSPGSGEAELPMVPSARPDCLSVSLCQVAPQSEWRRRRCPSVRPLYADGGYQLKIRSLEGGYRLSEMTSGGVDCSSECIGVSAVMIDAFRLQKQQACTSRGGSRPGREASQASVDKGLFG

SEQ ID NO: 43622 - protein, 79 aa, Zea mays
  Coding DNA Sequence Number=SeqID_247
  Homolog annotation: Hit_ID=Q5NKP3; Match level="QueryCoverage=100%, HitCoverage=27%, E-value=1e-10, Identity=63%"; Hit description =Putative uncharacterized protein 9C20.7
MSRVFDHYYIKDCGIILAPEVTQRRTDNNDHSPSSGQESSVLTMSRVFDDYYIKDCGIISAPEVTQMRTDNNDHSPSSG

SEQ ID NO: 43623 - protein, 320 aa, Zea mays
  Coding DNA Sequence Number=SeqID_248
  Homolog annotation: Hit_ID=Q6J9V9; Match level="QueryCoverage=20%, HitCoverage=33%, E-value=5e-07, Identity=45%"; Hit description =Putative uncharacterized protein
MAERYQLPRSCVPPTTRQKDGGHPPSGGLEGGKTRCIREHEDMVAFQGGHPPFKGDSPYLRPQPSRAESSPTRSKVLPCGAGAGSHTSCKPAQSRRSQTAVRGAHNRPAVTSDPPLLPRPTGKRGGQPCRRHATAPSGRASLTPNTPSMEAQAHASCNRRAECFVHATAPPLAPPPRLLDCGTNTATRGDPAHDPAAPAWRGGGASGRRSGRHFAFAIMTASVKGSGKGETPKRILPREGTRLRASLLIRGSKAGPSEGFDSRLRSRGPYTHYWSEVRRPAPRKGSTTASGYSGSAPTTDQGFEGWPPKGSQPPQTQSEG

SEQ ID NO: 43624 - protein, 289 aa, Zea mays
  Coding DNA Sequence Number=SeqID_249
  Subcellular localization annotation: CTP_CleavageSite=24; ConfidenceScore=5.32e-01
MVAFQGGHPPFKGDSPYLRPQPSRAESSPTRSKVLPLRRGGWVPHVMQAGPEQKKPNRRARCMQPPSGYKRPSIFAPTSGRKGGQPCRRHATAPSGRTSPTSSAPSMEAEAHASCNRRTGCCVRATAPSLAPLPRLLDCGTSTATRGNPMHDPAAPAWRDGQCGQKWAGSNGGGRRAGAAVTSSAKLTSHPGAEPGKGNTPKRILLREGTRLRASLLIRGSKAGPSEGFNNRLRARGLHTHYWSEVRRPAPRKGSTTASGHSGSAPTTDQGFEGWPSKGSQPPQTQSEG

SEQ ID NO: 43625 - protein, 504 aa, Zea mays
  Coding DNA Sequence Number=SeqID_250
  Gene Ontology: Mol. function=nucleotide binding; Cellular component =plasma membrane; Biological process=small GTPase mediated signal transduction
  Homolog annotation: Hit_ID=Q338Z5; Match level="QueryCoverage=58%, HitCoverage=100%, E-value=1e-58, Identity=89%"; Hit description=Ras -related protein Rab11D, putative, expressed
  Pfam annotation: Domain name=Miro; Domain location=13-203; Score =30.7; E_value=5.2e-06; Accession=PF08477.4; Description=Miro-like protein
  Pfam annotation: Domain name=Ras; Domain location=13-250; Score =203.2; E_value=6.2e-58; Accession=PF00071.13; Description=Ras family
  Pfam module annotation: Pfam domain module=Miro::Ras; Domain location= 13-203::13-250
MAGAGDKVDYVFKVVLIGDSAVGKSQILARFARNEFSLDSKATIGVEFQTRTLVIDHRSVKAQIWDTAGQERYHYQQLTHPSASPLCSRSLSAALLARWSLAPIMLLDPFLLRIRSLWTVAVAQTLSAMVDLSACEAFAFSRVHTYLTSRAAQDNVLLGALGALLVYDITRRQSFDHIPRWLDELRAHADKNIVIMLVGNKSDLEEQRAVSTEDAKEFAEKENLFFLETSALQATNVESSFQTVLTEIFKIHSKKNMVSEPKSNGAAPAMPGTKVLVPGPAQEIPKSKCCSSMSKEAQGLRLGFQRPLPTWNGQANKGTPWTQAKTRLERRGGTKQRDKRLASTGRTAHGSAIALPPRSLPSPKRTSAILAPASNCAPQPHIFLATDRMSRDNPTIGDTHSPPKPTLHLRRGLHPQSSVAPAAGGKREGGRHRPTTNSVVAAAMREDLRLAYANLVVAKADDDFSRAEESFRVRVKKYSSKIVDEAIPQKLRDGVNPGLIPSHP

SEQ ID NO: 43626 - protein, 358 aa, Zea mays
  Coding DNA Sequence Number=SeqID_251
  Gene Ontology: Mol. function=protein binding; Cellular component =actin cytoskeleton; Biological process=ubiquitin cycle
  Homolog annotation: Hit_ID=A2XCY4; Match level="QueryCoverage=74%, HitCoverage=60%, E-value=1e-111, Identity=74%"; Hit description =Putative uncharacterized protein
  Pfam annotation: Domain name=Kelch_1; Domain location=230-276; Score =22.3; E_value=0.0018; Accession=PF01344.16; Description=Kelch motif
  Pfam annotation: Domain name=Kelch_1; Domain location=278-325; Score =55.9; E_value=1.4e-13; Accession=PF01344.16; Description=Kelch motif
  Pfam module annotation: Pfam domain module=Kelch_1::Kelch_1; Domain location=230-276::278-325
MPWVDSSSEAPSHLREPVILLPSLVKVIVGPDVFIHLLKQLLQSLWRLPSKILGSKSWTKPLNHGLNDNFIGHCRRLCSQAQEPSDIRLKILLMILCALKESLSCDWLRLKALETCYQVESVSYHCRVDGGLKTVVSARKFVPGAKLCMQPDVIPNKRKSKSSRKDRSKTQSPLLLGLPDELAISCLMRAARIEHPNMRDRDQKLSWYAFDPVNQLWKSLPPVPPEYSEAVGFGSAVLNGCYLYLFGGKDPVNGSMRRVVFYNARINKWLRAPDMLQKRHFFGSCVINNCLYVAGGECVGIQRILRSAEVYDPNRNRWSSIAEMSTGMVPSIGVVHDGKWYLKGLNSHRQVMSEVYLL

SEQ ID NO: 43627 - protein, 213 aa, Zea mays
  Coding DNA Sequence Number=SeqID_252
MRRKDGGYPPSGGLEGGKTRCIREREDMVAFRRGKSGRRFAFAEITAPKKAPSHLTDQRFEGWPPEGFNSRLRSRGPYTHYWSEAGPRRVHIRLRRRARDDQGYVRYITKARAALPSSPETPCSAPIEGNMALSPLLLAERRRRGVCKKAESVPDRPLALCRGSGATLANPAPAEPLTASTYQPKNLGPDRTPGLRPARMREQPDQPKHYARH

SEQ ID NO: 43628 - protein, 82 aa, Zea mays
  Coding DNA Sequence Number=SeqID_253
  Gene Ontology: Mol. function=kinase activity; Cellular component =ornithine carbamoyltransferase complex; Biological process=amino acid metabolic process
  Homolog annotation: Hit_ID=Q6QP54; Match level="QueryCoverage=59%, HitCoverage=19%, E-value=2e-14, Identity=75%"; Hit description =Putative kinase
  Subcellular localization annotation: CTP_CleavageSite=55; ConfidenceScore=5.06e-01
MEPGGGTAVGAVGSLLTSSCFLWGRVMMAPPVDVASLCPRLGDVEAPPKPRSNLSSMAEAESEPLGQARRRSSVEARAESEP

SEQ ID NO: 43629 - protein, 256 aa, Zea mays
  Coding DNA Sequence Number=SeqID_254
MQPGCTPPTAVTQDGDLQLDGGGKRAGLRPLPLPQPQGFSSPGLGRGVCRVGVGPCVGGGPLLHSVIGGKGGRRPWRRQLHRAWLSDASGFGAARGAGVCHGSWKRFLRRRDSQGRPRTDLQLYGLLPVLASRVWAWAGPPGSSIRPEVSAAAVRPPGAEVVVVAAAGAGDGAPFVGLLLLRRPSSIEWGYSPVDYLNRFTKHESPRVKVTIESGDPRAASPSEARSDLAKGVVDAEGATAPFQRQDPSLQDQSVL

SEQ ID NO: 43630 - protein, 1235 aa, Zea mays
  Coding DNA Sequence Number=SeqID_255
  Gene Ontology: Mol. function=protein binding
  Homolog annotation: Hit_ID=Q10R94; Match level="QueryCoverage=23%, HitCoverage=65%, E-value=1e-119, Identity=77%"; Hit description =Lipase, putative, expressed
  Pfam annotation: Domain name=DUF620; Domain location=422-667; Score =384.4; E_value=1.7e-112; Accession=PF04788.3; Description=Protein of unknown function (DUF620)
MGAPDFCARRARIYCAAAWVTHWYARPPHNRGTSAEHSSAASISLPRARRRSLANHAPQFASPVKNGCSSSRLPPRAIGCNNLHTRAANSAAIPPYAVFVGEGRAATPGPPVSQTNTASGGMSDGPHASDSDVHAVEDGVGVEWPTRWIPKTSGRTQNGTLAKLSDQPIVILLVNWLQDASGGTGSGVLSCSSDSSMERNDAGLAGRPAVAELSSAATHAATNNATTTGPPACVSARDFDRSPNLSTPVSFPSSLPLDAYTLPLPFAALHTRATAERSQPPTETRTLPAWGPRVSVKPTVRRLAGRSEMKSRVALEPLAEEPGCGEEDAARRRSGLHAALHRWARLLSGGVAGDDARPAADLRVLLSVLACPLSPVPLLPRLPRHNDGTPYVQVASSAQYIIEQFRATTGCGKLEDGAVKSMYASGRVRLSMLQEPGGGGGGGRGHEGSFVLWQLAPSMWLVEMSVAGQSVAAGSDGRVAWRRTPWLGAHAARGGSRPLRRALQGLDPVTIASIFSTAEHAGEKEVDGEDCFVLRLDVGPSVLSSWSDGTAEVIRHGLTGFFSQRSGLLARLEDSQLTRIQSPGAAAMYWETTIASAVSDYRAVDGGVAVAHAGTSTAHLARFGVGVRAARVVTRMEESWTIDDVAFNVPGLGPDAFIPPEEVRRSRSYGAAIAGGNRHLLGNVPLSPHANRAERRQETLEVKPYQYHLHLEWSPVEKSQPDVDPREIDLAMKIAERMFLKMKEDEAKNKIEEEENDRWRPNDESTSSQGSSFKSTSHMCFIANGSDSESESEDEEEQESDSEDEDDLQQFFAQLSKKHRMSLLKLMKRAEEQKEMLHKQEDFLIRKIEDLEKLTKEHEKLKCSHDDLVQRSQMEVRCQTSLCQNEDGFPKLLRACTVRLGIRSQPEYDGREFVEHGTEKCVVTVYIGSSPHHVEWSVTAAGHRFKDTCQVVAHKALRALCQIYEEEVADTPLRFFPPFQRDRPAWMARMRALEEQQLLEDDPIVVYLTAYLLTLDAQYDFLARHHRQMIARAEDAEKLNRKLHVDLTTVQARVAALESREAIAVEALKQAKDEHVQKLMEAYLVTHNQRRALRIQEPASSNPVQSVRDEDPKILEGHPVSTRGEKKAWELPEGAIVLEGIPVFPQAMDKQEHPESSQDPPPELCEPLTMKKIPAPSLEVKEEAASTPPAPPPSEELQEPVPLEEEFDRVLPSQSPPEEVINISSLLTHPGDISD

SEQ ID NO: 43631 - protein, 101 aa, Zea mays
  Coding DNA Sequence Number=SeqID_256
MKKKSKRDLEMKHKTAALKLTQGFLSKDLKWERQEMYCWSEVRGVRDQLNCPSGPVQLVLTREFRRENPSSTARRQVQLVYGQRGSQLKLSSAEVEKAQLS

SEQ ID NO: 43632 - protein, 155 aa, Zea mays
  Coding DNA Sequence Number=SeqID_257
  Homolog annotation: Hit_ID=Q2QWX3; Match level="QueryCoverage=67%, HitCoverage=6%, E-value=2e-08, Identity=28%"; Hit description =Retrotransposon protein, putative, unclassified
  Pfam annotation: Domain name=zf-CCHC; Domain location=62-79; Score =7.9; E_value=0.099; Accession=PF00098.14; Description=Zinc knuckle
MGCLLLAEEWFEKNKHRFHSNYKEGGGGSGATAPKHKAQPRSEGGTSGSVKLTSEGTPRRKGRCRKCDIYGHWAVDYKRSRKEKAKEPHKSEANLVVDSVEDHGALMLSMCDVAHNSSYDVHLTEKIIPMIVPDGVWVLDHHHTMWQHSPKKLAY

SEQ ID NO: 43633 - protein, 268 aa, Zea mays
  Coding DNA Sequence Number=SeqID_258
MAPLHRLPSRALPLSSSRLLPFPHEALREAGTGDVRRCAGDKLHLYRSEESGPHSCVRDSFRAAVVHQLGRLHRIQIVAGLTSLTYKLPCDLNYLFALKIKNKNPRTLRNKAPYTKQHAANIKNPIDKQENNGFLHDKPQHFADLGYPVQKGQGDPERQRGIAEFNTGDRIRKLKGNIDGQFTDLNHKSYKRKPLGFPVFSTRGTWLTAIVPGEEKAAEWLAGDSRASGEGTVVSGMSRQTHLWSGHSRRLPESPEPGAQAASTVGDE

SEQ ID NO: 43634 - protein, 69 aa, Zea mays
  Coding DNA Sequence Number=SeqID_259
MAEREARLADQQRMAKMFQYMRALAPHTGQSGRHPTTLIERPVHRHTSPAAHLDETYVISVETYEILET

SEQ ID NO: 43635 - protein, 50 aa, Zea mays
  Coding DNA Sequence Number=SeqID_260
MAPLCRPAHHPPEAQPATFWPPKAAADCQTLSFSANFYKIRLGKNHSKST

SEQ ID NO: 43636 - protein, 120 aa, Zea mays
  Coding DNA Sequence Number=SeqID_261
MDPSPHMLCIRFCPQNRMVRTIQTTQTNTNYIPLSRQVFVYTMVVEEILVDLPHICVENGVILEDSSEEFLPTLTPLAESLAFAAGSSSSTPPAPAVQAPTPGGDDPDDSGDDDEDEEEE

SEQ ID NO: 43637 - protein, 178 aa, Zea mays
  Coding DNA Sequence Number=SeqID_262
MVTSSSMAGESEPGCGLCPSLSLKDFHHQGWGGDCRVPGSRTRVASEPLSAPASATAAGRGSSADEIARAAHGPTSNSTAFCLSLPHEFGHGRGPPGSGIRPEVIAAAVRPPGAEVVVVAAAGAGDGTPFVGLPLLRRPPRRESLGSVSLVVRGFPCLVRGTPRPLFDEPRPGVAVSA

SEQ ID NO: 43638 - protein, 524 aa, Zea mays
  Coding DNA Sequence Number=SeqID_263
  Gene Ontology: Cellular component=chloroplast
  Homolog annotation: Hit_ID=Q94FY8; Match level="QueryCoverage=35%, HitCoverage=69%, E-value=1e-43, Identity=84%"; Hit description =Probable tocopherol cyclase, chloroplast precursor
  Subcellular localization annotation: CTP_CleavageSite=65; ConfidenceScore=5.79e-01
MNLAVAAALPSVTPRTGVVLPRSSRRHCPRGVVPRAASSSVSSFTSPSAAAAPIYTPTPQDRSLRTPHSGYHFDGTARPFFEGWYFKVSIPECRQSFCFMYSVENPLFRDEGGWEGVAAADGAAAGGGEDNLELIPGVMDLRSMGISVFSGEIQCNVFPGASGEVSLTAAGGLRKIGLGDTYESPSLVQFVILRFPNLTWRASGCEGQWLDGGKEMREKVLDYPGPGAKLKELDPLKGLSEQVCKLVLGVDLARLDAPFHQAVSDEVRPWSVALGKRRRGCGRADGWGPPGGNSERRGRRLALCAVLTRGTRGSTGQRPREGKEEGGEGEAVGWAAAVRVVFNPEPGARLAMPDCEGALSGACGLRPRRRSHRATRPPQREEERGRKEGVDGSPRVTPASLMARSSGDADVDDRQATTTVKARATAWGGWQGRATEEGEGREFYAPQARPWRVDDVGGGRGLIGGPGATWASASRGGNGSGRDAGRAVDRRREPWAQRDWQEGAARREEGARRGKAEAPTCLAR

SEQ ID NO: 43639 - protein, 165 aa, Zea mays
  Coding DNA Sequence Number=SeqID_264
  Homolog annotation: Hit_ID=A2YTJ5; Match level="QueryCoverage=46%, HitCoverage=37%, E-value=8e-20, Identity=61%"; Hit description =Putative uncharacterized protein
MADSLVEAMERMFNERLPMTGDGYRGYGDGRRVDFDNSCGRRRAHGRRVRFEDEEFEDHDREEGSDENPFANDGMFGWRHHHRQANFKDRDRYHGRCHRNDPNNIARVKLDIPKFTGKESADEYLNWAEQCDQIFRVHNLSDQHRVNLASVEFFGVGDLFSNAMG

SEQ ID NO: 43640 - protein, 175 aa, Zea mays
  Coding DNA Sequence Number=SeqID_265
MNKRPAFKDGRGHRKALVRVPVQGMQTSHQSQRARGRPVGATNGLDGGEASPGRHHISTNDGVCDVAPANAGRSKAHRQVLAPVLAAKARKRAECCILAGQQQFAFPGMAGGRLLRRAGGWFPPPEAGRRGGQPIRAEVEPRLASLSALARMELVVTVLGDRRRRGAAGLHDENP

SEQ ID NO: 43641 - protein, 142 aa, Zea mays
  Coding DNA Sequence Number=SeqID_266
MGSRHSACSAEAECRGSFVLLSLVTLLRGEVAFGAIYAQQKALKELFLLSQPSSALELQFLSSWKSPPVGAKAKTPPFARGLRCSRWSDRDKAGRDTLRRTRHFDEGLRRCPTTARPRSVPRPTCDLAHCNGPRVAASVLRA

SEQ ID NO: 43642 - protein, 113 aa, Zea mays
  Coding DNA Sequence Number=SeqID_267
MCARNLEMVQRVTWSTRSGGVTNSGEHDCTIPVGLVLGSSSGKLHGLLGKLSEGSDRVECSGGFDLGLACYEEVVLMWVSGHTSVAEIRGTHHELLTCGVATSIDMLQVHKSL

SEQ ID NO: 43643 - protein, 101 aa, Zea mays
  Coding DNA Sequence Number=SeqID_268
MQYNGSSSLISCEKQTIRIGFLSLQVTALVPTITEMGDHVSGRVRSKVCGQVHSGLAFQSWSRQILDGRLWCWLLDYLLSNSLLRNEDVLSVSEITVYQMQ

SEQ ID NO: 43644 - protein, 159 aa, Zea mays
  Coding DNA Sequence Number=SeqID_269
MPEGSGPETSRWATWCFGCDKTPEGGTSSRPLGGALRHRQSSEARNVQAGQQSRRGGASGRRSGRRFAFVIMTASVKGLGKGDTPKRILPREGTRLRASLLIRGSKAGPPEGFDSRLRSRGPYTHYWLAPKGFTAASDAERGMTMGTFDTLPRLGLRSR

SEQ ID NO: 43645 - protein, 157 aa, Zea mays
  Coding DNA Sequence Number=SeqID_270
MATGRLLRAVLGRQSQQGNARGHGEMELRILSSTYGASIWWGCGEKEIGAPLLAAQAMERLLAAMEQKGALGGDELLLEFLGAVDRELGDHGSRIGSCTAGKIGAPGGSRAASIAEGEARAHGREDGREGAGEQGRAPWLLGAPAPWKWRSAMAAGG

SEQ ID NO: 43646 - protein, 176 aa, Zea mays
  Coding DNA Sequence Number=SeqID_271
  Subcellular localization annotation: CTP_CleavageSite=4; ConfidenceScore=5.47e-01
MSSRSLMHRVFPPSKPPDGGYPPSFRLIVGGTQLRVCFVKLRLFSSCFEYPDFFVGNRDVCASESCFSRKVTSEVSVSRRRRSPSARSALLLTRTLTHPWGSVTDAVEKARRIASAEELPNVKTCSVRGITYPNVSYLSQKVMSEVSVSRRRRSSSARSALAAYVYSIVFRIHFSK

SEQ ID NO: 43647 - protein, 150 aa, Zea mays
  Coding DNA Sequence Number=SeqID_272
  Subcellular localization annotation: CTP_CleavageSite=25; ConfidenceScore=5.10e-01
MAADSPPAGGGIDDVFPAWRKNNIRARPVLSPANGGGGGATKAKREATPHRLSSESTSPALQWGARRASTSRLRRRRAPSPHDTPIPSKWTTPVRSRRACRTSPSYLRRRCNLMKLRCPIFRRVEIILICRKMTLAIRLRRASPRRQCNR

SEQ ID NO: 43648 - protein, 112 aa, Zea mays
  Coding DNA Sequence Number=SeqID_273
  Subcellular localization annotation: CTP_CleavageSite=55; ConfidenceScore=5.14e-01
MGGGLLAAASALRSVLALFGPPEQKSSSSPLLERVTARYSPVDYLNRFTKHESPRVKVTSEHEQRRSWLENENLVGRSLAGLSVSGTDAGVDQPRPRVGLAPLGDGWPRPQG

SEQ ID NO: 43649 - protein, 134 aa, Zea mays
  Coding DNA Sequence Number=SeqID_274
MRKFVASFRRQAEARADPSLRGFRRFRVLEEEFSSESEGSPVYTSPPASSDDSDDSRGIAAEVWTYIRAVECAGLEGLDESEVSSDEEDSSDSSEEGSGGVGDDEGDDDGGKGDGKGDDMGDGKGGSGSSKASG

SEQ ID NO: 43650 - protein, 27 aa, Zea mays
  Coding DNA Sequence Number=SeqID_275
MAGGIKLAGAKGKWLAGEVHRMRRGLD

SEQ ID NO: 43651 - protein, 236 aa, Zea mays
  Coding DNA Sequence Number=SeqID_276
MVEYIRPRGHPIKRQNHLVRGRRRRDSTSYSGSAGEKAFLENLQESRNEAGNSTASSAPSEDYLLQARSREFIHPENPVVHLIHGKMDTDYKEKKETNEMKARQAALLVPLPSKENRKKIVIMTTPFYPDVLFIGGEWNRPPSPTANQLCLGKNLLSGKLADKGIDAVTPGDIMKPKNEIRCSLYRETRSRRWEKLQMNESLGKGGTPADVIVGKLKSKPSRKQDSVERTLSSNET

SEQ ID NO: 43652 - protein, 593 aa, Zea mays
  Coding DNA Sequence Number=SeqID_277
MPSLGGRKVRSPRFALDLRGRDPASVVREAEDEAVRIVGRYVPKTEAQRSWDIRGSNDCLNRVFELNSLPYGGYPGEDVVDRHGKKPAAVTEDDPAPEATPASKKRKLGTAVGELGVSDSFAMELMGTCAAPGGRMSSPELRESSARMLEVTGGRWPKDVPIPRVAGEDFFTSRMARDLRVFPYGRNIVAVVSAVMNKDRQEAAQKRRAVIRLPEARPKRARGTAKATAPGGSQPMLAAKPAAPGSSKVPESVKAAGAGGTKSAPNGAAKARELPSSGKRVADFGTNISLDDYLVGSGEGQLVVVPPAVATMMSVAVPGVKGSARSAGGEISAVAAVKDEAGTVSRRLREASQQLSQAADFADRVASGALTADVSAEVERLRAQHADAVREKSAADSKCRKLAEKVAALEGERTDLRAAGGGEEGGQLGHRQGAGGGQIGAGGGESCQPAHRGVGGALVDSYRELGARTADFEVPDREAGLRFLEWMQEELLALPTIVEGFMSFASLVTCEGAMNALSREGCSHYEVFDRSDEDFGREIYKVEDPMVKDSAGALFDRMWGPYGREVVRERSDRARDQMVRAKDVEDFGPLNGT

SEQ ID NO: 43653 - protein, 455 aa, Zea mays
  Coding DNA Sequence Number=SeqID_278
  Homolog annotation: Hit_ID=A2WQE8; Match level="QueryCoverage=70%, HitCoverage=85%, E-value=2e-75, Identity=46%"; Hit description =Putative uncharacterized protein
  Pfam annotation: Domain name=Transposase_24; Domain location=250-385; Score=-21.5; E_value=0.042; Accession=PF03004.5; Description=Plant transposase (PttaEnSpm family)
MLSDNMDERKISFVLTKDPPSDLEVSITPIKRPRQRTNVDEETIEVSIDAYKEWLAILQLDNPETVLYERQSNDDLILSDEEIHGSSKPTANWPSHARRHRKRDPDVIGIYVDNDGVFKKEGRGTLKGIAAATKRIKNGDHKLKIEFSSKLGGPVGPNARTFVDEIVLFTKKKAPLIGVKKWKDIELNVRSSIASDVLRRWEFLTNEDAHEKIWSVAKERYKGWRSTLSSTYKAYNSYAERMKNKPEDVDIVEWHYMVLYFGSEKFQKISSRNSENRQKQRTKHIMGSRTFSQISFQQRDPETGIEPTDLSLWMITHCKNDEWSEEASRGIYEYAAEKIAEKMYQTERFDLTREEENAIFQTTFKETTGCKANRLHGHGYLSRYPTRSQVMESKFLERARATVATNQKNIELESQVQLLNEKLAYEVAEREIILQEKFQSLQEEEEKKDKCLEKK

SEQ ID NO: 43654 - protein, 161 aa, Zea mays
  Coding DNA Sequence Number=SeqID_279
MELDSGDLGEHNREPGRDRGRGSSGRHGRDGQGAMRRGEHHGELGGEETITRELGAAGPNLSWSSWHRRSRGKALRRAWGGLRPGTQEARRNVHGEHREMGKSGSVRVPWKGKLRGGARLEEWEAAARRSLRAQTGRAPCRGQGRTRKLRGRRRREGGKEV

SEQ ID NO: 43655 - protein, 145 aa, Zea mays
  Coding DNA Sequence Number=SeqID_280
  Homolog annotation: Hit_ID=Q6JAD6; Match level="QueryCoverage=98%, HitCoverage=40%, E-value=2e-23, Identity=69%"; Hit description =Putative uncharacterized protein
MESWLPAQRDPAAADLLSTRIQESFFRAQMSAQIALHAHQLLDLPAFLLATGADSKVHLSYLHGLLTVLTTSDQGHRVDGLRARLHLPYVHYLCYIFAQLIWPPQFQGTLEASRLQFGSYRPAPKDPVPVPDLVPDTQAEDAAFH

SEQ ID NO: 43656 - protein, 36 aa, Zea mays
  Coding DNA Sequence Number=SeqID_281
MGDPVSGRVRGEVCARLHSGIFGFRIMDMEHDQDEG

SEQ ID NO: 43657 - protein, 93 aa, Zea mays
  Coding DNA Sequence Number=SeqID_282
MDRSIPVTTAIEPYLAVTARTSRSQPRPSPDLPRRRIHVSYSLHSIDCNLADGEYILVPEQGVAQEVAPDPAPEPAPEDLPAPALEGKPQFYA

SEQ ID NO: 43658 - protein, 236 aa, Zea mays
  Coding DNA Sequence Number=SeqID_283
  Subcellular localization annotation: CTP_CleavageSite=11; ConfidenceScore=5.26e-01
MTTQGAGRAVSTSLAKSLGLRKPKREAGSGAKNRHQTLSREKRATLRLRHNNRAKKGWPPEGFDSRLRLRGPYTHYWSEVRRSAPRRVPRPPQAARAPRPLLIRGSKAGPRRVHSRLRHRARDDHGYVRYITKARAALPSSPETPCSAPIEGNMALSPLLLAERRRRGVCKKAESVPDRPLALRRGSGAALANPAPAEPLKASTYQPENLGPDRTPGLRPARMREQPDQPKHYARH

SEQ ID NO: 43659 - protein, 143 aa, Zea mays
  Coding DNA Sequence Number=SeqID_284
MTSHGSLDEGNAQSHTDGLAREGFPRILWELFEKHRVPHSRVRMTLEPHPLQPGWRSLDSESFGYRAEDTIKAIALHGLTTFCGFHPLELSTHPIGLFPAEKEDDPMWKDRVEHAKDIWAIYPGQTAHLTVRCMNALYRLQVM

SEQ ID NO: 43660 - protein, 309 aa, Zea mays
  Coding DNA Sequence Number=SeqID_285
MTASATSGMQFLVVWMCFRNERRDSSFWCLMDLRSLGCTVAKEMSEPLKHVLTEHNWQVRCDDILRCPSNLGGHGLDDQTVARVLLGLIFVDVRNFEIRRPLDHPEQRGKGRDSAGHQGLLVPPGRGRDGGLAAATDVIGPTAFPGLAGPTLGFHRGRCEVRSRNAAPCQCPVVPIVLLPLPQFALMKAVTQRVNVALCVSPTVDDVAHASFWMSVREEVTLHPGKRAGQCPIILFSDRMVTSYTPTPILIMVCLTLWGLLPLQGGFIVGDRGIFYSPVDEEDIGEIGVWSRPRHPSCCSCGLGNQGGL

SEQ ID NO: 43661 - protein, 393 aa, Zea mays
  Coding DNA Sequence Number=SeqID_286
  Homolog annotation: Hit_ID=Q6J9V9; Match level="QueryCoverage=33%, HitCoverage=45%, E-value=9e-57, Identity=86%"; Hit description =Putative uncharacterized protein
  Pfam annotation: Domain name=LepA_C; Domain location=314-382; Score= -39.5; E_value=0.029; Accession=PF06421.3; Description=GTP-binding protein LepA C-terminus
  Subcellular localization annotation: CTP_CleavageSite=59; ConfidenceScore=5.40e-01
MQDACNRATVVHPFSSVTSGGPAWRPGPTRHVTGAPVTTCKETALPLAPMPHLLDCRTSAAIRGSPTRDPTVPIKCNDHGGALSHGIKRTHPCSVPRTTRARATDAPRIARPVALTPWQGKRHLWQAKRALFHLRHDDRVKKGTGKGDISKRILLSEGNGPRALLLIRGSKVAPCGVRQPPQSTRAPSPLLIRGLKAGPSEGFDSHPRACRVRDDPRYVRYMAEARATLPRYPRRFLRPAGMICNGIPPEGGTEPSDPIKWVRVQQITYRAKLSHDLSRVQPRAQLGAPPRPTSGLSLGLGRRSPPRPTPGLGLSLGLWRSLRLARPRARTDRATGDTSLPYPYLAASGYEGTRPVEGKKRMKAIGRVDVPQEAFMAALRLEKEVLQLTFMDL

SEQ ID NO: 43662 - protein, 361 aa, Zea mays
  Coding DNA Sequence Number=SeqID_287
  Gene Ontology: Mol. function=hydrolase activity; Cellular component =cellulose and pectin-containing cell wall
  Homolog annotation: Hit_ID=Q6ESF3; Match level="QueryCoverage=98%, HitCoverage=97%, E-value=1e-132, Identity=63%"; Hit description =Hydrolase, alpha/beta fold protein-like
  Pfam annotation: Domain name=Abhydrolase_1; Domain location=122-355; Score=27.7; E_value=2.9e-05; Accession=PF00561.11; Description =alphabeta hydrolase fold
MAGTDVAGSARGSDAALGKTGEPPAAARSGAAKKVTLALLASFSALLYSQIQPPPSKIPGTPGGPPVTAPRTRLKDGRHLAYLESGVPKEKAKYKIIFVHGFDCCRYDVLNVSQGLLEELGIYLLSFDRPGYAESDAHPARTEKSVALDIAELADNLQLGPKFHLIGFSMGGEIMWSCLKYIPHRLAGVAILAPVGNYWWSGFPPDVFKEAWRVQFPQDQRAVWVAHHLPWLTHWWNTQKLFRGSSVKDGDPAMLSKEDRLKQVRQQGEHDSLHRDMMVGFGKWDWSPLEMENPFAGGQDEVKVYLWHGVEDLYVPVQLSRYISERLPWVIYHELPTAGHLFPVADGMPDAIVRSLLLGDE

SEQ ID NO: 43663 - protein, 158 aa, Zea mays
  Coding DNA Sequence Number=SeqID_288
  Homolog annotation: Hit_ID=Q6JAD6; Match level="QueryCoverage=100%, HitCoverage=56%, E-value=4e-50, Identity=84%"; Hit description =Putative uncharacterized protein
MVRTKNVSASGGGDDEDPSSPFRQVKGKIVYLEQQKGRKKRRMDRAAHALHSLCYCTSDPPCRPHSGVAPATAHVVALFRPPFTDGSRRSPADFTTAAKFLYELMRRTVLPRMGYREVTTHIQLWLLGAMISHSKFDVVGFLICEIEDTVLDGLRARR

SEQ ID NO: 43664 - protein, 196 aa, Zea mays
  Coding DNA Sequence Number=SeqID_289
  Gene Ontology: Mol. function=carboxyl- or carbamoyltransferase activity; Cellular component=ornithine carbamoyltransferase complex; Biological process=amino acid metabolic process
  Homolog annotation: Hit_ID=Q8SA97; Match level="QueryCoverage=100%, HitCoverage=24%, E-value=1e-15, Identity=36%"; Hit description =Ornithine carbamoyltransferase
MAPPVDVAGLRPRLGDVEAPSKPRSSLSSVVEVESEPLGRARRSSSSSRAEPKSEPWVGRSGVRRLPGLSPSPSPGSGGAEFAVFRGRARVRALGRAERSSPSSGAEPESEPWVGRSGVRRLPGLSPSPSTGSSEAELPMMPSAGPDCPSVSLCQVAPQSEWRRRRCPSVRSLYADGGYQLRIRSLEGTPNYGPRQ

SEQ ID NO: 43665 - protein, 348 aa, Zea mays
  Coding DNA Sequence Number=SeqID_290
MNKNTSIQSAITNGTPVPPPQGRTTPLDAGGPAEQQKTDEWPVVARSSSGDDDDFCSGGPNSGSTDLRADAVAKRPPPMPKLVRQGRAEGHRVGGRSVGGPGYLIGGRTSSSCRGRRRRRKWLRSHSRPRARHAAAADAPDDDRPSLRSLREGAGHRPRRGRPQLGTLPSPALVMKILEAEGGAEAAARLAFPHHQTGGTGKGDTPKRILPREGTRLRASLLIRGSKAGPPEGFDSRLRSRGPYTHYWSEVRRPAPRKGSTAASGYPGSAPITDQGFEGWPPKGSQPPQTRARDDHRGSGAALANPAPAEPLTASTYQPENLGPDRTPGLRPARMREQPDQPKHYARH

SEQ ID NO: 43666 - protein, 120 aa, Zea mays
  Coding DNA Sequence Number=SeqID_291
MAHQRAQSTRGGGRPKSGEGDLRLSVKFCRVRGLGKLHGPMAELTEALARLGGDWSGLATVAEALAAMAGGKELAGAKEGCLAGGEIWSPEIRSVSLLKPEAIQGFVVSRARVLMPSSGM

SEQ ID NO: 43667 - protein, 171 aa, Zea mays
  Coding DNA Sequence Number=SeqID_292
  Homolog annotation: Hit_ID=Q6YUJ8; Match level="QueryCoverage=37%, HitCoverage=6%, E-value=1e-07, Identity=48%"; Hit description =Putative uncharacterized protein OSJNBb0076O03.22
  Pfam annotation: Domain name=Transposase_28; Domain location=1-166; Score=-42.8; E_value=0.0017; Accession=PF04195.3; Description =Putative gypsy type transposon
MALLDPPKCFKSEVALNLVCNLLGWGVLAFVGRICVGTSPLGDLAAGEFVLFVSNLPCGLVLPISSFFVLLLEELGLQPQHLTPHFILQAADFAYLCEMSVGATLLLPAFGRKGVVQRPSGAGKRAELQLHLSRLLRLGARIEEATTTGKMQHRVAASVAVPNGCHRVKSE

SEQ ID NO: 43668 - protein, 269 aa, Zea mays
  Coding DNA Sequence Number=SeqID_293
MVCRLLGWDVPVLGGRTCWEDLCCCWRGLASSLYPWRPASSFRRPSSPTSVGCPWMRRSLLLLPPAFGGKDGHQPHEGGQRAESRLHPSHPQHFGVGSESCCGSISLALKDLVSPLTLPFAAKRGVAVRPPNGRRSRCTQVRHIHGVPCAAGHTVLMPPGGSYKTSYAVEVAAAFLDEVAASAGGPLEVEVVAAVGEAAGASFQRDPAGPRYRTRLSGYTGSGPPQETSFRVQNQAKWPHRFRTTPWNGLPFFRTAPRLSGPPAFAERS

SEQ ID NO: 43669 - protein, 97 aa, Zea mays
  Coding DNA Sequence Number=SeqID_294
MEEERGGGAYQRRDSSGEVVEGVREVLRVTAMCGSPSGMAGDQSPVRFCRVRALGKLHGPLAKLTEGQAQLGRDRSGLAVVAEAWAVVAGGGKARQS

SEQ ID NO: 43670 - protein, 245 aa, Zea mays
  Coding DNA Sequence Number=SeqID_295
MPSHCSKGYHCFRVPTVAPGPTSGEDTSLQEPAPKEDDSWAQAPKSETGLLVSSGVKRRTTAGGGLLLSRRLAPLAAVRLLRTRRPRPKEYDSWARAPMSEDGPLLSADMKRHGESLLAWRFAFFALGDQRPRNEEAWRFAPRMVVRFLRTRTPTPKEYDSWARAPMTEASPLLSAEMKRRGGSLLAWQFAFFAHEDRCPRSMTRGPGPQCQRLGRLGARQARFSVASRGVSGGVFLKKGFPRVW

SEQ ID NO: 43671 - protein, 208 aa, Zea mays
  Coding DNA Sequence Number=SeqID_296
MQLFGRGVCLPKALDGSKNQDLAFSSFSVTLLNLNHGSSSLISYEKQTIRIEFQPCKIRAHHLGVQCLTDPDCRRAVTALVPTITGMGDHVSGRVMGKVCGQATEVVSGTCSGQTTAVGFNQSARGAPLGDVEAMRARNREMVQWITRSTCSGGVTNSDERDLTAPVGLVLNSSLGKLHGLPRKLFEGSDRAEVGGIGLVTVVALGRL

SEQ ID NO: 43672 - protein, 114 aa, Zea mays
  Coding DNA Sequence Number=SeqID_297
  Subcellular localization annotation: CTP_CleavageSite=36; ConfidenceScore=5.24e-01
MAEPTKWRSKGKALTSVKTWDDSSSEDDPPRTRSHRSSSRSSRSSHKCLMARVLVKNVVIETSSNEITMENEQLKQEVARLSQALYDKKCKAKQIQPPQDNTIEGVNKPMEEKL

SEQ ID NO: 43673 - protein, 192 aa, Zea mays
  Coding DNA Sequence Number=SeqID_298
  Homolog annotation: Hit_ID=Q8H8K3; Match level="QueryCoverage=43%, HitCoverage=6%, E-value=7e-07, Identity=37%"; Hit description =Putative retroelement
MKMKVMQDIPSYIEAPLRIASALRQPSYSLCFSHYGSDPSPKDLRKTKAPNNMYSRLNLVINELHSIGIYKLGDADIVRKIISLLPQQIYGSIITILHNLEDLSQMTPTIMIGKIVAFEMSRKMGQQEEPTSSKPYGFACDEHKKMKGKKKAPSSSEEEEEEDDDDDQPSTSSFEDVTPGFRRQTKCKPCTC

SEQ ID NO: 43674 - protein, 172 aa, Zea mays
  Coding DNA Sequence Number=SeqID_299
  Gene Ontology: Mol. function=aspartic-type endopeptidase activity; Cellular component=chromatin; Biological process=chromatin assembly or disassembly
  Homolog annotation: Hit_ID=Q75HA0; Match level="QueryCoverage=88%, HitCoverage=42%, E-value=4e-13, Identity=28%"; Hit description =Putative uncharacterized protein OSJNBa0056E06.12
MQELMAQQNEILRQLAQRYPPPQHYGGGDHHQRPPAAATNQEFLSTQPPLFTRAEDPLDADVWLRVVESKFPLLNGVCSDVAKYAQAFNDLCQYAGYHADTDEKKRDMFRRGLSTKLRDRLNTVRAKSFNELVNMAISQEDCITARQAEKKRKTPMAGPLAQPQRFRIVSDT

SEQ ID NO: 43675 - protein, 76 aa, Zea mays
  Coding DNA Sequence Number=SeqID_300
  Subcellular localization annotation: CTP_CleavageSite=24; ConfidenceScore=5.21e-01
MSLISWSNSSSWSVGLVAVLFWLRASQRERVSWFGSSGCSEAAPVAEAFFGGMTKNIKNVELHLYLWLDRRQFYED

SEQ ID NO: 43676 - protein, 170 aa, Zea mays
  Coding DNA Sequence Number=SeqID_301
  Subcellular localization annotation: CTP_CleavageSite=54; ConfidenceScore=5.30e-01
MVAPPPPPAARKAAGQTRMLLFRHGGKTSSSSPPSGKVTAIVAVSLRGEEYHVVAAVEGHELETPEAEQRPGLKRLLETTHLELNGKLFVNTQQAPTWRANCQRFDPGGVPGPTSKFVAVRLSPDGLARDGTQGRKTWLVSAQMGMAELIYGTNLGLSELGVWFYPLYQH

SEQ ID NO: 43677 - protein, 593 aa, Zea mays
  Coding DNA Sequence Number=SeqID_302
MESFDQMRAHVSGKADQVKGLLRLRDTDTSLITFRKKFGHRQGEQQHPRRCFHPRRNLAWPRTATQGKGPPPKGGRQHHANRCLGQAPAVATTSSLAWEAAISRADEVSFRADSTSVRANTAASGSGSSQSSRGFQKLSKGSLERQDRQSRGTPTPPGYGHLTRHLPRKATDARLSDLDIGRTLGGSPDLRQMSKYLKRLHFAPAKTRYISSQTGLRFRSRGYEQPPHRGARWMPNSKRLAGDLCSSRDNDLHLGRLNSSSDDLRTNAAVKRPSPTSPHEGRGQAAKAEELEGADRGFEPTDTAPANSGCPKARRQVLTPVIAEAAPKHEHRPRGVQRAGRPPGVADGSSSSPTPAWLEEASAGLEDAFLPQTLGEEKGFSPYDTGAGTHTSYELIRSTKKKPVDERVDHHATGIQLHRNCAPLRLRLHPVDQRKGSGPACHVTGAPVTTCEKLHRHSRQCCASSTAEPVPRLEVALRMTQQCQLKATATGQSAAGDRERGHCGKDPSRWRKRAPSPPTDQGFEGWPLERVSTAAPEHSDFNPITDQGARRVRDDSGYVRYITEARAMLPRGLGPANHPQVLLERASRPPADP

SEQ ID NO: 43678 - protein, 308 aa, Zea mays
  Coding DNA Sequence Number=SeqID_303
MVTSSSTAGESKPGRGLCPSLSLEDFHHQGWGGDCRVPGSRTRVASEPLSASVSATAAGRGSSVDEIARAAHRPTSNSTAFRPSLPHEFGHGRGPPGSSIRPEVIAAAVWPLGAEVVIVAAAGAGDGAPFVGLLLLRRPPHRVGLFVPAEESLGSVRLVVRGFPCLVKGTPRPLFDEPRPGVAVSARTEAELARKEDLVGRSLAGSSVSGTDAGIDLPRPLVGLMSSGDSWPRPRGDRLSRLLGPDPRGRPWRRRPGLGDDAVLQSGGLRTASPSEAGSDFAEGVVDAEGAAAPFKRQDLSLQDRIIL

SEQ ID NO: 43679 - protein, 471 aa, Zea mays
  Coding DNA Sequence Number=SeqID_304
  Homolog annotation: Hit_ID=Q6QP51; Match level="QueryCoverage=16%, HitCoverage=35%, E-value=4e-13, Identity=57%"; Hit description =Putative growth-regulating factor 1
MAERYQLPRSCVPPTTRRKDGGYPPSGGLEGGKTRYIREREDMVAFQGGHPPFKGDSPYLRPQPSWAESSPTHSKVLPYGAGAGPHTSCKPAQSRRSQTAARAAPPLAPPPRLLDCGTNTAGRSSGHVVSPAYVPSRGDERTLSHGVKTTRPCSVPRMARARATAASRTTRPVALTPRRDMRRLWQEKQATLRLRHNDRVKKAASDRVGSTPTTGQRFEGRPLERVQQPPQATRALRPLLIRGSKAGPRRVHSRLRHRARDDHGYVRYITKARAALPSSPETPCSAPIEGNMALSPLLLAERRRRGRLRGCSRKPGSGRTIDSVNIPARELGTRPYTRDTASSHEGTTRPAEALREALRPRRSQTTPPRPRGLHPAGALARTHRNKTQPRKAGPLAKKCDESLQASANTPFEARGLLTGTIIRGTLKAPNSQLAKPQKTANSAPPDPGLGLGLSPGRRRTPLCPTQGSDSG

SEQ ID NO: 43680 - protein, 78 aa, Zea mays
  Coding DNA Sequence Number=SeqID_305
MDEGLKPKFLKLSKLQFEGHTFVISEEKMSQDKKVAAETELTEEEKLFEQKKVVDPYIAGFLESMAKSNTEKITKEIL

SEQ ID NO: 43681 - protein, 269 aa, Zea mays
  Coding DNA Sequence Number=SeqID_306
  Gene Ontology: Mol. function=nucleoside-triphosphatase activity; Cellular component=integral to membrane; Biological process=transport
  Homolog annotation: Hit_ID=Q8GU84; Match level="QueryCoverage=52%, HitCoverage=10%, E-value=3e-47, Identity=65%"; Hit description=PDR -like ABC transporter
  Subcellular localization annotation: CTP_CleavageSite=15; ConfidenceScore=5.20e-01
MMPESHPHPHAGAVLASTSSRRSLSLGSSISQSFRQMDTEDPFARSQSEHEHRDDEENLRWAALEKLPTYDRMRQGILRRALDQQQESGGGGVEIVDIHKLAAGDGGRALLERLFQDDSERFLRRLRDRIDMVGIELPTVEVRYEQLTVEADVITAGRALPTLWNAATNFLQIRGGRHWRTPKTCRIGAIVARGRTTADPHSSCLARSSLPPEPHAPDVASTTGDGYASCDCRRHPRPSWPLLPPPKPIVPLQSPMVPRVAIAARSYLV

SEQ ID NO: 43682 - protein, 175 aa, Zea mays
  Coding DNA Sequence Number=SeqID_307
MSGQFTTPLRVMTEEVSYRGRNILHNLWGSNKALSGRQLQEAEAPGASEEDMGISQGRFTAYFVVKTRAILQECAKSPFKSRRRSQKPKPGKINRSRSCTLLRVTHPTYQNMWVIILQLLLLRLVSHRLLGHNFHLRHHYNLPIHEDSSQKGANRLISSEISGRNPKLAQSTILC

SEQ ID NO: 43683 - protein, 227 aa, Zea mays
  Coding DNA Sequence Number=SeqID_308
  Homolog annotation: Hit_ID=A2XFR6; Match level="QueryCoverage=76%, HitCoverage=49%, E-value=2e-07, Identity=28%"; Hit description =Putative uncharacterized protein
MELSEEQESEGWIARPITRDTARGCHIHDALDTLLRRAFDRHTWSIEYRCVVYQHCCGLYSDQWEATCLVRCRDNDLRGAETFSENYSITERDTAEVAMQDAAQCALSQYCSLFSGVADGLDLKYYPRHSTDSVGGVIVLPVGEGNPRLNIMVNLAIVLNTELDHAIDELGKVQAEVAELRAECTTRHYLDGGSPTPIRIQHPYHSPPHGHFDYGTPDCMTQIDLDP

SEQ ID NO: 43684 - protein, 1317 aa, Zea mays
  Coding DNA Sequence Number=SeqID_309
  Gene Ontology: Mol. function=nucleoside-triphosphatase activity; Cellular component=integral to membrane; Biological process=transport
  Homolog annotation: Hit_ID=Q2R1Y0; Match level="QueryCoverage=96%, HitCoverage=88%, E-value=0.0, Identity=83%"; Hit description=ABC transporter, putative, expressed
  Pfam annotation: Domain name=ABC2_membrane; Domain location=1041 -1255; Score=231.6; E_value=1.8e-66; Accession=PF01061.15; Description=ABC-2 type transporter
  Pfam annotation: Domain name=ABC2_membrane; Domain location=404-617; Score=199.0; E_value=1.1e-56; Accession=PF01061.15; Description=ABC -2 type transporter
  Pfam annotation: Domain name=ABC_tran; Domain location=782-964; Score= 75.0; E_value=2.4e-19; Accession=PF00005.18; Description=ABC transporter
  Pfam annotation: Domain name=ABC_tran; Domain location=79-302; Score =52.0; E_value=2.1e-12; Accession=PF00005.18; Description=ABC transporter
  Pfam annotation: Domain name=MMR_HSR1; Domain location=80-179; Score=- 21.6; E_value=0.1; Accession=PF01926.14; Description=GTPase of unknown function
  Pfam annotation: Domain name=PDR_assoc; Domain location=622-689; Score=108.0; E_value=2.9e-29; Accession=PF08370.2; Description=Plant PDR ABC transporter associated
  Pfam module annotation: Pfam domain module=ABC2_membrane::ABC2 _membrane::ABC_tran::ABC_tran::MMR_HSR1::PDR_assoc; Domain location =1041-1255::404-617::782-964::79-302::80-179::622-689
MKFICLRPPVARAWIPEGEAEKQQTRGSASSFPKIPKLVDEEVRVDRMRGVRGLIGRFGSSNKRNITILKNVNGILKPSRMTLLLGPPSSGKSTLMRALAGKLDKNLKVSGSITYCGHPISEFYPERTSAYVGQYDLHNAEMTVRETLDFSRRCLGIGARYEMITELARRERDAGIKPDPEIDAFMKATAVQGQETNIITDLTLKVLGLDICADVIIGDEMIRGISGGQKKRVTTGEMLTGPATALFMDEISTGLDSSSTFQIVKFMRHLVHVMNETVMISLLQPPPETYNLFDDIILLSEGYIVYHGPRENILEFFESVGFRCPDRKGVADFLQEVTSKKDQQQYWYLDQEQYHYVSVPDFAERFKSFHACQQMQKELQIPFEKSKTHPAALTTKKYGLSSWESLKAVMSREQLLMKRNSFIYIFKVTVLIILAFVSMTVFLRTKMPHGQIADGTKFFGALTFGLITIMFNGFAELQLTIKKLPVFYKHRDFLFFPAWTFGVANILLKVPISLVESVVWVVLTYYVMGFAPAAGRFFRQFIAFFATHQMAMALFRFLGAVLKTMVVANTFGMFVLLIIFIFGGFVIRRNDIKPWWIWGYWASPMMYSQNAISINEFLASRWAIPNNDTTIDAPTVGKAILKSKGLFTEEWGFWLSIGALIGFIILFNSLYLWALTYLSPSSGSNALVSEGEDDVNEIALKERSRDARSEDEISQVVYGDLGTNGATNTLVQSRVTLPFQPLSLCFNHVNYYVDMPAEMKEQGFTESRLQLLSDISGAFRPGVLTALVGVSGAGKTTLMDVLAGRKTSGAIEGDITLSGYPKKQETFARISGYCEQTDIHSPNVTVFESITYSAWLRLSSDIDDGTKKMFVEEVMALVELDVLCDALVGLPGVSGLSTEQRKRLTIAVELVANPSIIFMDEPTSGLDARAAAIVMRTLLLLKRGGQVIYAGELGRHSHKLVEYFEAIPGVQKITEGYNPATWALEVSSPLSEARLNMNFAEIYANSVLYRKNQELIKELSVPSPDYQDLSFPTKYSQNFYNQCAANFWKQYRSYWKNPPYNAMRYLMTFLFGLVFGTVFWQKGKNIDSQQDLYNLLGATYAATFFLGASNSITVQPVVSIERAVFYREKAAGMYSPLSYAFAQTCVEVIYTILQGILYTVIIYATIGYDWKADKFLYFLFFMTACFNYFGLFGMMLVACTPSALLANILITFALPLWNLFAGFLIVRPAIPIWWRWYYWANPVSWTIYGVVASQFGENQGELSVPGGKPVVVKQFLKDNLGIQHDLLGYVVLVHFAYIIAFFFVFGYSIKFFNFQKR

SEQ ID NO: 43685 - protein, 86 aa, Zea mays
  Coding DNA Sequence Number=SeqID_310
MVMQGASLAEVQGKAASQTPPPAEARGKSPAAPIPIPAPGIGASAPRAGDDAVSPGGWTDLAPCDAVNASPDEKAKGGSLTYMHCI

SEQ ID NO: 43686 - protein, 249 aa, Zea mays
  Coding DNA Sequence Number=SeqID_311
  Gene Ontology: Cellular component=microtubule organizing center; Biological process=microtubule cytoskeleton organization and biogenesis
  Homolog annotation: Hit_ID=A7PVY6; Match level="QueryCoverage=26%, HitCoverage=7%, E-value=2e-15, Identity=62%"; Hit description =Chromosome chr8 scaffold_34, whole genome shotgun sequence
MNSITLVRKLCEFGCLFHKVWGFISDNISRSPSDAATEVGTVTQAFCSALQEELSDYYKLLVVLESYSLNPIPTPGSDSEGRRGSSDKVAKTTWRDVSYQITKINMYKDGRHVQDMLKVRLQFSMCIYFLGLNLYKGPHMLKEKELLEKHNLWLDEELKAKAKNLAKLGKTNMDEMSANIAKFERERYESSSSLRRSKEHISELEQRISYMKRWRWPIMGRSNRACSLLGFAQLLVLSLSFVTTYKDSP

SEQ ID NO: 43687 - protein, 95 aa, Zea mays
  Coding DNA Sequence Number=SeqID_312
MDGKGSFAADLSLHHYSLSFGLLIFGFVILYITKRYKESANFKEKVKQQAQVYYRFEVASSFVTSQVSLALCPDLSNESVSNASGQAGDVIQVCW

SEQ ID NO: 43688 - protein, 186 aa, Zea mays
  Coding DNA Sequence Number=SeqID_313
MAALGPLTEARGRQQGLDSSDSCPSARLQCSSDGHDITPTGCQNLSGCHNGMKDQGPLTEGWPRGDEDETGARVRPLAPSPAWTLVTPYCKRTRPGRGTNTKAAGFPPLSRPPPATSLPPFALGLAPTHLGWGTRRHSLVGPGTPRSRNADKNLRKQLAEAKLKCAIAEADRDASDYWKNYWEKQL

SEQ ID NO: 43689 - protein, 115 aa, Zea mays
  Coding DNA Sequence Number=SeqID_314
  Gene Ontology: Mol. function=metal ion binding
  Homolog annotation: Hit_ID=A3B7H6; Match level="QueryCoverage=60%, HitCoverage=7%, E-value=3e-19, Identity=69%"; Hit description =Putative uncharacterized protein
MICGKNVVRGETFSRAKSVQAWVGLSKVPTEWYCNSCRNLVQKEKALAKNKNAKAAGRQAGVDSIEQIMKRAIRNVPISDDLGGCALCKCGAQERWSMAEVKVMQARADRADNGL

SEQ ID NO: 43690 - protein, 165 aa, Zea mays
  Coding DNA Sequence Number=SeqID_315
  Gene Ontology: Mol. function=kinase activity; Cellular component =ornithine carbamoyltransferase complex; Biological process=amino acid metabolic process
  Homolog annotation: Hit_ID=Q6QP54; Match level="QueryCoverage=73%, HitCoverage=44%, E-value=6e-26, Identity=53%"; Hit description =Putative kinase
  Subcellular localization annotation: CTP_CleavageSite=39; ConfidenceScore=5.05e-01
MEPGGGTAVGAVGPLLTSSCFRKGAESRHRHRPESARGRVMMAPPVDVAGLRPRLGDVEAPPKPRSSLSSMAEAESEPLGRARRRSSAEDRAESEPWGRTKRSSSSSGAEPESEPWFGRSGVRRLPGLSPSPSPGSGGAEFAVFRDLVRVRALGRAERSSPLIVA

SEQ ID NO: 43691 - protein, 324 aa, Zea mays
  Coding DNA Sequence Number=SeqID_316
MEVRCQTSFCQKEDGFPKLLRACTVHLGISCQPEYDGREFVEHGTEKCVVTVYIGSSLHHVEWSVTAAGHRFKDTCQVVARKALRALCQIYEEEVADTPLRFFPPFQRNRPVWMARMRALEGKQLLEDDPTVMYLTAYLLTLDAQYDFLARHHPQARATALESHEVIAVEALKQAKDEHVQKLMEAYLVTHNQRRALRIQELASSNLVQPMRAEDPQILEGHPVSIRGEKKAWELPEGAIVLERIPVSPKAMDKQEHPVSSQDPPPELFEPLTMKKIPAPPPSEELQEPVPLEEEFDPVLPSQSPPEEVINVSSLLTHPGDVSD

SEQ ID NO: 43692 - protein, 36 aa, Zea mays
  Coding DNA Sequence Number=SeqID_317
MGYRHSACSAEAGCRGKEEGVEADLQEFQGFGEFED

SEQ ID NO: 43693 - protein, 231 aa, Zea mays
  Coding DNA Sequence Number=SeqID_318
MVTSSLMVGESEPGCGLYPSLSLKDFHHQGWGGDCTVPGSRTRVASEPLAAPTSATAAGRGSSAGEIARAGHGPTSNSTAFCPSLPHEFGHGRGPLGSSIRPEVSAAAVRPPPGAEVVVVAAAGAGDGAPFVGLLLLRRPSPIEWGCSYLRRGNRSSVCNGTLNANSPVGCLNRFTKRESPRVKVTSESGDLRTASPSEARSDLAEGVVDAEGAAAPFQRQDPSLQDQIVL

SEQ ID NO: 43694 - protein, 316 aa, Zea mays
  Coding DNA Sequence Number=SeqID_319
MAERYQLPRSCVPPTMRRKDGGYPPSGGLEGGKTRCMREREDMVYFQGGHPPFKGDYPYLCPQPSRAEFSPTRSKALPCGVGAGSRMSCKPAQSRRSQTVARGAHDRPAVTSDPPLLPRPAGERGGQPCRRHATAPSGRPSPTPNTPSLEAQAHASCNRRAECFVHATAPPLAPLPRLLDCGTNTAARGDPAHDPAAPAWRGGQCGQKWAGSNDGGRRAGAAVTSSAKLTSHPGAAREPPLTGPGKGDTPKRILPREGTRLRASLLIRGSKAGPPKGSTAASDRVGPTPTTGQRFEGRPPEGLHGRLRLLGLRAHY

SEQ ID NO: 43695 - protein, 42 aa, Zea mays
  Coding DNA Sequence Number=SeqID_320
MAGGIELVGAKERWLAGEGTGKGGYFEKGSFPAKETSPEPSY

SEQ ID NO: 43696 - protein, 137 aa, Zea mays
  Coding DNA Sequence Number=SeqID_321
MRGKVNCCCLARVQLSVLHPDDGRAVHRRLLSPVLKRRPPLERLPTAAVVASADETVSATCARGLRLFGFNGWFSSPPPKTEVVVTLLVQWSLASHLDFVTPHAFRSGQPPRALPTSESRYHCYPKYMCLFFVAAEA

SEQ ID NO: 43697 - protein, 563 aa, Zea mays
  Coding DNA Sequence Number=SeqID_322
  Gene Ontology: Mol. function=cysteine-type peptidase activity; Biological process=proteolysis
  Homolog annotation: Hit_ID=Q5NKQ2; Match level="QueryCoverage=93%, HitCoverage=82%, E-value=1e-168, Identity=84%"; Hit description =Putative uncharacterized protein 9C20.3a
MTSVALKPPMEAWQRQQDPCRTDSCASTGLKGVLPQKMKSVDCPPANPKRITIESSQEFLSVEIPRPASIEVPPNTKHSDHRPAPIEKPSVIHEANEQTGSGDDDDDFMTPTKKRNAAGSPMNILRKTCTKRPKVVETPRQTMQKLNVRCNPQDVIITIKILNERQRQAVGRKGFSNILDMTLDALGSRSHLHWLMDKLDHKDMTICPGQGKELKITKETVHLILGLPNAGGGKPLGIDEAVAGNNLRAELGLSKDEFVVASLQDRLRKGNDDDLSIRCFFLILFNRLLFPTSSWGISNHEVLLTEEMDRFHETDWCHLIFNDLCEAAQKWHTRSTSNVSTTIYGCSVVILLPLIKDMLSSKIKQLQPRDRPKFIEKFVEYDSEVGKACSIIKSTLTKMVVKQYELADTFAELIDDVLRAESGDPDNVAEAPQTAKPPYISQHMSSEAHIHKGTQNTQDLTTPYSQPNTELTDCNPMSSYPSSHLPMFDATPQKHGGDIDASHDTPTYTTPLFYQTPSGHTLLDFEEHERYSKSPQIFYQTVLDAYLDKTLPQLDNFVDYKTV

SEQ ID NO: 43698 - protein, 28 aa, Zea mays
  Coding DNA Sequence Number=SeqID_323
MAGGIELAGAKERWLAGEDSKGRRRDWV

SEQ ID NO: 43699 - protein, 108 aa, Zea mays
  Coding DNA Sequence Number=SeqID_324
MKVSPRRLDATLEHDEDEALLSSGAGTRESTGAWRERDVDAGSRVDVGVGLWGAEADVGVGCGGQRQTSAWGCGGLRHREERGKEGAEGEGIGVEPLHGVTCAVLFGF

SEQ ID NO: 43700 - protein, 967 aa, Zea mays
  Coding DNA Sequence Number=SeqID_325
  Homolog annotation: Hit_ID=A2XJ53; Match level="QueryCoverage=78%, HitCoverage=90%, E-value=1e-142, Identity=42%"; Hit description =Putative uncharacterized protein
MPASACTHLDSGCTRKYTRFKNIHAVYDEDYDRDPKRIKTEIIDSELSVGSVSDKDSEQDCDDVFLKDLRTQCKAKNWKTSKITSEGCGIKNQAKTEDDIDLDKPLIALKQKSPKTSLAKDNVKMNALRSSPCATKEEDTTSHRDKILSSSLIKATMQDPVLEKLGRKFAELEQSKVVIDCTEIVGDQICCVEVNNTAGALASCAKPDVLCEIKAEDTNYSEFGTSICSIKNPEHSSFKLQQKLVAGDDCVPQYCFMTRPAQLADVSDHPCEQTCSINNFDDITAAKAIEVSSLGLTDETSNHQKTSENLTDSDVCESSTAHGFIACSFNQSCHDLVDSDEHWNLFVPRNEPVKLLEELSSVDESCADTQSDLCGSTKMNCTSLEGVVQMQAEGQLDSIVCCGVRPKHMLLDMEIRHTETGVFTFDKTIDLAHPANFVAQDGRLESIVYDVLNNHAQRTASKNESSVGLPETAVSQSSLIDFTDNCVEDKRASVDKILPPNNLDWPLKDKLNSTTDYDICRPINDDEGSEEELVPQHQLYQSCSDKFNLSSAMPEISNAEDSQKISAGAQNSSATFLETDGRIKKPNFFVDEEPIEENTPKVLLSKRKIMSPMSQEKLCSALTGIDLCDGVQRFKSKIIIEDHDKTTISLPQPAHMQDRSMLSTDRRLKSRTFVSPTSKGVLKSTGSPPHQHTTCSCTRSSPVVLDTEKAVEFSQRQMHDIENIAAKLIRSLKHMKSIVDESLSTEAYSLLPNFNIAERGGDAENPNVTCSVTLVNEVQVDLHMLRALMLHLIGAEVDGAEVVAVNEGGTLEGVVELVKELAHLGGLRHAIGHNAVLSLCAAAGDDGLPLGSPGDKVGAGTQEYDIAGSGSVCVGTADLVGVGVDHELRRLGGSEEQTIVEGAVEVAQDPLESGDIGLLWGVHVEAHLLDGVGDVGPGEGEVLKGTSEALVRRHISDWGPSSLESFA

SEQ ID NO: 43701 - protein, 35 aa, Zea mays
  Coding DNA Sequence Number=SeqID_326
MASAATGMARVRSVLEEDDSFVAIRCEAHDIKVNP

SEQ ID NO: 43702 - protein, 145 aa, Zea mays
  Coding DNA Sequence Number=SeqID_327
MGKNKKGGSSSHHSGDKRKREPSPPSKDFGDSESEGSSVYASPPVSSDDSDDSHGIAAEVWTYIRSVERSGLEGSDELEIFSDEESSSNSSEEEGGGDGDDEDNKAMEATTAVMATGARATAATTRVTAAAARPVAKRHWLKYYR

SEQ ID NO: 43703 - protein, 96 aa, Zea mays
  Coding DNA Sequence Number=SeqID_328
MVTTSSWVGRSKPGCDLGPTLSFKDVHHPRWGGGRAEPALCLPRGSVGAEAEAAREVPVADGITATIRASGLRLFVLVLAPRASAWARARLQQCLP

SEQ ID NO: 43704 - protein, 48 aa, Zea mays
  Coding DNA Sequence Number=SeqID_329
MAAITPGNLCKGYVVVMRMMVFYYDYGNGKEGVEADLQEFQDFDEFED

SEQ ID NO: 43705 - protein, 103 aa, Zea mays
  Coding DNA Sequence Number=SeqID_330
MPSVPAGDQGGFVPATDVMTEMIRVGASAAANADDATASSAGAAPAAAGLVAAVPGGPRAMRWNNNTSGFILRRMAQGRGFVHMTEAHRNIWLRTFLAKNYYM

SEQ ID NO: 43706 - protein, 255 aa, Zea mays
  Coding DNA Sequence Number=SeqID_331
  Gene Ontology: Biological process=embryonic development ending in seed dormancy
  Homolog annotation: Hit_ID=Q75KQ9; Match level="QueryCoverage=92%, HitCoverage=32%, E-value=1e-55, Identity=51%"; Hit description =Expressed protein
MKLILHTITILCILLLAVGKVKDEKVKVLMELTKLKEQYLLLKGSSAVKEGHDTGDSSKLIPGHDQQGMLKTMLKRTSLRHWMRKESNTIGHGSSDGNDHTVCKEHSVDVARLRVENAMLLEGVGTVEHLTSSVHRLHIVLLKTCDVDAPNTYRLLRWLEFGDASSQYFSNYDQATLLILITEANLMKTALNVVLPVSWSGDSSDAIKYEAMCDPSDSPKSKSGKVDPLSSAGMEMVELLILAAEILKESFLVKK

SEQ ID NO: 43707 - protein, 94 aa, Zea mays
  Coding DNA Sequence Number=SeqID_332
METLKQRSPIDGPSSKYDQRIQALVQPLICWINRNCDNSFPPSLKEEFSWLGARIVRMLLDVRLISTDDQIADGFTKALTTTKMEQFKIILYNL

SEQ ID NO: 43708 - protein, 121 aa, Zea mays
  Coding DNA Sequence Number=SeqID_333
MAPKKGSSKAAPSVDEAAKAALLAEKKGKALVDTTHQEACEDDALSKRQRNEQPTPEGTLRTCSSRGQPQPPLGFAPLEGEDATEDGKVIGVSAEEQLQLRASRIKNRNLQKQKEILEAKR

SEQ ID NO: 43709 - protein, 130 aa, Zea mays
  Coding DNA Sequence Number=SeqID_334
MGKSNKRKREPTPPSEDFGDSEYSDEEFSSESEGSPAPVSPPTSSDDSDDSQGIAAEVWTYIRAVKRSGLKGSDESEYSSDEEDSSDSSEEDGGGDGGDDDDDGGDGDDGDDSGGGGDGGSSRGSNKASG

SEQ ID NO: 43710 - protein, 207 aa, Zea mays
  Coding DNA Sequence Number=SeqID_335
  Homolog annotation: Hit_ID=Q2QRU2; Match level="QueryCoverage=51%, HitCoverage=6%, E-value=4e-07, Identity=35%"; Hit description =Retrotransposon protein, putative, unclassified
MHEEQWTVFTGPRRDDLTNYWVLGPFVRSFILPVDLGDIYLPQTPPKRERCPMRPRGPLSLAARPQAKRPQGGRAWQGAGRVPYGYGPVAVALDGGLENKWLLDSGCSRHMIGSNKWFSGLDPVIRKKYITFEDKSRGKPFSMSLGRICGGQISPGSTRRLEGLAKGFGQLGLLFCKAIPSCAREELLAEWADVGNERTRTKAAREV

SEQ ID NO: 43711 - protein, 112 aa, Zea mays
  Coding DNA Sequence Number=SeqID_336
  Homolog annotation: Hit_ID=Q7XBE0; Match level="QueryCoverage=55%, HitCoverage=7%, E-value=2e-08, Identity=39%"; Hit description =Putative gypsy-type retrotransposon
MEVIGEPSALEAAAAENPAPEGGAGSDLALVGSTSCNPAPEGVADSDLALALVDGMPAQLRSHGATVPEGALSLMQWNPLLLQKQIGDLKASNAAALSDMALRCSELEEKYL

SEQ ID NO: 43712 - protein, 129 aa, Zea mays
  Coding DNA Sequence Number=SeqID_337
MGKDKKGQGSPRRSGDKQKREPSPSSEDFGDSEYSEEEFSSESEGSPGIAAEVWTYIRSVERAGLEGSDESEVSSDEENSSGSSEEGSGGDDSGGGGGDGSGGDDGGRGGDDGKGGSSSSKASGKAPLA

SEQ ID NO: 43713 - protein, 1655 aa, Zea mays
  Coding DNA Sequence Number=SeqID_338
  Gene Ontology: Mol. function=ATPase activity, coupled to transmembrane movement of substances; Cellular component=integral to membrane; Biological process=transport
  Homolog annotation: Hit_ID=A2WL88; Match level="QueryCoverage=72%, HitCoverage=87%, E-value=0.0, Identity=72%"; Hit description =Putative uncharacterized protein
  Pfam annotation: Domain name=ABC_membrane; Domain location=533-804; Score=53.2; E_value=9.1e-13; Accession=PF00664.14; Description=ABC transporter transmembrane region
  Pfam annotation: Domain name=ABC_tran; Domain location=1439-1622; Score=150.4; E_value=4.9e-42; Accession=PF00005.18; Description=ABC transporter
  Pfam annotation: Domain name=ABC_tran; Domain location=879-1034; Score=105.2; E_value=2e-28; Accession=PF00005.18; Description=ABC transporter
  Pfam annotation: Domain name=MMR_HSR1; Domain location=1440-1544; Score=-19.3; E_value=0.062; Accession=PF01926.14; Description=GTPase of unknown function
  Pfam module annotation: Pfam domain module=ABC_membrane::ABC _tran::ABC_tran::MMR_HSR1; Domain location=533-804::1439-1622::879 -1034::1440-1544
  Subcellular localization annotation: CTP_CleavageSite=44; ConfidenceScore=5.34e-01
MTPRILCDDVGSQPPYGSKRTSARTQPLRQLSLRQAPSLLRRPRHHTSWVLKSLRLPQRHGPLREGWPRGDEDETGARLEAARSLIRVDACNRLLQAHPTWARDEHEGRGIPTSLTPVSDRLALPPSRSPSRSTHLGWGTRRHSLVGLRDPRSRNADSRPGPRKEPGTRHSFDRHGRVAVTTTDAMCHRLCRPCIKVRTCQSRASAAAAMAATPAWDWEESLVFFLQPFFLHGVSAAAHLILALAVAGRLLFRRLSASRTKDGEVGGGDASRGVGRFRYWYGVSVCTTWAMGAFEVLLAVYSWYANGGAGWSRDAVVEQVDAAARAVSWLLLAAYLQFDFWWRRQRQERFPVALRLWLALFMLLSVVTVGVHAAMILDGSLVPGRSWALDAVSVTAAAVLLSVSAGFFGRKEGEGGGHASEAHEPLLNGAHEGSGDDDENSSSAADASLFTGAGFLSVLTFSWMTPLLGVGHRKTLVPEDVPGLEPGDSVAGVLPPFKANLEALTGDGGRSSRKAVTAFKLTKALLRTLRWHVAVTAFYTLVYCVAVYVGPYLIDSLVQYLYLNGDERYASKGQLLVLAFVVAKVLECLSQRHLFFRLQQAGIRARSALVAVLYQKSLALSSQSRRSHTSGEMINIVSVDADRVGIFSWYLHEVWQVPLQVVMAMFILYSTLGVASLAALGATVATGLATVPLGRMQERFQEKLMDSKDGRMKATSEILHSMRILKLQGWEMRFLSKIIELRKTEANWLKRYLYTSATMTFIFWGTPTFVAVVTFGACMLMGIPLETGKMLSALATFRVLEEPIYELPGTIAMVIKTKVSLDRIASFLCLDELPSDAVQRLPRGSSADFAVSVGNGCFSWEASPDAPTLKDLNFQARPGMRVAVCGTVGSGKSSLLSCILGEIPKLSGEVRTCGTTAYVSQSAWIQSGKIQENILFGMEMDRDKYDRVLESCALKKDLENLPFGDQTVIGERGINLSGGQKQRIQIARALYQDADVYLFDDPFSAVDAHTGSHIFKVMKDGRIAQAGRYDEILGSGEEFMELVGAHEESLTALDVVDAMNENEANVSSSPSSRIETPNLSRSLSLAEKKHGATNEAEGDDDDARSGQLVQEEEREKGRVGFWVYWEYLTQAYKGALVPLVLLAQTLFQIMQIASNYWMAWATPASKDAEPPVSAPTLLFVYVVLALGSSLCILASTDQSEVDTNIADQMGTVAFSIIQLVGITAVMSQVAWQVFVVFVPVFAACVWYQRYYIDTARELQRLVGVCRAPIIQHFAESIAGSSTIRSFGKEDQFVSTNSRLTDAYSRPKFYNAGAREWLCFRLDVLSSLAFAFSLIFLINLPAGLIDPGIAGLAITYGLTLNTLQAQVVWSMCTLENKIISVERILQYMGVPAEPPLVMPENKLAQSWPSNGEIQLQNLHVKYAPQLPFVLKGLTVAFPGGVKTGIVGRTGSGKSTLIQSLFRIVDPAVGQIVIDGIDIRTVGLHDLRSRLSIIPQEPTMFEGTVRSNLDPLGEYSDDQIWEALDCCQLGDEVRKQELKLDSPVVENGENWSVGQRQLVCLGRVILKRSKVLVLDEATASVDTATDGLIQRTLRRQFKETTVITIAHRITSVLDSHMVLLLDNGVAVEHDRPDKLLEDKSSLFSKLVAEYTMRSVLT

SEQ ID NO: 43714 - protein, 535 aa, Zea mays
  Coding DNA Sequence Number=SeqID_339
  Homolog annotation: Hit_ID=A2XCZ4; Match level="QueryCoverage=11%, HitCoverage=52%, E-value=2e-08, Identity=55%"; Hit description =Putative uncharacterized protein
MARVGDRTRYPSMDPLDTVVATMKNCGGEDRREELGLGAKKGMGAGEICIAGAGADGAGSTFASYNGNGGEVVVIAEEEEEEGERGLEDDVGPRPTIVAVDLSRCHRSLPPLPAPLTESQSLVIPGIGAAAGPAMELMAVPKKKVSKYKKGLRNGPKALKSVPVIIRCRSTRDEATKQMPNATESRHQAELDAAATHSHSPPVSHEGGRGWKKNEQREEGKRRTAPASYPACQPLTPPRSLRANPAAKRPPGRFSQPFFVRPGLSAASSAMLAMSSLLRQPSGRTPSRLPHRKRGSWWRHGRTDVGAMDSMISSLGPSSSRRLIPSKHKQRRILRDARDVLPTETAAGTYAQPPPPPQKRKLVAPQEDRCGSDGFDDLIPGSLLIASIDPQQAQTGSSPTLPNRRDRSARTPPEAPARPVLPTLLCSPRPQRRILRDARDVLPTETAAGTYAQSPPPPQKRKLVAPGRTDTAPASYPACQPLTPPRPLRANPAAKRPPDRFSQPFSVRPGLSAASSAMLAMVFLTIELPDAKGVK

SEQ ID NO: 43715 - protein, 331 aa, Zea mays
  Coding DNA Sequence Number=SeqID_340
  Gene Ontology: Mol. function=structural constituent of ribosome; Cellular component=intracellular; Biological process=translation
  Homolog annotation: Hit_ID=A2Z1N2; Match level="QueryCoverage=49%, HitCoverage=31%, E-value=2e-44, Identity=61%"; Hit description =Putative uncharacterized protein
  Pfam annotation: Domain name=Ribosomal_L18p; Domain location=118-227; Score=-25.0; E_value=0.0013; Accession=PF00861.13; Description =Ribosomal L18pL5e family
MASGRRGDRGVGEGKVTAMNAGRGVSADRQDVEVREEKAVDTGQISDSPLAARRLFDDLPHWRWRCYPPRPALPVRHPTTSLIGSGTSLDFSLPQRPGVVGAPGRAYPMIEATARRGARTESAKVRNRRLQKKFNGTATKPRLSVFCSSRQLYAVLADDHNKEILFYGSTLQKSICGDPPCGTVVSRRRRLLRLGFALVCNELGISEISYDRNGFARGDKKMTAFEVPDFRTYCSPLVTIPIIIYSSTKIHSSEDAETGTGVPNLWTNHGFSISGSMKVCARNGIASSPNSSLHQRSRPDELDPGPEHLRRMPIRASRASQEELESTREKE

SEQ ID NO: 43716 - protein, 157 aa, Zea mays
  Coding DNA Sequence Number=SeqID_341
  Gene Ontology: Mol. function=olfactory receptor binding; Cellular component=mitochondrial membrane; Biological process=protein insertion into membrane
  Homolog annotation: Hit_ID=Q10P18; Match level="QueryCoverage=72%, HitCoverage=34%, E-value=2e-51, Identity=83%"; Hit description =TB2/DP1, HVA22 family protein, expressed
  Pfam annotation: Domain name=TB2_DP1_HVA22; Domain location=22-90; Score=-4.0; E_value=0.0013; Accession=PF03134.10; Description=TB2DP1, HVA22 family
MASGSSRPQIDQFVRLKKGHEQRGHLLSFSIFTIGRILVALLTVLERFGDFTISWLPFYLEVKLLFFVYLWYPKTKGTTYVYGTFFKPCISQHENEIDRNLLELRARATDMVVLYFHKAASVGQNTFFDVLKYVAAQSPSWKSRQHPHQDVDNWKYM

SEQ ID NO: 43717 - protein, 311 aa, Zea mays
  Coding DNA Sequence Number=SeqID_342
  Gene Ontology: Mol. function=ribulose-phosphate 3-epimerase activity; Cellular component=chloroplast; Biological process=reductive pentose -phosphate cycle
  Homolog annotation: Hit_ID=Q9ZTP5; Match level="QueryCoverage=88%, HitCoverage=88%, E-value=1e-119, Identity=82%"; Hit description =Ribulose-phosphate 3-epimerase, chloroplast precursor
  Pfam annotation: Domain name=Ribul_P_3_epim; Domain location=52-284; Score=420.8; E_value=2e-123; Accession=PF00834.10; Description =Ribulose-phosphate 3 epimerase family
  Subcellular localization annotation: CTP_CleavageSite=38; ConfidenceScore=5.67e-01
MATPSSSLCSSFASLRTASIGHPRGIASSTPRKAFQVRASARVDKFSKSDIIVSPSILSANFAKLGDQVKAVEVAGCDWIHVDVMDGRFVPNITIGPLVVDALRPVTDLPLDVHLMIVEPEQRVPDFIKAGADIVSVHCEQTSTIHLHRTVNQIFENHWDVLLSFILVACCKLELSYLSTIYQIKSLGAKAGVVLNPATPLNAIDYILDVVDLVLIMSVNPGFGGQSFIESQVRKIAELRRLCAEKGVNPWIEVDGGVGPKNAYKVIEAGANAIVAGSAVFGAPDYAEGMLSKESRPAKGLQLYTHKELDV

SEQ ID NO: 43718 - protein, 37 aa, Zea mays
  Coding DNA Sequence Number=SeqID_343
MAILGVPLRAVSSFNVEDRNRDPMQINVVSSDLDVFN

SEQ ID NO: 43719 - protein, 275 aa, Zea mays
  Coding DNA Sequence Number=SeqID_344
MDAYREQGAWTALFEAPSQEVDLRFLEWLQEELGVLPTIVTGLMSFASLVTCEEVVEDPVLKRSAGALFDRMWGPHDRETVWERSDRAMDQMACDEEVKDLGDLDSMLPEASLPEASGVELAPLSDAGKGPLPTPALTGDGKDPAPAPATMCEDSPKAVVEPAGEDPTAVARPSQVPMFGPAHATATDNAIFVAASTVVSADALDVAKVEPSPRVEGSGGLSDEYEVSFVELSWDDCVVAPGLRLSLVFIEGLHVEDAVSVDEVFGCWLVDVWGG

SEQ ID NO: 43720 - protein, 82 aa, Zea mays
  Coding DNA Sequence Number=SeqID_345
MESHITTELEATLGINLSLVLGVGRATILNRNTVSDDVDISGINIISTFDLLAFDVFCGDACGYDPSALVKAYVPIADSRGL

SEQ ID NO: 43721 - protein, 221 aa, Zea mays
  Coding DNA Sequence Number=SeqID_346
MARRRGGARCRYGEGRRWRESVLAAARGGGSWGSLRCVVQGARHGGGDGGGGGDGARWEGRGPRLSGRGRWRGRGCPGVGGGGRPQDCTGARWRGRGMRQLEDEQARWAGRSVAGGGVGACGGRRKSARGGRRSARAVAVGRARAVAGDDYRGGEHGCALEETRAAGLERGRRGSFTLELGAKICGAELQSTSVPRQLVGDSVAGSSAPRSMAPRCVSSAP

SEQ ID NO: 43722 - protein, 343 aa, Zea mays
  Coding DNA Sequence Number=SeqID_347
  Homolog annotation: Hit_ID=Q6J9V9; Match level="QueryCoverage=31%, HitCoverage=44%, E-value=5e-39, Identity=67%"; Hit description =Putative uncharacterized protein
MGATRIAHPVALTPRRSRRHLWQARRVSLRLRHDDRVKKGTGKGDDSERILLGEGSGPRALLLIRGSKAGPSERAGPSEGFDSRPRARRVRDDFGYVRYMAEARATLPRYPRTFPRPAGTICNGIPPEGGIEPSDPVEGVWVRRITRKYFWSASLGHQPTPNEWGTGVHSDHPKLRLARPQASPSGGGLRLARPQAPASGGGLRLARPLDSASTSVSGGIASSPDPGLGLKRNLRLARPWARTDCANRGYIITLSLASSGYKKQDRRPIWLTPTTSNDGLRRSSDGHAITCTGLKLSPDNHVGMAILEGGSRGEGADERAPSPSLSLSRRACNPYYEQHPGAG

SEQ ID NO: 43723 - protein, 164 aa, Zea mays
  Coding DNA Sequence Number=SeqID_348
MSGAPEDSDFKVFALGNFQRPLRYNSPDCPVYTGHVRCSKEGRPQELASLGFSLQPLRYNSPDMSGVHRTVRCNLGATAASRQRSPAGAFNARQKRAVVRHAGAGAPDIEQYMSGVHRTSRRAQKTEPQRSIQRLFGDVAVAPDMSGVHRTVRCAIEQTAPPNG

SEQ ID NO: 43724 - protein, 164 aa, Zea mays
  Coding DNA Sequence Number=SeqID_349
MSGAPEDSDFKVFALGNFQSPLRYNSPDCPVYTEHVRCSKEGRPQELASLGFSLQPLRYNSPDMSGVHRTVRCNLGATAASRQRSPAGAFNARQKRAVVRHAGAGAPDIEQYMSGVHRTSRRAQKTEPQRSIQRLFGDVAVAPDMSSVHRTVRCAIEQTAPPNG

SEQ ID NO: 43725 - protein, 147 aa, Zea mays
  Coding DNA Sequence Number=SeqID_350
MGKNNKRKREPTPPSEEFGDSEYSEEEFSSEPEGSPAPVSPPASSDDSDDSQGIAAEVWTYIRAVERAGLEGSDELEYSSDEEDSDGGDEGEDDDDDDDDDDDDGDGSGRGGGDGRDSTKGSSRGSTKGSSGGSTKGGGGGRGRASG

SEQ ID NO: 43726 - protein, 90 aa, Zea mays
  Coding DNA Sequence Number=SeqID_351
MKLWKETSRSFKTTTSSRCGLAATPSRLPVKAAFIYVSFPHFDLLWLDLDTLHESQSSLSHPALRNKARWELMECKAYQREWLKLSIAFK

SEQ ID NO: 43727 - protein, 68 aa, Zea mays
  Coding DNA Sequence Number=SeqID_352
MGTLPGGLFAECPKWHSAKKAALPSAARRTLDKDIFVAECFAECFRHSAKRLIPVVVGGSVDATDALL

SEQ ID NO: 43728 - protein, 293 aa, Zea mays
  Coding DNA Sequence Number=SeqID_353
  Homolog annotation: Hit_ID=Q10RU8; Match level="QueryCoverage=47%, HitCoverage=15%, E-value=3e-64, Identity=81%"; Hit description=DENN domain containing protein, expressed
MGYLFGECWPTDLKPDVVRSGACVATRRPGSSLSTWSATGEREAAAAPVHAVAAGFFDHSNCVLKLGYLDIVTKGYLDIVTFFSNDSMRGASPVMAAGDISLSVSPISLFVVFRCDCGDVKILPRKLIDFLDAPVPFIAGVQHKPPDIKMKGSSLVRVKACSLPRLPHYKELVSNLGPLHARLSCENSLAKRHPIYKCNEVQADVAWKFLNIMRTYLESLCSDLRFHTITNVQSNNDRVSLLLKDSFIDSFPSNDRPFIKGIGKIKTRHVAWSAEDFDFAEATSLIRSVLKSI

SEQ ID NO: 43729 - protein, 240 aa, Zea mays
  Coding DNA Sequence Number=SeqID_354
MVGCSSEQSSVALGIGGPRETVGYPSQYSADFTRRVQGSGEVGVQVAPEELRRVPLFGLVMPPDISASVPSSAGFPLRRFLSREDLLFVGSAMRRKVPSSSATYELVPKQNVDPGRKTILGRKVTAIELPWIDDTPPTWRASCRCFGSDRTPGVAPQGSGRFEVRNTLRPGESAVYGGLQDRGTMVHNGGKILSGDIAIVHLQLSEVGTTTWFMVGYTFGDDCAGVGGGSLECIITKEAR

SEQ ID NO: 43730 - protein, 694 aa, Zea mays
  Coding DNA Sequence Number=SeqID_355
  Homolog annotation: Hit_ID=Q6JAD6; Match level="QueryCoverage=100%, HitCoverage=96%, E-value=0.0, Identity=74%"; Hit description =Putative uncharacterized protein
MPRTKNASASGGGDDEDPRRPFRQVKGKTVFLEQQEGRKKRRSDREARTAAAAAAAAAQAALGDQPDVPSDQIAFRARRLASRSRSSTHTSASTPPPTLPAPATPIAPSTSTPIPTTSTTPASTASPAPAPASAPSVPPPRFRERDETEVRPLVSDPRLFDLQCATAARVHRFRYVPVESWLPAQRDPTAGVLFSTRIQESFFRAQMSAQIALRVHRLLDLPAFLLAAGAESEAHLTYLPGLLTLLTISGRYVEEWVRVFYASVWIDPDHHWMRFRFEREDVTITASQIRQLFGFPESTTRLHSLCYGTSDPPRRPHGGVAPGTAHVAALFRPPFTDGSRRSPADFTTAAKYLYELIRRTLLPRMGYREATTHIQLWLLGALVSHSQFDVVDFLICEIEDTVLDGIRARRQLPYAHYLCHIFAQLIQPPRFQSTLEASRLVFGSYRPAPEIPVPAYAPVFDTQAEDAALRQFDTQGTAADDDDDDDDDDDFGIPPPPPPPMPPRSHDHEAGSSSAAPATPQAMDPALASILQTLTQQQAHLAAEQARLSDRMLSMFQNMQDRQDALQQQLIQDRAENRAFMALMLQHSGISAPPVQSVPPPPLHAPVVPSILSGPPAGTSPLRPVTLAFTSPALSSICPQPPVPPASAVTTTAVAVSVTASVPVAPAARPASESVPAPASTADPGSETDSDPPS

SEQ ID NO: 43731 - protein, 365 aa, Zea mays
  Coding DNA Sequence Number=SeqID_356
  Homolog annotation: Hit_ID=A6N0F2; Match level="QueryCoverage=11%, HitCoverage=17%, E-value=2e-07, Identity=63%"; Hit description =Lysine-specific histone demethylase 1
  Subcellular localization annotation: CTP_CleavageSite=48; ConfidenceScore=5.05e-01
HASLPSPRTWPDFTGGPRSTSPDFGLPPPRVDRAIQPDSSPPTSIPACAHGPTDSGHPRRRPAHRCDPRDLPYVLDHFTGAISPPAILALNAPAIRSVGVAIWPRLLLGEDWASGEPKLCADGGLPAEIRSLGAIVDLGSGIKNKIALKFNTIFWPNVEVLGSIAPNIKSSGKGSRPRRIYVSPEDPLQQRTHLRLARGPVFAKKQPWPDRHADRPYRRSIQCKDGLTHYPDARSSVDRAEGSDSGSALEDDELRFARPQGSDSGSAPEDDKLRFARPQGSDSGSASEDDELRIARPQGSDSCSALEDDELRFARPQGSDSGSAPEDDELRFARPQGSDSGSAPKDDELRFARPQGSDSALASAD

SEQ ID NO: 43732 - protein, 72 aa, Zea mays
  Coding DNA Sequence Number=SeqID_357
FKAVLGTARAATTGAGETVYLSLKAPHHLGCGSRAANVVLQQVFHLHHLSSKDRAPFYPLGLSSGIKFQVAQ

SEQ ID NO: 43733 - protein, 132 aa, Zea mays
  Coding DNA Sequence Number=SeqID_358
  Homolog annotation: Hit_ID=Q7XBD4; Match level="QueryCoverage=31%, HitCoverage=4%, E-value=9e-09, Identity=73%"; Hit description =Cinful1 polyprotein
MSKSFGFSTLEDGLSVLSKNELADSLAYNSLKGLILSNALRWAWVGGTHSLMNRVADWRGPRVSFFVQAQQNPAWRPGNFSSELTAAVDPPSTVAVVNNYTNHGGDCSPEPRSHLYRGQGTTQRSNWYGALI

SEQ ID NO: 43734 - protein, 70 aa, Zea mays
  Coding DNA Sequence Number=SeqID_359
MRQPRAPLAGGTELSGVHRTVSGAPRGHQLKLFALGNSWKPARYDSPDCPVCTGHVRCSKEARSPELASL

SEQ ID NO: 43735 - protein, 157 aa, Zea mays
  Coding DNA Sequence Number=SeqID_360
  Subcellular localization annotation: CTP_CleavageSite=38; ConfidenceScore=5.01e-01
MARARAYKAHRDLNRTPPRTLDLTGAQTHRRLPVHGVSAAARSPCHRRPANQALPNLVQPSERTEHTSVKLPERGIEVCFAGEASPRSPDSTRPPASVDRVILTCLKMLNLSVHLVKVAFAIYFTICLRLRKIEKVIKMMNQGALLFLLGYLFSVVH

SEQ ID NO: 43736 - protein, 428 aa, Zea mays
  Coding DNA Sequence Number=SeqID_361
  Gene Ontology: Cellular component=plastid chromosome
  Homolog annotation: Hit_ID=A2YHX5; Match level="QueryCoverage=69%, HitCoverage=48%, E-value=1e-147, Identity=85%"; Hit description =Putative uncharacterized protein
  Pfam annotation: Domain name=mTERF; Domain location=133-428; Score= -28.0; E_value=2.8e-06; Accession=PF02536.5; Description=mTERF
  Subcellular localization annotation: CTP_CleavageSite=61; ConfidenceScore=5.79e-01
MAAALPHSRLHLPLHTPSPTSRRRPCPRSRRRLPSFVAVSRLQNTTAATHPVLPPPAPPPSAALLAAEGASLAPRREHRFPGSVSSPTSTASASNEAEYAVLLRALQVRRAVAAEVLVAALGGGKVGGLTYIKNLTGRMGPFVDRVVVEAAAMRRDRPELAHMSFNARAKAYIQESGLVELVKWFKHNSMTYPQIAKVVCACSGDLGKVRKMIKWLRSIYVKGDFLGRVLANGGSFLNRSFEELEEIIGYLESLGVRRDWIGYVISRCPQLLSLSMDELETRVRFYTDLGMDKKDFGTMVYDYPRVLGFLSLEEMNSKVQYLKEFGLSTEELGRLLAFKPQLMACSIEERWKPLVKYLYHLNISRDGMKRMLMVQPTIFCLDLETVIAPKVQFLIDIGVRSDAIGNVLAKFPPVLTYSLYKKIRPVFC

SEQ ID NO: 43737 - protein, 385 aa, Zea mays
  Coding DNA Sequence Number=SeqID_362
MVTTSFWVGKSKPGCDLGPTLSFKDVHHPRWGGGHAEPALYLPRGSAACRSRRPGFRRPLLPEGDRRAVCTGGPPMMPRAVRAAFVFWVGPAFALGRRPRAEADAPLVWEDLSGDLPGAGVPCRRRRGGGGSRSPRRRRDHCHHPRPGPPCRRACPRPSSVGGSEGKITAAPAHCRRSQNGRRRAARRSSVAPQAFPMEWGRSYPRRGNRSSVCNGISNAEPTPKSISRGLGSGWRPWEPVGRGPRGNRPSRLLGPDSRRSPWSASSSEAGSDFAEDAVDAEGATAPFSVKTRACRIRSSCSVCLLRPPRPEKHTLAVLAKLHLFSSCFEHLDSVGNRDVCVSESCFSRKGRVRYPYPRGVGIPWLGRPCRLRVLSPIHEALSPT

SEQ ID NO: 43738 - protein, 156 aa, Zea mays
  Coding DNA Sequence Number=SeqID_363
MGKNNKRKREPTPPSEDFGDSEYSEEEFSSESEGSPAPIPLRESSDDSDDSQGLAAEVWTYIRAIERSGLEGSDESEYSSDEEDSSEEGGGGDGEDDDDDDDDDDEGGGGSNGDGGGGGGSSGSKDGDGGSRGGSGGSSRGSNRGGSDRGSNRASG

SEQ ID NO: 43739 - protein, 445 aa, Zea mays
  Coding DNA Sequence Number=SeqID_364
  Gene Ontology: Mol. function=nucleoside-triphosphatase activity
  Homolog annotation: Hit_ID=A2YQ32; Match level="QueryCoverage=34%, HitCoverage=17%, E-value=9e-32, Identity=49%"; Hit description =Putative uncharacterized protein
MAWMPITSMENPDASTPTSVAATHVSLLSFVVSAHYKMQGLAEHVCPFELVHQGGLIRASEGKLWCTEIMDDSGNDNLDGVGKSSNEGHGGHNCNNEDMVLPGLLGGMALPMFDEMPLNSGEEEISLFSKGFDYPVFDYMPLDKVTWDEESRHNDLLDQLAPNADYFVAAERKPTAHPISFDKLHMDVVYDLFEEMSCKEEVAEKLEQVTSRNAGLSNCDVQDLPNEISNDVQWDEEFLSDQSMHIGLLQHLVVGMVSTCHPNIDWISHTCLMQTIQLEEFLSSVEMDRVGVLRERDIVQQILQESGSICSVICDNPKEVYHETEWKQGQLLHAVDVVKDIEREFVQINTSRSQWANLVMDVDSRLDKTLSILRPQALTDYRDLLSCLGWPFSLFSLDTEKDKYSQILNPLVLMNEENKAIYSQSFQAPFKGKCALGPFLKCFGD

SEQ ID NO: 43740 - protein, 69 aa, Zea mays
  Coding DNA Sequence Number=SeqID_365
  Gene Ontology: Mol. function=kinase activity; Cellular component =ornithine carbamoyltransferase complex; Biological process=amino acid metabolic process
  Homolog annotation: Hit_ID=Q6QP54; Match level="QueryCoverage=98%, HitCoverage=23%, E-value=2e-15, Identity=66%"; Hit description =Putative kinase
MALPVDVAGLRPRLGDVEAPPKPRSSLSSMAEAESEPWGRVKRSSSSTGAEPESEPWGRAKRSSSSSGI

SEQ ID NO: 43741 - protein, 132 aa, Zea mays
  Coding DNA Sequence Number=SeqID_366
MKSFARSLLGTRSSSRSSSRGEDSVFQGTGSTVSRRRALAEHLPPQDDAEIEEPVVEDHARDDVEDDGGDNVGDDVGDDAGGDSGARDSGSGGDSAAWSGTSRVRRTRKLHFVGPPPELPPESRVLIKPSGK

SEQ ID NO: 43742 - protein, 148 aa, Zea mays
  Coding DNA Sequence Number=SeqID_367
MGKGHKRKREPTPPSEDFGDSEYSEEEFSSESEGSPAPVSPPASSDDSDDSQGIAAEVWTYIRAIERSGLEGSDESEFSSDEEDSDGGEDEDDDDDDDDGDDDDGGDGDGDGGYGGGGSGGKGSTRGGSSTGSTRGDGGKGSSSKASG

SEQ ID NO: 43743 - protein, 44 aa, Zea mays
  Coding DNA Sequence Number=SeqID_368
  Homolog annotation: Hit_ID=Q8W0X3; Match level="QueryCoverage=88%, HitCoverage=3%, E-value=2e-07, Identity=69%"; Hit description =Putative gag protein
MSLEEILEARYVDDITNEPLPLYEPQPVALKAIASKEALPNKVA

SEQ ID NO: 43744 - protein, 72 aa, Zea mays
  Coding DNA Sequence Number=SeqID_369
MVNDAGDKFHGLFKGDLCEGPRFDPLREFFDCDQDLGVAPECPFERFSLPDVHLTLGGPIESLSEGVPHEAS

SEQ ID NO: 43745 - protein, 450 aa, Zea mays
  Coding DNA Sequence Number=SeqID_370
  Gene Ontology: Mol. function=hydrolase activity, hydrolyzing O -glycosyl compounds; Cellular component=anchored to membrane; Biological process=carbohydrate metabolic process
  Homolog annotation: Hit_ID=A9NVN4; Match level="QueryCoverage=94%, HitCoverage=94%, E-value=1e-127, Identity=51%"; Hit description =Putative uncharacterized protein
  Pfam annotation: Domain name=Glyco_hydro_17; Domain location=29-346; Score=329.5; E_value=5.8e-96; Accession=PF00332.9; Description =Glycosyl hydrolases family 17
  Pfam annotation: Domain name=X8; Domain location=364-449; Score =172.6; E_value=1e-48; Accession=PF07983.4; Description=X8 domain
  Pfam module annotation: Pfam domain module=Glyco_hydro_17::X8; Domain location=29-346::364-449
MTLCTVLLQILLPTLLLVSAITGADASGIGVNYGTRGTTLPAPADVARFLARDTIFDRVRLLDADPVLLRAFAGTGLAVDVTVPNGVVPHLLNLTFARRWVRDNVTPYAGATNISRLLVGDEVTTEANRTLLLALVPAMQNLHTALVAASLHGRVKVSTTHSLGVLTTTEQPSAARFRDGYDAAIVRPLLRFLRATGAPFMVNAYPFYALANDSSLDFALFRVNDGVMDQGTGLVYGNMLDAQLDAVHSAVRRMGFGDVDIAVSETGWPSAGEDWEVGVGADLARDYNSNAIRHLGSGVGTPLMPNRTFEVSIFSLFDENLKPGPVSERNFGLFRGDMTPVYDVGIFTDPETLEPVRAKVTSRKWCVPEPAADEMVLQENIDFACGQKGVDCTAIRPGGVCYEPDTVQAHAAYAMNLYFQANGQHAFDCDFGQTGIVTTADPSYGGCKFM

SEQ ID NO: 43746 - protein, 446 aa, Zea mays
  Coding DNA Sequence Number=SeqID_371
  Gene Ontology: Mol. function=metal ion binding
  Homolog annotation: Hit_ID=A7Q9V6; Match level="QueryCoverage=35%, HitCoverage=41%, E-value=8e-31, Identity=48%"; Hit description =Chromosome chr8 scaffold_68, whole genome shotgun sequence
PESEPWGRAERSFAVFRVLARVRALGSGGAEFAVFRVLARVRALGSGGAEFAVFRVLARVRALGSGGAEFAVFRVLARVRALGSGGAEFAVFRVLARVRALGSGGAEFAVAPLARPDCLSDSLCQLYADGGYQLRIRRLEELGRTSPLPTLAGALGPPSPPPSSQKNSSHRARDSDEHGPLHRLRLRLAACGLRAAPTSSPPPSPSALDAPPPALRRRRRGGLGLLWKLPSTRAPPRPAPMDARAPPPPQPHPSRAPSPQSHLSRAPSPQPPPAPSRRYGVHFSASSFIQTPLTALLEYSGILRPDPGCGIQQPGTGAGPGEVSIRIVAPGEAGTSSERAEEVIVEEEEEDGQATRTRPEDSSPAAGGGEGGRETSSSYQRYDIQQVARWVEQILPFSLLLLVVFIRQHLQGFFVTIWIAAVMFKSNDILCKQTALKVGDCFVELL

SEQ ID NO: 43747 - protein, 112 aa, Zea mays
  Coding DNA Sequence Number=SeqID_372
  Homolog annotation: Hit_ID=A2ZWJ9; Match level="QueryCoverage=80%, HitCoverage=25%, E-value=2e-18, Identity=53%"; Hit description =Putative uncharacterized protein
QEECFAQSTFVEAGLSVGVKPQGSLKRSSPDKAHRSTMDTVYHHHHVSPLTGNGAATATVGEKLGVERFELPLFYISLSWKEKEDDFLAMKGTKLPSELRKGPRTWTRPSKY

SEQ ID NO: 43748 - protein, 156 aa, Zea mays
  Coding DNA Sequence Number=SeqID_373
  Homolog annotation: Hit_ID=Q6QP54; Match level="QueryCoverage=25%, HitCoverage=14%, E-value=1e-07, Identity=70%"; Hit description =Putative kinase
MAPPVDVAGLRPRLGDVEAPPKPRSSLSSVAEVESEPLGRGLTACQSHSVKGHRSRSGAGGAVLLSGRSVEWRSDGGHFGSAGWGTHVRIKVSGHLCIKCSCDLVGRCGDLVRVASWRRLGLGRAGNIFAAGGGPRARQKSSGVGCPCPRPGSGEA

SEQ ID NO: 43749 - protein, 156 aa, Zea mays
  Coding DNA Sequence Number=SeqID_374
MPPHVFEVGAVAHSAVNRGGLCFRRALNHRRAIESASALTQQESAGCYGRGLRSPSFNRHARSGEEKQSGRARWRIPAASCACRCNRHPSEAEAAPDWSPDQRGNRLGMDSGGRRYLTIWAHKPATCLLIVACARSCGTSLAVTERKCARLSIRLV

SEQ ID NO: 43750 - protein, 103 aa, Zea mays
  Coding DNA Sequence Number=SeqID_375
MGKSKKGGGSSHHSGDKRKREPTPPSEDFGDSEYSEEEFSSESEGSPAPASPRRRLMIQTTPKGLPRSGGDSGKGGDGSGKGGSGDGSDGSKGNSKGSNKASG

SEQ ID NO: 43751 - protein, 114 aa, Zea mays
  Coding DNA Sequence Number=SeqID_376
MSRAFDDYYIEDCGIILASEVTQRRIDNSDQFVILATVREGTQRRWGDLAREGGVNGGPRRVRKGRPMDGTIGGGSSSDGRAMSRMELGWGARGGGWARAERVGPEGVKCWGVA

SEQ ID NO: 43752 - protein, 147 aa, Zea mays
  Coding DNA Sequence Number=SeqID_377
  Subcellular localization annotation: CTP_CleavageSite=59; ConfidenceScore=5.58e-01
MTLGWAAKRSVPRAHQRGSTPGHCTTRCATPLHTSCSRILTQRQQRPSSQRTRIHVRSVATYVNNPRVVDVGDNHEASLLNDGQCGAAALDRVQVVASRELVVHSGTCDHVRLLLEVELTVAKLLLVIDERRQRECLLLMVFVRGFK

SEQ ID NO: 43753 - protein, 60 aa, Zea mays
  Coding DNA Sequence Number=SeqID_378
DALPDHLGSGQWGLALPGWFEMQGLCYGLGSTMMMFLDEEMEKAKPWKETSRSFKTTMNS

SEQ ID NO: 43754 - protein, 32 aa, Zea mays
  Coding DNA Sequence Number=SeqID_379
MELTPVHLVLSSAESVKKDFQLWWVGKMETDG

SEQ ID NO: 43755 - protein, 29 aa, Zea mays
  Coding DNA Sequence Number=SeqID_380
MEVVFEVLKSLEDVEELDPELEQEQGGQI

SEQ ID NO: 43756 - protein, 301 aa, Zea mays
  Coding DNA Sequence Number=SeqID_381
  Subcellular localization annotation: CTP_CleavageSite=68; ConfidenceScore=5.08e-01
MHDGSAKTLLPFEGVTLLLKATLPTCVLSRRGLSLLQHAPRSSPLRHGGWVPRVMQTGPGQKEPKPPRAARATAQRLRAFLHFCPDQRVKGRTAMQAACDRIEGAHPFDFDASSMEAQAHTSCNRRAGYCVQETAPPLAPLSCLLDCGTSTATRGNPAHDPTVPTRHIGHGSVSHRRRRDGRYGQKWTGSNDGGRRAEAAVKSDRERGYPERDPSPRRKRAPSPTTDQRFEGWPLGGFNSRLRALGLRAHYWSEVRRPAPRKGSTAASGNSGSAPTTDQGFVGWPPKGSTAASDAERGMTL

SEQ ID NO: 43757 - protein, 44 aa, Zea mays
  Coding DNA Sequence Number=SeqID_382
MDEQSANQEQSQGAVSVWGTGQCPVRQAASAEQAALGNSPTAYG

SEQ ID NO: 43758 - protein, 222 aa, Zea mays
  Coding DNA Sequence Number=SeqID_383
  Homolog annotation: Hit_ID=A7P1J7; Match level="QueryCoverage=48%, HitCoverage=57%, E-value=8e-17, Identity=48%"; Hit description =Chromosome chr19 scaffold_4, whole genome shotgun sequence
  Subcellular localization annotation: CTP_CleavageSite=34; ConfidenceScore=5.56e-01
MDASVSLGPNLKAIRRMQMNQSAGTPSSASSLTRARHAGDGSGAQARALSGDFSGFPSRIAPSPPFKMSEALEKDKEIDEEEEEYVLLELDNCLYSDMSPGAPFVLSGLDTLTPTLIIGDSLKMQVLYCCRLAAQGAKYKIGEYEETIGTCYLFSETEAEPKPTSNEMAPSEENTDKQVSSSKEAPSKEVNHLASVQKILKFRPINAEHSQHRAYQHKDKEF

SEQ ID NO: 43759 - protein, 122 aa, Zea mays
  Coding DNA Sequence Number=SeqID_384
  Subcellular localization annotation: CTP_CleavageSite=37; ConfidenceScore=5.34e-01
MVLAVVVLLGAVAVLVVVLLLQPRVSYVAVRAGWRCSAPTRSACPTGASSRWLVNGVHMVIFVSVSQGNQSREKLGTLTDSAHARTVRATTADCPDRGPSGLSAGLSALLNLTSIICPPAFW

SEQ ID NO: 43760 - protein, 94 aa, Zea mays
  Coding DNA Sequence Number=SeqID_385
  Subcellular localization annotation: CTP_CleavageSite=58; ConfidenceScore=5.39e-01
MRKGAGTYLDRITNGGMAMTGTQYTSVVNRARRGASRKRQVGIVVRRLEVGRVFARKLGSEVGPIPQELPSKQITTKPSESFSRGPLAPHREVV

SEQ ID NO: 43761 - protein, 134 aa, Zea mays
  Coding DNA Sequence Number=SeqID_386
MGAHAHTSCNRRTGRYLQATAPPLAPLPRLLDYGTSTATRGNPAYDPAVPARRDGQCGQKWAGSNGGGRRAGAAVTSSAKLTSHHGADRRRLRQEKQATLRLRRNDRIKKRDRERGIPRKGSFSVKETGFEPPY

SEQ ID NO: 43762 - protein, 36 aa, Zea mays
  Coding DNA Sequence Number=SeqID_387
  Homolog annotation: Hit_ID=Q94EV5; Match level="QueryCoverage=86%, HitCoverage=6%, E-value=2e-07, Identity=87%"; Hit description=Opie2 gag protein
MDPKGKGMVVNDKEKESFVNDPKDEYHKVSGLDNAK

SEQ ID NO: 43763 - protein, 145 aa, Zea mays
  Coding DNA Sequence Number=SeqID_388
  Homolog annotation: Hit_ID=A2YHW7; Match level="QueryCoverage=86%, HitCoverage=29%, E-value=4e-19, Identity=46%"; Hit description =Putative uncharacterized protein
  Pfam annotation: Domain name=DUF1005; Domain location=2-145; Score =80.0; E_value=7.7e-21; Accession=PF06219.3; Description=Protein of unknown function (DUF1005)
HLLAPASTKPPRHPRRLRTGDAQLGYRFELVPDHNSNITDSAVCVAESSVPAVRGGQFAIDLTTAGSPGRGSSELGHALWPPGGFVMSAAVQEEGRRGRPSVGISVAHFGCAEDAAAFVALAAAVDLSMDVCRLFSCKLRRELSA

SEQ ID NO: 43764 - protein, 65 aa, Zea mays
  Coding DNA Sequence Number=SeqID_389
MQHGEMVAPLSLYDDGWPGGGEVAMGMTGDGELFKADFKGYFGDALTNEHLSELTDLDHATRQWL

SEQ ID NO: 43765 - protein, 247 aa, Zea mays
  Coding DNA Sequence Number=SeqID_390
MVVDTELTTTDCESAAVLSRWRQIPGAVGGLSSEIRLRPPSTRPKGAPGFLTPSTVVGTPGFACGGSLSLLSAHGDGGTRYGRRVARTGGRRSFMWSTGVGSRARVVGRGPSFARSDRESSLSSSEKRKPDALAPSEFGDSTLTELRFAHSPICAPRLRSIKAGDGIGTTDGGGGMTSSSLKKGGHPVLAALVGGRPKPGGAGVGGLQRGAVGSTSGVDTGGTGVNQIHHYPVNGKANPIVVEDSFT

SEQ ID NO: 43766 - protein, 51 aa, Zea mays
  Coding DNA Sequence Number=SeqID_391
MAPRKPCDDGGSQLPYGSRGTLQFKGYNVDLDRGKVVIEKINASNKTHKTY

SEQ ID NO: 43767 - protein, 187 aa, Zea mays
  Coding DNA Sequence Number=SeqID_392
MNRILWLLHLSEGLGKYNIRYTACINQNIVDQKSLDDTRNDHSIIVRVILELKVLLREGSTEGVSFFKIFGYEAYPQQPATSIVPAHKNLCPNNPRVIDVGDNHEAPLLNDGQRDTAALDRVQAAASRELVVHNGACDHVGLLLEVELTVVKLLLVIDERRQREFLLLMVFVRVSSKKHGFMLGVGL

SEQ ID NO: 43768 - protein, 265 aa, Zea mays
  Coding DNA Sequence Number=SeqID_393
  Gene Ontology: Mol. function=amino acid binding; Biological process =metabolic process
  Homolog annotation: Hit_ID=A2YXG7; Match level="QueryCoverage=96%, HitCoverage=57%, E-value=8e-87, Identity=66%"; Hit description =Putative uncharacterized protein
  Pfam annotation: Domain name=ACT; Domain location=126-198; Score =43.9; E_value=5.7e-10; Accession=PF01842.16; Description=ACT domain
  Pfam annotation: Domain name=ACT; Domain location=39-102; Score=22.7; E_value=0.0014; Accession=PF01842.16; Description=ACT domain
  Pfam module annotation: Pfam domain module=ACT::ACT; Domain location =126-198::39-102
MVRWGEMVEEEEDDEYAKLVRRMNPPRVVIDNDSCGNATVIRVDRVNKHGILLEAVQVLVDLNLVITKAYISSDGNWFMHVFNVTDQDGSKLHNREVIDHIQKCLESDGYLVPPANGYALPEDQFTSIELTGADRPGLLSEVCAVLATLSCNIVKAEVWTHDGRTAAVIQVTDEATGRAVHDAGRLSRVQELLRDVMRGDGTCNRGGTGISAERRLHTLMLDSVGGGGAEEAGGGRDESGGCGVARPKVVVMDCAERRYTGGDPA

SEQ ID NO: 43769 - protein, 28 aa, Zea mays
  Coding DNA Sequence Number=SeqID_394
MNALDSLGAELLPLNLHVSHCVHDHQGI

SEQ ID NO: 43770 - protein, 40 aa, Zea mays
  Coding DNA Sequence Number=SeqID_395
MAVAWPRRVPRPGELRPSELRRPRPRQCAASRVSPRDGSF

SEQ ID NO: 43771 - protein, 177 aa, Zea mays
  Coding DNA Sequence Number=SeqID_396
  Gene Ontology: Mol. function=protein-tyrosine kinase activity; Biological process=protein amino acid phosphorylation
  Homolog annotation: Hit_ID=A3AA52; Match level="QueryCoverage=97%, HitCoverage=29%, E-value=8e-73, Identity=77%"; Hit description =Putative uncharacterized protein
MATVAPASVKGFNCTANRTRPCQAYALYRAGFAGMPLDLAAIGDLFAVSRFMIVHANNLSTMAAPANGQPLLVPLQCGCPSRSLSSYALMQYHIGLGGTYWIVSTTKLQNLTQYQAVERVNPTLVPTVLDVDIMVTFPVFCQCPAAADNATTLVTYVMQLGDTYVSVAAAFSIAYPQ

SEQ ID NO: 43772 - protein, 451 aa, Zea mays
  Coding DNA Sequence Number=SeqID_397
  Subcellular localization annotation: CTP_CleavageSite=51; ConfidenceScore=5.64e-01
MAGSAAPARPAPCPPGSAVPVPARLGRPCGRPASAAPAPAQPPAPAQPPLRAAGSAAPAPAPGRFNRPLAENDPVEEPEELAGEAPEQQSVAMRIDGFGYDYGDGKWYSFRLERMARLRHTARKSIIPFLPSRLAERPLRRPVAGQSSHLERLHHRLHEEQERRRQEQQGSSSSLHQEIESVRSCSPKLPLEAPPAPPLGAPASGVAAGGDPDDGGGDDSSSHGTDLSANHELEGWFARSITRDAARGCHFHDALDTLLRRAFDRHTWSVEYRCVVYQHSRGVYPDRWEATCLVRRPENSLQGAEACSEHYSISERDSAEAAMQDAARRALSHYCSVFGGVADGLDLKYYPRRPSGSTGGVIVSPVGEGNPRLSSTVNLAAVLNTELDHALDELSRARAEIAQLRAERAERRHLEDGSPAPFGTQHLYRSPQRGSQSYGNPDCKTKITLEP

SEQ ID NO: 43773 - protein, 107 aa, Zea mays
  Coding DNA Sequence Number=SeqID_398
MVSDPAPSSAPRYLAYSLPSNHLPGEDILFCINVDLEVHAKMKSAVVASSDPCPPRRRPRPTGPSSTACTSASSACCSTSCPSYWWNPEEYLGLAALLHANRSVCWC

SEQ ID NO: 43774 - protein, 66 aa, Zea mays
  Coding DNA Sequence Number=SeqID_399
MAPSAPLAFATVDQVRPDLGHSKQTLTGCLDQVGPNPDLIISTSLAPTKSSPTLVALSKPQPGWPG

SEQ ID NO: 43775 - protein, 398 aa, Zea mays
  Coding DNA Sequence Number=SeqID_400
  Homolog annotation: Hit_ID=Q6J9V9; Match level="QueryCoverage=16%, HitCoverage=22%, E-value=4e-09, Identity=59%"; Hit description =Putative uncharacterized protein
  Subcellular localization annotation: CTP_CleavageSite=74; ConfidenceScore=5.27e-01
MHEGSAKTWLPSKGVTLLLKATLPTCVLSRRGLSLHQHAPRSSPYDTGAGSHASCKLAQGRRSQTAARGARNCLAVTSTPPLSPRPAGERANRHAGGMQPYQEGAPFRLRRVQHGAQAHTSCNRHAGYYVRETAPPLAPVPRLLDCGTDAMTRGNPAHGPTVPTEHIGHGSVSHGRRRDGRYGQKWAGSDGGGRRAEAAVKSSAGSRPLLGQRESPLPRSEDDAPVFRSSNGSRTHSGCPTNHTSCRINSAAGQAAPLAGTGKGDTLKGILLHEGSGPRAPLLIRGSKAGPSEGFDSRLRALGPRVLLLIRGSKAGPSKGFDSRLRALGLRAHHRSEVRRLAPRMGSTAASGHSGSAPTTDQGFEGWPPKGSTAASEHAERGMTLGTSDTWPRLGLCS

SEQ ID NO: 43776 - protein, 231 aa, Zea mays
  Coding DNA Sequence Number=SeqID_401
MASATRLRRRSRQWTDWPGSDRRSFFSSQLCLCPCWHRCLRLQLIEERPRVPLTKQEKPRAARPTEPRDSYASGIRIPHSSPSHEETHTWLRGPDSRNEQTPALKVRTTPHIGGLAGRQNPRWLADARSGSSDNDIRSGRPNSSSDDLRADAAATRPSPKTHLKGRGQATKAVESEVSPRVAPAISSADKPLPAASVGGGTGSSAGAAQAGELDTWQLPAPRTANALPPDH

SEQ ID NO: 43777 - protein, 326 aa, Zea mays
  Coding DNA Sequence Number=SeqID_402
MGKSKKGGSSSHHSGDKRKREPTPPSEDFGDSEYSEEEFSSGSEGSPIPASPPASSDGSDDSQGIATEVWSYIRAVERAGLEGLDESEVSSDEENSSDSSEESGGGGDGEGCRCFGSDRTPGVAPRGLGRLEMRNTLRPGEDASCNGLQVDPGDICPPQAPDLWVDFEAISPKILGLACRTLNFIGCTGGAPNGCSPRASSRFWKIIYSKRRSSPLSPRGLQLPSLPQHRPMTRTTLRGLPRRSGLTSGLAGSDESEYSSDEEDSSEEDGGGDGEGDDDDDNDGGDGGDNSDGGGRGGNGGSSRGNGGSSRGNGGSSSKGSNKASG

SEQ ID NO: 43778 - protein, 133 aa, Zea mays
  Coding DNA Sequence Number=SeqID_403
MKGRTKKTGRHHPLHPTHGSVSDYVVTYIKMSSISSRVAAVEACPSASTPATPQQDIPYGLPGYGGIPKVPVNINLCQSRHILPPQPPSNPSSTPSSFPITTTIIPPTGIFRSTILSTSDECSSLSSIGVFIV

SEQ ID NO: 43779 - protein, 534 aa, Zea mays
  Coding DNA Sequence Number=SeqID_404
  Gene Ontology: Mol. function=glucose-1-phosphate adenylyltransferase activity; Cellular component=chloroplast; Biological process =glycogen biosynthetic process
  Homolog annotation: Hit_ID=P55234; Match level="QueryCoverage=100%, HitCoverage=100%, E-value=0.0, Identity=91%"; Hit description =Glucose-1-phosphate adenylyltransferase large subunit 2, chloroplast precursor
  Pfam annotation: Domain name=NTP_transferase; Domain location=87-365; Score=418.8; E_value=7.9e-123; Accession=PF00483.14; Description =Nucleotidyl transferase
  Subcellular localization annotation: CTP_CleavageSite=87; ConfidenceScore=5.11e-01
MQFSSVLPLEGKACMSPVRRGSGGYGSERMRINCCSIRRNKALRRMCFSARGAVSSTQCVLTSDAGPDTLVVRTSFRRNYADPNEVAAVILGGGTGTQLFPLTSTRATPAVPIGGCYRLIDIPMSNCFNSGINKIFVMTQFNSASLNRHIHRTYLGGGINFTDGSVEVLAATQMPGEAAGWFQGTADAVRKFIWVLEDYYKHKAIEHILILSGDQLYRMDYMELVQKHVDDNADITLSCAPVGESRASDYGLVKFDSSGRVIQFSEKPKGAALEEMKVDTSFLNFAIDSPAEYPYIASMGVYVFKRDVLLDLLKSRYAELHDFGSEILPKALHEHNVQAYVFTDYWEDIGTIRSFFDANMALCEQISIQTNTVFISYAPSQPPKFEFYDPKTPFFTSPRYLPPTKSDKCRIKDAIISHGCFLRECAIEHSIVGVRSRLNSGCELKNTMMMGADLYETEDEISRLLAEGKVPIGVGENTKISNCIIDMNARVGRNVSITNKEGVQEADRPDEGYYIRSGIVVVLKNATIKDGTVI

SEQ ID NO: 43780 - protein, 170 aa, Zea mays
  Coding DNA Sequence Number=SeqID_405
  Subcellular localization annotation: CTP_CleavageSite=94; ConfidenceScore=5.21e-01
MVPIRGGRTAPPIEAAISVDSVAAAGSTAGASTPVWAAAACAPARSAVSASAPIRAAATRAPMGMRGCPLCRLLSRCFPRQPELFVGVVVDRSRAASSTAAQNLELCCRRTCSIRRLRCFYFRSRCCQFRRRQPCCPCRCRCSRCCCSLSFLCRGDLGFLLAPRTRSDRA

SEQ ID NO: 43781 - protein, 250 aa, Zea mays
  Coding DNA Sequence Number=SeqID_406
  Gene Ontology: Mol. function=protein binding
  Homolog annotation: Hit_ID=Q7Y180; Match level="QueryCoverage=22%, HitCoverage=21%, E-value=9e-13, Identity=72%"; Hit description =Acidic leucine-rich nuclear phosphoprotein 32-related protein 2
  Subcellular localization annotation: CTP_CleavageSite=99; ConfidenceScore=5.63e-01
MGTHIYRDYVCIRVSFLTPTQQPLQQSPSRRRASAKSPSTFNTSQPPPPPRGGSSFLPGAATPQPPPTPLPWPARASSPCHHRPCATGEDDAAWERAISAAIKSTSAPKTLTLDGVVKSSTGGLPSAALLERFAASLEELSVAGRASSRSRAFPASRRSGASPSSSPSRGAPLLARGPSPPPGAPAPLPLHRRSPEPPTPSLARRPLLRGPCRRPSLARRPQVVDTRSRRRRSAAPPCAAHRRLRPVTEI

SEQ ID NO: 43782 - protein, 85 aa, Zea mays
  Coding DNA Sequence Number=SeqID_407
MRQAGGSLAPEMRPICSRLQSLVQGALSIVRVWLHICTQSLIDNNQTPAHYIPRCKHQQIQATKHMVDTSKVKLDVMKLWIAKRR

SEQ ID NO: 43783 - protein, 180 aa, Zea mays
  Coding DNA Sequence Number=SeqID_408
  Homolog annotation: Hit_ID=Q7XAX9; Match level="QueryCoverage=25%, HitCoverage=6%, E-value=4e-17, Identity=93%"; Hit description=HDA1
PLPLTRPALISAPARALAMPPHAPKEDSWYSNVLYLGNEDEVPILTMTCPASDIERYKSGELRLAPSSLILPKDVLGHRRRPMSPKASPRKHPSAGTKDEFWVWHLPADQKTRPNLGVCCYGEMRCTVSPPSVSGSCGRSSPDPYDVPEFGWRDIRRYKQFRSVDTNISTGDDSALGQRL

SEQ ID NO: 43784 - protein, 24 aa, Zea mays
  Coding DNA Sequence Number=SeqID_409
MAHRRSQKNKKTTPKENKEGDKCL

SEQ ID NO: 43785 - protein, 434 aa, Zea mays
  Coding DNA Sequence Number=SeqID_410
MGLGASSGLNAQHSMRPLEDCPTWGDEMGMQLVCGASGPSRQICGALGPSRRICGQPSIDACVAQLNNAQLDARAGSFISVERSQESPSPSWKQCRQLANEARDLGVRAASFNDEERTKVPLAVGSLNQLRSASPQYHLAAGPLEGDRTDSPQATGPLGFTGEARQDDLVAEPVDWATTDLTHQMCISETERTTLTLGDHVAADSGRKSSTGNLLHQSIHCTTGIEQPGMLHIRGLQSSKKLMVYSRKRFNSRDKSGNMNEEGSGPIASVLRIDTDENTVSTVREVSLAVTTDGSQSTSQETQTGSTQLKNKQFLSKLSKKISGLLATPEDPPFMTSKNAQVAEIIPRRSRRIAGVGVEFDNMDLSSRTTKKVMQALKVIGDPGAVTQQAKEDYLKVFSTELPISHIEALASFFGWVVPDDLKVGSISVGISAC

SEQ ID NO: 43786 - protein, 158 aa, Zea mays
  Coding DNA Sequence Number=SeqID_411
MGVGKGRLGKNNKRKREPTPPSEDFGDSEYSEEEFSSESEVSPAPIPLRESSDDSDDSQGLAAEVWTYIRAVERSGLEGSDESEYSSDEEDSDDGGEDEDDDDDDDDEGGGGGDGDGSGRGGGSGSKDGDGGGSRGGSGSSRGSTRGGSGGDSNRASG

SEQ ID NO: 43787 - protein, 140 aa, Zea mays
  Coding DNA Sequence Number=SeqID_412
  Homolog annotation: Hit_ID=O48967; Match level="QueryCoverage=50%, HitCoverage=15%, E-value=8e-15, Identity=63%"; Hit description =Putative uncharacterized protein
MATQVSAAPAGKVRRNVKPVGIPAGRACARFVANFASAYQQHGVEAHLHTVRQEPEETLRTFISRFTKVRECREIIDLAKRVSERREQSSKDGCPPRRRPGKEKVDDGEVATAEWDLGYQSPEGDLKDVFAGGSYSGGDN

SEQ ID NO: 43788 - protein, 230 aa, Zea mays
  Coding DNA Sequence Number=SeqID_413
MTSHGSSDDGNALTHTDRLAREGFPRILWEVLQVAGYTTPPQYAVQQFEKHRVPRCRLATHPIGLFPAEREDDPMWKDRVEHAKDIWAIYPGQTAHLTVMRGEAMSHLMALLEATKITLDNREELVVDLSQEMVEKDLQVEQLSTEIQELEELVGTRENAIEVLEDQLLNTQQQLDEANEHLDMHHQEIQDQEANEDVDIEGGDEPASSVDTAGSGRPPSPESSVASFAH

SEQ ID NO: 43789 - protein, 81 aa, Zea mays
  Coding DNA Sequence Number=SeqID_414
  Subcellular localization annotation: CTP_CleavageSite=38; ConfidenceScore=5.22e-01
MVLAWLGRGAGHAGARVSVLWRGQKASNTWRPLPLVITASSAKVGFSQGNTWGVTPGVFHLVDEKKGLLISGKRGKSVSWR

SEQ ID NO: 43790 - protein, 200 aa, Zea mays
  Coding DNA Sequence Number=SeqID_415
  Gene Ontology: Mol. function=DNA binding; Cellular component=nucleus; Biological process=regulation of transcription, DNA-dependent
  Homolog annotation: Hit_ID=A2XAX8; Match level="QueryCoverage=93%, HitCoverage=21%, E-value=1e-94, Identity=86%"; Hit description =Putative uncharacterized protein
  Pfam annotation: Domain name=WD40; Domain location=142-181; Score =30.5; E_value=6.1e-06; Accession=PF00400.23; Description=WD domain, G-beta repeat
  Pfam annotation: Domain name=WD40; Domain location=57-95; Score=19.2; E_value=0.016; Accession=PF00400.23; Description=WD domain, G-beta repeat
  Pfam annotation: Domain name=WD40; Domain location=99-137; Score =34.1; E_value=5e-07; Accession=PF00400.23; Description=WD domain, G -beta repeat
  Pfam module annotation: Pfam domain module=WD40::WD40::WD40; Domain location=142-181::57-95::99-137
MDLEWVDDLEQFGDVGSLDDNVESFLSNDDGDPRDIFAALKRSPAEPSPAVSKGFTFSEVNCWRTSNSKIVCCHFSSDGKILASAGHEKKAVLWNMENFQTQYTPEEHALIITDVRFRPNSSQLATSSFDRTIKLWNAADPGFSLHTFTGHNGQVTSLDFHPKKTDLLCSCDGSGEIRYWNVTQFACLRAIKVAYIPSTL

SEQ ID NO: 43791 - protein, 195 aa, Zea mays
  Coding DNA Sequence Number=SeqID_416
MARFREDPRARGEQGASCARENRDAQGRSLGTPVMETGAGRAPWQVAEQKVSVEGDEDMAGGNNLIHALGRRRTRRPASWERHRVAGGSREGAAWLDRSSAGNCSAQWSRGGRARQGESAASWATAQRNINTWGVTPPTTRPVALTLRQGRRHLWQAKQATLHLRHDDRVKKGPGKGILRKGSFSVKEAGPEPSY

SEQ ID NO: 43792 - protein, 22 aa, Zea mays
  Coding DNA Sequence Number=SeqID_417
MASHRALLLLLLAAALVAALAS

SEQ ID NO: 43793 - protein, 524 aa, Zea mays
  Coding DNA Sequence Number=SeqID_418
  Gene Ontology: Mol. function=helicase activity; Cellular component =chromatin; Biological process=protein amino acid phosphorylation
  Homolog annotation: Hit_ID=Q2R0Z1; Match level="QueryCoverage=100%, HitCoverage=25%, E-value=0.0, Identity=60%"; Hit description=AT hook motif-containing protein, putative
  Pfam annotation: Domain name=DUF889; Domain location=239-495; Score =337.8; E_value=1.9e-98; Accession=PF05970.5; Description=Eukaryotic protein of unknown function (DUF889)
MFVTIVVHCPVCNVRPLFDKYWIYFTDDIHRGLREALGNPHYTAPHEQLLTLLLRKLADTFANSVFSNRLINNELSPEPLLLRDHAAAAVSQLNADQRLIFEKLTESALSCLPGVFFVYGHGGTGKTFLWNAILTHLRSQQKIVLAVASSGVASLLLPKGRTAHSRFKIPFDLDEGGVCGVKRGTMLSELIQQTSLVIWDEAPMTHRHCFEALDRTMRDILSEHRAENANIPFGGKPIVLGGDFRQILPVVRKGSRSAIVNASITSSPLWQHATVLKLRTNMRLSNPSLHGKERADLEQFSKWVLDIGDGALPAMTRGDESEPTWITIPEDLLIHTDGDAAVALISEVYPDLLEKYMDPTYLATHAIVCPNNLTTDKINDYIVSMLPGHGVQCLSCDTISKASERIPDFDMLYPTEFLNSINAANFPCHKLVLKRGVTVMLLRNLNQTAGLCNGTRMLVTEVGHRVLKCIVLTPSGVDEEVFIPRIALNTTDVKWPFTLQRRQFSIRICYAMTINKSQGQTLSK

SEQ ID NO: 43794 - protein, 27 aa, Zea mays
  Coding DNA Sequence Number=SeqID_419
MAPKRKASSSSAVVIPPIDPNRRIFSR

SEQ ID NO: 43795 - protein, 180 aa, Zea mays
  Coding DNA Sequence Number=SeqID_420
MICESGTTYAGQGDTCRCFGSNRTPGVAPQGKNNKRKREPTPPSEDFGDSEYSEEEFSSESEVSPAPIPLRESSDDSDDSQGLAAEVWTYIRAVERSGLEGSDESEYSSDEEDSDDGGEDEDDDDDDDDEGGGGGDGDGSGRGGGSGSKDGDGGGSRGGSGSSRGSTRGGSGGDSNRASG

SEQ ID NO: 43796 - protein, 93 aa, Zea mays
  Coding DNA Sequence Number=SeqID_421
  Homolog annotation: Hit_ID=Q6J9V9; Match level="QueryCoverage=48%, HitCoverage=15%, E-value=1e-14, Identity=88%"; Hit description =Putative uncharacterized protein
MSRLLDCRTSAATRGNPARDPTVPIECNDHGASDTSGRRSGRRFTSVMMTASKKGPGKGIFWKRILPSEGNGPRALLLIRGSKVAPSGVRQPP

SEQ ID NO: 43797 - protein, 158 aa, Zea mays
  Coding DNA Sequence Number=SeqID_422
MVGESEPGCDLGPTLSFKDVHHPRWGGDRAELALYLPRGSASHPLPRRSREEALTGPAGGADLDSVGLIDGGRRHLQRVGVVGLGPGGPSCRGRLPRRRCPTRPGGFEWGSAGGLVAPAISVEAEAAREIPVTDGITATIRAPGLRLFALVLAPRASA

SEQ ID NO: 43798 - protein, 175 aa, Zea mays
  Coding DNA Sequence Number=SeqID_423
  Gene Ontology: Mol. function=diphosphate-fructose-6-phosphate 1 -phosphotransferase activity; Cellular component=6-phosphofructokinase complex; Biological process=glycolysis
  Homolog annotation: Hit_ID=A2X8W6; Match level="QueryCoverage=50%, HitCoverage=15%, E-value=3e-39, Identity=86%"; Hit description =Putative uncharacterized protein
MEGLSRRTWRNIESTATLRSAVVSVDLPYFPTFWIGKRWSTNVSEENLLEVLQGTTFRVEYGDAAIAADPVGAHVISHAFPHTYGQPIAHFLRKTTVVPDAKAISEHQVVRVGIVFYGRQSPGGHNVVWGLYEAIKAHNLLGVCFVAEDPKEGEHLRKIFSWASAEAVTYRASAQ

SEQ ID NO: 43799 - protein, 40 aa, Zea mays
  Coding DNA Sequence Number=SeqID_424
MAHQTVRCTKAVQMSTSHSREFGDTLRYNSPDCPVCHRTV

SEQ ID NO: 43800 - protein, 284 aa, Zea mays
  Coding DNA Sequence Number=SeqID_425
MEGAPAPPPPLGIQGPGLKHIQGSLGPTYPVQCCPIALRLAPTVIALGLLIRGSGGKSRKGNKDDDLGGGGAGGDEGSAGSDLVVVGEAQFLEDEHGVRRGEGGAGDGVRDDVMCVGESMVETAKVVEDDFGVLHGVTDITEGVGGGLRVLALGVDAGVAEDGQGLVVEKDGTWLFVGAEDVLNGDPKIASRLVVVLHCEVENGVVDGAEDPTFDGTVRLVPIRVGGISRSVPSICDLRPNFAQGFEVGRPLVVGILNLQRHGNMGFDKNGDVGNLGCTMITSS

SEQ ID NO: 43801 - protein, 19 aa, Zea mays
  Coding DNA Sequence Number=SeqID_426
KNYPENTLIFGSDTGTRNS

SEQ ID NO: 43802 - protein, 53 aa, Zea mays
  Coding DNA Sequence Number=SeqID_427
MGLGVCGSLCQGGNETDGFGYDYGAGCQHCNHCSGEDEAVEGDFQEFQDYDEF

SEQ ID NO: 43803 - protein, 128 aa, Zea mays
  Coding DNA Sequence Number=SeqID_428
  Homolog annotation: Hit_ID=A3B0Z6; Match level="QueryCoverage=39%, HitCoverage=17%, E-value=3e-07, Identity=52%"; Hit description =Putative uncharacterized protein
MSLTQLKGKCIAQPSQDNRDHMVKKLETGKTVACTKPLEGNVKDLRIAKREEQKKKINTSSKSLNHASIKGNIQGNPKLQLVLERKKKQLQREDTHMKEKDIKNNNIHLDNKILKIINGVVGESLSIS

SEQ ID NO: 43804 - protein, 251 aa, Zea mays
  Coding DNA Sequence Number=SeqID_429
  Gene Ontology: Mol. function=protein binding
  Homolog annotation: Hit_ID=A2WS01; Match level="QueryCoverage=99%, HitCoverage=100%, E-value=7e-69, Identity=58%"; Hit description =Putative uncharacterized protein
MARRRKTDAPPRLDEADRTLYSTFCGAANSLSQLYAQAMAQQKLNFHAGERHALVRKPSPVFCLSPLIPASSLSSRRKELLVQGENPQNNTGLRRHSENSIRFQEKLYQWILRKHDEEARLTVAEIMSHIQHEIDYVGTDAHVSPRVPQHPQIANPFANSVVPPGTGLYGQSAAGFAPRPSVTDQSKNTIFSNALSSPVRRSLQNSHTTQGAGNGGRNAEANLAGANREANSTSSNDTSMDMVSDTNEFYQ

SEQ ID NO: 43805 - protein, 64 aa, Zea mays
  Coding DNA Sequence Number=SeqID_430
  Gene Ontology: Mol. function=oxidoreductase activity; Cellular component=integral to membrane; Biological process=electron transport
  Homolog annotation: Hit_ID=A2Z1M4; Match level="QueryCoverage=60%, HitCoverage=4%, E-value=2e-12, Identity=89%"; Hit description =Putative uncharacterized protein
  Pfam annotation: Domain name=NADPH_Ox; Domain location=1-39; Score= -17.2; E_value=0.00065; Accession=PF08414.1; Description=Respiratory burst NADPH oxidase
MVDSKEFAVGIFDALARRRRQNLERISKDELYKFWLQISRVGPVIPWGPGATAPRAPPQGRRWL

SEQ ID NO: 43806 - protein, 69 aa, Zea mays
  Coding DNA Sequence Number=SeqID_431
  Subcellular localization annotation: CTP_CleavageSite=18; ConfidenceScore=5.47e-01
MKPWKETSRSSKTTTSSRCGLVATPSRLPVKAALSTFLFRTLIYYCVFAYGITSSATPMCRSLGMLTSD

SEQ ID NO: 43807 - protein, 91 aa, Zea mays
  Coding DNA Sequence Number=SeqID_432
MNRLHQEKNLFIGNLAGGGTDAEIFGNITRLENGIQRSPYRETRSQKWEKLWKNGSSEKEGTLDDVTVGRLKNRLSRKQGNIERIHFSDAT

SEQ ID NO: 43808 - protein, 152 aa, Zea mays
  Coding DNA Sequence Number=SeqID_433
  Gene Ontology: Mol. function=cyclin-dependent protein kinase regulator activity; Cellular component=nucleus; Biological process =cell division
  Homolog annotation: Hit_ID=Q2RAC5; Match level="QueryCoverage=86%, HitCoverage=26%, E-value=5e-66, Identity=95%"; Hit description =Cyclin-T1-3
  Pfam annotation: Domain name=Cyclin_N; Domain location=1-109; Score= -14.6; E_value=0.0024; Accession=PF00134.14; Description=Cyclin, N -terminal domain
MSYLLVLDSLRPQVTIATAIVFCHRFFLRQSHAKNDRRTIATVCMFLAGKVEETPRPLKDVILLSYEIIHKKDPAAVQRIKHKEVYEQQKELILLGERVVLVTLGFDFNVNHPYKPLVEAIKKFEVAQNALAQVAWNFVNDGYAKITLHHCK

SEQ ID NO: 43809 - protein, 53 aa, Zea mays
  Coding DNA Sequence Number=SeqID_434
MAPKRKTTNSSAAVIPAIDPNSQLPFAEHSATERQGLSSISVSRADRLNSGYQ

SEQ ID NO: 43810 - protein, 196 aa, Zea mays
  Coding DNA Sequence Number=SeqID_435
  Subcellular localization annotation: CTP_CleavageSite=37; ConfidenceScore=5.16e-01
MADDVTKGGLATTTSANAQRQRTNLKSDFGPTHRLVSSPEVSPGATIGTLKLGYPCYRTKTKNPRHYLLVTWWGCHMWTKPQLALGTGGYSGPTVAPGSAVWSAPGTPRGQKRRRPDAATCPTACDWSFRYTPILRRLRISGRKEDALTMGISCSKYYIHYVPEPACRGSAPLYVRPFSYKRGGTQRYKTGSKKLT

SEQ ID NO: 43811 - protein, 881 aa, Zea mays
  Coding DNA Sequence Number=SeqID_436
  Gene Ontology: Mol. function=ATP-dependent helicase activity; Cellular component=intracellular; Biological process=RNA-mediated gene silencing
  Homolog annotation: Hit_ID=A7PXV4; Match level="QueryCoverage=99%, HitCoverage=44%, E-value=0.0, Identity=80%"; Hit description =Chromosome chr15 scaffold_37, whole genome shotgun sequence
  Pfam annotation: Domain name=PAZ; Domain location=157-318; Score =154.6; E_value=2.8e-43; Accession=PF02170.13; Description=PAZ domain
  Pfam annotation: Domain name=Ribonuclease_3; Domain location=352-499; Score=144.2; E_value=3.7e-40; Accession=PF00636.17; Description =RNase3 domain
  Pfam annotation: Domain name=Ribonuclease_3; Domain location=574-687; Score=157.5; E_value=3.7e-44; Accession=PF00636.17; Description =RNase3 domain
  Pfam annotation: Domain name=dsrm; Domain location=714-774; Score =42.9; E_value=1.1e-09; Accession=PF00035.16; Description=Double -stranded RNA binding motif
  Pfam annotation: Domain name=dsrm; Domain location=798-870; Score =42.7; E_value=1.3e-09; Accession=PF00035.16; Description=Double -stranded RNA binding motif
  Pfam module annotation: Pfam domain module=PAZ::Ribonuclease _3::Ribonuclease_3::dsrm::dsrm; Domain location=157-318::352-499::574- 687::714-774::798-870
MDLFVARTIITKASLVFRGPIEITESQLILLKSFHVRLMSIVLDVDVDPSTTPWDPAKAYLFVPVGAEKCMDLLREIDWTLVNSIVNSDAWNNPLQRARPDVYLGTNERTLGGDRREYGFGKLRHGTAFGQKAHPTYGIRGAIAEFDVVKASGLVPGRGWGHFNDYQNKGKLFMADSCWDAKDLAGMVVTAAHSGKRFYVDSICYNMNAENSFPRKEGYLGPLEYSSFADYYKQKYGVELVYKKQPLIRARGVSYCKNLLSPRFEHSEASNGEFSENLDKTYYVYLPPELCLVHPLPGSLVRGAQRLPSIMRRVESMLLAIQLKDIIGYPVPANKILEALTAASCQETFCYERAELLGDAYLKWVVSRFLFLKYPQKHEGQLTRMRQQMVSNMILYQYALNKNLQSYIQADRFAPSRWAAPGVLPVFDEETRDSEPSIFDEEFTPSSELQKNLYDDYDGDSMQEDGEIEGDSSCYRVLSSKTLADVVEALIGVYYVAGGKIATNHLMKWIGINAELDPQEIPSSKPYNIPESIIKSINFDTLEGALGIKFQNKGLLVEAITHASRPSSGVSCYQRLEFVGDAVLDHLITKHLFFTYTDLPPGRLTDLRAAAVNNENFARVAVKHKLHVHLRHGSSALETQIREFVKDVQEELSKPGFNSFGLGDCKAPKVLGDIFESIAGAIFLDSGCATSVVWKVFQPLLDPMVTPDTLPMHPVRELQERCQQQAEGLEYKASRTGNVATVEVLVDGIQIGVAQNPQKKMAQKLAARNALVVLKEKETAAKKDTEKDGEKKNGSQFTRQTLNDICLRRQWPMPQYRCINEGGPAHAKRFVYAVRVNTSDSGWTDECIGEPMPSVKKAKDSAAVLLLELLNRNYRGKPDGK

SEQ ID NO: 43812 - protein, 61 aa, Zea mays
  Coding DNA Sequence Number=SeqID_437
MSREWESPRRADTVASAEKDSAACAAPTAVPLDRVRLTGSQVLQKAPQETPLRPTQGSDSG

SEQ ID NO: 43813 - protein, 75 aa, Zea mays
  Coding DNA Sequence Number=SeqID_438
  Subcellular localization annotation: CTP_CleavageSite=44; ConfidenceScore=5.36e-01
MAAPMAGAPWPPGRAPRRPPGCAPAPAARPAAPPAAQPAAGRARLAAGRPRPPGQPPPPRALAWPPVQPGRFNRP

SEQ ID NO: 43814 - protein, 132 aa, Zea mays
  Coding DNA Sequence Number=SeqID_439
MREHEPNLLSRTQTIEKQWHKFAPAGYPRGNGSSIEKGCKNGRMSALGWCDIVAPAEGSLRRYIPIDAEKLQPQQGSSTHVSQVQPSPVPTLIRQGKGIEIYSCDLPLFSHPVLKVLTERYSGNSLSPLKYH

SEQ ID NO: 43815 - protein, 18 aa, Zea mays
  Coding DNA Sequence Number=SeqID_440
MEGVVLLVAMELGLMVGL

SEQ ID NO: 43816 - protein, 16 aa, Zea mays
  Coding DNA Sequence Number=SeqID_441
MARKMLIDGEVAAVAG

SEQ ID NO: 43817 - protein, 381 aa, Zea mays
  Coding DNA Sequence Number=SeqID_442
  Gene Ontology: Mol. function=transporter activity; Cellular component= intracellular; Biological process=transport
  Homolog annotation: Hit_ID=Q7F8U2; Match level="QueryCoverage=45%, HitCoverage=31%, E-value=5e-78, Identity=79%"; Hit description =Putative phosphatidylinositol-phosphatidylcholine transfer protein
  Pfam annotation: Domain name=CRAL_TRIO; Domain location=35-206; Score= 95.1; E_value=2.3e-25; Accession=PF00650.11; Description=CRALTRIO domain
  Pfam annotation: Domain name=Prefoldin_2; Domain location=244-346; Score=39.6; E_value=1.1e-08; Accession=PF01920.11; Description =Prefoldin subunit
  Pfam module annotation: Pfam domain module=CRAL_TRIO::Prefoldin_2; Domain location=35-206::244-346
MTGHCGASGGGKGNCFSIVQDFVFEELDDVLRYYPQGYHGVDRESRPVYIEKLGMVDPNKLMQITSVDRYIKYHVQEFERAFRERFPACTLAAKRHIDSTTTILDGFKNFSKTTRELVHRMQKIVATIIPSGFKWIWNSVKGFLDPKTSSKIHVLGLNYQSMLLEVIDSSELPEFLGGSCTCSDKGDLLVFFPAALWFVWAYIKLGVGISGEERREGWMWLLAMVLSSPCLVLIDHGHFQCNCISLGLTLGAIAGVLSRNKLVTATLFTLAIIHKQELELLSDGANVYKLIGPVLVKQDLVEAKANVKKRIEYISAELKRMDRALKDLEEKQNNKKESNIPDVYPFQNHSWQYNFCYNILCVEIKVAVRVRIVLRRPGTYA

SEQ ID NO: 43818 - protein, 247 aa, Zea mays
  Coding DNA Sequence Number=SeqID_443
MTIVPFDYIDSGILKNDTLNGKADRAEGLLRLWDTDTSLITFRESTLGGFFDLQQMSWNELPPHRKGCKMMNSKQLTGDHCTSSDNDLRHGRLDSSSDCPRANATVKGPLPVSPHGGREQAIKAKEPEVCPLVAPTVSSAEATTSAVGSLTYGGHHLSTDDSGHLRTDAAPANGGHPSAHKEVLAPVLATGVRTRPSRDADAALAAYDVLYDPPGVAGGARRAMDTADLRTAQPSPVQWMDYHTLTR

SEQ ID NO: 43819 - protein, 120 aa, Zea mays
  Coding DNA Sequence Number=SeqID_444
MSRLLGTTGPVQRLEAAPCMTQWCQLRATVTGQSAVGIDATVGLTTGGQAVIAAIDVRKQRSNHQPGPGPTYRLASSPEAAGDRETGHFEGVLRSEGNGPRALLLIRGLKVAPRGVRRLP

SEQ ID NO: 43820 - protein, 117 aa, Zea mays
  Coding DNA Sequence Number=SeqID_445
MPPPPRHHILDKGCRSRRLLPVFVPHQLRHRLAQWLLHVHEDVSHHARIIVFVVVGRPVRLPCLAAFALFFHPNLLPPPKVAAASGPMLVDAGMPVSSIPLLLYETLEVGEARDGGL

SEQ ID NO: 43821 - protein, 219 aa, Zea mays
  Coding DNA Sequence Number=SeqID_446
  Homolog annotation: Hit_ID=Q7XAX9; Match level="QueryCoverage=20%, HitCoverage=6%, E-value=6e-17, Identity=93%"; Hit description=HDA1
CDYVTRLEAARKAVELGGGDVGPLRSSQGPCRSRALPSSLLQPGPLPLTRPALISAPARALAMPPHAPKEDSWYSNVLYLGNEDEVPILTMTCPASDIERYKSGELRLAPSSLILPKDVLGHRRRPMSPKASPRKHPSAGTKDEFWVWHLPADQKTRPSLGGVVQAVSPPSVSGSCGRSSADPYDVPEFGWRDIRRYKQFRSVDTNISTGDDSALGQRL

SEQ ID NO: 43822 - protein, 30 aa, Zea mays
  Coding DNA Sequence Number=SeqID_447
MDAELYRECLRRAKYIGHQCCKGPYQSYSI

SEQ ID NO: 43823 - protein, 162 aa, Zea mays
  Coding DNA Sequence Number=SeqID_448
  Subcellular localization annotation: CTP_CleavageSite=46; ConfidenceScore=5.29e-01
MQGKVNCYCLARVQLFVLHPGDGRAVRGWLLSPTLRKGRTSTTRVRSAASVVSCSVPGMLAQLALAPPPTVPPAAWFGRGCPSIARATVAPRNLRPLCDELKPEAAVSARTEAVSARKEASSAWEQVASQAKEVQLRQLELGKVIRERDQSRSHAAEAEQFV

SEQ ID NO: 43824 - protein, 86 aa, Zea mays
  Coding DNA Sequence Number=SeqID_449
MAVREVPEPCRSTAGGAAGILLTSPYFRRGLRTTDVMDARGEPSLPATGSYPGGWHSSRSGASDAVFLSGRSVKGRSDRGHFDLAD

SEQ ID NO: 43825 - protein, 57 aa, Zea mays
  Coding DNA Sequence Number=SeqID_450
MESHDLWAERESRLVGGNENDGFGIGYGNGCPHCNHCSGEDEAVEGDFQEFQDYDEF

SEQ ID NO: 43826 - protein, 64 aa, Zea mays
  Coding DNA Sequence Number=SeqID_451
DALLGHLGSDQWRVMIFGQNGNHGLWRYFGTGGYEIDGFGYDYDAVEDEAVEGDFQEFQDYDEF

SEQ ID NO: 43827 - protein, 43 aa, Zea mays
  Coding DNA Sequence Number=SeqID_452
MARMLRWLPPLGRLPGVEVVTAAGSSLGSQVVRPDPLDGGSRY

SEQ ID NO: 43828 - protein, 169 aa, Zea mays
  Coding DNA Sequence Number=SeqID_453
MQAACNCTTGMHPFDSDASSMEAQAHTSCNRRADYYVQKTALPLTPMSRLLDCGTGAATRGNPVHGPTAPTEHIGHRAGGTFGRRSGRCFTSAMMTTSKKVRHIVQFRILFLFPFLSLATGTGKGDPPKGIFLREGSGPRALLLIRGSKAGPSEGFDCHPRALGPRAHY

SEQ ID NO: 43829 - protein, 15 aa, Zea mays
  Coding DNA Sequence Number=SeqID_454
MGTNGHLDLDTGGKS

SEQ ID NO: 43830 - protein, 143 aa, Zea mays
  Coding DNA Sequence Number=SeqID_455
MNVNSGFLNGELVDEIYVRQSPSFIIVGFEDKVLLLDKMLYKLIAKSLQNSIHIEGAMHAVSLAHSIVPACMTVQALQPFRKKISWVSECNKLWEGAQQASPIRFRQRCHRVPSCPLGRWIGRYLDCGLGLWRCEILEGGCFI

SEQ ID NO: 43831 - protein, 105 aa, Zea mays
  Coding DNA Sequence Number=SeqID_456
MVKNFGSKTVQIAVNAVVTSHLLVCLYSAAARELSPLLEGDVDPEDTKSQWKCFRLWDNYCVKNKRCVDECLGVEGKGYTHGHCELWTCVCCKKNGEDEILAPSG

SEQ ID NO: 43832 - protein, 146 aa, Zea mays
  Coding DNA Sequence Number=SeqID_457
MGKSNKRKREPTPPSEDFGDSEYSEEEFSSESEGSPAPVSPLASSDDSDDSQGIAAEVWTYIRAVERSGLEGSDESEFSSDEEDSDGGEDEDDDDDDGDDDDGGDDDGGDGDGDGSGSDRGSDGGDGSKGSTRGGSSTGSSSKANG

SEQ ID NO: 43833 - protein, 308 aa, Zea mays
  Coding DNA Sequence Number=SeqID_458
  Gene Ontology: Mol. function=translation initiation factor activity; Cellular component=transcription factor complex; Biological process =regulation of transcription, DNA-dependent
  Homolog annotation: Hit_ID=A2Y747; Match level="QueryCoverage=69%, HitCoverage=63%, E-value=2e-54, Identity=53%"; Hit description =Putative uncharacterized protein
  Pfam annotation: Domain name=TFIIB; Domain location=108-191; Score =26.3; E_value=2.7e-05; Accession=PF00382.10; Description =Transcription factor TFIIB repeat
  Pfam annotation: Domain name=TFIIB; Domain location=222-292; Score =10.2; E_value=0.0014; Accession=PF00382.10; Description =Transcription factor TFIIB repeat
  Pfam module annotation: Pfam domain module=TFIIB::TFIIB; Domain location=108-191::222-292
MDCSSAPIDTHNSAAEEAALPRRIPSAPEASSSGLGLQWMRGSVTLSLRTPDQEPAAVALSLNTRHPQGHLQEELATAAAAAVVHEGAQAQAQQPLGERDMPEEHRAIADMAARLGIAAGARDRAVEVFMRMEERKGKSKSHHYYTKGAGRSGDALYAACLYVACRSAGAPRTFKELAAATRDGPAARKDIGKLIALIRKRLGDEAGGEAMDMGVVRAADYVERFGSLLGIGEGEVRAVQEAARRMQDHLDVRRNPDSTAAAIVFMAMERRAGAGSSIRDVSAATGVAENTIKQAYRELYPHADLLFP

SEQ ID NO: 43834 - protein, 162 aa, Zea mays
  Coding DNA Sequence Number=SeqID_459
  Gene Ontology: Mol. function=kinase activity; Cellular component =ornithine carbamoyltransferase complex; Biological process=amino acid metabolic process
  Homolog annotation: Hit_ID=Q6QP54; Match level="QueryCoverage=35%, HitCoverage=28%, E-value=1e-20, Identity=67%"; Hit description =Putative kinase
MALPVDLAGLRPRLGDVEAPPKPRSKARAESEPWGRAKRSSSSFGAEPESEPWVGRSGVRRLLGLSPSPSSRVGRSGVRRLPDPSPSPSPGSGGAEFAVFRDLARVRALGRAERRPDCLSVSLCQVALQSAQAALSFCQAGQWSGEVTAVTSALPGGMRQDK

SEQ ID NO: 43835 - protein, 81 aa, Zea mays
  Coding DNA Sequence Number=SeqID_460
MATATAAPASVARRRIWGHARDGGSLRRDGGSGDTLAMADSCGATANLGTRRGIGSRGHARGGGPMRFIVIDLNIDIKIKS

SEQ ID NO: 43836 - protein, 114 aa, Zea mays
  Coding DNA Sequence Number=SeqID_461
PDVDLAADERRLGGAQIRQILREGSGASRETPWSQKKKGGQEQRPRRQPSSRPVRGQRENPLSRREDNAPMIRSSNGSHTRNDRPANHSPRRINSAAGQAAPLAGEADDASPSP

SEQ ID NO: 43837 - protein, 175 aa, Zea mays
  Coding DNA Sequence Number=SeqID_462
MKKAILDIELMDRLVPGEGENDMNGGELDNGVEGLVVLHSGTLCETLKDPTSLVASSEPSEGVVPNRAKWGWVTHRLGGKAIENIGSNVHGLCPTTSGKRCLKEEAVNHGCGGVNSTFDSAVLRGSVGARESQLNTMGKKGARGGVVELTAVIALEATNQATELGGDPSEEVVRV

SEQ ID NO: 43838 - protein, 237 aa, Zea mays
  Coding DNA Sequence Number=SeqID_463
  Homolog annotation: Hit_ID=Q6JAD6; Match level="QueryCoverage=100%, HitCoverage=35%, E-value=9e-33, Identity=61%"; Hit description =Putative uncharacterized protein
MPRTKNVSAPGGGDDEDPPRPFRQVKGKTVYLEQQEGRKKRRMDRAARAAAAAAAAAAEQIEKGAQLQIPSDQIAYRVRRHAYRPHSSAPTTPSIASTHPPTSPAPVTPAPSTTSSIPTTSTTPASTAPSAPPIPPARFRERDETEVRPLAADPRLFDLQRATAARNPAAVDPFSTRIQESFYRAQLSAQIALRAHQLLDLPAFLLAASADSKVHLSYLPGLLTLLTTSGRYVEEWV

SEQ ID NO: 43839 - protein, 341 aa, Zea mays
  Coding DNA Sequence Number=SeqID_464
  Homolog annotation: Hit_ID=Q6JAD6; Match level="QueryCoverage=95%, HitCoverage=45%, E-value=1e-40, Identity=36%"; Hit description =Putative uncharacterized protein
MDFLICEIENTVLDGLRAHRQLPYAHYLCHIFAQLIRPPQFQGTLEASRLIFGSYRPAPEDPMPAPALVIDTQAEDTTFHQFETQDATVHDDDDDDDDFGVPPPPPPPMPPRTHDHEAGSSSDVAPAAPPAIDPALAVILQTLTQQQAHLAAIQQQMSERMLSMFQTIQDRQDTLQQQLLQDRAENRAFMTLMLQHTGVLIPPVQSAPPPPLQAPIVPAIQLGPPLPSVGLSSSPLQPVTLVFTSLVISSVSPQPPVPPASAVTTAVVVVSVTSSAPAAPAAQLPSESVPALASTADPGFETDSGPQLALAQGKGFPTQKPESARFPSGILVAHRTMHETV

SEQ ID NO: 43840 - protein, 62 aa, Zea mays
  Coding DNA Sequence Number=SeqID_465
MAAVGALQRGVGGGSALQRGRWVAVVVRMEARHECGGHDLFQASRVSFSVSSWVRHFSLEMG

SEQ ID NO: 43841 - protein, 39 aa, Zea mays
  Coding DNA Sequence Number=SeqID_466
TFGAPKHNPNSGGARSQFRELPFPLRRISTASSLDPFDA

SEQ ID NO: 43842 - protein, 318 aa, Zea mays
  Coding DNA Sequence Number=SeqID_467
  Gene Ontology: Mol. function=methyltransferase activity; Cellular component=mitochondrial outer membrane; Biological process=metabolic process
  Homolog annotation: Hit_ID=Q84M50; Match level="QueryCoverage=80%, HitCoverage=88%, E-value=1e-93, Identity=58%"; Hit description =Putative endosperm C-24 sterol methyltransferase
  Pfam annotation: Domain name=Methyltransf_11; Domain location=22-118; Score=46.2; E_value=1.1e-10; Accession=PF08241.3; Description =Methyltransferase domain
  Pfam annotation: Domain name=Sterol_MT_C; Domain location=127-256; Score=173.2; E_value=7e-49; Accession=PF08498.1; Description=Sterol methyltransferase C-terminal
  Pfam module annotation: Pfam domain module=Methyltransf_11::Sterol_MT_ C; Domain location=22-118::127-256
MDANKYYDLVTGFYEYGWGDSFHLAGGYPGETSREAIKRHQHFLALQLGLKKGMKELIFSAGLSEQCCFLKGDFMDMPISDNTFDAAYAIQATCHAPDAQGVYSEVYRVLKPGQYFALDEWCLTDRFDPNNAKHLAIKAEIELGDGLPDIRTTRQCVQAMKDAGFEVVFAKDLAQVFPCPWYRVMDPTYFSWAHFQCTRPGRIVTRAIVNTLEFLRIAPAGSMGAYNVLMSASDGLLKGGREGIFTATFFVLGRKPLKEVDIFYALLLIAPFLGNTTLIGPMYCLDLSYENSSIKSILHLMYDPVFYANSEIKKHSRS

SEQ ID NO: 43843 - protein, 56 aa, Zea mays
  Coding DNA Sequence Number=SeqID_468
  Subcellular localization annotation: CTP_CleavageSite=30; ConfidenceScore=5.70e-01
MKTSDWKGRQQMSHSSASFSTDSVTVASSSSSNPASSSSSTTTLALFGVPPSEEVV

SEQ ID NO: 43844 - protein, 358 aa, Zea mays
  Coding DNA Sequence Number=SeqID_469
  Gene Ontology: Mol. function=RNA-directed DNA polymerase activity; Biological process=RNA-dependent DNA replication
  Homolog annotation: Hit_ID=A2ZFH7; Match level="QueryCoverage=62%, HitCoverage=43%, E-value=5e-27, Identity=31%"; Hit description =Putative uncharacterized protein
MPIVGLADDGLGFYLSHFAKPLTKKPKRVFIGLVKVIEGLVSAEDLERDFGFHFPWNKMWKATKCHSGFLMQFPSQERLEEMISFPELKMKMSGAKIVVVPWSSRAKPKSRLHTVWVIAENVPEELQNYQSICEIGSMIGAVEEVDLMSLDSDDIVRFKIHIKSVAMIPPVVEVAVKPFLYDIFFRIESICDEGWNDDSVNLGKRASVQIHGSSDPLFDKSGKKPKNLDDVTLEDDPNPNLKIGESSSQGKEFAKMSDPNLVPSKDMSDEEQKLDNLSDEKVDFDPNEDDLLSSQELEEFAKDMEEDQTDFQSKIGAMISIPPMTILFMMGKTKSLWTCPLTRLMASEKALGWRRMMM

SEQ ID NO: 43845 - protein, 277 aa, Zea mays
  Coding DNA Sequence Number=SeqID_470
  Gene Ontology: Mol. function=hydrolase activity; Cellular component =integral to membrane; Biological process=G-protein coupled receptor protein signaling pathway
  Homolog annotation: Hit_ID=A2YQ22; Match level="QueryCoverage=87%, HitCoverage=65%, E-value=9e-99, Identity=72%"; Hit description =Putative uncharacterized protein
  Pfam annotation: Domain name=Abhydrolase_1; Domain location=1-236; Score=61.9; E_value=2.2e-15; Accession=PF00561.11; Description =alphabeta hydrolase fold
LFAVDLLGFGRSPKPANCMYRVRDHVEAIERTLILAGDGESQSLMSSFHLVSHSMGCTIALALAAKHPTRVKSITLVAPRASQVALNRLAEKKLWPPLLFGSAVMSWYEHVGRTVCFLVCKNHLLWEWLFSLLNLNRGVDFRVRDLTKHTHHSAWHTMHNVICGGAALQDANLEAVAAAGIPVQVLHGADDQVVPVECGRHVKAKIPRAKLRVMERRDHSTVVLGRERGFAEELKAFWCASRSPVHVQDAEVRRGRSGPASAFMGQALKGYPTVKRD

SEQ ID NO: 43846 - protein, 458 aa, Zea mays
  Coding DNA Sequence Number=SeqID_471
MKILEAGRWLKGTNSHGVAFLQRRGGKTADIPHPGAWKPSWAESPPTHSKVLPYGAGAGSHMSCKPAQSGRSQTAVHGAYNRPAVTSDSPLLPRPTGERGGQPCRRHATAPSGRASPTPNTPSMEARAHASCNRRAECFVHATAPPLAPLPCLLDYGANTATRGDPAHDPAAPAWRGGQCGQKWAGSNGGGRRAGAAATSSSKLTSRPRAAREPSLTARSGRRFAFTIMTASEKGPGKGDTPKRILPREGTRLRASLLIRGSKAGPSEGFDSRLRSRGPYTHYWSEVRRPAPRKGSTAASGYSGSASITDQGFEGWPPKGDRVRQITRKYFWACLWAPSRPLTNGARTSTRITRLQLTGDTMFGAHRGQHGAFPPLLLAERRRRGVCKKVESVPDRPLALCRGSGAALANPAPAKPLTASTYQPENLGPDRTPGLRPARMRDDQTSRSITRGIKTSEE

SEQ ID NO: 43847 - protein, 304 aa, Zea mays
  Coding DNA Sequence Number=SeqID_472
  Subcellular localization annotation: CTP_CleavageSite=51; ConfidenceScore=5.34e-01
MSSSSLKRRVFPSSKPPDGGYPPPFRLLVGGTQLHGSWYLSAIVRLQGFSSAGPAVPPCRRSPRMVTAGFWVGKSKPGCDLGPTLSFKDVHHPRWGGSHAEPALYLPRGSAGRPFPRRLGVEALAGPADGADLDNVGLIDGGRRHLQRVGVVGRASGGPSCRRVTAASGRRPTRLGGFEWGSAGGSVSPAIGAEAEAAREVLVTDGITATTRAPGHRAGVLVLAPRASAGARARSQQRRPTVAVVRTGGGEPAVGLLLLRRPSPWSGVESLGPFGLVVWGSSSLVKETPRPPFGGPRPGVAISV

SEQ ID NO: 43848 - protein, 265 aa, Zea mays
  Coding DNA Sequence Number=SeqID_473
MKLKQFASSCGWCKVILHCDGNANSELGGVAALHTPCSSSSLTLLIEAAKLTSTATRLFDDHRDEDFYGLPRKYSIVARVEVKFPIEPHYRDRQHFILSDINGAKIEAITYVSVTVKHFNNLLHEKHVYNMHNVKFGLHPGEFNFRHLNGPMELYFNQQTIVEPYTVPIQMPPFPKHIFFNLDDIAELPNRTLVDIMAIVVHMDTIHRTMWGPFRKIVIMDARVPRVFGSYRNTLQSVPSQHPLFWTNSKSFGGAEQPSVCCYIS

SEQ ID NO: 43849 - protein, 155 aa, Zea mays
  Coding DNA Sequence Number=SeqID_474
  Homolog annotation: Hit_ID=Q1KSA7; Match level="QueryCoverage=100%, HitCoverage=100%, E-value=2e-66, Identity=83%"; Hit description =Putative complex 1 protein, LYR family
  Pfam annotation: Domain name=Complex1_LYR; Domain location=65-134; Score=70.3; E_value=6.6e-18; Accession=PF05347.6; Description =Complex 1 protein (LYR family)
MAVARHGGRGTALLLRARWQPAGSGARCIHEGPDTIEELLDRHLVKKPAAGPDEESAEARRRLTSSRREALALYRDILRAARLFAWTDDRGVPWREVLRANARREFEDARGERDPEVVARLLIGGRDAVQQALDRLADASRRAIETEEAKRRGGA

SEQ ID NO: 43850 - protein, 270 aa, Zea mays
  Coding DNA Sequence Number=SeqID_475
MEGFMSFASLVTCEGAMNALSREGCQHYEAFDRSDEDFGREIFKVEDPVVKDSAGALFDRMWGAHGREAVRKRSDRAREQMARAEVVEDLEGLNGARPEAEVDPVLPGAEVIPEAAEASSAGPVPTVTGEGSLPAPAPTAEGGGAGSGGSDGGGRAFVGGLAEESSDEDLDYFAALDVAAAEASPRVTDAEVLPSPSAGRRRRRAVVKRRVSGVDGGRLRVGRDGRRELLSSPVGVSVGEGELRSLFEGEELRMMLFNYREMGIILKVEP

SEQ ID NO: 43851 - protein, 445 aa, Zea mays
  Coding DNA Sequence Number=SeqID_476
MSTEDDVDFSVDAGECSAPSPFLLLRLSRFSGSSSWWGRQQRLEGSAVPDRVLEVSAVPKGVVHVLVVRTLGIEDVVQCSFASTGCPSGTRDMWFGGVNLVTRPLLPTLVGLLVRVASWCRWCRLRSSDEVLSPFVCGDVEVCLPEQLLRGSWCLLQYGSDEGRVIRSPVEVLDHCCFRNLRDMISHGLEPFEVRLESLIPSAPDGFEVPWLRRLVGEGLEVGDEAPTEVTLVVDAVSGGPGSGGIDGQPASRVLLRLVLVDVGDFEIARGMSERQKMISCLSEQSPIALGVWSPGEAIGYPSQHSTDLTQCVHGSGQVGVQVPSEKRVLSTLSRLLFGLLLSLPTITSARIPPFYEDPFFWSFSHLRDLISRHRLRRVPLSGFMMSSDISASVPSSARLPLKRFLPWHGWFIVGDGGRFRSPPDEEDVGVEWNCRSDKLLSILL

SEQ ID NO: 43852 - protein, 63 aa, Zea mays
  Coding DNA Sequence Number=SeqID_477
MESDGGTAVGAVGSLLTSSCFLGVAQAALSFCQAGQWSGEVTAVTSALPESARQDKGVRPPLH

SEQ ID NO: 43853 - protein, 344 aa, Zea mays
  Coding DNA Sequence Number=SeqID_478
MAERYQLPRSCVPPTTRQKDGGYRPSGGLEGGKTRCIREHEDMVAFQGGHPPFKGDSPYLRPQPSQAESSPTRSKVLPCGAGAGSHTSCKPAQSRRSQTAVCGAHNRPAVTSDSPLLPRPMGERGGQPCRRHATAPSGRASPTPNTPSMEAQAHASCNRRAECFVHATAPPLAPPPHLLDCGTNTTTRGDPAHDPAAPAWRDGQCGQKWAGSNDSGRRAGAAVTSSSKLTSHPGAAREPSLTTRSGRRFAFAIMTASVKGSGKGETPKRILPHEGTRLRASLLIRGSKAGPSKGFDSRLRSRGPYTHYWSKVQRPATRKGSTTASGYSGSAPTTDQGFEGWPPK

SEQ ID NO: 43854 - protein, 224 aa, Zea mays
  Coding DNA Sequence Number=SeqID_479
MGPRPFARPSVLLVDPGDICPPQAPNLCVDFEIISPKIPEISALPLANALEINILFSGVKDSLGACLWARARKAEVRRTTPATSGSASPPLEDFGNSEYSEEEFSSESEGSPVYTSPSASFDDSDDSQGIAAEVWTYIRAVERSGLESSDESEVSSDKENSSDSSEEESGGDGDDEGGGDVGGGDDGGDGDADGDGGKGDDNDDGGDGKSGSGSSKASGKAPLA

SEQ ID NO: 43855 - protein, 46 aa, Zea mays
  Coding DNA Sequence Number=SeqID_480
MENELGRGNGKDRTRNENGRTEWQNKKWGMRMSFAGSGEWEKQNKK

SEQ ID NO: 43856 - protein, 48 aa, Zea mays
  Coding DNA Sequence Number=SeqID_481
  Subcellular localization annotation: CTP_CleavageSite=30; ConfidenceScore=5.13e-01
MSLPAHALLSVTRARPRRRLATAGSPRRRRATVRGPRHRERDAPPALI

SEQ ID NO: 43857 - protein, 199 aa, Zea mays
  Coding DNA Sequence Number=SeqID_482
MAVMGSTSEKMYLCQDPLLVSISAKQSLIIEKPYLDSLNQHTLESLFFSRSSEVFGTRTGACGPNNLVVLPQGYRFRLPLAFHNLTISANVFALVLDVSIEGLSQYMLCPLGKPYPETLALVWKCLPIIADMDMGLPASPLLKVFRSESRDEILLRGEGCNTPGVYIPLDNEYGFKHMISVNKTDTKEIFILKIGESDG

SEQ ID NO: 43858 - protein, 277 aa, Zea mays
  Coding DNA Sequence Number=SeqID_483
MRNRLKMMRLMIKRMSHLKRRSMIKGEMSMIKIRKMNRVKDRHTQESTKRFKEITPVEDALKDSDWVLAMQEELNNFTRNEVSLLHSNSLSRTVDWDPTGRTLPNLRYTTELGLHGELRGSRDQGELAAGRSSAGNRKRRAGRKKLWGDGTSRGSAAQNPSQREAGSRDTEEHGEEDEQGWASSGSKTPWEGERAGGSRTQQQARYQARPWERARRVTTRCREPAGRAWEREQGCDGWRGRSAMGRTTAGWAAGFYPPAAGDLFSPERWPDEDEERR

SEQ ID NO: 43859 - protein, 82 aa, Zea mays
  Coding DNA Sequence Number=SeqID_484
KNPIENALARAAKNLLSLGAPNCPVVHRTVSGELVALGNSSTAYGYNSPDCPVCTGLSGEPTVGRANGRPRDLRGTRGRANG

SEQ ID NO: 43860 - protein, 56 aa, Zea mays
  Coding DNA Sequence Number=SeqID_485
MARWLSRGSAKTNAVTEPPNKSYPTKEKTLKGMLVIWESRVSRRVIKIKEGNAGIV

SEQ ID NO: 43861 - protein, 71 aa, Zea mays
  Coding DNA Sequence Number=SeqID_486
MAVSVCVTKMSRHMKYYLRFVLYLKADEVLIEVLLTQGSVIQPIVVVRENEMVFVTEREMCPWAISKYFGD

SEQ ID NO: 43862 - protein, 274 aa, Zea mays
  Coding DNA Sequence Number=SeqID_487
MVTTSSMVGRSEPGCSLCPALSFKDLHYPCWGGGQAEPELYLPHGFVGHPLLQHSGERVLTGLAEGADSDNAGLVGRKHRQLQRIGLAGSAGSGSAPGAPSRRTSGRRAARTGGSPKTPCTARAAFVFLGCPAFALVRRLLRGGRCSPVREDPSGDLPVGRWLPSSTLRWWRLKKSSLPTRSPPPSALRASGSLALIACPRPSSGDMGEELVAAASALRSSLLLFGHSERGSLSLLPERASASHQGFCRPAGPPMWGVVRTCGSGTGVPFVMAP

SEQ ID NO: 43863 - protein, 222 aa, Zea mays
  Coding DNA Sequence Number=SeqID_488
  Gene Ontology: Mol. function=protein-tyrosine kinase activity; Cellular component=chloroplast; Biological process=protein amino acid phosphorylation
  Homolog annotation: Hit_ID=Q10S84; Match level="QueryCoverage=45%, HitCoverage=25%, E-value=5e-42, Identity=82%"; Hit description =Serine/threonine-protein kinase Cx32, chloroplast, putative, expressed
MSSAIEKRVVGCSVPYAMRNCCGSADADVNPPSRPPTEGLPGFSHTLLAPSLRSSSRLVFRRHAVGRGPLPPPKPSDGGGAKQEKGGGDGPDQCPGLGRVLEAPRLREFTLAELRVATRGLKPEMVLGEGGFGPVYKGWVDERTLNPAKSNAGVIVAVKKLNPESFRGLQEWQSEVNFLGRLSHPNLVRLLGYCGDWRGQGTAPGGVRVHVQWQPRKPPVQK

SEQ ID NO: 43864 - protein, 902 aa, Zea mays
  Coding DNA Sequence Number=SeqID_489
  Gene Ontology: Mol. function=zinc ion binding; Biological process =regulation of transcription
  Homolog annotation: Hit_ID=Q10S83; Match level="QueryCoverage=98%, HitCoverage=96%, E-value=0.0, Identity=72%"; Hit description=RWP-RK domain containing protein, expressed
  Pfam annotation: Domain name=PB1; Domain location=817-900; Score =83.4; E_value=7.2e-22; Accession=PF00564.15; Description=PB1 domain
  Pfam annotation: Domain name=RWP-RK; Domain location=595-646; Score =113.4; E_value=6.8e-31; Accession=PF02042.6; Description=RWP-RK domain
  Pfam module annotation: Pfam domain module=PB1::RWP-RK; Domain location=817-900::595-646
MEQAPQTHGGGGLLACGVMEDVAVGDLDLMEELFMAAPGFDFSDFSQPGAGGESPGVCFSPLFDICSTTTTATPPPPPPSGDDNRDQPTPPRRGWVFQPRLEVDATVKERLRRALERIASLSQTQPGELLAQVWVPTVIGDRQVLTTCGQPFWLDCRNERLANYRTVSMKYQFSADETARTDLGMPGRVFVGRVPEWTPDVRYFSTEEYPRVHHAQYFDIRGSVALPIFEPRSRVCLGVVELVMTTEKVNYNAEIQNICSALKEVDLRSSDVSSDSRAKVTDTSYRAIIPEIVDVLRTVCETHKLPLAQTWIPCICQAKRGSRHTDEKLKYCVSTLDEACYVRDLNVNGFHEACSEHHLFRGEGVVGRAFATNEPCFSEDITASSKIQYPLSHHAKLFSLRAAVAIRLRSISTGSLDYVLEFFLPVDCIEIEEQRAMLNSLSITIQQTCYTLRVVSLKELVDEGSIETSALTPPEYDKSMHENIDEVCSGIGVPARTASLETSEEVSSWIASLVCAQNKGVKEMDGDLPFGFSKQEDEGFSVTAGWHTSPVIEPEGSIFSGFKQHEEYKVKEVTCLRDPSSSNLEKTVEKRRTKMEKTVSLEELRKHFAGSLKEAAKNLGVCPTTLKRICRQHGINRWPSRKIKKVGHSLKKLQMVIDSVHGSEGTVQLSSLYENFTKTTWSERELQGDATYPLSEEKGPLEPSVPDRYCEGRFTSHTSGSNSLSPSCSQSSNSSHGCSSGSKSQQHVSAPQLAVKKEVFMEENQSSTLLKAASHAELQMLPEERLVTLPRSHSQVLLSEQKPVENITGMQMSKPDSLKIKAMYGEERCIFRLQPSWGFEKLKEEILKRFGIAREVYVDLKYLDDESEWVLLTCNADLLECIDVYKSSSTQTVRILVHSSDQ

SEQ ID NO: 43865 - protein, 213 aa, Zea mays
  Coding DNA Sequence Number=SeqID_490
  Gene Ontology: Mol. function=structural constituent of ribosome; Cellular component=ribonucleoprotein complex; Biological process =translation
  Homolog annotation: Hit_ID=A2WXX3; Match level="QueryCoverage=96%, HitCoverage=68%, E-value=4e-86, Identity=77%"; Hit description=60S ribosomal protein L5-1
  Pfam annotation: Domain name=Ribosomal_L18p; Domain location=27-170; Score=230.0; E_value=5.3e-66; Accession=PF00861.13; Description =Ribosomal L18pL5e family
MGGFVKTQKTNAYFKRFQVKFKRRRAGKTDYRARIRLINQDKNKYNTPKYRFITNKDIIAQIVSASITGDIILAAAYSRELPRYGLEVGLTNYAAAYCTGLLLARRVLKIRDLDQEYEGNVEATGEDFSVEPAEERRPFRALLDVGLIRTTTGNRVFGALKGALDGGLDIPHSDKRFAGFKKDDKQLDADIHRKYIYGLHVAEYMKVLYLGAD

SEQ ID NO: 43866 - protein, 113 aa, Zea mays
  Coding DNA Sequence Number=SeqID_491
  Subcellular localization annotation: CTP_CleavageSite=29; ConfidenceScore=5.38e-01
MAAWTPLPCRAPEKGTSRSSPGTRRRGARRGARRGAPSRSSPAEWWRAMDGPLPGNLGACVSIWEEKQGKGERGAGPTCKVSGPPSSEAFLSSLSQSQQPGIPRHGTGIDLHN

SEQ ID NO: 43867 - protein, 138 aa, Zea mays
  Coding DNA Sequence Number=SeqID_492
  Gene Ontology: Mol. function=kinase activity; Cellular component =ornithine carbamoyltransferase complex; Biological process=amino acid metabolic process
  Homolog annotation: Hit_ID=Q6QP54; Match level="QueryCoverage=58%, HitCoverage=28%, E-value=2e-10, Identity=48%"; Hit description =Putative kinase
MAPPVDVVGPCPRLGDVEAPPRSRSSLSSEAKVESEPLGRARRRPSAEARAESELYGRAKRSSSSSGAEPESEPWVGRSGVRRLPGLSLSPSPGSGGADSRSGAGGAVLLSGRLVERRSDCGHFGSVDWRSCVRIKVS

SEQ ID NO: 43868 - protein, 158 aa, Zea mays
  Coding DNA Sequence Number=SeqID_493
  Subcellular localization annotation: CTP_CleavageSite=44; ConfidenceScore=5.13e-01
MAVSTPGQGLGWPGRGSPPRAPRWQAFRPPRWATEQGLGELEPRVGAGRASRPAAARRSYWRGGQGVATRSYLAWACLQGPEVGWGQGRPWVLEGEGWSRTFRDGAAAAPLRPGCSRPTDTILEDLLGRLVRTHTRFLYGTLILLADVDRIVFIGVSD

SEQ ID NO: 43869 - protein, 163 aa, Zea mays
  Coding DNA Sequence Number=SeqID_494
MVCLGLGGRRKHTLQDNPILQARISIVEGSSSTLGVDYTFGEGLLQESGSSRRLGWSPRGLGQLSHEDISPARGLGRSTPASVPQTDDPARLRPTKSSFRANSASVRADTATPGFGSSKSGRGVPLTKQEKPRTARPTEPRDSYASGIRIPHSSPLYGATHAW

SEQ ID NO: 43870 - protein, 129 aa, Zea mays
  Coding DNA Sequence Number=SeqID_495
MCKSNKRKREPTPPSEDFGDSEYSEEEFSSESEGSPAPVWTYIRAVERSGLEGSDESEYSSDEEDSSDSSEEGGGGDGGDDDDDDDRGDGDDGDDGDDGGSRDGNGGSKGGNVGSSRGSNGGDSNKASG

SEQ ID NO: 43871 - protein, 152 aa, Zea mays
  Coding DNA Sequence Number=SeqID_496
  Gene Ontology: Mol. function=nucleic acid binding
  Homolog annotation: Hit_ID=Q2QRS7; Match level="QueryCoverage=28%, HitCoverage=11%, E-value=3e-09, Identity=67%"; Hit description =Retrotransposon protein, putative, Ty1-copia subclass
MAAGSRGTSKEVTAADEHMERQRQLLVAAGKMQVIKEFEELAIDGSNYLAWASDIKIGFASRGILHTINAPDANNPNITDIANHLSYSQAFGRPLFKVNPRWQQKIKIYEAHFNQATEKYKEIGCSNNKASAQQMDDMMIEYNSGDICGDLV

SEQ ID NO: 43872 - protein, 495 aa, Zea mays
  Coding DNA Sequence Number=SeqID_497
  Homolog annotation: Hit_ID=Q6QP51; Match level="QueryCoverage=40%, HitCoverage=76%, E-value=6e-08, Identity=31%"; Hit description =Putative growth-regulating factor 1
MRATAQRLRAFLHFRPDQRVKGQTAMQAACNRTRGAHPFDFDASSVEAQAHTSCNRRAGYYVRETAPPLAPVPRLLDCGTSAATRGDPAHGPTVPTEHIGHGSVSRGRRRDGRYGQKWAGSNGGGRRAEAAVKSSASSRRLLGQRENPLPRREDETPVSRSSNGSRTHNGRPDRRHLWQAKQATLHLRHNDRVKKGIGKGDTPKGILLREGSGPLAPLLIRGSKAGPSEGFNSRLRALGLRAHYWSEVRRSAPRKGSTTASGHLGSAPTTDQGFVGWPPKGSTAASDAERGMTLESHQREASSPRTPSKRDRVRQITRRVRLTAAKSGLGRHRKLRLARPQGSAPVSASDDELRFARPQGSDSALASEDDELRLARPQGSDSASAPEDDELRLARPQGSDSASAPEDDELRLTRPQGSDSALASDDGLRLARPGARTRPRPRKTDSTSTSEEPPPRPTQGSDRPRHRGAIITLPLASSSYEEQDRCPIWLTPVNK

SEQ ID NO: 43873 - protein, 261 aa, Zea mays
  Coding DNA Sequence Number=SeqID_498
  Subcellular localization annotation: CTP_CleavageSite=60; ConfidenceScore=5.64e-01
MVAFQGGHPPFKGDYPYLRPQPSRTESSPTRSKVLPCGAGAGSHTSCKPAQSRRSQTAVRGARNRPAVTSDPPLWPRPTGERGGQPCTRHATAPSGRASPTPNTPNMEAQAHASCNRRAECFVHATAPPLVPPPRLLDCGTNTATRGDPAHDPAAPAWRGGGASGRRSKRRFAFAIMTTPKKGLGKGDTPKRILPREGTRLRASLLIRGSKAGPPEGGSKAGPSEGFHGRSGYSGSVPITDQGFEGWPPKGSQPPQTPSKG

SEQ ID NO: 43874 - protein, 152 aa, Zea mays
  Coding DNA Sequence Number=SeqID_499
MGKGNKRKREPTPPSEDFSDSEYSEEEFSSESEGSPAPVSPPASSDDSDDSQGIAAEVWTYIRAVERSGLEGSDESEFSLDEEDSDGGEDEDDDGDDDDGGDGDGDGGKGSTRGGSSTGSTRGGSGKGSTRGGGDNDSTRGGGGGSSSKASG

SEQ ID NO: 43875 - protein, 46 aa, Zea mays
  Coding DNA Sequence Number=SeqID_500
MESHDLRAERESRLVDDDEDNDGFYDDDYAYGKEEGVEADLQEFED

SEQ ID NO: 43876 - protein, 46 aa, Zea mays
  Coding DNA Sequence Number=SeqID_501
MESHDLRAERESRLVDDDEDNDGFYDDDYAYGKEEGVEVDLQEFED

SEQ ID NO: 43877 - protein, 252 aa, Zea mays
  Coding DNA Sequence Number=SeqID_502
MEVRCQTRFYQNEDGFPKLLRACTVHLGIRSQPEYDGREFVEHGTEKCVVTVYIGSSPHHVEWSVTAAGHRFKDTCQVIVRKALRALCQIYEEEVVDTPLRFFPPFQRNRPVWMARMRALEEQQLLEDDSHIRVPHCIPAHPRCTMIARAEDAEKLNRKLHVDLTTAQARVAALESREVIDVEALKQAKDEHVQKLMEAYLVTHNQRRALWIQEPASSNPVQPMKAEDPRFLKVTRSLSEEIRRLGNYRKDP

SEQ ID NO: 43878 - protein, 130 aa, Zea mays
  Coding DNA Sequence Number=SeqID_503
MGAPDCPNNPRVADVGDDHEIPLLDDEQHGAAALHRVQVAAAPELVVHSGTCDHIGLFLEVELAVAKFLLIVDERPQRECLLLMVFVRGFQGNENEFCGEEGIGKAEQGMTECGMEETQGMADYYCSLNT

SEQ ID NO: 43879 - protein, 217 aa, Zea mays
  Coding DNA Sequence Number=SeqID_504
SDEGQLAVVAPTAGTVPKAGGDALGSGGEVSALVVVRDEAGAATHRLKGVTEALSQVTEALGQVADFASRAASGALTAAVSAEVERLRTQHADAVREKSASDSKCRKLTDKVAVLEKEKADLRRQLAAEKREANEAIAKQQAAQAEAKLARAEGNLAKELAEHLQERLNALESRAKGAEAAVEDLVVKDSTGALYDRMWGPHGREVVRERAETAMAQ

SEQ ID NO: 43880 - protein, 386 aa, Zea mays
  Coding DNA Sequence Number=SeqID_505
  Gene Ontology: Mol. function=protein binding; Cellular component =cytoplasm; Biological process=ubiquitin-dependent protein catabolic process
  Homolog annotation: Hit_ID=A2XBJ7; Match level="QueryCoverage=75%, HitCoverage=69%, E-value=1e-119, Identity=66%"; Hit description =Putative uncharacterized protein
  Pfam annotation: Domain name=Skp1; Domain location=90-164; Score =53.7; E_value=6.3e-13; Accession=PF01466.10; Description=Skp1 family, dimerisation domain
  Pfam annotation: Domain name=Skp1_POZ; Domain location=16-81; Score =7.1; E_value=0.017; Accession=PF03931.6; Description=Skp1 family, tetramerisation domain
  Pfam module annotation: Pfam domain module=Skp1::Skp1_POZ; Domain location=90-164::16-81
MSESELAVIKPEALKTYIWLQCFDGSIQQVEEEVAMFCPMICREIVKNGTGSSKNHAIALPERVNPASLSLILDYCRFHQVTGRSNKERKSFDEKFVRIETERLCELTSAADSLQLKPLVDLTSRALARIIEGKTPEEIRDIFHLPDDLTEEEKLEPLKNVNDDPRIRLLNRLYAKKRKELQERQKLKDVQVQKEEKDERSLDELLCFINGDGDMQDDVEYPFEDADLDDGLDPAMKEELDREVEDFARRLNSVWSESHIGGNGSVQRFPGFNHRNGDESSTSSRVSTADRWEGSGSGDLCSRKNHTFSPRAAVFARASAPHRRGYTVTRRLASPLLRRGARSPWRSVSGMPDADDAVAKRNRRPSDATKVALSSPFVVHRICDRH

SEQ ID NO: 43881 - protein, 462 aa, Zea mays
  Coding DNA Sequence Number=SeqID_506
  Gene Ontology: Mol. function=nucleoside-triphosphatase activity; Cellular component=integral to membrane; Biological process=transport
  Homolog annotation: Hit_ID=Q7FMW4; Match level="QueryCoverage=67%, HitCoverage=55%, E-value=3e-69, Identity=47%"; Hit description =Pleiotropic drug resistance protein 15
  Pfam annotation: Domain name=ABC_tran; Domain location=5-155; Score= -34.0; E_value=0.00046; Accession=PF00005.18; Description=ABC transporter
MDPEARNTLIFSLQIISVARVNLTMHFTNKHTYDEVNRSVGASTEASSEANTRRWCVQILGLDMCADIIVGNELMRDISGGQKKRLTTGEMLVGLTKVLFMDEISTGLDSSTTFQIVKCIQQIVHLGEATVLASLLQPAPEVFDLFDDVMLLSEGQIVYQGPREYVLEFFERCGFRCPQRKGVLDFLQEMDHHVADRKEILDRPREIAPLGLSGKFNDFFSFCHCHLALWHIQVQNTKLHVGDLALSKIAQSYIKKRSGTVLVQNEKPYHYVSVPEFVAKFKKFHMGKSLKKQLSVPFHKRKIHKSALVFSEKSVSTLELLKVSWSKEWLLMKRNSFLYIFKIVQPSRRRCLYTMASVMLIFSTKAADIHQIIPLVKAAGPDKMKFNGVEEQLVQEFSLDDLFPLVAPLFMETPHSCSMYAEKAEQCFDERYMALVDLQEGNERLFYKLLIDNIEEPLGKDP

SEQ ID NO: 43882 - protein, 357 aa, Zea mays
  Coding DNA Sequence Number=SeqID_507
MGKKHGSAPNLHTCSGLDSHDEQKHWHPRCHYKRNSGSNPTAAAMIPVRTRQPEGFRSRPYSRDVKETSKPKSRGRPVGGADGLDEGGASSGCHHSSTDDSVRLSTNADELEDGFCHQKLEEEVASRPAQEAEPRLASLSAPARMMNILATEGGAKIAAWLAPPHLEAAAQRLQAALRFCPDQRAKGRAAMQAACNRAKWAHLSDFQRAQLGGPGPRVMQPGPGKGDTPERILPCEGTRLQASLLIRGSKAGPSEGFNSRLRARGLHTHYWSEVQKPAPRKGSTAASGYSGSAPTTDQGGNDLVTESHQREASSPRTPSPGDRVWQITRSSPETPCSAPIEGNMALSPSSLRKGDAG

SEQ ID NO: 43883 - protein, 101 aa, Zea mays
  Coding DNA Sequence Number=SeqID_508
MEVSRDKLDNCQVQLPQIMQVESYLLEHIGNARLGEARILKGTDKALVGSRVKVSVGDSALATTTAVEGLFPSALTMVGPLNHEGPTHCGQGAAKDTRVLP

SEQ ID NO: 43884 - protein, 147 aa, Zea mays
  Coding DNA Sequence Number=SeqID_509
  Subcellular localization annotation: CTP_CleavageSite=71; ConfidenceScore=5.10e-01
MDAIQVKAPPTQETRSCLARAQPRAKTADPGEFTSRPRENSVACPAPTAMPPARVRLTVAKSSLGRHKKLRLARPQGSDSTSTSDDGLRLARPEGSDSTSTSDDGLRLARPQGSDSTSTPEDDLRLARPQGSESTSTSDDGLRLARP

SEQ ID NO: 43885 - protein, 232 aa, Zea mays
  Coding DNA Sequence Number=SeqID_510
MQAACNYTKGMHPFDLDASNMEAQAHTSCNRHAGYYVRETAPPLAPVPRLLDCGTGATTRGNPAHGPTVPTEHIGHGAGDTFGKQSGRRFTSAMMTASKKEAPPRPTPGLGLNLDAGRQPPPRPTPGLGLNLDLGRRTPPRPTPGLGLNLDLGRRTPPRPTLGLGLNLDAGRRSPPRPTLGLGLHLDLGRRSPPRPTTGLGLSLDLGGITASPDLGLGPTTLQGGHHYPTPS

SEQ ID NO: 43886 - protein, 129 aa, Zea mays
  Coding DNA Sequence Number=SeqID_511
MAQGHISLSTTPWAVSGGEVLKWKTSPTLKMIAMLKVDVEVKEGVFYQSNVRCLVACKARLIVPTLLLRQTHMDSILGPYSSGPLSHLVVPVEMAVASVGPKIVILSNKWTTTRQRGIPCRPERSRNGR

SEQ ID NO: 43887 - protein, 161 aa, Zea mays
  Coding DNA Sequence Number=SeqID_512
MGKSNKRKREPTPPSEDFGDSEYSEEEFSSESEGSPAPVSPPASSDDSDDSQGIAAEVWTYIRAVERSWLEGSDESEFSSDEEDSDGGEDEDDDDDDDDDDDGGDGDGSGSGGGSGGKGSTRGGSSTGSTRGGSSKGSTRGGGGNGSTRGGGGGSSSKASG

SEQ ID NO: 43888 - protein, 53 aa, Zea mays
  Coding DNA Sequence Number=SeqID_513
MRVRLKMMKETIKKMSHLKRRTMIKGEMQMIKTRKMMREPNRSSATSKMSMVW

SEQ ID NO: 43889 - protein, 250 aa, Zea mays
  Coding DNA Sequence Number=SeqID_514
  Gene Ontology: Mol. function=kinase activity; Cellular component =ornithine carbamoyltransferase complex; Biological process=amino acid metabolic process
  Homolog annotation: Hit_ID=Q6QP54; Match level="QueryCoverage=45%, HitCoverage=40%, E-value=3e-18, Identity=50%"; Hit description =Putative kinase
MEHRPGPERLLETAHLELDGELFVNTQQAPTWRANYRRFETGGSLGRRVKCRRVPQPRWVGAWPSAKGGREVAGDRRERGENPAVFVFVPRPGRPESAWGRVMMALPVDVVGLCPRLGDVEAPPRSGSSLSFVAVVESEPLGRARRRPSAEARAESEPWGRAKRSSSSSRAEPKSEPWVGRSGVRRLLGLSPSPSPGSGGAEFAVFRGLAQGLSPSPSPGSGGAEFAVFRGLAQVRALGRAERSSPSSEA

SEQ ID NO: 43890 - protein, 484 aa, Zea mays
  Coding DNA Sequence Number=SeqID_515
  Gene Ontology: Mol. function=transferase activity, transferring glycosyl groups; Cellular component=membrane
  Homolog annotation: Hit_ID=Q10RW1; Match level="QueryCoverage=93%, HitCoverage=88%, E-value=0.0, Identity=74%"; Hit description =Xyloglucan galactosyltransferase KATAMARI 1, putative, expressed
  Pfam annotation: Domain name=Exostosin; Domain location=57-413; Score= 431.7; E_value=1e-126; Accession=PF03016.6; Description=Exostosin family
MEKAAANALPPLRFLAVLAVTAWTFFLYFHFSVLSGSTVEVSHGDDGGADPCRGRYIYMHDLPPRFNADIIRNCRKTEDHWGDMCGALSNAGLGRPLADRTDGVLRSEAGWYATHQFALDAIFHNRMKQYECLTNRSAAAAAVFVPFYAGFDFVRYHWGYDNAARDAASVDLARWLMARPEWRRMGGRDHFLVAGRTGWDFRRSNNVDPDWGNDLLVMPAGRNMSVLVLESAMLHGGDYPVPYPTYFHPRSDADVARWQDRVRGQRRTWLMAFVGAPRPDVPINIRVRDHVIAQCTASSACTMLGCARATGSTQCHTPGNIMRLFKKTTFCLQPPGDTCTRRSAFDSMVAGCIPVFFHPGSAYKQYRWHLPRDDHLRYSVYIPDADVRERNVSIEAVLRAIPPAAVQRMREEVVRLIPRVLYADPRSKLETVKDAVDVAVEGVLDTVARIRNGEYVDSGGPVTEDPPNLFASTESRFRPAQADR

SEQ ID NO: 43891 - protein, 537 aa, Zea mays
  Coding DNA Sequence Number=SeqID_516
  Gene Ontology: Mol. function=transferase activity, transferring glycosyl groups; Cellular component=membrane
  Homolog annotation: Hit_ID=Q10RW1; Match level="QueryCoverage=89%, HitCoverage=92%, E-value=0.0, Identity=67%"; Hit description =Xyloglucan galactosyltransferase KATAMARI 1, putative, expressed
  Pfam annotation: Domain name=Exostosin; Domain location=95-451; Score= 428.4; E_value=1.1e-125; Accession=PF03016.6; Description=Exostosin family
MQLSVANSIVQLLVKSGRKPGGSARSRRAVEVKGIEIKAAAAAKAKVLPPLRILAALAIAAWTLFLYVHFSVITGTVEVMSNGEDLADPCRGRYIYMHELPRRFNADIVHTCRNRKTEDHWGDICASLSNAGLGRPLDGDSVITGESGWYGTHQFALDAIFHNRMVQYECLTNHSAVASAVFVPFYAGFDFARYHWGYDNATRDAASVDLTEWLMARPEWRRMGGRDHFLVAGRTGWDFRRISNLGADWGNDLLVIPGARNMSVLVLESTLKRGTDFSVPYPTYFHPRSDADVLRWQDRVRGQRRTWLMAFVGAPRPDVQMSIRVRDHVIAQCKASGACAMLSCARTPSSRQCHRPANIMRLFQKATFCLQPPGDSCTRRSVFDSMVAGCIPVFFHTGSAYKQYPWHLPKDDHLRYSVYIPTADVRRRNVSIEAVLRAIPPATVARMQEEVIRLIPSLLYADPRSKLKTLKDAVAVAVDGILDTVARIKNGEEVNCGGPVDKDPPNLFASTASRFFPEGYVQAARGRSWTKGMQSRI

SEQ ID NO: 43892 - protein, 540 aa, Zea mays
  Coding DNA Sequence Number=SeqID_517
  Gene Ontology: Mol. function=transferase activity, transferring glycosyl groups; Cellular component=membrane
  Homolog annotation: Hit_ID=Q10RW1; Match level="QueryCoverage=80%, HitCoverage=85%, E-value=1e-169, Identity=67%"; Hit description =Xyloglucan galactosyltransferase KATAMARI 1, putative, expressed
  Pfam annotation: Domain name=Exostosin; Domain location=32-393; Score= 383.0; E_value=4.7e-112; Accession=PF03016.6; Description=Exostosin family
MVAWSFFLYLHFSLISGAEEVSNGDPCRGRYIYVYDLPPRFNTDIIRDCRKAGGRWADMCAFLSNGGLGRPLADDGMDGVVTGKAGWYNTHELALDAIFHNRMKQYECLTNRSAAASAVFVPFYAGFDSLRYRVGYDKATRDAASADLSFWLTVQPQWGRMAGRDHFLVAGRTGWDFRRRSGADANTDRGNGLLLTPAGRNMSLLVLESTLEHGSDFSVPYPTYFHPRSDADVLRWQARVRAQHRTWLMAFVGAPRRNVPTSTWVRDHVIAQCKACSACAMPGCARSPGSAQCHSPASIVRLFEKAIFCLQPPGDDGSSTRRSVFDSMVAGCIPVFFHTASAYKQYRWHLPRDDHLRYSVFIPDADVRWRNVSIEAVLRAIPPSTVERMREEVIRLIPTLLYADPRSKLETLKDAVDVAIEGILDTVTRIKNGEQVNCCGPVDKDPPNLFAATASRIPPKGAMRAVDQNRSAELRQPCRSFSYLRAYVQVDLVTSEPREIEGLCSLNQPLAFPDPHGPWHSVAAQVTYFRSDSNIEGLYL

SEQ ID NO: 43893 - protein, 68 aa, Zea mays
  Coding DNA Sequence Number=SeqID_518
MRGSGRPFYRRPERGMWRLSGTGEAHQGGDNGGIVVATGWLGAGGGEWSPGHSARGRKAPNIAETIVS

SEQ ID NO: 43894 - protein, 282 aa, Zea mays
  Coding DNA Sequence Number=SeqID_519
  Gene Ontology: Mol. function=catalytic activity
  Homolog annotation: Hit_ID=A2XU13; Match level="QueryCoverage=34%, HitCoverage=10%, E-value=7e-17, Identity=54%"; Hit description =Putative uncharacterized protein
  Subcellular localization annotation: CTP_CleavageSite=16; ConfidenceScore=5.04e-01
MRTYGVAAPTSCASTSAAHAASTRDGLLALRCLDRDARLFKRCRDESAPAVPASNSTPTPTKAALPARITYPILIPSLSPDVAARRDAIESEEAVEAKGLRDDTTCIVIDIISPKKPKHTIQSQRTPGKGLVLLKNFFLRKTTSNSLSLHYKNNYSEPDLEEVFEGGCPSLSRRYHWNSVFSSTNNGLVALEKEGVMIPQSVQCAGSGTWNHQAENSAARSDPTVVSTTQTKTDNKSRSTTEFGLGRNRKLRLARPQAPASGGGFRLARPQAPASGGGLRLA

SEQ ID NO: 43895 - protein, 167 aa, Zea mays
  Coding DNA Sequence Number=SeqID_520
MNKTPALKVPLQMELRFHLRRYEQPHTIGGPAEQQKANGWLAATRSGSSDNDLRPGRRSSFSNGFWAGGVGNLVGREAFSGCHHLNTAPTGAGRLKAHRQVLALAGATQNMSASLAAHDVLGDPLTRLSARGRPGRGRSVRGATIVQTKDEMLHPGWAAAVRLPRRG

SEQ ID NO: 43896 - protein, 382 aa, Zea mays
  Coding DNA Sequence Number=SeqID_521
  Gene Ontology: Mol. function=zinc ion binding; Cellular component =nucleus
  Homolog annotation: Hit_ID=A7QP60; Match level="QueryCoverage=97%, HitCoverage=94%, E-value=3e-66, Identity=41%"; Hit description =Chromosome chr1 scaffold_136, whole genome shotgun sequence
  Pfam annotation: Domain name=Sel1; Domain location=127-159; Score =3.6; E_value=6.3; Accession=PF08238.3; Description=Sel1 repeat
  Pfam annotation: Domain name=Sel1; Domain location=160-198; Score =17.6; E_value=0.048; Accession=PF08238.3; Description=Sel1 repeat
  Pfam annotation: Domain name=Sel1; Domain location=199-234; Score =16.8; E_value=0.079; Accession=PF08238.3; Description=Sel1 repeat
  Pfam annotation: Domain name=zf-MYND; Domain location=318-359; Score =43.3; E_value=8.9e-10; Accession=PF01753.9; Description=MYND finger
  Pfam module annotation: Pfam domain module=Sel1::Sel1::Sel1::zf-MYND; Domain location=127-159::160-198::199-234::318-359
MRTRSGSRYSNGGGEDALVGQKRKRAASAVAGECACCERRKRPADGPDYLDALPDDLVLSILTKVAADSSAPADLLSVHLTCKRLNELGSHDMVFAKASPASLSVKAAAWSEAAQRFLKRSADAGNLEACYILGMIRFYCLGSRSGGAALLAKAAVGGHAAALYSLAVIQFNGSGGAKSDRDLRAGAALCARAAALGHVDALRELGHCLQDGYGVRRDPAEGRRLLVSANARELTLALSAAASRHAAGVVVGGGGGGGCPLLSDFGWSLPEAEPHAANQFMVDWWWASDRCAAQAGGKITGESGVDGDGAELRLCSHVRCGRRETRRHEFRRCSVCGAANYCSRACQALDWKRAHKVQCVPVDRWLLGAVGDAQDQQQQQPQ

SEQ ID NO: 43897 - protein, 201 aa, Zea mays
  Coding DNA Sequence Number=SeqID_522
  Gene Ontology: Mol. function=receptor activity; Cellular component =mitochondrial outer membrane translocase complex; Biological process= protein import into mitochondrial outer membrane
  Homolog annotation: Hit_ID=A2WYG9; Match level="QueryCoverage=75%, HitCoverage=63%, E-value=2e-57, Identity=70%"; Hit description =Putative uncharacterized protein
  Pfam annotation: Domain name=TOM20_plant; Domain location=6-155; Score=237.2; E_value=3.7e-68; Accession=PF06552.3; Description=Plant specific mitochondrial import recep
MEMSDAERLFFFEMACNNSEVAYEQNPNDADNLTRWGGALLELSQMRNGPDSLKLLQDAEAKLEEALQIDPNKSDALWCLGNAQTSHGFFTPDTAMANEFFAKATECFQKAADVEPANELYRKSLDLSAKQSRKKKKKDNEFCGLDAVACSRTAQGAGADVRSAVQCVRAIQGLPLPLPLHPHPGQKDKRCFVFTPATTGR

SEQ ID NO: 43898 - protein, 75 aa, Zea mays
  Coding DNA Sequence Number=SeqID_523
MGIPVGDLSPRGTGMGKKCSPQAFVGIPVGKLFRRGDGDGELFPGGEFPVAIPTRCSERAVVVRVKPRGTHGRSA

SEQ ID NO: 43899 - protein, 45 aa, Zea mays
  Coding DNA Sequence Number=SeqID_524
KKKKRKKVAVYSQGAVSVWGTGQCPVRQAASAEQAALGNSPTAYG

SEQ ID NO: 43900 - protein, 545 aa, Zea mays
  Coding DNA Sequence Number=SeqID_525
  Homolog annotation: Hit_ID=Q6J9V9; Match level="QueryCoverage=25%, HitCoverage=41%, E-value=6e-13, Identity=42%"; Hit description =Putative uncharacterized protein
  Subcellular localization annotation: CTP_CleavageSite=56; ConfidenceScore=5.04e-01
MQASCNRTKGAHPFDSDASSMGAQAHTSCNRRAGYYVREAAPPLAPVPRLLDCGTSAVTRGDPAHGPAVPTEHIDHGSISRGRRRDGQYGQKWADSIGGGRRAEAADRRHLWQAKRATLHLRHNDRVKKGTGKGDTPKGILLREGSRPRAPLLIRGSKAGPSEGFDSRLRALGPRALLLIRGSKAGPSEGFDSRLRALGLRAHHWSEVRRLAPWMVSTAASGHSGSAPTTNQGLRSRGTLGHFRDQQERFCNGIPSEGGIEPSDPIKRDRVRQITCRYFWSAPLGHEPTLIEWGTGVHSDHPLATHWRHHVRRPPRATWRFPPPCGKATQGRMKKAESVLDRPLALCGGSGAALANPAPAKPLTTSTYQPENLEPDYAPGLRPLVTPISTKLQRPDGRDSGQGSVHSRDTISPRPSPASGKGLGLNLDAGRRTPPRPTPGLGLNLDIGRRTLPRPTLGLGLNLDLGRRTSPRPTLGLGLSFDLGRRTLPRPTPGLGLSLDLGRRSPPRPTLGPRLDLDLGGASASPDLGLGPTTSQGGHHYPTPS

SEQ ID NO: 43901 - protein, 449 aa, Zea mays
  Coding DNA Sequence Number=SeqID_526
  Subcellular localization annotation: CTP_CleavageSite=41; ConfidenceScore=5.53e-01
MSSHSLHASRPSTFRAPGWGVLALLSSCRRWRNTTSRKLVPFSHRSALGIFIRQPGCIPSPVVTQDGDHQFDGGEKRAGLRPLPLPQLQGSSSSVLGRGVRRVGACLRAGSGPLLPSVIGGEGVRRPWRWQLPHVWLSGLSGFGAASGVTSHRGSRKRFLRRRGSRCHPRTDLRLYGLGSLSSPLEWGRGRGPCCSSVCPEVIAATVWSPGAEVVVAAAGAGVGEPPGVLPPCRPSNVGGCPYLRGQNRSSVCNGTLSADVCSLRLSGPEHLGIFGESLGSIGLAARGFSCLVKGTLGRSAMSRSRRQRCQHVQRQSWLKKKLRRSKPGLAVHWRDRRRSRVAEAMSRAVHWPDQRRSWVAEAMSRADVLGGQLVEATAQPVEPSAQAEFPEETLAAMAQAWCRQVPLRWRSSDHVAVRGRVGFRRRWSRRRGCCCSPLMSAPAGTVYL

SEQ ID NO: 43902 - protein, 30 aa, Zea mays
  Coding DNA Sequence Number=SeqID_527
MEYIVSRGACGGPGAAHVAGLPPKTVKETI

SEQ ID NO: 43903 - protein, 401 aa, Zea mays
  Coding DNA Sequence Number=SeqID_528
  Pfam annotation: Domain name=Transposase_28; Domain location=240-398; Score=-47.7; E_value=0.0041; Accession=PF04195.3; Description =Putative gypsy type transposon
MAWMPPVSRVDMAHLILRWHNACQWSNQSAFNAEAAHHLPVDWPHGSIGSPPERGAEAYAIWSGHVSAPDPCLALIKVRVLDPARRFGPCIQGSGIFPRGFGPNVDTMEYIVSPATWWPRCCPRGGGPAPKEDDSWARAPVSETGLLVSTGMKRRGGPRVRGWSTAFGGDEEARRFAPCVAVRPLRTRRPTPKEYDTWARAPMPGAGSPWRASDEIFCDASGRQWGNLSLKGDSPECAAMALLDPLERLQPEVALNLVRNLPGWGVPAFAGRIRVGASPHGDLAAGEFVLFVSNLPSGLSLPISSFFVLLLEELGLQPQHFTPCFILLAAIIAYLYKMSVGATLLPPAFGFKDVHQPCGGGERVELRLHLSRELHQCLMGVVQDVAEMAAACFQRDPTDVE

SEQ ID NO: 43904 - protein, 41 aa, Zea mays
  Coding DNA Sequence Number=SeqID_529
  Homolog annotation: Hit_ID=Q7XBC6; Match level="QueryCoverage=65%, HitCoverage=1%, E-value=2e-07, Identity=92%"; Hit description =Putative copia-type pol polyprotein
MYNRLKTVVNQVRNLGSTKWDDHEMVKNRMSWSMTTSFFKS

SEQ ID NO: 43905 - protein, 327 aa, Zea mays
  Coding DNA Sequence Number=SeqID_530
MGDTRRLFASSLEERNSVGVGTFHPSFGFKDFHQPARLYPPRWWSPKTVTTSSWVGRSKLGCDLGPTLSFKDVHHPRWGGGRAEPALYLPRGFVGHPLPRRSRERALTGPAGGPDFDNAGLVDGRRRHLQRVGLVGLAPGGSFCRRAAAAPCAREDHPRCRALLEHRSCSGVVLPLHRRGIFTRRPAEAVREVPIADGITATIRASGLQLFVLVLAPRASAWPGCPLAGPTLELISRGLGSGWRPWEMVGRGPRGDRPSRLLGPDSRRSPWQRLSERGDAVVLQSGDPWTASPSEARSNLAEGVVNAEGATAPFQRQDPSLQDQSVL

SEQ ID NO: 43906 - protein, 295 aa, Zea mays
  Coding DNA Sequence Number=SeqID_531
MVADPLWQLLARRVEDDDSSTLVGVLLTFLLLGAGLTDVTCDLPFAENSTYHILPISKLGLYIEEVDGGLRSPSPELVDKRLVGGAISEGTYYINVGGIGEFIPFMGQPPDVVPKTLLALLGTPFEVLGAPKAFVGALEVFVEVFPEIRLVMDGVARQMLKQGPCPLRGEWCRRQSVDGEIQDDELVVSYSRHATVKALVLQPYARVRRPIVLGDIHRSLHFWRELRFSVGASEGAWTRPWWARVVLRPPFAWLLDFLLLLALVVEDVPGVMCFSEAGFHGKAGLHGLGGLCPLL

SEQ ID NO: 43907 - protein, 337 aa, Zea mays
  Coding DNA Sequence Number=SeqID_532
MEVRCQTSFCQNEDGFPKLLRACTVRLGIRSQPEYDGREFIEHGTEKCVVTVYIGSSPHHVEWSVTAAGHRFKDTCQVVARKALRAMCQIYEEEVADTPLRFFPPFQRDRPVWMARMRALEGQQLLEDDPTVVYLTAYLLTLDARYDFLAQHHPRVAALESREVIVVEALKQAKDEHVPKLMEAYLVTHNQHRALRIQEPAPSNPVQPRRAEDPQILEGHPVSIRGEKKAWELPKGAIVLEGIPVSPKAMDKQEHPESSKDPPPELFEPLTMKKIPAPSLEIKEEAASTPPAPSPSEELQEPVPLEEEFDPVLPSQLLPEEVINISSLLTHPGDVSD

SEQ ID NO: 43908 - protein, 268 aa, Zea mays
  Coding DNA Sequence Number=SeqID_533
  Homolog annotation: Hit_ID=A2WVL9; Match level="QueryCoverage=19%, HitCoverage=23%, E-value=2e-07, Identity=57%"; Hit description =Putative uncharacterized protein
MSPVLVLGSPSVAAAVLGHLYLLSVLTFLSWQSAPAMLLVLLDLDSSELFVLVVEVKAMDLDPAAEEERQLEDHNEAMDARQALMGVDVTHLDPIELEDFAGSRTGTGTDSTSPPTSTTASASGGSRKRSKVWNNFDELTNLVNDDYAFTDKVFAITLDNASSNNTAMKYLRHFLSGYLGVPAPVVTDDDDDDSFTPNDDDLVIEERRHCLAPDMVEVLSCIKDWELADAHLQHIMEEKTWELKAEHENLYLDDPEGTQTLDGGGGLA

SEQ ID NO: 43909 - protein, 85 aa, Zea mays
  Coding DNA Sequence Number=SeqID_534
  Subcellular localization annotation: CTP_CleavageSite=58; ConfidenceScore=5.23e-01
MAGSSEAASGRRDSGRVARQRRGGWRARRGGVRAGRDGASGEASGVRMAARRRPGGVRAVRRRAAGCDKNFTMFGESCETQCVET

SEQ ID NO: 43910 - protein, 83 aa, Zea mays
  Coding DNA Sequence Number=SeqID_535
MASKASLWEAREKDEPSRMAVRRSTAMENAYGAEVTQLGAIGYGAEVRAALAQTDVVAPTCTYLGAIAYGAELCYLGATGYGA

SEQ ID NO: 43911 - protein, 155 aa, Zea mays
  Coding DNA Sequence Number=SeqID_536
  Homolog annotation: Hit_ID=Q5NKP3; Match level="QueryCoverage=36%, HitCoverage=22%, E-value=8e-21, Identity=87%"; Hit description =Putative uncharacterized protein 9C20.7
  Subcellular localization annotation: CTP_CleavageSite=80; ConfidenceScore=5.36e-01
MDDGLRLARPQCSDTASASEDGLRLARPRARTQPRPRKTNSASPDPRARTQPRPRRSLRLDRPQARTCHVTRKAIITLPLASSGYGEQDRRPIWLSPEALMLASLIDDEKKLGDCQFDLWKQYYVAACVAVFGKLRRSRRLDAVQSGCTALSIFK

SEQ ID NO: 43912 - protein, 150 aa, Zea mays
  Coding DNA Sequence Number=SeqID_537
  Subcellular localization annotation: CTP_CleavageSite=71; ConfidenceScore=5.34e-01
MASPDQTVDGAGAWWDHNRQCNKHVGSLEAMALSGSHVPLAPSSRRSSTTLTRRSARPVKSSLLHHAYPSHAASASSPALPFPRGPKLSRGLDVPNLKKRCERFVSTMPCPRRFDLHCEHEAGKTEPPPPQAHVVELTAHDRLYGACGQS

SEQ ID NO: 43913 - protein, 105 aa, Zea mays
  Coding DNA Sequence Number=SeqID_538
MEDLHAACWGLRAAEPPRDLTGSMHTGSQCPSRRMEDLHAACWGLRAAEPPRDLTGSMHTGSQTIYAMNSKLQIHLKFHTVISGSTNGNEVCRVGQFGKAGDLPA

SEQ ID NO: 43914 - protein, 200 aa, Zea mays
  Coding DNA Sequence Number=SeqID_539
MEISRERESSRERGRARHRRVTATTPMEISRERERERGRSRGREGGRVEMAYPAEAAPNPSTRDPARGREGGRVEMAYPAETTANPSTRDPARGRARETLARGAARANAPASELPRVGSLATERRPKWPYEPGLVERWVLQQARQAPTPTQLQQCSHMGSRTSHRMPPNPTHAGSSVNAYPLLPSLLARKAEEDVPHASA

SEQ ID NO: 43915 - protein, 191 aa, Zea mays
  Coding DNA Sequence Number=SeqID_540
  Subcellular localization annotation: CTP_CleavageSite=42; ConfidenceScore=5.33e-01
MALMPSPAEATTSTRGSLTSGGDHLCTGGRRLPQHARRGSRSCSTNRSKDKTIKERRCHCRGVRRLVWSPSVPDGQGKPWMWQTRARRDFPPCGGWATTPRPDGRSAATRGSPAHGPTVPLSTTVTGQSAVGIGTTVGVAIGGPTVIAATGARKQRSNHQSDSGPACRLASSPEAGPGATVGTLNQGYPLL

SEQ ID NO: 43916 - protein, 67 aa, Zea mays
  Coding DNA Sequence Number=SeqID_541
MGLTFVVGKGRIRVERDPALCGRLNKEVGHLGDVDPRAIDLAMRIAERMFLKMKEDEAKNKIEEEND

SEQ ID NO: 43917 - protein, 225 aa, Zea mays
  Coding DNA Sequence Number=SeqID_542
  Gene Ontology: Mol. function=cysteine-type peptidase activity; Biological process=proteolysis
  Homolog annotation: Hit_ID=Q8S456; Match level="QueryCoverage=100%, HitCoverage=65%, E-value=1e-62, Identity=57%"; Hit description =Putative uncharacterized protein 163K15.6
MTIHPGAGKELKITKETLRLILGLPSAEGGREFTDWYDGDKLPTSTSSPINEPIVSTPPVGTSDNQHHDRPTQVPTADIKGSEQDPPISGAPKFDKSPLTEAFIDCIHDDDQLYNPDTIANTLILNVNVGIMVPMLCRSHWTLYAINFQLRRIDILDSNPNGPALGGTTWNDIHNDQVMIKGMKLPWSRLIMKRLSMVLQEARPDSCIPKFGNFKIVLLPNCPTM

SEQ ID NO: 43918 - protein, 946 aa, Zea mays
  Coding DNA Sequence Number=SeqID_543
  Gene Ontology: Mol. function=phospholipase D activity; Cellular component=membrane; Biological process=phosphatidylcholine metabolic process
  Homolog annotation: Hit_ID=Q8SAG7; Match level="QueryCoverage=89%, HitCoverage=96%, E-value=0.0, Identity=72%"; Hit description =Phospholipase D beta 2
  Pfam annotation: Domain name=C2; Domain location=157-251; Score=72.0; E_value=2e-18; Accession=PF00168.21; Description=C2 domain
  Pfam annotation: Domain name=PLDc; Domain location=466-501; Score =38.9; E_value=1.8e-08; Accession=PF00614.13; Description =Phospholipase D. Active site motif
  Pfam annotation: Domain name=PLDc; Domain location=778-805; Score =39.1; E_value=1.6e-08; Accession=PF00614.13; Description =Phospholipase D. Active site motif
  Pfam module annotation: Pfam domain module=C2::PLDc::PLDc; Domain location=157-251::466-501::778-805
MDCISFWSKASVLTVENHISGTPSVARGKSRIRAEPEKDGKVTSRSIADGIRQKFTTTKRVVEAEPVSAAWTGTRDHGGRHRYSSNSDQRQGIGSRFQGPNRMRHAECVCKQFRERKRPIRGATNRTMPVQDDDESVSWLVHGSAGDAPAVLLHGSLDIWIHEARNLPNKDILSKRMRDLLCKPSEGMTSDPYVTVQVASAVVARTFVIPDDENPVWAQQFLVPVAHEAATVNFVVKDSDVVGAELIGVVAVRADQLQAGDMVEGAYPVLERNGKECAPGAVLRLSVQYVPVARLTMYHHGVTPGPDFAGVPRTYFPLRRGGKVTLYQDAHVPDGTLPEVRLGNGDCYRHGQCWRDVYDAICQARRLIYITGWSVFHTIHLVRDGHDDMALGDLLRRKSQEGVRVLLLVWDDPTSRRLLGIKMEGYMGTRDEETRRFFKHSSVQILLCPRSAGKRHSWVKQQETGTIFTHHQKTVILDADAGNHRRKIVAFVGGLDLCGGRYDTPKHTLFRTLQTFHKEDYYNPNFAVEDARGPREPWHDLHSKIDGPAAYDVLKNFEERWLKASKRSAAKKLSKLSRSHNDSLLWINKIPDIIAIDDEIYSNDDDPERWDVQIFRSIDSNSVKGFPKDPREATSKNLVCGKNVLIDMSVHTAYVNAIRGAQHFIYIENQYFLGSSFNWDSHRDVGEHKNLLLPYDHLKFPKFRTLKYSTLQKMTMQMMYEIIYKALKEVGLDGTYEPQDYLNFFCLGNREAEDTTCTSSGPFSASNPQDQARKNRRFMVYVHSKGMIVDDEYVIIGSANINQRSMEGTRDTEIAMAAYQPQHTWANMLSAPRGQRQMSFANLVCFHLQIFGYRMSLWAEHIGAIEESFTRPESLECTRQVRHIGQQNWEKFISSHVTEMKGHLLKYPVSIDSRGKVNPLSGCATFPDLGGNICGSFLNIQENLTI

SEQ ID NO: 43919 - protein, 483 aa, Zea mays
  Coding DNA Sequence Number=SeqID_544
  Gene Ontology: Mol. function=binding; Biological process=embryonic development ending in seed dormancy
  Homolog annotation: Hit_ID=A2XBT8; Match level="QueryCoverage=92%, HitCoverage=98%, E-value=1e-139, Identity=58%"; Hit description =Putative uncharacterized protein
MAQHSAACSIFFLAAGPEPKPRTGHNMSPSDDGEETLAALIELSRTPEGREGLTDVLIDTLFLLPASPPRLLLLRLRLLRNLLAGDELNHYAFIEHSGPAAVAASVLSFPSLAPDVARAALQALGNAALAGELHRDAVWQALFPEALRVFAGLRDQGVLDPLCMVLDTCCGGEGGRGRLQELCHEELGLPILVQAVTTASQVEHKEEWLEWLLFKVCAEEQKFESLFYALCSANDVGEYNAKHIFLLDTLSRCLNSHPEEVTVSDSFAHDVFNLHKHAAETVNFTYRGTSPLPTGHPAIDVLGYTLQLLRDICAWESTSADTQRPVDSLLQAGFVKRLLRYLGELEPPSTIRKSMAGAGGQGDNHPALENAKVCPYIGYRRDLVAVIANCLHRRKKVQDEIRQLDGIMLLLQQCVIDEDNPYLREWGLLAVKNLLEENEENQKEVSELEMQKPVITPEIANIGLKVEIDKETGRPKLVNTSDT

SEQ ID NO: 43920 - protein, 150 aa, Zea mays
  Coding DNA Sequence Number=SeqID_545
MGKNNKRKREPTPPSEDFGDSEYSEEEFSSESEGSPAPVSPPASSDDSDDSQGIAAKVWTYIRAVERSGLEGSDESEYSSDDGGEDEDDDDDDGDDDDDDDDGDGDSGGGGRGSNSGSGGGNGGSRSGNGGSSRGSGGGGSSKGSNKASG

SEQ ID NO: 43921 - protein, 115 aa, Zea mays
  Coding DNA Sequence Number=SeqID_546
  Subcellular localization annotation: CTP_CleavageSite=26; ConfidenceScore=5.63e-01
MSGPLPPAPTRSKALPCDSGAGSRMSCKPAQGRRSQTAARGTGKGGYPERDPSPRRNRAPSPPLLIRGSKAGPPKGSIVASDRVGPTPTTGQGFEGRPSEGFHGRLRLLGLRAHY

SEQ ID NO: 43922 - protein, 74 aa, Zea mays
  Coding DNA Sequence Number=SeqID_547
  Subcellular localization annotation: CTP_CleavageSite=36; ConfidenceScore=5.38e-01
MAHLCRHANATHRRAGAAAGPTSLPFPGRLPKFAVSALTIRGPVLLQVTRTIPQAITVALFRNRKDVYTLPAHM

SEQ ID NO: 43923 - protein, 160 aa, Zea mays
  Coding DNA Sequence Number=SeqID_548
  Subcellular localization annotation: CTP_CleavageSite=18; ConfidenceScore=5.12e-01
MDGPPRPRCLQATATRCRCAANSPLRFRPDPSLSTTDVDQVCQWSAGLPVNYSALITQRGIGTVVCCLMLEAILLFQATVSGMLLTAEMAFKCARGLPPEAAAEPIVKNNYPEPDLEEVFEDGCPSLSRRYHWNSVFSLTNNGLVAPEKEGVMIPQSVKL

SEQ ID NO: 43924 - protein, 241 aa, Zea mays
  Coding DNA Sequence Number=SeqID_549
MVKAREMEAEPFSAADSAPDARLSSTQKENNPRQKPKSSRQNLAPKGRRRHPAGTDMGTCGAGRATSDEDIWCRGAYKLCVEFSRSRRPHEDGLHALRCLDRDARLFKRRRDEPAPAVPVSNSTPTPTEVALPARITYLILNPALPPDVAARRDATESEFKKNMSRNLIFCYLKATVQFRKLLSNARLPPDGTVDAACLLIRSSSSGVASRQQHEEREEQVEGEECPDCGGTRLYDRCKGE

SEQ ID NO: 43925 - protein, 58 aa, Zea mays
  Coding DNA Sequence Number=SeqID_550
MESHDLRAERESRLMDKVAMRMVVLVLTLVMVVRIATTSGEDEAVEGDFQEFQDYDEF

SEQ ID NO: 43926 - protein, 178 aa, Zea mays
  Coding DNA Sequence Number=SeqID_551
  Homolog annotation: Hit_ID=A2X6T6; Match level="QueryCoverage=31%, HitCoverage=5%, E-value=2e-08, Identity=50%"; Hit description =Putative uncharacterized protein
MEKEPLDMVESSVRVIETHVDIIRSLVTDGVVDTSEPESVYTLETTLFQIGDVCDMLEKCALSIKKYVDSKRAKIIQDEALQYAEDDEAADDLEELPSPDLLTQADILEKYFGIEYDSDKQRRHGCDVIMLKDPKKRLSPVVYHLPLFVGFTDGWKHLVITNDLRAEDACELVKGPDD

SEQ ID NO: 43927 - protein, 271 aa, Zea mays
  Coding DNA Sequence Number=SeqID_552
  Gene Ontology: Mol. function=metalloendopeptidase activity; Cellular component=mitochondrial respiratory chain; Biological process =proteolysis
  Homolog annotation: Hit_ID=A2Y6N6; Match level="QueryCoverage=54%, HitCoverage=11%, E-value=8e-68, Identity=83%"; Hit description =Putative uncharacterized protein
  Pfam annotation: Domain name=Peptidase_M16_C; Domain location=122 -257; Score=31.0; E_value=4.3e-06; Accession=PF05193.12; Description =Peptidase M16 inactive domain
MSMPPHPNPLLPAAEEPFHVFVGYDPREHELAVFVDYDFLYLVDLADLLAIAGRIGVASVKHDVRNPAFLDWEVKEQLQNIKSEIADVSANPQGLLLEALHSVGYSGALAKPLMASESAVNRLDVSSLEEFVAEHYTAPRMVLAASGVDHDALISVVEPLLSDLPCVKRPEEPKSVYVGGDYRCQADSQNTHIALAFEVPGGWNQEKTAMVVSFRDFPPEGTMRVCDSTCPEISQAVSSVLERAVYAIAPGGVKKTITCAVAYANLIVLQR

SEQ ID NO: 43928 - protein, 146 aa, Zea mays
  Coding DNA Sequence Number=SeqID_553
MVAVCRDENGTGTRNGYRVRVSKQDGFSDTDTGAFADRPPPTALPAARCLRRPPCLLPGASADRCACCRACCQVPSPITVLAIVPAARCLRRSPCLLLCLLPSACCHGREKHRLTEQPSSRDRASRATKPGQVPPPRSRAADVRIF

SEQ ID NO: 43929 - protein, 423 aa, Zea mays
  Coding DNA Sequence Number=SeqID_554
  Gene Ontology: Mol. function=N-acetyltransferase activity; Cellular component=cytoplasm; Biological process=protein transport
  Homolog annotation: Hit_ID=Q8LRF5; Match level="QueryCoverage=27%, HitCoverage=37%, E-value=2e-55, Identity=89%"; Hit description =Autophagy-related protein 3
  Pfam annotation: Domain name=Acetyltransf_1; Domain location=271-348; Score=23.1; E_value=0.0011; Accession=PF00583.15; Description =Acetyltransferase (GNAT) family
  Pfam annotation: Domain name=Autophagy_N; Domain location=6-144; Score=177.6; E_value=3.2e-50; Accession=PF03986.4; Description =Autophagocytosis associated protein, N-terminal domain
  Pfam module annotation: Pfam domain module=Acetyltransf_1::Autophagy _N; Domain location=271-348::6-144
MQVKQKVYEFYKGTVERVTAPRTVSAFLEKGVLSVPEFILAGDNLVAKCPTWSWEAGDPSKRKPYLPANKQFLVTRNVPCLRRAISVEEEYDAAGAEVVLDEDGEGWLATHGVQGTLLIALLHHAEKPGASWSEDKTMQSGTSNPHPVLPVAELRGSRTRQSSTASNASENHLQGLAASSRARSIPTTVEGVSLSTLRRWRYMSTVTRITRWQHEEEDTADHGQLCAALDVLHECFDDMVEPRTQTDLAADIVFNQESGLRRLNFRGYYVVGLEKVGELITVGTLRVFGNQVAELPLVGTRFAHRRQGMCRLLVTELEKMLRQVGVRRLVLPAVPELLPMWTASLGFHAMTRSDVMEMAVEHAIPELQGNHHVPKDSACLASFFDWDQLAHEIKDGEKREEVDEEYAKRMPETSQVQNECPYI

SEQ ID NO: 43930 - protein, 195 aa, Zea mays
  Coding DNA Sequence Number=SeqID_555
  Pfam annotation: Domain name=Lem_TRP; Domain location=107-116; Score =3.0; E_value=74; Accession=PF08262.2; Description=Leucophaea maderae tachykinin-related
  Pfam annotation: Domain name=Lem_TRP; Domain location=126-135; Score =3.3; E_value=61; Accession=PF08262.2; Description=Leucophaea maderae tachykinin-related
  Pfam annotation: Domain name=Lem_TRP; Domain location=145-154; Score =3.0; E_value=74; Accession=PF08262.2; Description=Leucophaea maderae tachykinin-related
  Pfam annotation: Domain name=Lem_TRP; Domain location=164-173; Score =3.0; E_value=74; Accession=PF08262.2; Description=Leucophaea maderae tachykinin-related
  Pfam annotation: Domain name=Lem_TRP; Domain location=69-78; Score =3.0; E_value=74; Accession=PF08262.2; Description=Leucophaea maderae tachykinin-related
  Pfam annotation: Domain name=Lem_TRP; Domain location=88-97; Score =2.5; E_value=93; Accession=PF08262.2; Description=Leucophaea maderae tachykinin-related
  Pfam module annotation: Pfam domain module=Lem_TRP::Lem_TRP::Lem _TRP::Lem_TRP::Lem_TRP::Lem_TRP; Domain location=107-116::126 -135::145-154::164-173::69-78::88-97
MAPPVDVVGLCPRLGEVEAPPRSRSSLSSKVEVESEPPGRTRRRPSAEARAESEPWGRAKLPGLSPSLSPGVGRSGVRRLPGLSPSPSPRVGRSGVRCLPGLSPSLSPGVGRSGVRRLPGLSPSPSPGVGQSGVRRLPGLSPSPSPGVGRSGVRRLPGLSPSPSPGVGRSGVRRLPGLSPSPSPGVGRSGVSYDA

SEQ ID NO: 43931 - protein, 227 aa, Zea mays
  Coding DNA Sequence Number=SeqID_556
  Gene Ontology: Mol. function=ATP-dependent helicase activity
  Homolog annotation: Hit_ID=A2WM02; Match level="QueryCoverage=37%, HitCoverage=15%, E-value=3e-32, Identity=81%"; Hit description =Putative uncharacterized protein
MKQMPPPPKDLEIAIVSLIPFMSWSIQKENPLLRLTVENCELSSIGVIILLDCLTNAKQLLDVLSIADNHLGSPVAAALARFLGSHVRALNATDIGLGTVGFQILEETLPTEVALSHINISVSLGSAPAIADSLAIRVGGQAMSRFWKPGSEKPSTLLVDDEEGGVVFLPSSSSVSSSGFGYASLERQRQRLPVYKYRKAILYLVERHATTIVVGETGSGKSTQIPQ

SEQ ID NO: 43932 - protein, 333 aa, Zea mays
  Coding DNA Sequence Number=SeqID_557
  Subcellular localization annotation: CTP_CleavageSite=61; ConfidenceScore=5.55e-01
MQPGRIPSPVVTQDASRMFIILAGAGAGLSRSSSPRAGRLATSSSSFWRWKPSSGPAEEASSSHAGEGELLLSSLDATFRPSPHFRGEDGSEDLPVRLANCRRWWRGGRHRLCRRGGSWRKLPPVKAVGAADGPALGSLALMSDSLVDYLNRFTERESPRAKVTSEESLGSVGLAVRGFSGLVKGTPRPLFDEPKPEVAVSARTEVELAQKEDLVGQSLDGSSTGGTDAGVELPRPQAGMMSSGNSWPRPRDDRPSRLLEPDSWRRPSRRWPGCGADVALQSGDPPTASSSEARSNLAEGVVDAEGASAPPPPSTVDVRACRIGLSCSDPLSK

SEQ ID NO: 43933 - protein, 98 aa, Zea mays
  Coding DNA Sequence Number=SeqID_558
  Homolog annotation: Hit_ID=A3BBN3; Match level="QueryCoverage=52%, HitCoverage=12%, E-value=6e-08, Identity=50%"; Hit description =Putative uncharacterized protein
MGVRYSGRIVCSGFGQLIDLQKEVCPIQLLALCVIRLRKPSSIFLSPIWKHRNACVFEGVVPCTQRVQSAVIEEGNVWCLAGASALQDLLLRQLPRGP

SEQ ID NO: 43934 - protein, 654 aa, Zea mays
  Coding DNA Sequence Number=SeqID_559
  Gene Ontology: Mol. function=ATP-dependent helicase activity; Cellular component=spliceosome; Biological process=mRNA processing
  Homolog annotation: Hit_ID=Q5QNI3; Match level="QueryCoverage=100%, HitCoverage=74%, E-value=1e-161, Identity=69%"; Hit description =Putative DEAH (Asp-Glu-Ala-His) box polypeptide 35
  Pfam annotation: Domain name=HA2; Domain location=440-599; Score =18.6; E_value=0.0052; Accession=PF04408.14; Description=Helicase associated domain (HA2)
  Pfam annotation: Domain name=Helicase_C; Domain location=290-379; Score=36.0; E_value=1.3e-07; Accession=PF00271.22; Description =Helicase conserved C-terminal domain
  Pfam module annotation: Pfam domain module=HA2::Helicase_C; Domain location=440-599::290-379
YLKEAGWADGGRLIGCTQPRRLAVQYFLLLYADVSPSHLLLIIAFSTHLTIEQMVASRVAEEVGVKLGEEVGYTIRFEDQTNPGMTMIKFLTDGVLIREMMEDPLLTKYSVIMVDEAHERSISTDMLLGLLKKPCQVKMRIAYLTSHTIEIQKDFLNNCHVTNTQSVVAMIHALVINLSILPYWRKNSLLGSSDNLPSPEPAVLSVEGKGYTVEIHYVEEPVSDYLQATVNTVLLIHEKARFFMQEPPGDILVFLTGQDDIEAAVKLLNEEIQHLGRHYLVGQREAPDLSLVSDQLPPAIMRGLEDLIFAPTSKGKRKVVLSTNIAETSLTLEGVVYVVDSGFSKQKCYNPISDIESLVVAPISKASARQRAGRAGRVRPGKCFRIYTEEYYLTEMQSEGIPEMQRSNLVSCIIQLKALGIDNILGFDWPASPSPEAMIRALEVLFSLGILDEDAKLTVPIGFQVAEIPLDSIPFRSTYEAMFYGAKTLEPADRIWKSWAPGPRANIVSSHGWLSTIGVGQRTAKEEAVLLSLAGAKGLPFIQALDQPANDFGCSDEILTIASFLSVQSVWVSVRGVKKEFDEAKLRFAAAEGDHVTFLNIYKGFHQSGKSSQWCYKNFLNYQALKKVVDIRGQLLRIVKSFGIQLKSCDRDMQ

SEQ ID NO: 43935 - protein, 475 aa, Zea mays
  Coding DNA Sequence Number=SeqID_560
  Gene Ontology: Mol. function=1,3-beta-glucan synthase activity; Cellular component=1,3-beta-glucan synthase complex; Biological process=1,3-beta-glucan biosynthetic process
  Homolog annotation: Hit_ID=A2XC08; Match level="QueryCoverage=33%, HitCoverage=11%, E-value=1e-79, Identity=88%"; Hit description =Putative uncharacterized protein
MAFEMYGMLAGNVSALTGEYVKPAYGGEKEAFLKKVVTPIYHTIAKVEAERSKREKGNHSEWRNYDDLNEYFWSADCFRLGWPMRADADFFCQPDERNESTRISKQKGKVNFVELRSFWHIFRSFDRLWSFFILALQVMIILAWDGGSLASIFDYAVFKKPLPPVPPTGRPSPPPPRARPRPRPLPSSPASQAARSLCSGRADILCPSCHLPMAALPSSPIGGDSPSATAVAVTAGQAIAPPATMPLGARTAATGLPVQAVVGRAEGAAAMFASLAVVGLTAERPLPHDPRSELTVGAPYIADLRPLLDAPPPAVMPPLRRWASVGATVAASQERQRATSLALEHERAMCAALTAHMATAQRLFLGHPPVDHETPTPTPEAAHGLDVDHVTTLHAQVVGLHNIRSLVSIVLDPASSHYPRWRGQVLTLWQYALADHVLVDLVNPPHLGGPSMGEYCRQMKVLADSLRDLGEPVVD

SEQ ID NO: 43936 - protein, 159 aa, Zea mays
  Coding DNA Sequence Number=SeqID_561
MMNLTSLKSELSRLRRRNGRRKSIAESILGDKYMTTETTNSGRWFRPFPNQLLIILMIPVGFSQVYAYVTDVESGTKIDEDTQRQPLGEDVGELQRGGDAENPNVTDSDPLTDKVQIDLHVLRAMMLHEIGGEVDRVDVIAVDEAGALEGAVELVEKLE

SEQ ID NO: 43937 - protein, 133 aa, Zea mays
  Coding DNA Sequence Number=SeqID_562
MDADDPDSNALRDEVKVDLDMLRALMRDRVDREVEGADIVAVDQRAPSVGNVKLLEKLTQPARLSHAISNSPVFGLNMTETDLLDNMHDVGPGEGEILKSVDKVAVDSGVTHRSTVTRELGMRVHRGQTGLAI

SEQ ID NO: 43938 - protein, 102 aa, Zea mays
  Coding DNA Sequence Number=SeqID_563
  Gene Ontology: Mol. function=1,3-beta-glucan synthase activity; Cellular component=1,3-beta-glucan synthase complex; Biological process=1,3-beta-glucan biosynthetic process
  Homolog annotation: Hit_ID=A2XC08; Match level="QueryCoverage=83%, HitCoverage=6%, E-value=4e-29, Identity=76%"; Hit description =Putative uncharacterized protein
MAKDSNGKDRDLRKRLDNDYYFKCAIEECYASFKNIINGLVQGEPEKRVINKIFVEVEKCISEDKVIADLNMRALPDLYFKFVELSTCVPIYESARVPIYER

SEQ ID NO: 43939 - protein, 219 aa, Zea mays
  Coding DNA Sequence Number=SeqID_564
MRALEILGRTPLNTQSLRWRQIHQAPNTIKELEPALKSPCTIPAALLHHSSKLDSSLPGERVGSPNFCSNKNQNCLEKTHDTKRWWMGKKAGCGRPLLAKRSAVQHLLCMTSHKKPHLAGTQISDPRHVIKGLHHRPLISDPKWNKSVNMGSQILQSLPHEPSVSPKQGTTTITHLRDHRNREQGLQQAVTYKGRSAQGLEESVLFSQSHLTRKAQFKH

SEQ ID NO: 43940 - protein, 115 aa, Zea mays
  Coding DNA Sequence Number=SeqID_565
  Subcellular localization annotation: CTP_CleavageSite=47; ConfidenceScore=5.63e-01
MGCPNKAQEDSLKATKSLPSNLAKRMTKSLPSNLVRRSRRLSSCPCRAASFSAETVKLNFRLELQATPTHNLDNGLCLELQVLREWVSLEVMTSTWLPVVPFSGGAYTSYSKVSS

SEQ ID NO: 43941 - protein, 132 aa, Zea mays
  Coding DNA Sequence Number=SeqID_566
MESHDLWAERESRLVGGNENDGFGIGYGNGKWYSFRLERVVRIATTAQEKMKPWKETSRSSKITTSSRHGLAATPSRLPVKAACHLDPARITTHLGSLALITSHLENKNEEEEKRSKSKSSKEHEQNSLSSH

SEQ ID NO: 43942 - protein, 291 aa, Zea mays
  Coding DNA Sequence Number=SeqID_567
  Homolog annotation: Hit_ID=Q6QP51; Match level="QueryCoverage=11%, HitCoverage=15%, E-value=1e-07, Identity=81%"; Hit description =Putative growth-regulating factor 1
  Subcellular localization annotation: CTP_CleavageSite=28; ConfidenceScore=5.13e-01
MQAACNRTKGAHPFDFGASSMGTQAHTSCNRRAGYYVRETAPPLAPVPRLLDCGTGAATRGNPAHGPTVPTEHISHGSVSRGRRRDGRYDQKWADSNGGGRRAEAAVKSSASSRLLLGQRENPLPRRDDDAPEFRSSNGSRTRNGCPANHSSCRINSAAGQATPLAGEAGDASPSPYDRIKKGTEKGDTPKGILIREGSGPRALLLIRGSKAGPSEGFDSRLRALGLRAHYWSEVPRLAPRKGSTAASGHSGSAPTTCQRFEGWPLRRVRQLPQATRAPRPLLIRGSQAGP

SEQ ID NO: 43943 - protein, 382 aa, Zea mays
  Coding DNA Sequence Number=SeqID_568
MVALLSRVVSQRTSPYGEDRPIWVERRRSDGRPGSSLRLAGAAALVPAAEGSPETRGTGDWRGSGAIRVVGEVGEGTGTPLVGFGSGQRHRRGAVHGGAARRRGYSTPASNQTQQRAKQGAIGAGEVPYLKAGSGDSSAATETRRGPGSTVAAARRTTGERGQREIGRGRGNWGAFRVADVGAELTGAKGAAELQRRRETELGTAGLRRRRSACAQRGGKRVYWAQMGGEGEGEWGSGHKWPRARWGESHARRGRGEGGREQLGGGYAGTTGLTSRARNAEREENGCGRERSGADGLGPRAERERGIGRAGGSGSADRWGRASSERGRRLLSEAVSPCRTFGDEAWSQQRKNTFPSFMLRKEEFLCFVKNPPIVAETLMLRQ

SEQ ID NO: 43944 - protein, 123 aa, Zea mays
  Coding DNA Sequence Number=SeqID_569
MGAPDSPVHTGHVRCPSHVILSVEIGAGRPLEALSSCGTGQSGASLILCSDFCRVYCSLSESTVGAQMTVAPLAHRTVRCTPDSPVNFSGAAFVKSRGYRVPEADLPWRTGHCPVYTGQSGEL

SEQ ID NO: 43945 - protein, 171 aa, Zea mays
  Coding DNA Sequence Number=SeqID_570
  Homolog annotation: Hit_ID=Q10CH8; Match level="QueryCoverage=67%, HitCoverage=75%, E-value=5e-08, Identity=38%"; Hit description =Expressed protein
MALIMLIGDGSTMCHVVRHLAHTPTPIAPVAISGIPVVPKPPIVPVATLPLMLIVPTIPAVGVVPQIHVVSNTAVLPPMSAVVPTIMPKVMLSPMLVIMAKVGALPPMPVVVPKVGDLPSMPSIPVVSVSIRSHECDTNSVDRPVKMLVESVSQKLRCTYVHILEDVGESE

SEQ ID NO: 43946 - protein, 131 aa, Zea mays
  Coding DNA Sequence Number=SeqID_571
MGKNNKRKREPTPPSEDFGDSEYSEEEFSSESEGSPAPIPLRESSDDSDDSQGLAAEVWTYIRAVERSGLEGSDESEYSSDEEDLSEEDGGGDGEDDDDDDDDEGDGGGSGGSKDGDGGGGSGKGSNKASG

SEQ ID NO: 43947 - protein, 163 aa, Zea mays
  Coding DNA Sequence Number=SeqID_572
MAAPRTTRPVALTLRRDKRQLWQEKRATLRLRHNDRVKKGTGKGDTPKGIVLREGNGPRAPFTDQRFKGCPSEGFNSRLRALGLHAHYWSEREASSPRTPSKGDRVRQITRRGSGAALANPAPAKPLTASTYQPENLGPDRAPGLRPARMREQPDQPKCCETH

SEQ ID NO: 43948 - protein, 151 aa, Zea mays
  Coding DNA Sequence Number=SeqID_573
MAATAAEERGELEGERALRVMTMATALGGNPFLKKDSPTDARDATEDLARRAPRGLGPRVILPGRWFLGAEKSNRCSRQYRVSSRPQQKVERVNFQNQCSGIEAPCAWPSKTIKCRGHGSVSRGDRRDSWRDRSQTGIIMSASAQKQRANR

SEQ ID NO: 43949 - protein, 209 aa, Zea mays
  Coding DNA Sequence Number=SeqID_574
MVTAGPTADTEDATQEVVQDVAEMAVARFQRDPADVELEVSRLDASILKKELVTWPPRGPTGLGLEAKPCSRTPESQFQILGHPSQSGGPCRLTNKTITKQIWGGESSLYNLVFMSVNQQIGFMRVDLTGLAYIYALPSYKGRKLNSPALLLWEKLTEVLYVLGIGHRLSFSCDKADTPRSAHFRHLEGSFPAGREFMDPFLVQYSPQD

SEQ ID NO: 43950 - protein, 56 aa, Zea mays
  Coding DNA Sequence Number=SeqID_575
MPSMGLGVCGSLCQGGNETDGFGYDYGAGCRHCNHCSGEDEAVEGDFQEFQDYDEF

SEQ ID NO: 43951 - protein, 53 aa, Zea mays
  Coding DNA Sequence Number=SeqID_576
MGGTTRAWGCETEQGAATPPGSTQSKSIVDHRPDWHYTELLGISFPMLQYQQL

SEQ ID NO: 43952 - protein, 216 aa, Zea mays
  Coding DNA Sequence Number=SeqID_577
MSVLASKYICENGKKKRKKKKRKNSPANWARGGDFGPLGADALAAQLAQLRGSDGGGRRRSAGPPAREGEGADGVDGNRGGKRARPGPVGGELHGGSPPPVRFFGGEVVARHRRVKWVTGVGLIGPTGAYGGRSAAAKSPVRFPAIIEWGKWRVVNVRVWRSSWCNLIEQKIAREGEGSSPGQGRQHGDSSSIGAGEAEEVVGAGVVKMGLGRVLL

SEQ ID NO: 43953 - protein, 337 aa, Zea mays
  Coding DNA Sequence Number=SeqID_578
  Gene Ontology: Mol. function=calcium ion binding
  Homolog annotation: Hit_ID=Q10S92; Match level="QueryCoverage=79%, HitCoverage=25%, E-value=1e-111, Identity=77%"; Hit description=EF hand family protein, expressed
MSLPTELTCGHANRLVEERETVDLGYGEAERTFLCPHQRSAGRVEVEKQVLDSREKLEYYRTKMQDLVLYKSRCENRLNEITERASSDKREVESLAKKYEEKYKQVAELASKLAVEEAAYRDVQERKVELHDALIKMVQGGSVDGLLQVRADRIQYQLEEMEKALSERCKHFELKFKPSASVELPSGWEPGPQEGLIEWDEDWDKFEDEGFSIVKDNGTIQENPVSAENGKVPSLWDDGDMSPVASSNGHIKEERRYSGGDQVAESEIAYDFGDESVRSPGSAGRSASGSPFKSSGFGMHDSSPSKRESYSRAVHKNDEKAEPSSKREDRETMRPSV

SEQ ID NO: 43954 - protein, 1049 aa, Zea mays
  Coding DNA Sequence Number=SeqID_579
  Homolog annotation: Hit_ID=Q10S88; Match level="QueryCoverage=81%, HitCoverage=96%, E-value=0.0, Identity=54%"; Hit description =Expressed protein
MLQYLDFSHASTSRKWAHRRQGDGLEAPRNSMEFALEASHSYGVFQEDVPHYPCNMRQYPKSGLNHSFNPVKKLIQEDISFRTNEVQKRPGGVIARLMGMESPPLNAATESISRSEITPRPTMPRRDPPERETSAKHVSFVQHGNRDSTKQASKQEIRAYGEERDVFGQQNKRGNEWSKPQPREHPQEEELQKFKKEFEAWQASRAWEHSRSFELESSTLGDDDDDGRCTDIVPYRYQHHHHHHHKGKDASHGGKHIRSSNEDVHCWRRSSKESGTSISGSRTFSLTTSADAAACSTRLPLSRFYHEEERSLSPTRIVILKPCPELSADDVEESSLGSPELVKKENNMEAFLEEVKKRLKIELEGGVASDDKADRRWFAAAAAADVIPADPKQIARSIANQIRENVTRDMHPALLRSESTRSYRSDVPFDGQGQMDYIGRDARRQLSDRLKNVLRRDPPDAETPFSFSHRRRATSTSFDEEPTRPKPTRHEVAPPSSRKGKVRSKEEEKKCAVESDVRSFRYGPSNTPTTTQLDSEPVSPRNLMRKATGAAGQRRRRRGKGRKDAFSIRGKVSNLRQNFGLRAKLFGKKFHASDEPFPDDLPPIGTLVTAPSVLIHPGVLQENSTEVPPSPASWCSSPPDEMSRGGYPSPVSPLEASFSEHRSPMRTEAKDMASAASEPGEQAHAEEGRAETSPVLDEQDDGDMDDTDHPMKSFVRAVLVVAGMYGRRHNPGNATMSECEVKPIPKWVLEEVVSPSSAPAGSGAAAVMDHRLLFDLVNEALPGAVRASTTLCAFDKCHAMAPRRASGGKALLEALWKSMQVWIEPPSDRRTASSASVDVLIGRDLSVSAWHGAFREDADALAGDVEAELLDELLEETVWDVLLNPDAFNWSKTFLLSDIPPKLQEQGMNSIPFVVPKDCPVDPSLEDATSGISKDSDGYGGPSPIIVESGLRRSKRLKEPRAGFRHGACPKRNCLMCQHNFDGPPPLSSKVLRNLGTRLCNLSEDDLSEQRLKQKKLTVGPIGPQRVDRKDLTDEKTDDSSDEDKQDNH

SEQ ID NO: 43955 - protein, 181 aa, Zea mays
  Coding DNA Sequence Number=SeqID_580
  Homolog annotation: Hit_ID=Q6QP51; Match level="QueryCoverage=64%, HitCoverage=57%, E-value=2e-38, Identity=68%"; Hit description =Putative growth-regulating factor 1
MMTASKKPPPEHSGFRLITDQRFEGWPLGRVRQPPQSTQAPCPLLIRGSKAGPSEGFDSRPRARRARDDSGYVRYMAEARATLPSHFALPLTDLTGKQRRSPRSDCCATRQSGAGNSQVQPQAQQEAPPRPTLGLGLNLGLGRRTPPRLTPRLGLSLDLGGWSPPRPTPGLGLNLDLGRNH

SEQ ID NO: 43956 - protein, 32 aa, Zea mays
  Coding DNA Sequence Number=SeqID_581
MAQPTVADLGAVGAPDMSGAHRTWFRCTPDSP

SEQ ID NO: 43957 - protein, 58 aa, Zea mays
  Coding DNA Sequence Number=SeqID_582
MVMNLDVAVDGEVGAGGGGAAAVAEGLGVVVGDRRLPDTRLSRASGPRGVYKAIGQGY

SEQ ID NO: 43958 - protein, 187 aa, Zea mays
  Coding DNA Sequence Number=SeqID_583
  Gene Ontology: Mol. function=protein dimerization activity
  Homolog annotation: Hit_ID=A2Y331; Match level="QueryCoverage=85%, HitCoverage=30%, E-value=3e-24, Identity=40%"; Hit description =Putative uncharacterized protein
MDGAQLTLEQRASRAQQDGKRGGQRRWRRSKLSSTEAGKVTEILLSTNFWNSVQDCIRASQPLLIVLRIVDGDEKPAMPEVAAAMDMAKAKITSGFEGREAMKRKLLAIINRRWQDQMEFFELQKNDPTKREIGRLRAAFNEVLWKMVDDYDLQAIISKQADEYMSMAGPAFSSPLAIREQQQKEPQ

SEQ ID NO: 43959 - protein, 326 aa, Zea mays
  Coding DNA Sequence Number=SeqID_584
  Homolog annotation: Hit_ID=A3C735; Match level="QueryCoverage=70%, HitCoverage=25%, E-value=5e-28, Identity=33%"; Hit description =Putative uncharacterized protein
MRALSHRSWSVKVICSYYLYWVKIMLDIMENSSLCAETGTSQEGVGVKNPDECSLEEPQSMNLLPEPALYSPDDFVNEQENHSPSEIVELVKPSVLTFPYSPENTNDKEEKLSPQSVLDPIAEVTSPRHKTPKQDEFSMPTSRVLFKEVDAPSASPTLWNGPQVAILDDRATRVSFIKAVLEASGLLSEENSQIWYTEEPLLDVSVLAEVGNSYCLTDDAVLLFDYVEEVLLEIRDKFFGSDPWVNSLKHNVRPAPVGRRLVREVAKGIDSLVGKEFPHTLEQVMMKDLDSGSWLDLGGDTGSVVVELWDGLLDDLLEELVFDLWL

SEQ ID NO: 43960 - protein, 149 aa, Zea mays
  Coding DNA Sequence Number=SeqID_585
MGKSKKGGSSSHHSGDKRKREPTPPSEDFGDSEYSEEEFSSKSEGSPVPASPPASSNDLDDSQGIAAEVWTYIRAIERAGLEGSDESEVSSDEEDSSDSSEEGSDGDDDGEGDGDDGGDSDGDGSMGDGKGDGGKGSGKGGSGSGRASG

SEQ ID NO: 43961 - protein, 155 aa, Zea mays
  Coding DNA Sequence Number=SeqID_586
  Homolog annotation: Hit_ID=Q6QP51; Match level="QueryCoverage=23%, HitCoverage=16%, E-value=5e-10, Identity=78%"; Hit description =Putative growth-regulating factor 1
MASTVVRTPKVGPGPLDIQSGPQGWFQTPGYTVQTSEVDPGPPLVQAGPLEWDPDPRRQGRSDHGHFALSLTDLTGKQRRPPRSGCCANHPGIGLGLGRRSPPRPTPELGLSLGLGKSHVLTRPWASAPASASEEPPPRPTSGSDRPRHKGLKGK

SEQ ID NO: 43962 - protein, 130 aa, Zea mays
  Coding DNA Sequence Number=SeqID_587
  Homolog annotation: Hit_ID=O48967; Match level="QueryCoverage=100%, HitCoverage=37%, E-value=2e-20, Identity=41%"; Hit description =Putative uncharacterized protein
MVHIVELHGGASEDFLMEEEAALSMPRASSRPVPGAAAMHAVQQPLPLSHPGRRQGLHPAAPTDDLRAELNCRRAGEDASVSLERPDDLRAELNRRRAGEDARVSLERARERRQNIEGRNLDQDFAAVAP

SEQ ID NO: 43963 - protein, 190 aa, Zea mays
  Coding DNA Sequence Number=SeqID_588
MDDGDRVAGFGPLLRPAEVAALAPAAGSSPKTRGAGAPRVLGRPGWSGRLGKARGTQWRGLSRDRGTGGWWATARRLGGGANRLRREIKHNREQGREKERAVEVPYLKAHPRNLSVAVKARRWLGSTVAAPGLHGGWRGVTVDDGDVAAGERDLGYQSPEGVLKDVFTGDSDTGGESDRRRSWVPKAASH

SEQ ID NO: 43964 - protein, 47 aa, Zea mays
  Coding DNA Sequence Number=SeqID_589
MGKSKKGGSSSHHSGDKRKREPTPPSEDFGDSEYSEEEFSSKSEGSP

SEQ ID NO: 43965 - protein, 77 aa, Zea mays
  Coding DNA Sequence Number=SeqID_590
MASTVVRTPKVGPGPLDIQSGPQGWFQTPGYTVQTSEVDPGPPLVQAGPLEWDPDPRMGSGPPIGVPKALGQNIPGL

SEQ ID NO: 43966 - protein, 208 aa, Zea mays
  Coding DNA Sequence Number=SeqID_591
  Pfam annotation: Domain name=Ribosomal_L38e; Domain location=53-116; Score=6.5; E_value=0.00049; Accession=PF01781.9; Description =Ribosomal L38e protein family
MNVCELTLVVSHPPQVKNSSTNFFQCSRQYFDDLLGDEPIVDTSVTTQQTYPTINAIQIKDFLLTVRRKDARSVKIKRSKDVVKFKFYFKPLLSHYRNPALCRVPESLPSAFYRALGKEDFVESRTRQSPALGKELIYRVQDTRHSEALGKDFFAERQTLGKDGSWQRSLETWKTVHAKMISMLLSTSYDRFQERTGNFEHHVHSTWS

SEQ ID NO: 43967 - protein, 591 aa, Zea mays
  Coding DNA Sequence Number=SeqID_592
  Homolog annotation: Hit_ID=Q10S09; Match level="QueryCoverage=100%, HitCoverage=100%, E-value=0.0, Identity=60%"; Hit description =Expressed protein
MELVYMERRNGSYDDGAVPEFSGRGAGGDQDQDPPAAASEVQSDSRQTPDEKKSKGCQSCRDPFCSCSGGTPHSELFPPHPAKMMILEFLIASLRHPTRTHNVSDLDDLIADGVSQGSVVNLGPSEKKVLESLHAMVNAKTRPKSPSPFMAGSKLRKIRSKSHVITQSEILKLISPETWEASSFPGASPMIGGGTAEDGVHGNKPPPPCCSSVSSNQHVLSRCPSSLSACLLQCIWKDGLPHFELSLDDHPIAVYAASPVRVLEKDRAFDYVYMIHSGEQGRKDWMGHSSNVSRLVGKVKVSSSLVLNPDKSGLLETEFVLYGSPDDYLRQMRSPYSVPKGKGLVRRVTEIMRAGNVSASPRHPWKLGKSSSHQFDDLAGVLEGEMISAGGSDLVSLKADDLPSNQELAAIVVREQRRRRRKEPVSGGWGLKFLEKAGLNRPQGTEETDVQNSDGATHCVTVVVPRGYHGGVVSKSSRPSGLVERWRSGGRCDCGGWDLGCPIRVLNGDGCGSLPEGESRDRRSVEISIKGWSDLYTSTLQGAKNETMLKLVNITEDLYILYFDSSISPLQCFSTGIAIVHSRAPELCPKL

SEQ ID NO: 43968 - protein, 300 aa, Zea mays
  Coding DNA Sequence Number=SeqID_593
  Gene Ontology: Mol. function=nucleoside-triphosphatase activity; Cellular component=nuclear chromatin; Biological process=cell division
  Homolog annotation: Hit_ID=Q10N52; Match level="QueryCoverage=56%, HitCoverage=15%, E-value=2e-34, Identity=47%"; Hit description =Expressed protein
MEVILCIREDMDIIDLEDETIDTKILNSMAVTNDHFKTALGTSNPSALRETVVEVPNVSWEDIGGLENVKGELQEKITRVGISSSNPTVEPLPSNSLGNAIVDGMSQGSAEMNCSDDDVNTVSRIPTTNKPHDESMGNVAISKDDINTNNNLSIELKKEHDSDLHQDCSSMTNKVTIDAIDGDKCIKTKVGVFSHAGQQGLRNEVSASENSKDKRSLNSEKNTPVNNTDNSMQDAKTAAGSSTTDLQKSSALPKSASPIMQPTKQPHKTLDSCLGKTRSPDIKSEMSQNGMQAGSSENQY

SEQ ID NO: 43969 - protein, 404 aa, Zea mays
  Coding DNA Sequence Number=SeqID_594
  Homolog annotation: Hit_ID=Q10S15; Match level="QueryCoverage=96%, HitCoverage=95%, E-value=1e-74, Identity=44%"; Hit description =Expressed protein
  Subcellular localization annotation: CTP_CleavageSite=45; ConfidenceScore=5.08e-01
MGCFLGCFGGAKERRRRRRKRSPSQSPNGRARALPRVTPNKVDLDGEAVSAAAPLLATLLELRDSTDDMCLALVKKKVTFDPNVTTFEAAPIPEDDGEEADPEDGGNSKEKGWMLASECAKSEAFPLNHRYSKFAGSGNVSDYEDAEEDEFEDEEEEEDDYEDEEGEDGLDECRIDDDDEDEHGLLGIGRSEEDACESLFLFPFGKMSRDSGGQVAAPVAPPAEAPAVLGSVESLNLTRWKEPKPRGAAAPKSSDKENVTVERENRMDFLAEPPAVAAKRKEEPRPAVSDNSYTPSTPSKQEASVDASLSTWLGSSATPESNSVRSYSPISRDERPILGALTVEDIKVSSANSTPRRSRSPSPSPDDMPILGTVGAYWNCSAKESDPVTRGGFMRTRTRFGQVR

SEQ ID NO: 43970 - protein, 95 aa, Zea mays
  Coding DNA Sequence Number=SeqID_595
  Subcellular localization annotation: CTP_CleavageSite=50; ConfidenceScore=5.55e-01
MCAGGSGIESGNPVCPPLGPILLALTATVGSSSLSHRRTASSNPAAVNCRSGRAQPWSSRSPRRSVPWWWWGGGPGAKEADMGLGPPRLVRIKRL

SEQ ID NO: 43971 - protein, 210 aa, Zea mays
  Coding DNA Sequence Number=SeqID_596
MQAACNRTKGAHPFDFDASSMEARTHTSCNRRTGYYVQETAPPLAPLPCLLDCGTSTATRGNPAHDPTVPTEHIGHGSVSRGRRRDGRYSQKWVGSNGGGRQAEAADRRHLWQKKQATLRFRHNDRIKKGTGKGDTPKGILLREGNGPRAPLLIRGSKAGPSEGFNSRLRALGLRTHYWSEVRRLAPRKGSTAASGHSGSAPTTDQGFVG

SEQ ID NO: 43972 - protein, 196 aa, Zea mays
  Coding DNA Sequence Number=SeqID_597
MRKKHGSVPKMHTCSGPDSHNEQTPALKVPLQTELRFHLRRYEQPPTIGGPAEQQKADGWLFAARSSSSDNDFCSERPNGSSDDLRADAAAIRPSPTSPLEGRGRVEGRRVGGQSAGGTDYLVGRETSSGCRGGRWHRKQRQSRSDRRAGHAAAASAMNGERPSPPISEGRSGPLPARRPTPTRRTPLPSTDDEHP

SEQ ID NO: 43973 - protein, 193 aa, Zea mays
  Coding DNA Sequence Number=SeqID_598
MVASDLPSLATLSAAWGQAAFQAMGNVNDGTRDMTEMVRQQAKLHRSEPWVGRGGGSSEVEVESVFRGRGRVRAPGRARRRPSAEARAESEPWGRARRSSSSSGAEAESEPWGRARRSSSSSGAEAESEPWGRARRSFLWRPRLDLAAVSLTLSSGTAVGAAQAALSSCQAGQWSGEVTAVTPALSTGGRASG

SEQ ID NO: 43974 - protein, 799 aa, Zea mays
  Coding DNA Sequence Number=SeqID_599
  Homolog annotation: Hit_ID=Q10SC2; Match level="QueryCoverage=99%, HitCoverage=99%, E-value=0.0, Identity=56%"; Hit description=FHA domain containing protein, expressed
  Pfam annotation: Domain name=FHA; Domain location=51-134; Score=17.8; E_value=0.034; Accession=PF00498.17; Description=FHA domain
MAPDPCADLAVTPKTSAKDEASCSVAPPTPPKVTPDEVRAVARKFADQPIQETEPDVWAVLTAISKKARLRPQQISGKHCKIYKDTVSGERNRHEPVPVFFKDTSSNGTFINWKKFKKNASPVKLNHGDIISLPSPPHDGKSFVFVYREVNAISCVENGVPILKRKSEEGSSGSKRLKGLGIGSPDGPVSLDDVRRLEKSNADLREQLEAHVVTIETLRAEIKTTQVQHGKNSIKDLDERLGASKQSRADADEIISSQKAIIRELEEQLSEERNLRREERDKAAHDLKFAVHKVQAEAQEEIKKQAESYLRQQREQKEVINKLQESEKETRLFVETLRSKLEDARDNLVTSEKKVRELEAQFQDEQLVSANNRKKSENLETELRKLKKELENEKAAREEAWAKVSALELEIAATIRDLSIEKQRETQLRAFYSTTEEISSLFAKQQEQLKAMQRTLEDEENYESTLMSVDLNKEHLAIDNAGMKPVNCSKNTLGASIASPENTQVSEHSSSDEDANMTEQQDDDVTANGGNTQDLECTSPERSVERRPGFHGNPVPTAPEREVTDTEQVPETESEAGNVGCDDQRCDNIGGETMPLEDEVLLPENEEPTALLKDAGQPQSNMVPIPILDDGGGHCSEEKHEGACSESKRDDTHVGAIRTGDLLASEVAGSWAVETAPSVNGENESPRSLGDATERDEDGGSVAADALLTLVNSEGQAAGSQNNVEQASSKITDDRRVLSAMIGIVDPEFRKQMSRSGAGNEEPMSDAETDEGVEEGDSDSGSDGSDSDSEEAMVEDSVG

SEQ ID NO: 43975 - protein, 52 aa, Zea mays
  Coding DNA Sequence Number=SeqID_600
MARVACTLCGKRLDGGVSVLSVKKRQTFVAFVQRWYPKKRTKTKAMGGKALR

SEQ ID NO: 43976 - protein, 447 aa, Zea mays
  Coding DNA Sequence Number=SeqID_601
MPSSSSSADATPPAAASSEETLSNVMVEELRAGDSVEFGVSRMTSARIEDMQRLGYFGGGVARAPGTEEVPEPEGELVVFEAFFVAGLRLPAHRVFELNQLSYDGYPGQDEADRRGKKPAVETGGDPALVAAASSKKRKLVMDKDRQGAARKRQATVRVHEARPKRQRGTTKAEASGGGKPPLPAKVGASAPGKAPEVTVGAGGPKLTKVVPSVSGVAEAAKAARTLPPPGKRVADFGTEINVEDYLGGSDEGPLALVVPGAAIAKAAPAPKAGGETLGAGGEVSALALVRDEAGVATRRLKGATEALSRATEALSQVADFTSRTASGALTAALSAEVERLRTQHADAVREKSASDSKCRKLAEKVAALEKEKADLRRQLAGERREANEAVAKEQAAQAEARLAQRKAISPRSSPESCSGGLLPWRAARRGPRPRCERRPNGRARSS

SEQ ID NO: 43977 - protein, 290 aa, Zea mays
  Coding DNA Sequence Number=SeqID_602
  Homolog annotation: Hit_ID=Q6JAD6; Match level="QueryCoverage=100%, HitCoverage=48%, E-value=3e-86, Identity=52%"; Hit description =Putative uncharacterized protein
MSAQIALRAHQLLDLPAFLLAIGADSEVHLSYLPGLLTLLTTSGRYVEEWVCVFYASVWIDTDHQWMRFRFEREDVTIHASETRLHSLCYSTSDPPRRPHGGVAPATTHVAALFRPPFSDGSRRSTTDFTTVAKYIYQLMRQTLLPRMGYKEATTHIQLWLLGALISHSKYDVVDFLISHEDPVSVPDPVIDTQAEDTTFHQFENQGTAVPDDDDDGDDDDDDFGIPPPPPVPPCSHDHEAGSSRAVYAAPCAVDPALAVILQALTQQQALMASEQARLASEQARQAAVQ

SEQ ID NO: 43978 - protein, 547 aa, Zea mays
  Coding DNA Sequence Number=SeqID_603
  Gene Ontology: Mol. function=metalloendopeptidase activity; Cellular component=mitochondrial inner membrane; Biological process =proteolysis
  Homolog annotation: Hit_ID=Q10Q21; Match level="QueryCoverage=94%, HitCoverage=93%, E-value=0.0, Identity=82%"; Hit description =Mitochondrial processing peptidase beta subunit, mitochondrial, putative, expressed
  Pfam annotation: Domain name=Peptidase_M16; Domain location=106-254; Score=242.8; E_value=7.8e-70; Accession=PF00675.11; Description =Insulinase (Peptidase family M16)
  Pfam annotation: Domain name=Peptidase_M16_C; Domain location=259 -462; Score=160.4; E_value=5e-45; Accession=PF05193.12; Description =Peptidase M16 inactive domain
  Pfam module annotation: Pfam domain module=Peptidase_M16::Peptidase _M16_C; Domain location=106-254::259-462
MAFRRILSTAVRRRSAIAAAAAGNAREASTAVAAAPGVLAPDATPVRAPVMPYDRIAEAVNARLRRLEHPDPRFLRYASPVPSHADHTAILAAPETRVTTLPNGLRVATESSLAARTATVGVWIDAGSRYENEEAAGVAHFVEHMLFKGTGKRSAAQLEQEIEDMGGHLNAYTSREQTTYYAKVLDKDVPRAMEVLADILQNSNLDQARIEREREVILREMEEVEGQSEEVIFDHLHATAFQYTSLGRPILGSADNVKSITKEDLENYIATHYTASRMVITAAGNVKHEDIVEQAKKLFSKLSTDPTTTNMLVSKQPASFTGSEVRIIDDDMPLAQFAVAFNGASWVDPDSVALMVMQTMLGSWNKSAGGGKHMGSELVQRAAINDIAESVMGFNTNYKDTGLFGVYAVAKLKGGPGAAVEPTVCNRKADCLDDLAFAIMHEMSKLSYRVTEEDVIRARNQLKSSIQLHLDGSTAVVEDIGRQLLTYGRRIPTPELFARIDAVDASTVKRVANRFIFDQDVAIAAMGPIQGLPDYNWFRRRTYMLRY

SEQ ID NO: 43979 - protein, 244 aa, Zea mays
  Coding DNA Sequence Number=SeqID_604
  Subcellular localization annotation: CTP_CleavageSite=4; ConfidenceScore=5.35e-01
MSPRSLMHRVFPPSKPPDGGYPLSFRLIVGGTQLRGSWYLSAIVRLQGFSSCSPAVSPRRWSPKTVTTSSWVGRSKPGCDLGPTLSFKDVHHPRWGGGRAEPALLKGKCAFGPFLSILVIECKHKCLNVKMCPWLNKVQITSKGRRRKEMESGCVQPKAVSGLGTGLSGVHRTVSGAPDQRGANQPLSGFSPATSAKIHRTVRCAPDCPGERLQFVEIPRKREKRKEKKNTVVFKLIIGSLERS

SEQ ID NO: 43980 - protein, 61 aa, Zea mays
  Coding DNA Sequence Number=SeqID_605
MDESGMPPGTSNCITFESQRIGDASTTEDSLDLDLGGASASPDPGLGPTTSQGGHHYPTPS

SEQ ID NO: 43981 - protein, 317 aa, Zea mays
  Coding DNA Sequence Number=SeqID_606
MLFFRHVGKTSSIPPPAGGLSAAIVAVARRRKEYHVVAVVEGHELKTPETEHRPGLERLLETTHLELDEKLFVNTQQAPTWRANCRCFDPGGSLDRRVNCRRVPQPRWVSARRSAKGGGNQRETGIKGETRGLRVCPAPRSALGRGEVESVFRGRGRVRAPGRARRRPSAEARDESEPWGRARRSSSSSGAEAESEPWGRARRSSSSSRAEAESEPWGRARRNSSSSGAEAESEPWGRARRSSSSSGAEAESEPWGRVRRSFLWRPRPDLAAISLTLSSGTAVGAAQAAMSSRQAGQWSGEVTAVTSALSTGGRASG

SEQ ID NO: 43982 - protein, 505 aa, Zea mays
  Coding DNA Sequence Number=SeqID_607
  Gene Ontology: Mol. function=P-P-bond-hydrolysis-driven protein transmembrane transporter activity; Cellular component=membrane; Biological process=protein secretion
  Homolog annotation: Hit_ID=A7P222; Match level="QueryCoverage=100%, HitCoverage=100%, E-value=0.0, Identity=88%"; Hit description =Chromosome chr19 scaffold_4, whole genome shotgun sequence
  Pfam annotation: Domain name=SecY; Domain location=77-491; Score= -55.2; E_value=1.8e-10; Accession=PF00344.11; Description=eubacterial secY protein
MAGGFRVLHLVRPFLAFLPEVQSADRKIPFREKVIYTVISLFIFLVCSQLPLYGIHSTTGADPFYWMRVILASNRGTVMELGITPIVTSGMVMQLLVGSKIIEVDNSVREDRALLNGAQKLLGILIAIGEAVAYVLSGMYGSVSQLGTGNAILIILQLFFAGIIVICLDELLQKGYGLGSGISLFIATNICENIIWKAFSPTTINSGRGAEFEGAVIALFHLLITRTDKVRALREAFYRQNLPNVTNLLATVLVFLIVIYFQGFRVVLPVRSKNARGQQGSYPIKLFYTSNMPIILHSALITNLYFISQLLYRKYSGNFLVNLLGMWKESEYSGHSVPVGGLAYYVTAPSSLADVLANPFHALFYVVFMLSACALFSKTWIEVSGSSAKDVAKQLKRKVLRSCCYSQQLQYSVRTPNRPKFIFHAKEQQMVMPGHRESNLQKELNRYIPTAAAFGGVCIGALTVLADFMGAIGSGTGILLAVTIIYQYFETFEKERATELGFFGF

SEQ ID NO: 43983 - protein, 103 aa, Zea mays
  Coding DNA Sequence Number=SeqID_608
  Subcellular localization annotation: CTP_CleavageSite=46; ConfidenceScore=5.07e-01
MNKNTGIQSAITNGTPVPPPRVRTTPLDRGGPAEQQKTDGRLAAARSDYDNNDPRPGRRSSFSSGFGAGVTTEGLSPAEDENQPFRQGDGDPGPLAPYLSRHG

SEQ ID NO: 43984 - protein, 412 aa, Zea mays
  Coding DNA Sequence Number=SeqID_609
MGGPAEQQKTDERHAVARSSSGDDDNFCSRGPNSDSDDLRADAAARRPPPMPKLVRQGRAEGRRVGGRSVGGPGYLVGERTSSSCRGRRRRRERLRSHSRPRARHATAAGATDNNRPSPRSLREGAGRRPRRGRPQLGTLPSALPSRAESSPTRSKALLLRRGGWVPRVMQASSEQKKPNHRARCVQPPSGYKRLSTFAQTSGRKGGQPCRRHATAPSGRTSPTPNTPGMEAQAHASCNRRAECFVHATAPPLAPPPRLLDCGTNAATRGDPAHDPAAPAWRDGQCGQKWAGSNDGGRRAGAAVTSSAKLTRSERRFAFAIMTASEKGPGKGDTPKRIFPREGTMLRASLLIRGSKAGPSKGFDSRLRSRGPYTHYWSEVRRTAPRKGSTTASGYSGSAPTTDQGFEGWPPK

SEQ ID NO: 43985 - protein, 110 aa, Zea mays
  Coding DNA Sequence Number=SeqID_610
MDGKHTLQDNPILQAWVLTLEGSSSTLGIDNTFGEESGPSRRLGRSARGLGQLSSKDVSPTRGLGWSIPASVPLTDDPARLRPTRFSFRANSASVHDDTATPGLGSSESG

SEQ ID NO: 43986 - protein, 199 aa, Zea mays
  Coding DNA Sequence Number=SeqID_611
  Subcellular localization annotation: CTP_CleavageSite=63; ConfidenceScore=5.54e-01
LPLARVRGSPSPAAFGGEGAHRPYGRPGLRQRGAGRRRASSPPACRARRLGSRWPLPSEGGCRAVCTGGPPKMSRAARAAFVFWGGPAFAPGWRPRAEVGAPLAREDLSGDLPGGLMAPAIGVEAEAAREVPVTDGKMVGRGPWGNRPSRLLGPDSRRSPWTASPSEAGSDLAEGVVDAEGATAPFQCEDPSLQDQIVL

SEQ ID NO: 43987 - protein, 354 aa, Zea mays
  Coding DNA Sequence Number=SeqID_612
MGGTRHLSVSSLEERNSVGVGTFQPSFGFKDFHQPARLHPHAGGHPRWLSRRSTSRAGLQVTLSRGVRGRRRSLPCGRRGLGQRGADRRRASSPPACRSRRLGSRRPLLPGGGCRAVSTGGPPTMPRAARAAFVFWGGPAFAPGWRPSAEAGAPLVWEDLSGDLPGGRRPPLSAPRRRRPEKSPSPTGSLPPSTPWASGSSYLSSPLERRRGRGQDCSSAHPEACTVVARPSGTPWPLFDEPRPGVAISVRTEAELARKWEPGWPEPSQVARQRGSTSESISRGLGSGWRPWKRLGRGPRGNRPSRLLGPDSQRSPWTASSSEAGSDLAEGVVDAEGATPLQREDPSLQDQIVL

SEQ ID NO: 43988 - protein, 148 aa, Zea mays
  Coding DNA Sequence Number=SeqID_613
MEKWIMGRSEPVERKRDFVHALHHLSVLFRLHQRCRRRYRGGRGGDGGGSSSKSHIEEDSCDGSGSDCEADDTSKSAAASQSNVAARACETVSMTQFGQHVTSFHVEHKTGVETELSMHAGGARRDQYYPCLINDDNGDDHDIWSILY

SEQ ID NO: 43989 - protein, 175 aa, Zea mays
  Coding DNA Sequence Number=SeqID_614
  Subcellular localization annotation: CTP_CleavageSite=51; ConfidenceScore=5.23e-01
MAATRRVNPFLKADFPARAPKRHRQGLPRCAPGFPSYDMRVRPHMSYKLTRSAKKANRRTGSVQPPRGYTPFHLRRNQQSKRRTAAQGVCNRPAVIRPSIFTITSGQGGETLHKEHATAPRLCAHSASTDGPTSGMGAQAHMTCTRRTSFWVQKSRTATRANTAPPRGRRRRLRR

SEQ ID NO: 43990 - protein, 140 aa, Zea mays
  Coding DNA Sequence Number=SeqID_615
MGKSKKGGSSSHHSGDKRKREQSPPSEDFGDSEYSEEEFSSESEESPGITAEVWTYIRAIERSGLEGSDESEVSSDEENSSDLSEEESGGDGDDEGDGNDGGDGDGDGDGGKGDGKGDGDGGDGKSGSGSSKASGKVPLA

SEQ ID NO: 43991 - protein, 276 aa, Zea mays
  Coding DNA Sequence Number=SeqID_616
MERAYEGRGRSRGCRQGHDSMERANAEIAGRGDPGRRMCCGLEWTGLCYGRFNRGPGQVQPGSREVQPVSRESSAGTDCQSDPQAVELALGAVQPVSGPVFPVCGKGRIRVERDPSLCGRLNEEVGHLGDVDPRAIDLAMRIAERMFLKMKEDEAKNKIEENDRWRPNDESTSSQGSSFKSTSYMCFIANGSDSESESEDEEEQESDSEDEDDLQQFFAQLSKKHRMSLLKLMKRAEEQKEMLHKQEDFLIRKIEDLEKLTKEHEKLKCSYDDLVQ

SEQ ID NO: 43992 - protein, 164 aa, Zea mays
  Coding DNA Sequence Number=SeqID_617
CQRFIYNYTKSTVRNTIDYSGQEKLFGKTDQARTIRALAADRPRHQDTPRTEPMQKSKSALWTVWRKSADSLSPRADRPASGADRPPLIYRGGPSGPGSRTIRAQQNGATARKWLVAINTTPTTSIHYTQAFQPSTFNTRASNPFQDTFKASISPSFTIEKRDH

SEQ ID NO: 43993 - protein, 126 aa, Zea mays
  Coding DNA Sequence Number=SeqID_618
  Subcellular localization annotation: CTP_CleavageSite=61; ConfidenceScore=5.67e-01
MEVGPRRSPTSKRTPATGAGATARPTTPASRRQRRSRTWLRGRARRWDARGMRCGGQAGVRRFHAAGRAVSMTQFGQHVTSFHVEHKTGVETELSMHAGGARRDQYYPCLINDDNGDDHDIWSILY

SEQ ID NO: 43994 - protein, 52 aa, Zea mays
  Coding DNA Sequence Number=SeqID_619
MIMEAIEYKVVLKIYVEEQLEPSPDDEEWTNSKVIGEFLGAFEEGFGTSNGF

SEQ ID NO: 43995 - protein, 77 aa, Zea mays
  Coding DNA Sequence Number=SeqID_620
MGPRPSASTLVQSSLLSFDRSAYALEISTSFLEVEDSLGAPEINISSSVHAFEISIMSSGINDSLGAPHPMGVAPEL

SEQ ID NO: 43996 - protein, 158 aa, Zea mays
  Coding DNA Sequence Number=SeqID_621
  Homolog annotation: Hit_ID=A2Z2H1; Match level="QueryCoverage=87%, HitCoverage=42%, E-value=4e-35, Identity=58%"; Hit description =Putative uncharacterized protein
MAWAASLAESAPQAKYTCLFVNDVKDDLSQIGFDVESIQKMVAGLEGKIELLENKQDVANTGIWYLCQVAGGLKDGINTRFFQETSEKLKLSHSAQPENKPVKGLEFFSESTMEQKVADSKPIAVTVDAEKPEKTAAVMGTTVHRSIRFSYRKAGLAL

SEQ ID NO: 43997 - protein, 260 aa, Zea mays
  Coding DNA Sequence Number=SeqID_622
  Pfam annotation: Domain name=SlyX; Domain location=171-238; Score= -8.1; E_value=0.056; Accession=PF04102.3; Description=SlyX
MNSPTPASGGDSHFSSDFLSRDGFPSILWEVLNSAGYPTPPLYTVQLYEEHRVPRCRVWLTLEAHPLQPGWRSLDSETIGLRTNDTVEAVAMKTLTTFCGYHPLEMVMHPMGLFPAEKKDDPMWCNRALQSDAMTLLANTAQAAKLTLDSREDFVVDLSTELVEKDLQVERLSQRITTLEQQVEIRDNTIDVLENQLHDVQRELEEANDHLDMHHLEMEANEAGSEGEEAPEELGPAPGANGTTSAMPPSPVSSVASTAQ

SEQ ID NO: 43998 - protein, 35 aa, Zea mays
  Coding DNA Sequence Number=SeqID_623
MAIARRSLEFMVAPRYAMNRLLYNVITVVFEPAIS

SEQ ID NO: 43999 - protein, 122 aa, Zea mays
  Coding DNA Sequence Number=SeqID_624
MSRLLDKALAIEHKRVQLGDLKRKAISQGQGSSSVRPRYSRHRVHRLDQEDRAQFSMLHRGLHRHLLVRLLPLAPRRGLQDRRPALHASSAVRLGTMLMLVRREILVHQLRTSNRLLARDIQ

SEQ ID NO: 44000 - protein, 496 aa, Zea mays
  Coding DNA Sequence Number=SeqID_625
  Subcellular localization annotation: CTP_CleavageSite=59; ConfidenceScore=5.25e-01
MDKDRQGAAQKRQAVVRLPKARPKRLWGAAKAAAPGGSQPTQAAKSAVPGSSRVPDAVKAAAAGGTKSVPAGAEKARELPPPGKRVPDFATDISVDDYLVGSGEGQLVVVPPAVATAAAVVEPRAKGCALSAGGEFPALTAVRDEASAVSRRLKEALSQAADFADRVASGALTAVVSAEVERLRAQHADAVRDKSAVDSKCRKLADKVAALEGERADLRRQLAEERKEANEALTKAQFAQAEANLARAECSLARQRAEELEERFNALQTRVERAEASTRSEAERTRKQLVDSYHELGARTADFEVPDQEPGLRCLELLQEELLALPAIVEGFMSYASLVTCEGAMNALSREGCRHYEVFDQADQDFERDIYKVEDPVVKESAGALFDRMWGPHGREVVRERSETARGQAARNEKVDDFGALNSVQPGSESNPVAAVSEVAPAPAPETAGGALDAPTATTAGGGSSPTAAPRADDPAKMAAEAAVEDPTRAGSSQVA

SEQ ID NO: 44001 - protein, 430 aa, Zea mays
  Coding DNA Sequence Number=SeqID_626
MVTISSMVGRSEPSCDLGPALSFKDLHHPGWGGGWAESELYLPRGFVGHLLPQHSRERALTGLAGGSDFDNAGLVGGERRQLQRVGLVGSAGPGSAPSAPSRRKSGCHAARTEGPPKTSRAARAAFVFWGCPAFAPVRRLCAKVGAPLVREDPSGDLPTGKWLPLSAPRWWRLKKSSSPTGSQPPSTLRASGSLTLIACPRPSSGDAGEGIVAAASTLRPSPLQFGHLERRSLSLLLERAAVSHPEPYRPAGPPMNPLPLFDEPKPEAAVSAWTEAELAQKEDFVGRSLAGPSTGGTDTGVELPRPRAGLTSSGDSWLRLRGGRPSCLLGPDSWRRPWRRRPGRGADVVLRSGDPPTTLPSEARPGFAEGGVDAKGATAPPSSRSEPAGSVYLVKVMSEVSVSRRRRSPSARSALAAYVYSVVFRIPLSK

SEQ ID NO: 44002 - protein, 37 aa, Zea mays
  Coding DNA Sequence Number=SeqID_627
MAHRTVRCATGAPTVRHREQSTVRCTPDSPVRCPVCH

SEQ ID NO: 44003 - protein, 613 aa, Zea mays
  Coding DNA Sequence Number=SeqID_628
  Homolog annotation: Hit_ID=Q6JAD6; Match level="QueryCoverage=75%, HitCoverage=66%, E-value=1e-160, Identity=64%"; Hit description =Putative uncharacterized protein
KAARSGVRTEKPVQRQQLQQPLRRPHLEISRRLHPIRLHSVLVVSPPGLAPPLTPPLPLCHPLCLLPSLLLLHPPPQPYPLPPLRQLPLLPLLPLPLLLLLSLHLASGSVMRLRFVLWFQILVCLIFSVLLRHGYVGSAGADSEAHLTYLPGLLTLLTISGRYVEEWVRVFYASVWIDPDHHWMRFHFEREDVTITASQICQLFGFPESTTRLHSLCYGSSDPPRRPHGGVAPGTAHVAALFRPPFTDGSRRSPADFTTAAKYLYELIRRTLLPRMGYREATTHIQLWLLGALVSHSEFDVVDFLICEIEDTVLDGIRARRQLPYAHYLCHIFAQLIQPPRFQSTLEASRLYLDLTVCSEIPVPASASVFDSQAEDAALRQFDTQGTAADDDDDDDFGVPPPPPPPMPPRSHDHEAGSSRAAPAPPPAMDPALATILANLAAEQARLSETMLSMFQSMQDRHDALQQQLLQDRAESRAFMALMLQHSGISAPPVQTAPPPPLHAPVVPSILSGPPVGTSPLRPVTLAFTSPVLSSVCPQPPVPPASAVTTTAVAVSVTASVPVAPAARPQSESVPAPASTADPGSETDSNPPSAFALLPRPRPDAPPPPPPAS

SEQ ID NO: 44004 - protein, 446 aa, Zea mays
  Coding DNA Sequence Number=SeqID_629
MVSPVSCKRVIRVDVRAPFVGGRLGAQRHAQKYLRQLARWLCDAWAWASKPARQKSEKRVHLARLHAACMAARPSRPLVWAKVGGRFLHDMRDPTPESQGRALERVGEDSARGVWGRTYGELPLKGGRLLSEGNHVFFLPYASCLSIFQAPGWGYPPPFRLLVGGTQLHGSWYLSAIVWLQGFSSCSPAGLRPLPLPQPQGFSSPGLGRGVRRVEVGPRVGGGPLLHSVMGGGAVVVRGAGSCSVPGLQTRVASEPLAAPASATAAGRGSSAGAIAGTGHGLTSNSTAFCPSLPHEFWRGRGPPGSSIRPEVSAAAVRPPGAEVVVVAAAGAGDGAPFAGLPLLCRPSPSEWGCSYPRKGNRSSVCNGISNAASLVDYLNRFTKRESPRVKVTSEYEQRRSWLENGNLVGRSLARLPVSVADAGVDQPRPRVGPAPLEDAWPRPQG

SEQ ID NO: 44005 - protein, 227 aa, Zea mays
  Coding DNA Sequence Number=SeqID_630
  Homolog annotation: Hit_ID=Q8H6I2; Match level="QueryCoverage=98%, HitCoverage=100%, E-value=2e-63, Identity=55%"; Hit description =Putative MURBZC
  Pfam annotation: Domain name=Zea_mays_MuDR; Domain location=28-227; Score=-46.2; E_value=0.028; Accession=PF05928.2; Description=Zea mays MURB-like protein (MuDR)
MDSSMESVAELCAQKFSATVVAARDTFTASTAACVVAGDLCATASASATVVCAQEALAKYYELRAYAVLFCSYAVLFLSPVISTHDPLSSFGRWLFVFPVQKKMNKKLAHALKYVVSQMSDTAKKLQDTASFCYTDEDVVDGFMMTQVACSMDELAEILEVTSIDCQVSMMDPTAILEAGYGSEDNAVWEDVFRDREIMNQPLEAETLGEHCAKWGLSFNEIWDRSM

SEQ ID NO: 44006 - protein, 137 aa, Zea mays
  Coding DNA Sequence Number=SeqID_631
MVRRHNPSVVEFSSDSDEIQEESPVLSPPPRRPLSKRGRDSGRMEEEGSSMPSQPTRGRRQKVGVTRPRRSTSSSGYAPCQEEDGAFDDVIDLPPSDALYITGLHMHPTNVSRGPNEPSVDFSLKGVDTLQRLRFTN

SEQ ID NO: 44007 - protein, 540 aa, Zea mays
  Coding DNA Sequence Number=SeqID_632
  Gene Ontology: Mol. function=cytokinin dehydrogenase activity; Cellular component=extracellular region; Biological process =cytokinin metabolic process
  Homolog annotation: Hit_ID=A2WVL5; Match level="QueryCoverage=99%, HitCoverage=99%, E-value=0.0, Identity=71%"; Hit description =Putative uncharacterized protein
  Pfam annotation: Domain name=Cytokin-bind; Domain location=247-529; Score=639.2; E_value=3.6e-189; Accession=PF09265.1; Description =Cytokinin dehydrogenase 1, FAD and cyt
  Pfam annotation: Domain name=FAD_binding_4; Domain location=65-215; Score=67.6; E_value=4.2e-17; Accession=PF01565.14; Description=FAD binding domain
  Pfam module annotation: Pfam domain module=Cytokin-bind::FAD_binding _4; Domain location=247-529::65-215
MTRCLMFTLLFLVSSLISTVGLPVEPPAELLQLGGGDVGGGRLSVDASDIAEASRDFGGVARAEPMAVFHPRAAGDVAGLVGAAFRSARGFRVSARGHGHSISGQAQAAGGVVVDMSRGRGPGAAVARALPVHSAALGGHYVDVWGGELWVDVLNWTLSHGGLAPRSWTDYLYLSVGGTLSNAGISGQAFHHGPQISNVYELDVVTGKGEVVTCSETENPDLFFGVLGGLGQFGIITRARIALERAPKRVRWIRALYSNFSEFTADQERLISLGSGGGRRFDYVEGFVVAAEGLINNWRSSFFSPQNPVKLTSLKHHSSVLYCLEVTKNYDDETAGSVDQDVDTLLGELNFLPGTVFTTDLPYVDFLDRVHKAELKLRAKGMWEVPHPWLNLFVPASRIADFDRGVFRGVLGGRTAGAGGPVLIYPMNKHKWDPRSSAVTPDEEVFYLVAFLRSALPGAPESLEALARQNQRILDFCAGAGIGAKQYLPGHKARHEWAEHFGAARWDRFARLKAEFDPRAILAAGQGIFRPPGSPALAAD

SEQ ID NO: 44008 - protein, 134 aa, Zea mays
  Coding DNA Sequence Number=SeqID_633
  Gene Ontology: Mol. function=carboxyl- or carbamoyltransferase activity; Cellular component=ornithine carbamoyltransferase complex; Biological process=amino acid metabolic process
  Homolog annotation: Hit_ID=Q8SA97; Match level="QueryCoverage=76%, HitCoverage=23%, E-value=2e-16, Identity=48%"; Hit description =Ornithine carbamoyltransferase
MAPPVDVAGLRPRLGDVEAPPKPRSSLSSVAEVESEPLGRARRRPSAEARAESEPWGRAERSGAVLLSGRSVERRSDGSHFGSTGWLCADGGYQLRIRSLEGGNEIDGFGYDYGTGEDEAVEGDFQEFQDYDEF

SEQ ID NO: 44009 - protein, 54 aa, Zea mays
  Coding DNA Sequence Number=SeqID_634
MGGGLLAAASALRSVLPLFGPPEQKSSSSLLLERALPYRVGLFVPAEGEPEFRL

SEQ ID NO: 44010 - protein, 52 aa, Zea mays
  Coding DNA Sequence Number=SeqID_635
  Homolog annotation: Hit_ID=Q9XEJ4; Match level="QueryCoverage=51%, HitCoverage=2%, E-value=3e-07, Identity=96%"; Hit description=Copia -type pol polyprotein
MTTDRPLELLHMDLFGPIAYISIGGRKISNPRNLKGILETGSKRVQLKDQQN

SEQ ID NO: 44011 - protein, 175 aa, Zea mays
  Coding DNA Sequence Number=SeqID_636
  Gene Ontology: Mol. function=oxidoreductase activity; Cellular component=cytoplasm; Biological process=electron transport
  Homolog annotation: Hit_ID=O04709; Match level="QueryCoverage=49%, HitCoverage=8%, E-value=3e-30, Identity=72%"; Hit description=Lysine- ketoglutarate reductase/saccharopine dehydrogenase bifunctional enzyme
  Subcellular localization annotation: CTP_CleavageSite=35; ConfidenceScore=5.46e-01
MAASMAAVVAAVSASIGAMAQQGGDGRSRPGGCVRAGTRRSGAALLWRPETGRVRGGAQLCCSVSWPETDHLVSMKMIDEVHARKGKIKAFTSYCGGLPSPAAANNLLAYKFSWNPAGALRSGKNPAVYKFLGETIHVDGKSVTVLFLLTCYTKGANACSPVLPFSKKMAVAITY

SEQ ID NO: 44012 - protein, 80 aa, Zea mays
  Coding DNA Sequence Number=SeqID_637
  Gene Ontology: Mol. function=helicase activity
  Homolog annotation: Hit_ID=Q7XD07; Match level="QueryCoverage=85%, HitCoverage=6%, E-value=6e-21, Identity=61%"; Hit description =Putative uncharacterized protein
MPTQQSTSHDAYPKRSYYGGPEHICPYCHVVFWFQECVKNNFCSTQRKIVYNLCCKGGKVNLKPFERPPPLLANLLRFDG

SEQ ID NO: 44013 - protein, 182 aa, Zea mays
  Coding DNA Sequence Number=SeqID_638
MWVLERFRELDMLEICYPAMGEDISISVMLLTSQLMTFGEPRIGYPAFVAYFDRPRPLKPRAHLHPPAHAGTVATKSAHPPPTSARLRAPETSPAPKTQSSRVPPPPTSTRLRRPETSPPNPLTTAPGITNYDPLLPYLSPLCSPQGSSSSATFPPLPNARKLDPPLPPPQWPGSTETTAGL

SEQ ID NO: 44014 - protein, 136 aa, Zea mays
  Coding DNA Sequence Number=SeqID_639
MAHTLRWSPPLGRLPGAEVVAAAEVVAAVGAEVVASAGEPLRASYPRGPTGPRYGTRLSGYTGSGPPQETNQQAGLMRADLTGLEYTDAPVARKRHSFSHSKIVTPGSAHFCMDLSEAWTHGESRTVFGGRQASAP

SEQ ID NO: 44015 - protein, 200 aa, Zea mays
  Coding DNA Sequence Number=SeqID_640
MKRYEIWSVGSAIWGPDLIIANLTHARPITIELHTRAHVEPLSGSNPKRWQQIQWPEALSPNPGQSTAAPRPPAAVPLPAHRPLREQVHNFDIFSVRNNVGATTNTIGGYFVRIMVTTVPTATRSGTSANQSSASLVRNSRRDACQSSSARPRASSRGRAGAPRPDSGTPPMVGRRQEEVQVPCGSYPRVEVDSSPPKLR

SEQ ID NO: 44016 - protein, 264 aa, Zea mays
  Coding DNA Sequence Number=SeqID_641
  Homolog annotation: Hit_ID=Q2RB10; Match level="QueryCoverage=98%, HitCoverage=90%, E-value=2e-52, Identity=45%"; Hit description =Harpin-induced protein 1 containing protein, expressed
  Pfam annotation: Domain name=Hin1; Domain location=87-235; Score =125.3; E_value=1.8e-34; Accession=PF07320.4; Description=Harpin -induced protein 1 (Hin1)
  Subcellular localization annotation: CTP_CleavageSite=78; ConfidenceScore=5.07e-01
HPPTTETTPLQQHPSFARPPPPPPGTYIVQVPKDQVLRVPPPDRARRYKKLAARPARRRALRRACCCACAAAILAVLVAAAFAGAVYLAYRPRAPTFSVTSLSIRGLDAASLLRSSSSSSETLSPRLDAAVRADNGRNAKVGVEYRGSGSVAVSYSGARLAAGPWPAFRQPPRNVTAFAVAMSGRGVRLTEDQATRIAAEQAAGAVPLQVETTVPVRLRFGSVLRTWTVPVRARCDVSVDRLDGDAVVVNRGCRVRVRPLWWWW

SEQ ID NO: 44017 - protein, 167 aa, Zea mays
  Coding DNA Sequence Number=SeqID_642
MSVVDCILEEAIPEALPHELPEVNVIDVHIARSDEASPTGLLAGPECSPSSQGMSLCRISLDRSFGVYLRAVFAYMPIFQRLQNVEGLKNTFPELVAEKRLKYFEREVAHHTAGTNDLVIHFPSAEWSTIQRVRATRRFTFPPAALYKQTGRCEVITAFIAIALLCC

SEQ ID NO: 44018 - protein, 306 aa, Zea mays
  Coding DNA Sequence Number=SeqID_643
  Homolog annotation: Hit_ID=Q6JAD6; Match level="QueryCoverage=93%, HitCoverage=69%, E-value=1e-35, Identity=57%"; Hit description =Putative uncharacterized protein
MPRTKNVLTLGGGDDEDPPRPFRQVKGKTVYLEQQEGHKKRHLDKAARAAIAAAAAVEQAERGAQLHIPSDQIAYRVRRLASRPRSSTPTTATTPPPTSPAPVTPAPSTTSAIPTTSTTPASTAPPPASAPPIPPARFWERDETEVRPLAVDPRLFDLQRATTARMGYREAITHIQLWLLGALVSHLEFDVVDFLICEIEDTVLDADSAPHFQGTLEASRLLFRSYRPAPEDPVLAPAPVIDTQAKDTTFHQFETQGAAVPNDDDFGVPPPPPPPPPMPPRTHDHEAGSSSGAAPPAIDPALAAIL

SEQ ID NO: 44019 - protein, 103 aa, Zea mays
  Coding DNA Sequence Number=SeqID_644
  Homolog annotation: Hit_ID=Q6J9V9; Match level="QueryCoverage=65%, HitCoverage=23%, E-value=9e-20, Identity=77%"; Hit description =Putative uncharacterized protein
MQVACNRTAGAHPFGFVASNMEAQGHTSRTGKGDISKGILLHEGSGPRALLLIRGSKAGPSEGFRQPPQSTRASSSLLIRGSKAGPSEGFDSRPRALGLRAHY

SEQ ID NO: 44020 - protein, 470 aa, Zea mays
  Coding DNA Sequence Number=SeqID_645
MHRALPPSEPPDGEHPRCLRLAAVGGARPRGGWHPLAIAWLQGFSSGSPATFPHQWSPRVVTISSMVGRSKPGCDLCPPSASRIFIILAREEGGASRGLPPRGPVTRFFLRHLGEEDILQLCGGGVLQPCGGRRTAAAWTGCSIPSFVWATVAGCTEGSHNTSYAMRANGSEDLPVCFGAAATRWCDVGGQVAAVASAEVVAAGEGFSANDTVCATCAPGLRLFGFNGWFSSPARGRERGPSSGSVRPGAIAAAVLPSETEVVVALLVQRSPASHPKSPSARSALPLKASLAQFKNPRLLCDEPEPEAAASAWTEAELARKEASSAHEQVASQAEEVQERRLELGQVIREWDQPRSHAAEAVSRVDVLGGQLAELRSGQPSAMLTSSFEVEILPPVSPSEAGPDSAEGGNDAEGAAAPSVDDLFVGSRIAYPSESYFLQKVMSEDSVIDIVEKARKSFWQKSFRALGLVR

SEQ ID NO: 44021 - protein, 81 aa, Zea mays
  Coding DNA Sequence Number=SeqID_646
MGKSNKRKREPTPPSEDFGDSEYSEEEFSSESEGGSGGGSGGGDGSKGSTRGGSSKGSTRGGSGKGSTRSGGGGSSSKASG

SEQ ID NO: 44022 - protein, 175 aa, Zea mays
  Coding DNA Sequence Number=SeqID_647
  Gene Ontology: Mol. function=cysteine-type peptidase activity; Biological process=proteolysis
  Homolog annotation: Hit_ID=Q5NKP7; Match level="QueryCoverage=100%, HitCoverage=37%, E-value=6e-69, Identity=82%"; Hit description =Putative uncharacterized protein 9C20.3c
MATEEMEHNDSGPVFDQTPTPHDDTLKGTTNSGSDPPLTELECVRSLWDLICSKDIDQSRVVIDYGEYSANCMDIYESFAEGKCLENVFLQCFIECVRDDSKNHRRTLTSNRLILDVNVGNCLHNTLPPLVNLDKCKSDNSRDLRAHALHQLTFHCMNKALPLPLDIQRFMFARN

SEQ ID NO: 44023 - protein, 241 aa, Zea mays
  Coding DNA Sequence Number=SeqID_648
  Gene Ontology: Mol. function=nucleic acid binding
  Homolog annotation: Hit_ID=Q5NKP8; Match level="QueryCoverage=65%, HitCoverage=25%, E-value=2e-81, Identity=92%"; Hit description =Putative uncharacterized protein 9C20.4c
MAAPWGNKSISEYTTPTSVHRPNQCLDIVAMVQEEQQGGNQLASDASTHTKSATAVDAITPPAALRAPGVDDQTIFEASRMTVNQGGQHLNTMRTIGDHEQDTPVILQRHEVTIDPRLVPKVGMTFSGVDEAYKFYSRYAYEVGFPLKSIGNEKIDTEKNQLQCNKTHDPEYMEFISSMQESRIPQHCIMDYVSEMHSGPESVPVTTQGMYNLKKAKQRERNANDVAKLLSFFASCKKDNP

SEQ ID NO: 44024 - protein, 199 aa, Zea mays
  Coding DNA Sequence Number=SeqID_649
MAITSARAPLRKGPRPRLPTGGDNEAIKAKESEARRQMALMVSPAEATTSAVGSLTSGGDHLSIDDSGHLRTSAVPANGGRPSAREEVLASVLTAGVRTRPSKNADTAPAAYDILYRPRHAPTKRQEAVPEAAPGPAKPGNQACGGRRHPQLAGLAYPKFTSSARLVNALLPECWRKKQATSPCGSRDPNSARPPPKHG

SEQ ID NO: 44025 - protein, 107 aa, Zea mays
  Coding DNA Sequence Number=SeqID_650
MAMTYTCRNSDGFDVLSYFSGRCGRNLGGRAEMIHKSGAAHTSQGDTRLGPGAHWRLRCNRNEVLIEVATIYVLAALVRPFQRDPGILSRTPAVEFCPEVVGLRTPY

SEQ ID NO: 44026 - protein, 38 aa, Zea mays
  Coding DNA Sequence Number=SeqID_651
MGTSGHLDLDTGGPSATKHGPNSSPFAVLDRFCNELDP

SEQ ID NO: 44027 - protein, 111 aa, Zea mays
  Coding DNA Sequence Number=SeqID_652
MGKNNKHNSQGLAAEVWTYIRAVERSGLEGSDESEYSSDEEDSDGGGEDEDDDDDDGDDDDDGDGDGDGSGRGSGGGSKDGDGGGSRGSNRGGSSRGSTRGGGGGSNRASG

SEQ ID NO: 44028 - protein, 879 aa, Zea mays
  Coding DNA Sequence Number=SeqID_653
  Gene Ontology: Mol. function=kinase activity; Cellular component =ornithine carbamoyltransferase complex; Biological process=amino acid metabolic process
  Homolog annotation: Hit_ID=Q6QP54; Match level="QueryCoverage=10%, HitCoverage=32%, E-value=6e-20, Identity=59%"; Hit description =Putative kinase
  Subcellular localization annotation: CTP_CleavageSite=60; ConfidenceScore=5.75e-01
MSSSSSSSSSSSLSGVSGDGSLGSPSLLLPPTAPLQGVPSPHPLASLSLFRVLLLLLLLRSDPPRGSVHRVLRDRWQGRLVTPQFLETDGNLDYENQGQSDTRKKERTLTRDMHPRSGRIKGWVRAPASSLPTVPATRLWRSSAERGTGTSANPPSRPPASSPKAATAALPREAPSGDGWQRPPPRRPIAPVAAGGSHHSLRKRREPPIVIPEVKPPALPPLVRRHKDSGDVLLRARLPQLEDAATDPHRHADPPFPRRQGKRLRREEMGPQIPVWVNPQKSFANCREDGRLRDGVGVEIVQLHPIVMQKRPHETACWHSEPPLMEGDETQHIPRRRGQGGPARRDHPLRLRVTREGTEQAIGDKGLQIVHRDGGEGPRVARRNDGYPVCHRQAKGVAAERTRSGQDPFNASPEPAAKFRLEDETPVPRTAHATAAPRTTRPVALTPRQGRRHLWQALSPPTDQGFEGWPLGRVRQPPQSTRAPRPLLIRGSKVVPSEGFDSRLRALGLRAHYWSEVRRLAPRKGSTAASGHSGSAPTTDQGFEGWPPEGFDSRLRTRRARDDSRYVRYMAEARATLPRGYTRRENSAACPAPTVVPPARVRLTAAESSLRRHRKLRLTRPQGSAPASTSEDDLRLARPQGSDSASTSEDGLRLARPQGSDSASTLENGLRLARPQGSDSALTSEESPPRPTLGSDRPRYRGYIITLPLASSGYGEQDQRPIWLAPGSSAPPTVTTPHEQGTNTSPTATSAWPSYEKVAAREDGLTSRLSLSLANAWTPRGRNTDSLRANRSQMGRRSGSLRPESARGKVMMAPPVDVAGLRPRLGDAEAPPKPRSSLSSVAEAESEPLGRARRRSSAEARAESEPWGRAKRSSSSSGT

SEQ ID NO: 44029 - protein, 162 aa, Zea mays
  Coding DNA Sequence Number=SeqID_654
MRRKDGGYPPSGGLEGGKTRCIRECEDMVAFQGGHPPFKGDYLYSRPQPSRAESSPTRSKVPPPAARGLGPTRHASRLRAEEAKPPRAGPGKGDTPKRILPREGTRLRASLLIRGSKAGPPKGSTAASDRVGPTPTTGQRFEGRPPEGFHGRLRLLGLRAHY

SEQ ID NO: 44030 - protein, 130 aa, Zea mays
  Coding DNA Sequence Number=SeqID_655
MEQNIPKATLVWRTRLFGVPPDSVRCTRKIDAELASFRNLGGRSAIIHRTVRCSTGLSGVPAEQRLLRANGRLQKALNALQCTPACVEVRAGARRRTRQSTGPVRCTTGLSGAPPDCPVAPQVRAPTVEP

SEQ ID NO: 44031 - protein, 46 aa, Zea mays
  Coding DNA Sequence Number=SeqID_656
MAMMGSTSEKMYLYQVKKRQTFVASVQRWYQRKKIKTKATGGKDPP

SEQ ID NO: 44032 - protein, 235 aa, Zea mays
  Coding DNA Sequence Number=SeqID_657
MASKQVTPPAAPNYDWPGSTHIEGRERCVESSPAPAATRAVVPTPHGGDAITGTPFAPHGGTPAAHGGNPRQRDAGEQLSLPRGTPPASDRVKETARARGDERLPRGALLSARNSNGIRLSLKNGGGGHRAKRCFPLCSVLRRCLAPSPPLGYFDLPSISSLSTASSILAFATCFPNALDSVGSCDWDPFISVLEAFASWDAAGLGLSYRHQAAEPTPRRTMQRHPSPAFLLSDR

SEQ ID NO: 44033 - protein, 77 aa, Zea mays
  Coding DNA Sequence Number=SeqID_658
  Homolog annotation: Hit_ID=Q6QP51; Match level="QueryCoverage=55%, HitCoverage=19%, E-value=8e-16, Identity=93%"; Hit description =Putative growth-regulating factor 1
  Subcellular localization annotation: CTP_CleavageSite=40; ConfidenceScore=5.42e-01
MSAEASRKALRPQRSQTTPPRPRGLHPAGKQRRSPRSDCCASHPGKADNSKFSLGRNRKLNLARPQASASGGGLRLA

SEQ ID NO: 44034 - protein, 170 aa, Zea mays
  Coding DNA Sequence Number=SeqID_659
MDGGNHPRGGVQNRPHETTCRHSEPSLVKRDEAQHIPRRRGQGGSTRRGHPLRLRVTGERTKQTIGDKGLQIVRRDGGERPRVARRNNGYPVGHHQAEEVAAERTRDRERGYSKKDPSPRRKRAPSPPTDQRFKGWPLGRVRQPPQSARAPSPPTDQRFEGWPLGRVEST

SEQ ID NO: 44035 - protein, 121 aa, Zea mays
  Coding DNA Sequence Number=SeqID_660
MSEDKVCTKDPCWSVGTIYDTRELLGVSTTGPGIERGVTSGIRSNPRGFTGVCGLGGSGIWRKVHVGPEWSHGMTYDDTRHTDVAKRVGSWIVVDRRGCRSSKGVDCDILALRMVISWPKA

SEQ ID NO: 44036 - protein, 18 aa, Zea mays
  Coding DNA Sequence Number=SeqID_661
EEVVVSYCPGGGGGERLL

SEQ ID NO: 44037 - protein, 478 aa, Zea mays
  Coding DNA Sequence Number=SeqID_662
  Homolog annotation: Hit_ID=Q10SP9; Match level="QueryCoverage=13%, HitCoverage=15%, E-value=7e-20, Identity=77%"; Hit description =Expressed protein
MAFIMFSWSENYGDPSESKHLMALFKVAAKEIAADVRIALPGAIQSLFECLLYTFLFLWTPALSSNAGYQNLSRLIALNCPADSANAMVLLMYHGAPIYDSWGPRAAANACSQLRRGERNRGKGECRCLKPVTLDFKAGCLNSKSLLIGPILFPIATVFKSTFWQQLFSDQAAALLGEQPVYHVVQRTIGCGAAMPPVALPGKEAGFIPLLSKGHHIALVGTDCISKWIEVVPVKNITHKEAQLVLADRLQTLHSSCLPTLVALKSWTVVERLWMIWYAEEWIGEGWNTPKYEGEEAVDAGRDFFFGKNEGAVGLVVSSRCSPKPSQLHRNTIAWSQLDVIFGLATRPNEIEDAAFENKRDNSLKKLKVPKGEDRTLLGRSKRGSKHNPKGTPYYNIKDAVPAQLSLVARENSTQPFRMGSSGAVAWPEKVVYSRIPSVGPDLLKKAPDPYTHDPDLRVWPRAPMQASRAPWVRSGPL

SEQ ID NO: 44038 - protein, 186 aa, Zea mays
  Coding DNA Sequence Number=SeqID_663
  Subcellular localization annotation: CTP_CleavageSite=21; ConfidenceScore=5.03e-01
MSGAHRTVRCPLPTVGSSTCLAQIARPTVGPADRWLTGQSGAHRTVRNGPKAHFPFTNGTGPAAQHTGDRRPSNPVYQTDNGKAIHDAEVEAKRLVKFLPGFEVRREPAHDAGPDHGGKTDTVRNWNDPGAPFYQKLPREHAVHQGESHMPYGVARAAVSMLFINGGPRLSLSLRRSGSRFVVGTG

SEQ ID NO: 44039 - protein, 81 aa, Zea mays
  Coding DNA Sequence Number=SeqID_664
MEIPRGRARRMTMANHRRVPEAGSPCSRSRRLKHVANHLSVAPERVLRAMRADRAMGEGSGNQQGMSGKTASAPSDPIWTM

SEQ ID NO: 44040 - protein, 232 aa, Zea mays
  Coding DNA Sequence Number=SeqID_665
  Subcellular localization annotation: CTP_CleavageSite=18; ConfidenceScore=5.31e-01
MKLWKETSRSSKITTSSRCGLAATPSRLPVKAALSTFLFRTLIYCKNYMDVSDMARLRHTARKSVIPFLPSRLAERPLRRPVAGQSSHLERLHHRLREEQERRRQEQRSSSLSLHQEIESVRSCSPVLSLEPPPAPPLGAPASGVAAGGDPDDGDGDDSSSHDTDFSANPEPEGWVARPITRDAARGCHFHDALDTLLRRAFDRHTWSVEYRCVVYQHSRGVYPDRWEATCL

SEQ ID NO: 44041 - protein, 195 aa, Zea mays
  Coding DNA Sequence Number=SeqID_666
  Gene Ontology: Mol. function=kinase activity; Cellular component =ornithine carbamoyltransferase complex; Biological process=amino acid metabolic process
  Homolog annotation: Hit_ID=Q6QP54; Match level="QueryCoverage=50%, HitCoverage=28%, E-value=1e-15, Identity=50%"; Hit description =Putative kinase
MAPPVDVVSPRPRLGDVEAPLRSRSSLSSMAEVEFEPPGQARRRPSAEARAESEPWGRAKRSSSSSGAEPESKPWGQADRSSLSSGAEPKSKPWVGRSGGLTACQPHSVEWHNSRSGASGAVLLSGRSVEQQSDCGHFGSIDWRTRVRIKGERTVKDRLNFFTYAPASPFRKEEGESAMLPSEGAEHGVSGELLA

SEQ ID NO: 44042 - protein, 304 aa, Zea mays
  Coding DNA Sequence Number=SeqID_667
MLELTTLAANRPRIVKVRPPARPPGCLMKILEAERWLKGANFHEVALLQQQQDESNAGAPHPGARKASQAKSSPTRSKVLPLRHGAGSHTSCKLARTEEVKPPRAERVTAQRLQALLHLRLTQRVKGRTTMQAACNCTTGMHPFDFNAPSMEAQAHTSCNRRAGYYVRKTAPPLTPILHLLDCGTVAATQGDPAHSPTVPTMRIGHGSASRRRRRDDRYGQKWVDSNGGSRRAEAAVKSSAGSRPLLGQQESPLPRREDDAPVFRSSNGSCNGCPANHSSRRINSAAGQATPLAGEAGDASPSP

SEQ ID NO: 44043 - protein, 231 aa, Zea mays
  Coding DNA Sequence Number=SeqID_668
  Homolog annotation: Hit_ID=Q10CD0; Match level="QueryCoverage=57%, HitCoverage=32%, E-value=7e-29, Identity=56%"; Hit description=IQ calmodulin-binding motif family protein, expressed
MAVRPWESRFLGTYTADGIFVVNETKQPDRSATKTPYRKPVKKHDSTLQSNMLNQKGFPSNSEGVGSSANRPSGLVSTKSRLKVLPREGPEEAPSRPSPLVRSASNPKERTSGINSERTGDLDCQVHKRFSLLGLGKKPDTRNPNPKNPNPNPNNPNPKNPNYNLGSNFRYPKLFRKFRVKQTGSEAGRHLTKKGTVNRSLKATKDSHMLGSRHHLASCIDPVPTRVELET

SEQ ID NO: 44044 - protein, 127 aa, Zea mays
  Coding DNA Sequence Number=SeqID_669
MVQWVTRSTCSGGVTNSGERDRTVPVGLVLGSSLRKLHGLSRKLSDGSDWVEVDKVGLATVGALGRLTSRGEVTGAAGWLGKARRGAEGVTGKVAVHEGCSRGSLGAILLIGPYGFEVWKNVNMFDL

SEQ ID NO: 44045 - protein, 143 aa, Zea mays
  Coding DNA Sequence Number=SeqID_670
MGKNNKRKREPTPPSEDFGDSEYLEEEFSSESEGSPAPVSPPASSDDSDDSQGIAAEVWTYIRAVERSGLEGSDESECSSDEEDSDGSDEDEDDGDDDDDDDDGDGDGSGSGRGGGDGSRGSTKGDSSKGNTKGGGSRDRASG

SEQ ID NO: 44046 - protein, 449 aa, Zea mays
  Coding DNA Sequence Number=SeqID_671
  Gene Ontology: Mol. function=heat shock protein binding; Cellular component=membrane; Biological process=protein folding
  Homolog annotation: Hit_ID=Q0PMD7; Match level="QueryCoverage=100%, HitCoverage=100%, E-value=1e-177, Identity=71%"; Hit description=J -domain protein
  Pfam annotation: Domain name=DnaJ; Domain location=13-103; Score =104.5; E_value=3.3e-28; Accession=PF00226.22; Description=DnaJ domain
  Pfam annotation: Domain name=DnaJ_C; Domain location=266-390; Score =31.3; E_value=5.3e-09; Accession=PF01556.9; Description=DnaJ C terminal region
  Pfam annotation: Domain name=DnaJ_CXXCXGXG; Domain location=167-253; Score=151.6; E_value=2.2e-42; Accession=PF00684.10; Description=DnaJ central domain (4 repeats)
  Pfam module annotation: Pfam domain module=DnaJ::DnaJ_C::DnaJ _CXXCXGXG; Domain location=13-103::266-390::167-253
MFGRAPKKSDNTRYYEILGVSKDASQDDLKKAYRKAAIKNHPDKGGDPEKAVSSDENDCQSLCEEQRGMLGSVYLTLYSDLPFKELAQAYEVLSDPEKREIYDQYGEDALKEGMGGGGGMHDPFDIFQSFFGGGSPFGGGSSRGRRQRRGDDVVHPLKVSLEDLYNGTSKKLSLSRNVLCSKCNGKGSKSGASSRCAGCQGSGFKVQIRQLGPGMIQQMQHPCNECKGSGETISDKDRCPQCKGDKVVPEKKVLEVVVEKGMQNGQKITFPGEADEAPDTATGDIIFVLQQKEHPKFKRKGDDLFYEHTLILTESLCGFQFVLTHLDNRQLLIKSNPGEVVKPDSFKAINDEGMPMYQRPFMKGKLYIHFSVEFPDSLSPEQCKTLEAVLPLKPVSQYTDMELDECEETMPYDVNIEEEMRRRQQQHQEAYDEDDDVPGGGQRVQCAQQ

SEQ ID NO: 44047 - protein, 258 aa, Zea mays
  Coding DNA Sequence Number=SeqID_672
MSSLKHGPYSRKTPKILLSYILPITLLFILSQTIHSSLFSPTVNFTVLHHIHPAINTLSYHLPLHTHSTPSTKANTPPTQLLRSAGYTHSVASPPVHPPEKGDRGRARRRPSSKVEVESEPWDRVRRRPSSEVEVEFEPSGRARRRPSSEVEVESEPWGRARRRPSSEVEVESEPWGRARRRLSSEVEVESEPWVGRGGDRLPRSRWSPSPGSGEAELPMALEAGLGCCQPHPGGWHSSRSRVGDAVFLSGQSVDGAK

SEQ ID NO: 44048 - protein, 82 aa, Zea mays
  Coding DNA Sequence Number=SeqID_673
MATATAAPASVARRRIWGHARDGGSLRRDGGSGDTLAMADPCGATADLGTRCGIGSRGHARGDSPMRCARRRCASGRDDGFP

SEQ ID NO: 44049 - protein, 31 aa, Zea mays
  Coding DNA Sequence Number=SeqID_674
MDYMVFEVAELDGAAMICHTNSKMKVLEKFY

SEQ ID NO: 44050 - protein, 311 aa, Zea mays
  Coding DNA Sequence Number=SeqID_675
MGSGEAEVVRPRPGRTRVRALGSGGAEFAVFRVLARVRALGSGGAEFAVFRVLARVRALGSGGAEFAVFRVLARVRALGSGGAEFAVFRVLARVRALGSGGAEFAVAPLSRPDCRSDSLYRVVLQSEWRRRHCPSVRLLYADGGYQLRIRRLEGLGLGLGPGRRRTPLRPTQGSDSGSAPEDGELRSARPQGSDSGSAPEDDELRLARPQGSDSGSAPEDDELRFARPQGSDSALALANGLRLVRLGGSDSTSTLEDRLDLDLDLGGASTSPNLGRGPTTSIGSAIITLPRADSGYGEQDRRPIWLAPLYE

SEQ ID NO: 44051 - protein, 603 aa, Zea mays
  Coding DNA Sequence Number=SeqID_676
  Gene Ontology: Mol. function=aspartic-type endopeptidase activity; Biological process=DNA integration
  Homolog annotation: Hit_ID=Q10CF6; Match level="QueryCoverage=88%, HitCoverage=70%, E-value=1e-143, Identity=50%"; Hit description =Expressed protein
LHQHLLDANVEVTYTEYLDLMKVEVDQHLNKLSEDIRDLKSCNLAHKYDTDGSCCTACHVGKLAEIDDRFNSLKFLLAVVFRQIREILTVVNSSIHDLQWEHELQSEVTGIIIGDCIRGLQDELERKLYEQSSMVNSLRKNCQETVAQFASIREELIAISNILLPSEEEPQISLCRHESLGNWSDRWKFSFFRKRAHQDHSLSSTQNQNSATQKSISPSEVISERSDFRHLKGMTRHEMLNYFRSEISKLRRLHELDLQEKTEELFKFKREKWSLALKYDVEFEPLRRKFPEVISRFDQIMSNGMAAAVPTICSNSDAFDETSRLSSIIDSLYRENQHLHCLLAEKMKNIQELSSQISDSTRKMSLQYSLEKQILRQLNSTQVEYEDLFVESTIRDEIYQTVVRTLVDSHRNVLEDTTQTFRAKVSSLEAALSEKDKALCLSDEENQMLKEKLSTLEKEHFIQNNQQDLELIKQESEEMVLRDIEMEPQRSCEISDRDIQYEGLIKLNQVLEIASTTAKEIETKRLNLSDIQECKTKCFSMIFYGCQTVHQLDVKNVFLHDTLKETVYCSQPTGFVDSARPDLPKGLQHMLPRVANMLSYKLH

SEQ ID NO: 44052 - protein, 68 aa, Zea mays
  Coding DNA Sequence Number=SeqID_677
MGSRHSACSAEAECRGSFVLLLLVTLLRGEVAFGAIYAQMRVIGMPFGLPSARDGVLISVNASTNAQQ

SEQ ID NO: 44053 - protein, 92 aa, Zea mays
  Coding DNA Sequence Number=SeqID_678
  Subcellular localization annotation: CTP_CleavageSite=46; ConfidenceScore=5.18e-01
MYQSDRTSARKHRTSVRTTRTTDYGPGLPNPVDGAPVQSIVKQCARAARRTVSIIPYTRSFPCTPRLRRSWMSGRKKIALAANISSSKYYIC

SEQ ID NO: 44054 - protein, 117 aa, Zea mays
  Coding DNA Sequence Number=SeqID_679
MQESLAGPPSQQNPPEGLPRNPLQDRHHSKILPRAFPGIPCRTAITAKSSRGPPYTDHSPTALAPFGKVQGVLAQESRDTGNRVPGRRVEYWKPGGLFCKMSRGRRGIGHHDPSDPH

SEQ ID NO: 44055 - protein, 169 aa, Zea mays
  Coding DNA Sequence Number=SeqID_680
MNKHTGIRDAVTNGAPVPPPRVRTTPLRGGRPAEQRKADEWCAVTRSSSGDDDAFCSEGPSSGNADLRLDAAARRPPPMPKLVRQGRAEGHRVGGTGKGGYPERDPSPRRDRAPSPPLLIRGSKAGPPKGSTVASDRVGPTPTTGQGFEGQPPEGLHGRLRLLGLRAHY

SEQ ID NO: 44056 - protein, 293 aa, Zea mays
  Coding DNA Sequence Number=SeqID_681
  Pfam annotation: Domain name=IQ; Domain location=96-116; Score=23.0; E_value=0.0011; Accession=PF00612.18; Description=IQ calmodulin -binding motif
  Subcellular localization annotation: CTP_CleavageSite=38; ConfidenceScore=5.44e-01
MDRRSMTPGISSRLSSPPPAAAPLTAATPSHPPSLTPRAFTRLEESFGRLAEKWDQIVVMFHRYKEKTEKELQAAVRQREGSWHAARATPWPSSHEQVVVRLQAAVRGFLVRRAVRKLHLLISSSLHQLAACASNHQVSSIPFEPPAEVEIWVCSPPARPKRVVSFIRATALVLDRPNIRTGWFLLHLSSNVKSAVQLFPWDPGGQEDIAAVQIYILVPQLFCIFVLNNKGKPRCKRLNLKSCQVSLWQLEDELVLKGGGDVMGITGNGHHHAVRTRTKGKNKIEMSWDKARE

SEQ ID NO: 44057 - protein, 332 aa, Zea mays
  Coding DNA Sequence Number=SeqID_682
  Subcellular localization annotation: CTP_CleavageSite=97; ConfidenceScore=5.05e-01
MGWLEMGFMVGFSGGRPQFPVAHGSAVALRACISLRAPSTLPRPHPAPHRACIPPAAAPRPASRPHPAGGRTPPRIPRPSINGASTPARGPLPPPFCAAGRGGIDPRRRHTVVPSALLAEAGESSIRGEGARPWLLRWWSGLLEARSTMGSPIRDLPKSPATPAAPPRFSPVHLAPARDPLAALPSATPSISPPSTTIVCALPSDIFTGILLLKPEGLKDSCYCFVICPSREEADKAVTAYHNKRTLPAHQETCIVLIGEIGGMAEEDIATFIQVVSRCTGIPMTRLGHNDKERLVVLADRRVAIALPLLMYLSNVEKGGHHIATVDVPIKC

SEQ ID NO: 44058 - protein, 316 aa, Zea mays
  Coding DNA Sequence Number=SeqID_683
MAERYQLPRSCVPPTTRRKACGYPPSGGLEGGKARCITEREDMVAFQGGHPPFKGDSPYLRPQPSGAESSLTRSKVLPLRRGGWVPHVMQAGPEQKKPNRRARCVQSPSGLQAALHFCPDQRAKGRVAVQAACNRAKWGHFSDFQHAQHGGPSPRDMQPARRMLRASNCTATCATTAPPRLRNRYRNSRRPSARPGSASLARRRSKRRYTFAIMTASKEKGPGKGDTPKRILPREGTRLRASLLIRGSKAGPSEGFNSRLRARGLHTHYWSEVRRPAPRKGSTATSGYSGSAPTTDQGFKGWPPKGSQPPLTQSEG

SEQ ID NO: 44059 - protein, 375 aa, Zea mays
  Coding DNA Sequence Number=SeqID_684
MPALAAVRDEAGAVSHRLKEMKEALSQAADFADRAASGALTTFVSAEVERLRTQHADAVRKKSAADSKCRKLADKVAALEGEKTDLRRQLAEERREANEALAKAQAALAEANLARVEGSFARERAEQLEEGLSALQSRVERAEAATRTEAERTRKHLMDSYHELGARTADFEVPDREPGLRCLEWVQEELQALPTIVEGFMSYASLVTCEGAMNALSREGCRHYEVFNQADEDFERDIFKVEDPIVKESAGAIYDRMWGPHDREVVRERAETVRGQAERGERVDDFGALNSALPDPESNPAEAVSEAALEPPPETAEGAPDAPAAAVAGEGPPLETAEGAPDAPAAAAPMAEDPVTVAAEATAEAPATAGSSQVA

SEQ ID NO: 44060 - protein, 236 aa, Zea mays
  Coding DNA Sequence Number=SeqID_685
MEVVELVPCARNKWGNWQDFWFYVAEGTVEDHLGLPVSEMCSHFYSAYMPFEVAEEDADEGALRCAADLSSGRDLVEEFIAYGVWPLAHGWALGEVCPRRMPSHGGKLVRSPVFALDLHSRDPAAFVREAEDGAVRIVGRITRELHRSTRRSSGFMKPGRRDSGGYEGYCPRRRPAAAGGEVGRPCIQQGAGGCGCRRWFQVCEGCTGVRQGAGGHEGGPRVAAAGQARRRLRHRH

SEQ ID NO: 44061 - protein, 25 aa, Zea mays
  Coding DNA Sequence Number=SeqID_686
MGHELSMSQKLSLAYAALVGGLLDP

SEQ ID NO: 44062 - protein, 770 aa, Zea mays
  Coding DNA Sequence Number=SeqID_687
  Homolog annotation: Hit_ID=Q8SA97; Match level="QueryCoverage=18%, HitCoverage=22%, E-value=5e-07, Identity=34%"; Hit description =Ornithine carbamoyltransferase
MALPVDVAGLCPRQGDMGAPPKPRLSLSSVAEAESEPWGRARRRSFGRGQGGVRALGSGEAEFRRLPGLSPSPSPGVGRGGGRSAEARVESEPWGRARRSFVVFRVLARVRALGSGGAEFAVFRVLARVRALGSGGAEFAVAPLARPDCLSDSLCRVAPQSKWRRRRCPSVRLAWILTAKGSICAPGIDNTFSEARPSLGRRRDPRVSALKDNVITKPGPLPPGSSPRIRPEQAARPVTPGPRPAVLQGHQPGPRPRQQRGPQGGCCCNLALAHADAQGARTSTKSRRPEARMVAVIPSATGTSRAASTSAPTKGAVSPPVDPHSDPPGRVGHRPPHGGAVPVQRQDRPRTRTPPWQRAISWAVLPCTRRGSRLPAGGGTGSQADEPDALRLTTPAVDRPRVVEVRPARRASERPLPRTPKERPTHEPAREVELWLSPASTPARMMNILEAEGGTKIAARPASPHPGGWWSPSQVTTGVGVQPGWLMKILEAERWLKGTNSRGVAFPQRQGGKTAGIPHPGAWKPSRAESSPTRSKALLLRRGGWVPHVMQDGSKQKKPNRRARCVQPPSGYKRLSTFAQTSGRKGGQPCRRHATAPSGRTSPTPNTPSMEAQAHASCNRRAECFVHATAPPLAPPPRLLDCGTNTATRGDPDHDPAAPAWRDGGASGRRSERRFAFAITTASKKGPGKGDTPKRILPREGTRLRASLLIRGSKAGPSEGFNSRLRARGLHTHYWSEVRRPAPRKGSMAASGYSGSAPTTDQGFEGWPPK

SEQ ID NO: 44063 - protein, 859 aa, Zea mays
  Coding DNA Sequence Number=SeqID_688
MKGPFGAVRMSSGRDLVEEFVGYGVWPLAHGWALGEVCPRQMPSRGGMLVRSPAFALDLHGRDPAAFVREAEDGAARIVGRYVPKTEGPRSWDIRGSNDKLNRVFELNRLPYDCYPGEDTADRRRKKPMGGTEEGPSQEAVPATKKRKLGTILGRKGVSDNFAVELMGTCAAPGGRMSSPELRESSARMLEVTGGRWPKNLPIPWAEGEDMSTSRIAHGLRIFSYGRNIAAVVSSVMNKDCQDAAQKRRAVIRLPDPRREAKRAWGSVKAVAPGGSQPTLAAKPAAPGSSKVPESTKAVVTDRTKSAPGGAAKVRELPSPGRRVADFGMNISVDDYFVATASTAVVGVRGDAFCASGEISSAAAVKDEVGTMSCRLREASQQLSQQLRQAADFADRVASGALTADVSAEVERLRAQHADAVREKSAAESKNRRLAEKVAALEAEKTDLRRQLVEERREANQAIAEAQAAQAEAKLARAEGSLASQRAEEWEVRFNARGLVPRVGARTTDFEVPDREAGLRFLEWLQDEPLVLPTIVEGFMSFASLVICEGAMNALSREGCKHYEVFGRSDENFEHEIFKVEDPVVKDSAGALFDRMWGPHGREAVRERSVLLLLMARAEDVEDLGDLNGARPEAEVNLVLPEAEVDPVLRSKAVEGSSAGPVSTMSGEGSLPAPAPTAEDPPKGVAELAAEDPMAAAGPSQVQDFGPAHATATDTANFVAASTVVAENESDDSVSKFFESHDSGSSVVWTEESSDEDFDYFAALDVAAVEASPRVMDAEVFPGPSAGRRRRRAVAKRRVSEVEGGRLRVDRAGKQELLSSPAGVSVSEGELRSLFEGEELRMMLFNYREMGIIPKVEPM

SEQ ID NO: 44064 - protein, 58 aa, Zea mays
  Coding DNA Sequence Number=SeqID_689
MAHRTVRCATGAPTVRHRCANGHFQRLVLTQSRWTHGAPDSEQSTVRCTPDSPPGPTW

SEQ ID NO: 44065 - protein, 795 aa, Zea mays
  Coding DNA Sequence Number=SeqID_690
  Homolog annotation: Hit_ID=Q6JAD6; Match level="QueryCoverage=78%, HitCoverage=88%, E-value=0.0, Identity=74%"; Hit description =Putative uncharacterized protein
  Subcellular localization annotation: CTP_CleavageSite=89; ConfidenceScore=5.07e-01
RALKVFFLCAVRWFTGQLLCAVRCAPDSHCRLSAAISQRPPASFSHRRPPSSPGSGDLARALPLVTLCDRVPSLVLPGSSPLVMPRTKNASASGGGDDEDPRRPFRQVKGKTVYLEQQEGRKKRRSDREARAAAAAAAAAAQAALGDQPDIPSDQIAFRAHRLASRSRSSTHTSASTPPPTLPAPVTPIAPSTSTAIPTTSTTPASTASPAPAPASAPPVPPPRFRERDETEVRPLGSDPRLFDLQRATAARVRRFRYVPVESWLPAQRDPAAGVLFSTRIQESFFRAQMSAQIALRVHRLLDLPAFLLAAGAESEAHLTYLPGLLSFLTISGRYVEEWVRVFYASVWIDPDHHWMRFRFEREDVTITASQIRQLFGFPDSSTRLHSLCYGTSDPPRRPHGGVAPGTAHVAALFRPPFTDGSRRSPADFTTAAKCLYELVRRTLLPRMGYREATTHIQLWLLGALVSHSEFDVVDFLICEIEDTVLDGIRARRQLPYAHYLCHIFAQLIQPPRFQSTLEASRLVFGSYRPAPEIPVPAFAPVFDTQAEDAALRQFDTQGAADDDDDDDDFGIPPPPPPPMPPRSHDHEAGSSSAAPATPQAMDPALASILQTLTQQQAQLAAEQARMSERMLSMFQTMQDRQDSLQQQLIQDRAENRAFMALMLQHSGISASPVQSAPPSSRHAPVVPSILSAPPAVTSPLRPVTLAFTSPVLSSVCPQPPVPPASAVSTTAVAVSVTASAPVAPAALPVSESVPAPASTADPGSEPDSDPPSAFALLPRPRPDAPPSPPPASDV

SEQ ID NO: 44066 - protein, 350 aa, Zea mays
  Coding DNA Sequence Number=SeqID_691
  Homolog annotation: Hit_ID=Q6JAD6; Match level="QueryCoverage=88%, HitCoverage=44%, E-value=6e-57, Identity=45%"; Hit description =Putative uncharacterized protein
TDSSAEDGIQGGYHTYPALALGALVSHSEFDVVDFLICEIEDTVLDGIRVRRQLPYAHYLCHIFAQLIRPPQFQGTLEASRLVFGSYRPAPEAPVPASAPVFDSQAEDASLHQFDTQDTAVDDDDDFGVPPPPPMPPRSHDHEAGSSSAAPAAPPAIDPAIASILQSLTQQQAHLAAEQTRLSERMLTMFQTILDRQDSLQQQLLQDRAESRAFMALMLQHSGVSVPPVQSAPPPPLQAPVVPAIQTGPPIPSVGPSPLRPVTLAFTSPVLSSVCPQPPVPPASAVTSTVVAVSVTTSVPAALAARPQSESVPAPASTTDPGSETDSDPRRRSLCCLDRDRMRPRRLLPL

SEQ ID NO: 44067 - protein, 124 aa, Zea mays
  Coding DNA Sequence Number=SeqID_692
  Homolog annotation: Hit_ID=UPI00005A9633; Match level="QueryCoverage =32%, HitCoverage=7%, E-value=6e-08, Identity=70%"; Hit description =PREDICTED: similar to Copia protein (Gag-int-pol protein)
MRTKLKMMKMKIKKSHLKRRIMIKGEMPMIKTRKMMRVQGRHTQESTKRYKEITPVEDALRDSDWVLAMQEELNNFTRNEDAKPIKTPMGTNGHLDPDMGGKSIDQKISGNSHTKYDVAYRLSN

SEQ ID NO: 44068 - protein, 23 aa, Zea mays
  Coding DNA Sequence Number=SeqID_693
MGKRGSEGDAGDFDGDFIDDDEF

SEQ ID NO: 44069 - protein, 314 aa, Zea mays
  Coding DNA Sequence Number=SeqID_694
  Homolog annotation: Hit_ID=A2XFR6; Match level="QueryCoverage=44%, HitCoverage=40%, E-value=2e-26, Identity=45%"; Hit description =Putative uncharacterized protein
MDPGTHMMVRTLQTTRVNTSYAPQLRQIPVYPVVVEKVPANLPPVRVENVINLEDSSEEQLPTPTPLAESLAFAAGSSTSASSAPAFQAPAPGGDDPDGDSDDEDDDDEDDGEDGHVNEEADYAQQDNFMGFGPVVEHYTSMFETGHFPNLLQEVLHALGTYVRPYTKQGETLSAHESLIPLSTYAASVSDATRRTLWSLSHTYRQQLQNTRFKHLPQRLRGESQTNIVPGEPGEDRLNTLAGVVAGLNTDLDSATLDLYRVHLELENAHARIAALEAQLQGLDPPEAQVPAVALSPPRKRLRYGEPESVTRLL

SEQ ID NO: 44070 - protein, 557 aa, Zea mays
  Coding DNA Sequence Number=SeqID_695
  Pfam annotation: Domain name=TolA; Domain location=137-476; Score= -114.8; E_value=0.0018; Accession=PF06519.2; Description=TolA protein
AKAHHECYTGIQKLIADAIVEKRAAKERRRKVKNDPRAGAGAGTSSIAPEDQSRGGDGEEIIRSPVAIDPRAGAGSGTTSNVPEDQPGGGDSEEIQLDCSGGDLDDSLDFTRTPSCGVDIDLEEGNLNRTPPDLRGSTRSIDDILEMIYSPEHFASIDGESPPNSQPTRAPRIAVRKRKASSNPPGNDQPPVGPPETEEEPLSRDTGMQHPTAQKAEAEKKKAEIEMKNAEAEEAEKRKAEAEQADKKKAEEAENKRKAEAEVAEIKRKAAAEEAEKKKEVEAENKRKAEAEVAEMKRKAAAEEAEKKKEEEAEDKRKAEAEKAEIKRKAEAEEAEIKRKAEAEEAEIKRMAAAEEVVKKKADAEKKVDAEEKRIQVAIQKQLKDNIKALKKPVPAAKLKKMFQLQMSKEYAEQRQQYEDRLNMLRQEAKAEIDSLEKSIDGQAGPSSSFDDIQFPAESDDDINNLTQPIRLSQDEVSVGQADFSEFQRMIFKRLGDRVLKKPREYISPFKIPRNRPEIPLAKAVALRRKIASDPELKRFFFVFPSCNCYLHFILQF

SEQ ID NO: 44071 - protein, 151 aa, Zea mays
  Coding DNA Sequence Number=SeqID_696
MGKNNKRKREPTPPSEEFGDSEYSEEEFSSESEGSPAPASPPASSDDSDDSQGIAAEVWTYIRAIERAGLEGSDESECSSDEEDSDGGDEGEDDDDDDDDDDDGDGGGSGSGRGGGDGSRDSTKGDSRGSTKGSSRGSTKGGGGGRGRASG

SEQ ID NO: 44072 - protein, 356 aa, Zea mays
  Coding DNA Sequence Number=SeqID_697
VADFASRTASGALTAAVAAEVERLWTQHADAVREKSAADSKCRKLADKVATLEGEKADLRRQLAGERRETNEALVKAQAAQAEANLARAEGNLARERTEQLQERLTALESRVERAEAMSRAEAEWTRQLLIDTYRGLGAGTGDFEVPDREPGLRCLEWVQEELQALPTVVEGFMAYASLVTCEGAMNALSREGCRHFEVFDQDDEDFERDIFKVEDPVVKESAGAIYDRMWGPHGREVVRERAETARAQAARGERVDDFGALNSALPDPEPTPTEAVSGVALEPTPETAEGALDAPASDAAGEDLPPEVAEGAPDAPAAAALSAEDPAAVAAETTAGATAEPTAEAPATSGPSQVA

SEQ ID NO: 44073 - protein, 156 aa, Zea mays
  Coding DNA Sequence Number=SeqID_698
MGRRETEHKGENSKGNRGSCCPAPKADALAVGGYKRSRGRERESLLVSPSSRAATFSYEGPGPSFYRRKERAQGNDVPLCDVVGPSPRSGEAEAPPRSRLSPSPGAILALNAPAMRSVGAVIWPRLLHCEACPSWASGESKRRADGGYQPSLGVLG

SEQ ID NO: 44074 - protein, 865 aa, Zea mays
  Coding DNA Sequence Number=SeqID_699
  Gene Ontology: Mol. function=DNA (cytosine-5-)-methyltransferase activity; Cellular component=chromatin; Biological process =regulation of transcription, DNA-dependent
  Homolog annotation: Hit_ID=Q9ARI6; Match level="QueryCoverage=88%, HitCoverage=86%, E-value=0.0, Identity=95%"; Hit description=DNA (cytosine-5)-methyltransferase 2
  Pfam annotation: Domain name=BAH; Domain location=167-292; Score =54.4; E_value=4e-13; Accession=PF01426.9; Description=BAH domain
  Pfam annotation: Domain name=Chromo; Domain location=424-478; Score =75.6; E_value=1.6e-19; Accession=PF00385.15; Description='chromo' (CHRromatin Organisation MOd
  Pfam annotation: Domain name=DNA_methylase; Domain location=324-821; Score=36.2; E_value=1.5e-14; Accession=PF00145.8; Description=C-5 cytosine-specific DNA methylase
  Pfam module annotation: Pfam domain module=BAH::Chromo::DNA _methylase; Domain location=167-292::424-478::324-821
MAEEIHQNQEEEEEVVAASTAKRRRKAASSGKKPKPTPKQAKPAVAGMKKKGETEKTEPVVDDVCAEEPDEEELAMGEEEAEAEEQAMQEVVAAVAAGSPGKKRVGRRSAAASGDHVPEFIGSPVAAAEAHSNWPKRYERSTAANKPEEDDELKARCHYRSAKVDNIVYCLGDDVYVKAGENEADYIGRITEFFEGTDRCHYFTCRWFFRAEDTVINSLVSINVDGHKHDPRRVFLSEEKNDNVLDCIISKVKIVHVDPNMDPKAKAQLIEHCDLYYDMSYSVAYSTFANISSENGQSGSETASGISSDDAGLETSSNMPERTATLLDLYSGCGGMSTGLCLGAALSGLKLETRWAVDLNSFACQSLKYNHPQTEVRNEKADEFLALLKEWAVLCEKYVHQDVDSNLAGSEDQEDADTLDKDEFVVQKLIGIRYDGTGRKKGVYFKVQWEGYGPEEDTWEPIDNLSDCPLKIREFVQEGRKRKILPLPGDVDVICGGPPCQGISGFNRFRNRDEPLKDEKNKQMVTFMDIVAYLKPKYVLMENVVDILKFADGYLGKYALSCLVAMKYQARLGMMVAGCYGLPQFRMRVFLWGALSSMVLPKYPLPTYDVVVRGGAPNAFSVENHQPNDVMEYGGSPKTEFQRYIRLGRKDMLDWSFGEEAGPDEGKLLDHQPLRLNNDDYERVKQIPVKKGANFRDLKGVKVGANNVVEWDPEVERVYLSSGKPLVPDYAMSFIKGKSLKPFGRLWWDETVPTVVTRAEPHNQVILHPTQARVLTIRENARLQGFPDYYRLFGPIKEKYIQVGNAVAVPVARALGYCLGQAYLGESDGSQPLYQLPASFTSVGRTAVQANAVSVGTPAGEVVEQ

SEQ ID NO: 44075 - protein, 316 aa, Zea mays
  Coding DNA Sequence Number=SeqID_700
  Gene Ontology: Mol. function=hydrolase activity
  Homolog annotation: Hit_ID=Q8S9P9; Match level="QueryCoverage=15%, HitCoverage=12%, E-value=9e-16, Identity=81%"; Hit description =Purple acid phosphatase-like
MARDAGWETRGLASSGGVEIESKRIGQMWKQGREEAGAAVGKRNPNQKDGGSGNVQFFTARSLLQAAAASGRARIRIFVRLPRAPQAFGCWPLYLQPCLSHEPAVGWPKLRAHPPCSASLQLSARAPPLLRDPPPARLQLSARAPPLLRDPPPARRSRLRDERLRPTPSVPPSRDLLPPARRSRQPSESRRECRPPPSDSERGASPDKNAPSPMLPGPHRPSRRANPHCASGGAASRPPCSLPPLWFGPGGVFKVALFADLHYGEDAWTDWGPAQDAASDRVMAAVLDVENPGACMRTLSFCSPYPFPFPPKESKN

SEQ ID NO: 44076 - protein, 40 aa, Zea mays
  Coding DNA Sequence Number=SeqID_701
MPNSPGDVTNNKIERKKDCDARFSAECNLSLVMLHIIESL

SEQ ID NO: 44077 - protein, 220 aa, Zea mays
  Coding DNA Sequence Number=SeqID_702
MASRQNTCLGPDNHNEQTPSLKVPLQTELRFRPAGTNNLHIGEPAGRQTPGDSSATSAAAAMVPGRALLPEGSRLRPHSRDENQILKPESRRPLPPPQHRRRRPPVRQHRTSERRPPQSARAGPHSRPRHESEDRGRNVAPWLGSNSLPSPAWLEGASSAELEDGFHPQELEEEVASRPVQEVELWLASLSASARMTKILEAEGGAEIATRLASPRHRTG

SEQ ID NO: 44078 - protein, 232 aa, Zea mays
  Coding DNA Sequence Number=SeqID_703
  Homolog annotation: Hit_ID=Q6J9V9; Match level="QueryCoverage=34%, HitCoverage=31%, E-value=9e-14, Identity=50%"; Hit description =Putative uncharacterized protein
MPRLLDCGTGAATRGNPAHGPTVPAEHVGHGSVSRERRRDGRYGQKWADSRGGSRRAEAAVKPSAGSRPLLEQQGSPLPRREDDTPMFRPSNGLCNDCLANHPSRRINFAAGQATPLAGEAGTGKGDTPKGILLREGNGPRALLLIRAASDHLGSAPTTDQGFEGWPPKGFDNRPRTRRARDDSGYVRYMAKARATLPRLGAALANPALAKPLTASTYQPENSEPDHAPGLR

SEQ ID NO: 44079 - protein, 46 aa, Zea mays
  Coding DNA Sequence Number=SeqID_704
MAMVGALQRGVGGGSAHGGEARMQGAQGSGQSEEKLHCPMHAEYWA

SEQ ID NO: 44080 - protein, 29 aa, Zea mays
  Coding DNA Sequence Number=SeqID_705
MAHERQSEADGVAPPVGAEWRCNGLRVFS

SEQ ID NO: 44081 - protein, 46 aa, Zea mays
  Coding DNA Sequence Number=SeqID_706
MGLGVAMRLMVLGFDSGNGCQHCNHCSGEYEAVEGDFQEFQDYDEF

SEQ ID NO: 44082 - protein, 19 aa, Zea mays
  Coding DNA Sequence Number=SeqID_707
MPSNDALAEWLRRVPAKYM

SEQ ID NO: 44083 - protein, 357 aa, Zea mays
  Coding DNA Sequence Number=SeqID_708
  Gene Ontology: Mol. function=cysteine-type peptidase activity; Biological process=proteolysis
  Homolog annotation: Hit_ID=A2X4U2; Match level="QueryCoverage=87%, HitCoverage=36%, E-value=7e-34, Identity=33%"; Hit description =Putative uncharacterized protein
  Pfam annotation: Domain name=Peptidase_C48; Domain location=1-135; Score=-29.2; E_value=0.031; Accession=PF02902.10; Description=Ulp1 protease family, C-terminal catalytic domain
MMSKVFIPINIRELHWYLVVLNAKRRDIQILDSLGSLLGHKDLDCVLKGLQKQIDGVSHCMKLKDHNWLDLQVAYWLWKLIEFKDAKHTDSSSCGLFLLNYMEYWTRVELSDNFTQADIKNFRPKLAAILLSSDLNKRKGCPLYKNKTNTSTEDNETDSSGVEILEPSPNPNKRKRSPPINPEDDPISLYFEEICAKEENDVIPTPTSVNESGKDSLISGLPTKDMPARKAYMIEFLCDYIMTIHDATILEAKWVRSFKPFRIDLTVKTLQELLNVNKDMPIDCFNMDVQILAYNEPKRLSLAKRKITKHYMDLRFCDGATLRRNLFIDLLTYEGNTYRFNVPVNIREYLDRIMEKD

SEQ ID NO: 44084 - protein, 515 aa, Zea mays
  Coding DNA Sequence Number=SeqID_709
  Gene Ontology: Mol. function=4-alpha-glucanotransferase activity; Cellular component=cytoplasm; Biological process=carbohydrate metabolic process
  Homolog annotation: Hit_ID=Q69Q02; Match level="QueryCoverage=45%, HitCoverage=27%, E-value=1e-106, Identity=74%"; Hit description =Putative 4-alpha-glucanotransferase
  Pfam annotation: Domain name=Glyco_hydro_77; Domain location=175-504; Score=-24.7; E_value=2.4e-10; Accession=PF02446.8; Description=4 -alpha-glucanotransferase
  Pfam annotation: Domain name=KOW; Domain location=464-495; Score =21.2; E_value=0.004; Accession=PF00467.20; Description=KOW motif
  Pfam module annotation: Pfam domain module=Glyco_hydro_77::KOW; Domain location=175-504::464-495
MERKGGCCLAPRYAATAAAQQAGAAWQMGRIMLKFRPIAPKPAAMAPAPTPTPVTGPAVSAGKGKRKAACGGGGRRGRKPKKAAKVAMVTAAPAATAAAQDVGDCRKHCDKEKSSSSPSSSSSGTSSVDSSPPPRPQQRQLATLPLMPETAADKTVACPAIPETRLHYRRIRPCRSCPKLLVDWAVNLGFHLVQLLPINDTSVHGMRWDSYPYSSLSVFALHPLYLRVQALSDAIPVLRYTFVMLSNLFIEEIQQAKKHLDKKDVDYEAALSTKLSIARKIFNLEKEKVLNSSSFQQFLSENELDKLMSEGTLHHDVIRFHYYVQYHLYIQLSEAATYARKKNVILKGDLPIDVDRNSVDTWVYPTLFRMNTTTGAPLDYFDKNEQNWGFPTYNWEEMSKDNYGWWRARLTQGGAVSLKEATVPTPRFFRPHIEIKRDRQTSEVFEVLDAEGPYRSTREQLFSIGQMLRIRKGPLKGYLCRVVRIFRNDVTVKLDSLLKIVTVQADLLSVPANRG

SEQ ID NO: 44085 - protein, 181 aa, Zea mays
  Coding DNA Sequence Number=SeqID_710
MVQYPAGIRPPAQNAHCRRPIRAAICAGVEMIGRRASPREDLFAPDKTAAVEGTNSGCHAAISPSGHVRSPAPPSSVRPRHHEFDCLTAVVERGKLLGSDVLGAIADRQLGPAMVIIPPPIEAATSRMVLGVDHAVARENDEESEVTEEKTPPPLESRARTWLYFDICGSEPDSPVNEGKP

SEQ ID NO: 44086 - protein, 134 aa, Zea mays
  Coding DNA Sequence Number=SeqID_711
MAGRRDGRVAAGVSALHRGGLIRSKEVFAGRCSPPDHLDPGANRGTDRSSAVSILRWRSDPSRVLYHGDSHSVNLTDRVWVSFPLRFLWQQDQHSAAKWWSNIPSTRLLYGVTTKSHWIMSEIGFEVGSNSLLV

SEQ ID NO: 44087 - protein, 138 aa, Zea mays
  Coding DNA Sequence Number=SeqID_712
  Subcellular localization annotation: CTP_CleavageSite=39; ConfidenceScore=5.06e-01
MTVAGACEQRSRRQPSSRPVRGQQENPLSRREDNAPVIRSSNGSRTRNGRPANYSPRRINSAAGQAALLAGAAGDASPSPKQPRQKRGSGAALANPAPAKPLTASTYQPENLGPDRTPGLRPARMREQPDQPKHHARH

SEQ ID NO: 44088 - protein, 123 aa, Zea mays
  Coding DNA Sequence Number=SeqID_713
  Gene Ontology: Mol. function=kinase activity; Cellular component =ornithine carbamoyltransferase complex; Biological process=amino acid metabolic process
  Homolog annotation: Hit_ID=Q6QP54; Match level="QueryCoverage=54%, HitCoverage=23%, E-value=3e-09, Identity=50%"; Hit description =Putative kinase
MALPVDVAGLRPRLGDVEAPPKPRSSLSSMAEAESEPLGRERRRSLAEARAVSEPWGRAKRSSSSSGDWLLVSITLSSGAAVGVAQAALSFCQASQWSGEVTAVTSALPEGACQDKGVRPPLR

SEQ ID NO: 44089 - protein, 74 aa, Zea mays
  Coding DNA Sequence Number=SeqID_714
  Subcellular localization annotation: CTP_CleavageSite=69; ConfidenceScore=5.34e-01
MGTLVRSALRFPGAYLASGVQVKRSVFLKRRYKVNPFLPRHEMKRFRAARHPMTLCTPFKSLMGSMLVMAAIIF

SEQ ID NO: 44090 - protein, 216 aa, Zea mays
  Coding DNA Sequence Number=SeqID_715
MTSGGALVAAAAPVQPPRARPTSPPLMEMDMVTKLAGGAYHRDGDAGCQDDVTKVTCGTAHGDGNASCQDAAAKDNNTIHPVPTTVPTTRVRLTTVSYDLSRVQPQAKQGAPPRPTPASASRGVITTPDPGLGLNLGLGRRSPPRPTSASASGGLRLARPQPQPREKSPPRPKRLRTDYATGNMKRPDPLGLKCDTITSPRRLVNTFLTSNSTEFR

SEQ ID NO: 44091 - protein, 132 aa, Zea mays
  Coding DNA Sequence Number=SeqID_716
MDSKPRAFRDMIFYSTATYSKDLSFHCDLETRKCSWESYDDKGEVMRTIESKRLMGQKMRCGSQLVDSYINDRICDMRRYAKSALFDSPKRAEQRRLKVVDEKRAQDAREWEAARAEKQMLDNLADRLKGSE

SEQ ID NO: 44092 - protein, 66 aa, Zea mays
  Coding DNA Sequence Number=SeqID_717
MATMELMEEEDDDTSRLSELIALAEAGLYGEEENDTSRLSELIALAEVLFGVHGEEEDDTYIRTYK

SEQ ID NO: 44093 - protein, 540 aa, Zea mays
  Coding DNA Sequence Number=SeqID_718
MAQGRPYPPRGRRRLFYVRMAPDLRVFPYRRNIAAVVSAVMNKDRQEAAQKRRAVIRLPEARPKRARGTAKATAPGGSQPTLAAKTVAPGSSKVLESVKAAGADGSKSAPDGSAKVQELPLPGKRVADFGTNISVDDYLVGSGEGQLVVVPPAVATTVSAAVPGVKGSAVSAGGEISAVTAIKDEAGTVSRRLREASQQLSQATDFADRVASRALTADVSAEVERLRAQHADAVREKSAADSKCRKLAEKVAALEGERTDIRRQLVEERREANQAIAKAQAAQAEAKLVRVEGSLASQRAEEWEVRFKALQARMERAKASTRSEVERTRKQLVDSYRELGARTADFKVPDREAGLRFLEWLQEKLLALPTIVEGFMSFASLVTCEGAMNALSRERCSHYEVFDRSDEDFGREIYKVEDPVVKDSAGALFDRMWGPYGREVVREQSDRARDQMARAEDVEDFGPLNSAQPEAEANPVVAEAEVDPAPPSETSEGSPATPAAIVSGGGSSPAAVPMVEDPLKAATELAAKDPMSADGSSQVA

SEQ ID NO: 44094 - protein, 95 aa, Zea mays
  Coding DNA Sequence Number=SeqID_719
MARARATDAPRIARPVALTPWQGKRHLRQEKRASFHLRHDDRVKKGTGKGDILEKDPSQRRERAPSPPTDQGFEGCALRGSATALEHLGSEPFTD

SEQ ID NO: 44095 - protein, 137 aa, Zea mays
  Coding DNA Sequence Number=SeqID_720
  Homolog annotation: Hit_ID=Q5GAU8; Match level="QueryCoverage=22%, HitCoverage=22%, E-value=2e-09, Identity=90%"; Hit description =Putative uncharacterized protein
MTDAEKEVATERRMDSPPRCDCGDRAVIDEDTAKHFVCPNIDYPYGWRKCRFRERLYGPLFHWPEAETTDQAKDGGKKSFEVPSAWEKVKEIRNPKPGVKKKTCKVKDVGAQKCQSRSSQVDLMVYESNINLNHAKY

SEQ ID NO: 44096 - protein, 75 aa, Zea mays
  Coding DNA Sequence Number=SeqID_721
MDITKTTDQAKDGGKKSFEVPSAWEKVKETRNPKPGVKKKTCKVKDVGAQKCQSRSSQVDLMVYESNINLNHAKY

SEQ ID NO: 44097 - protein, 191 aa, Zea mays
  Coding DNA Sequence Number=SeqID_722
MAPKRASSKANEAAKAALLAEKKGKALVDTTHQEATEDDALSKRQRNEQPTPEGSLRTYSSGGQPQLPPGFAPPEGADVIEDGEVIGVSVEEQLQLRALRIKNRNLQKQKEILEAKRQRVSAQAKVRQMIRDEEQKALELEQEIALMQREGHLGLQHGPLLQQRAQIRRPVLPSAQPRHPTRRGIPRCQLP

SEQ ID NO: 44098 - protein, 368 aa, Zea mays
  Coding DNA Sequence Number=SeqID_723
  Subcellular localization annotation: CTP_CleavageSite=63; ConfidenceScore=5.77e-01
MDGAPPIFSVVGRSSLLAPRRLTPVPPLPWARTPTRDSPRSSVRSSGTLVPSARPPPPPTLPRASAPSPTIVMGAVAHPPPEGMAPCAFANPGASEPHPAAAMGLTATALAASTFPHPPWEHECTATDTLAKQLAEVVRRLLGYSSIKPLSASHVVTPSSKYEVAIIAKLHAQATAMKGMVGPHSDLEEPVSNRRLVHYPPSWPQRALWSHTYLDHSSVSFPSFHKVCNNLILEKMTKGHTLAPMALPHSTAPPRGAWHHDLPPLLPPSGLFVTRACPSCLCPFMSSPAACGRRRRSRGGGGRGDSLGATPWPSIYNPWTNCITMWPGPALVALPSVSVATAGSQYPLNHLPSTPPAPQPQPPQSALS

SEQ ID NO: 44099 - protein, 37 aa, Zea mays
  Coding DNA Sequence Number=SeqID_724
HCGTGGYEIDGSGYDYGAGEDEAVEGDFQEFQDYDEF

SEQ ID NO: 44100 - protein, 59 aa, Zea mays
  Coding DNA Sequence Number=SeqID_725
MGLGVCGSLCQVWVRPLGRSARHCGTGGYEIDGSGYDYGAGEDEAVEGDFQEFQDYDEF

SEQ ID NO: 44101 - protein, 367 aa, Zea mays
  Coding DNA Sequence Number=SeqID_726
  Homolog annotation: Hit_ID=Q6JAD6; Match level="QueryCoverage=65%, HitCoverage=36%, E-value=1e-100, Identity=70%"; Hit description =Putative uncharacterized protein
MSGRYIEEWVRVFYAIVWIDPDHQWMRFRFEREDVTLHASQIRQLFGFLESSTRLHSLCYDTLDPPCRPHGGVAPVTAHFAVLFRPPFTDGSRHSPTNFTPAAKFLYELMRHTLLPRMGYREATTHIQLWLLGALISHSEFDVVDFLICEIEDTMLDGFGARRQLPYAHYLCHIFAHLIRPPQFQGTLEASRLQFDFYRPAPEDLGAVADSSSDNDEDLGILPSPPVPPHSHDHEAGSSSVAPAAPPAIDPALAAILQSLTQQQAHLAAEQARQAAIQQQMSERMLSMSVTLDFSSPVVGPVSSQPPVPPAPTVTTAVVVVSMTAPAPVDPASQPMLELVPAPTSTVDPGFKTDSNPQLAFVLLPRP

SEQ ID NO: 44102 - protein, 113 aa, Zea mays
  Coding DNA Sequence Number=SeqID_727
  Subcellular localization annotation: CTP_CleavageSite=39; ConfidenceScore=5.20e-01
MTSTRGGGGSSIRSSGGGSQVGGGGSLIQRASDSGALVRASGGVPEVLRRRHFKADEQATPVDVRVATATHEARCSSERHHGRPEMRAAMIVRDILRSGAVFFSIIVFYAYHM

SEQ ID NO: 44103 - protein, 37 aa, Zea mays
  Coding DNA Sequence Number=SeqID_728
MVARRRRWARRCSPRVRAGGGATAASERVTRNLGNRA

SEQ ID NO: 44104 - protein, 144 aa, Zea mays
  Coding DNA Sequence Number=SeqID_729
  Homolog annotation: Hit_ID=Q7XBD4; Match level="QueryCoverage=82%, HitCoverage=12%, E-value=2e-17, Identity=37%"; Hit description =Cinful1 polyprotein
MRRNSLCHVGFWRFFCLVFEGLQVIAKDLDQREDFKWMVMSPLKISFAMERPMCEASEAADECLKAFGEVVKKIRSRDLIKEALAYNIYLTRTGWKLPKEVKSSDEGLVTLAFDFKEQSTYKSPSANWLKFIEEKCNEMCGNFD

SEQ ID NO: 44105 - protein, 104 aa, Zea mays
  Coding DNA Sequence Number=SeqID_730
MAATEEGRARVGARRLEDGDSQRARRQAEGRRMAWRRREREVAAIYGGEAPEHGCHFSPLQQFIEHVGTRDVDPNGTDFRLRRIQILKSDFYSFLMALFEILRD

SEQ ID NO: 44106 - protein, 184 aa, Zea mays
  Coding DNA Sequence Number=SeqID_731
  Subcellular localization annotation: CTP_CleavageSite=70; ConfidenceScore=5.02e-01
MEETHLHVFDASCPRQITLARAPACPAPRPSQASAMTRARAYKTLPGFDCTLPRTLKPHRGLARRRLPVRSVSAAAQSFCHRGPADRAIPNPVQPSEKTVHTSVKLPKQGIGVCFAGEASPRSPELSTPPDSPWFGRYTRHRRGHPPARVDRAIPAIPDVKPYLDVTARVSPSQPHPSPDLPRR

SEQ ID NO: 44107 - protein, 167 aa, Zea mays
  Coding DNA Sequence Number=SeqID_732
MKTLTTFCGYHPLEMVMHPLGLFPAEKKDDPMWCNRSDAMALLANSAQTAKLTLDSREDFVVGLSIELVEKDLQVERLSQRITTLEQQVEIRDNTIDVLENQLHDVQRELEEANDHLDMHHLEMEANEAGSEGEEALEELGPAPGANGITSAMPPSPVSSVASTAQG

SEQ ID NO: 44108 - protein, 104 aa, Zea mays
  Coding DNA Sequence Number=SeqID_733
MAATEEGRARVGARRLEDGDSQRARRQAEGRRMAWRRREREVAAIYGGEAPEHGCHFSPLQQFIEHVGTRDVDLNGTDFRLRRIQILKSDFYSFLMALFEILRD

SEQ ID NO: 44109 - protein, 151 aa, Zea mays
  Coding DNA Sequence Number=SeqID_734
MGKSNKRKREPTPPSEDFGDSEYSEEEFSSESEGSPAPVSPPASFDDSDDSQGIATEVWTYIRAVERSGLEGSDESEYSSDEEDSNGGGEDEDDDDDDGDDDDGGDGDGSGRGSSDGGRGGDDGSNRGSTKGGSSKGSTKGGGGSRGRASG

SEQ ID NO: 44110 - protein, 76 aa, Zea mays
  Coding DNA Sequence Number=SeqID_735
MPKEYDSWARAPVSEAAAMALLDPPKRFQSEVALNLVRNLLGWGVPAFAGRIHVGASPHSDLATGEFVLFVSNLPC

SEQ ID NO: 44111 - protein, 117 aa, Zea mays
  Coding DNA Sequence Number=SeqID_736
  Homolog annotation: Hit_ID=A2WXQ9; Match level="QueryCoverage=98%, HitCoverage=97%, E-value=5e-10, Identity=34%"; Hit description =Putative uncharacterized protein
MSGGRRRGLVWSLPVARSDALGKLGPAFGIGAGCGVGLGFGLIGGAGIGAGFPGLQLGFGAGAGCGIGIGFGYGFGKGVAYDESGSEKFDIMFDELMESTRKLVKATSKEIDKWRRM

SEQ ID NO: 44112 - protein, 61 aa, Zea mays
  Coding DNA Sequence Number=SeqID_737
MVLAVVVLLGAVAVLVVVLLLQPRVPYVAGAPLGDAGSAAMEAALRDGVVPFRVDGEARTR

SEQ ID NO: 44113 - protein, 77 aa, Zea mays
  Coding DNA Sequence Number=SeqID_738
MRKRTRLGLAWRRERHGVRGTDEHSGPGVQAPSRGRLKKPKLGTVVERFLGVMQRQPIARGRRRPWEREPAGNPARE

SEQ ID NO: 44114 - protein, 194 aa, Zea mays
  Coding DNA Sequence Number=SeqID_739
  Homolog annotation: Hit_ID=Q6QP51; Match level="QueryCoverage=46%, HitCoverage=41%, E-value=2e-25, Identity=69%"; Hit description =Putative growth-regulating factor 1
MEAQAHTSCNRRAGYYVQETAPPLAPMPRLLDCGTGAATRGNPARGPTVPIEHIDHGDRERGYFERDPSPQRKRALSPPTDQGFEGWPLGRPPQSTRAPRPLLIRGSKAGPSEGFDSRLRARKARDDSGYVRYMAEARATLPRGSGAALANSAMAKPLTASTNQPENLEPDHAPGLQSDRMREQPDWPRHHERH

SEQ ID NO: 44115 - protein, 169 aa, Zea mays
  Coding DNA Sequence Number=SeqID_740
MAIFNIRIVRTLGKGHVVKPCLLTLEVFKGPYNPSPDGLARDGTQGGKNAARVILRQGDALAVGVTSVREGERLYANVSGREEPEPYVHANVAVGEVLEPYVRGVVAVGGALEPCRSTTVGAAGTLLTSPCFRRGLRTAVVMDARGEPSLLVTGASLDGTSVLFPRSLS

SEQ ID NO: 44116 - protein, 57 aa, Zea mays
  Coding DNA Sequence Number=SeqID_741
RAHGYERPRELQRLVILDQRHCGTDGYEIDGSGYDYGIGEDEAVEGDFQEFQDYDEF

SEQ ID NO: 44117 - protein, 183 aa, Zea mays
  Coding DNA Sequence Number=SeqID_742
MEAQAHASCYRRAGCYVRATAPPLAPLPRLLDYGTSTATRGNPTHDPAAPAWRDGQCGQKWAGSNGGGRRAGAAVMSSAKLTSHPGAGPGKGDTPKRILPREGTRLRASLLIRGSKAGPSEGFNSRLRARGLHTHYWSEVLRPAPRKGSTTASGYSGSAPTTDQGFEGWPSKGSQPPQTQSEG

SEQ ID NO: 44118 - protein, 162 aa, Zea mays
  Coding DNA Sequence Number=SeqID_743
MDSATPAAERDPPAGGGSSWQGGGSASGRGELMAALEIRRQEGGGAPGGVVELLAPWSVMGANGAPGGEVEGGLLRSRTFASIAERRWASLANFIAPTHARTSDRHTLTVRLVRQDPSPCVRSWTRVPNSSEGGMIEKLRDLDKLGQGFTSVDPLEEIDIED

SEQ ID NO: 44119 - protein, 119 aa, Zea mays
  Coding DNA Sequence Number=SeqID_744
MAEPTVSRGHRTVRCAPDSVRCANGSKAATANGWLLLGAFGFRRYLRTRIGTTAEAQRIRRLIQRRRYEQESFGVIAEKETDLKMKRLFRPRWITIELLPNVKGMGVILHGLCPTPINR

SEQ ID NO: 44120 - protein, 197 aa, Zea mays
  Coding DNA Sequence Number=SeqID_745
MTVAALSSLTEAGGRQQGLDRSDSCPSAKLRCSSDSHDITPAGCQDLSDCHIGMAFLEKVGRAGPRMGQALSWGRSLPSPAWTLVTPLLQAHPTWARDEHEGRGTSTSLTPVSGHLASPPFALAHALNPSRLGHAAHSLVGLGTPRSRNADTWAMGWPDWCNTAPMPVSLASVSTSNGLENFGSARTGAVTRARFNA

SEQ ID NO: 44121 - protein, 46 aa, Zea mays
  Coding DNA Sequence Number=SeqID_746
MAMMGSTSEKMYLYQVKKQQTFVASIPRWYQRKKIKTKAMGGKVLS

SEQ ID NO: 44122 - protein, 321 aa, Zea mays
  Coding DNA Sequence Number=SeqID_747
MEVRCQTSFCQNEDGFPKLLRACTVRLGIRSQPEYDGREFIEHGTEKCVVTVYIGSSPHHVEWSVTAAGHRFKDTCQVVARKALRALCQIYEEEVADTPLRFFPPFQRDRPVWMARMRALEGKKMLEDDPTVVYLTAYLLTLDAHREVIAVEALKQAKDEHAQKLMEAYLVTHNQRRALRIQEPASSNLVQPIRAEDPQILEGHPVSIRGEKKAWELPEGAIVLEGIPVFPQAMDKQEHPESSQDPPPELVEPLTMKKIPVPSREIKEEAASTPPAPPPSEELQEPVPLEEEFDRVLPSQSPPEEVINISSLLTHPGDVSD

SEQ ID NO: 44123 - protein, 134 aa, Zea mays
  Coding DNA Sequence Number=SeqID_748
  Subcellular localization annotation: CTP_CleavageSite=79; ConfidenceScore=5.85e-01
MAGSAAPAPCPMPARLGRPRARPASAAPGRFNRPPGRFNRPGPSSPARSPVPASPDRIFARPRSRGLEWFLECLSVRTCSMDDRPGKQCNHEGGYEIDGFGYDYGAGCQHCNHCSGEDEAVEGDFQEFQDYDEF

SEQ ID NO: 44124 - protein, 274 aa, Zea mays
  Coding DNA Sequence Number=SeqID_749
MGAGGGIVEARVVEVVGMAEVVDGSRATGAREVGGGVEAVAEAQDCSPPRIRVLLRNHLVRGRQRRDSTSYCGSAGEKAFLENLRESWNEAGNSATSHAPSEDRLLQTNSREFIHPENHVVHLIHRKMDTDYKEKKKQRPVKLPFWYLHPQRRTKRSLSSRQLHSTPTSSSSVGEWNRPPSSTMNQLCLGKNHLNGKLADEETDVVTPGDIMKPENEIRRSLYRETRSRRWEKLQMNKSSGKGGTPADVIVGKLKSKPSRKRDSVARTLSSDET

SEQ ID NO: 44125 - protein, 79 aa, Zea mays
  Coding DNA Sequence Number=SeqID_750
MKKAAKLASEAEARRREASIGTPKHIDIRYHFVRDIIEKWLVKEASVRRECSGGGKEINVNLLQASGQLEAACYSGVEF

SEQ ID NO: 44126 - protein, 238 aa, Zea mays
  Coding DNA Sequence Number=SeqID_751
  Subcellular localization annotation: CTP_CleavageSite=49; ConfidenceScore=5.06e-01
MVEKGHGSRGETTVTRSAITKQKRWQRRGQGAQFPFSGYSLRLRRPKWEASSRVKNRHRSLSRIYKGPGETHSTLRPNPPRDSKLKSETPVPRTARARTTAAPRTTRPVALTLRQDRRYLWQPKQATLHLRRNDRVKKGTGKGDTLKGILLREGSGSRAPLLIRGSKAGPSEGFNSRLRALGFHAHYWSEVRRPAPRKGSTAASGHSGSAPTTDQGFVGWPPKGSTAASEHAERGMTL

SEQ ID NO: 44127 - protein, 156 aa, Zea mays
  Coding DNA Sequence Number=SeqID_752
MSGALNARQSTQKSGTREVAHQTLYSACPVCHRTSWRAQRSELQRSEPNGLVTWLAHRTLSGRRAIIHRTVRCTSDSVRCSKEARPPELASLGNAQQPLRYNSPDMSGVHRTIRCILGATAISAPTATCDAFNARAARAEGRRAHTGAPDMEQYMS

SEQ ID NO: 44128 - protein, 107 aa, Zea mays
  Coding DNA Sequence Number=SeqID_753
MAALSPLTKARGRQQGLDSPDSYPSARLQRSSNGHDTTRIGCQNLSGCHDGIVRNRKKKRSGEWLCAAKGCFGLGHRTVRCAPDSVRCARPARSKPAALGFFSGDFG

SEQ ID NO: 44129 - protein, 307 aa, Zea mays
  Coding DNA Sequence Number=SeqID_754
MAERYQLPRSCVPPTARRKDCGYPPSGGLEGGKARCIREREDMVALQGGHPPFKGDSPYLCPQPSGAESSPTRSKVLPLRRGNWVPDVMQAGPEQKKPNRCARCMQPPSSYKRLSTFAQTSRRKGGQPCGRHATAPGGCTSPTSNTPSMEAQAHVSCNRRAGCFVQATAPPLAPLPRLLDSGTNTATRGDPAHDPAAPAWRDGQCGQKWAGSNGGGRRTGAAGPGKGDTPKRILLREGTRLRASLLIRGSKAGPSEGFDSRLRSRGLYTHYWSEVRRPAPRKGSTTASGYSGSAPTTDQGFEGWPPK

SEQ ID NO: 44130 - protein, 241 aa, Zea mays
  Coding DNA Sequence Number=SeqID_755
  Gene Ontology: Mol. function=kinase activity; Cellular component =ornithine carbamoyltransferase complex; Biological process=amino acid metabolic process
  Homolog annotation: Hit_ID=Q6QP54; Match level="QueryCoverage=42%, HitCoverage=36%, E-value=2e-21, Identity=55%"; Hit description =Putative kinase
MAPPVDVAGLRPRLGDVEAPPKPRSSLSSVAEVESEPLGRARRRPSAEARVESEPWGRAKRSSSSSGAEPKSEPWVGRSGVRRLPGLSPSPSPGSGGAEFTVFRGLARVRALGRAKRSFLWCLRPGLTACQPHSVKWHRSRSGAGGAVFLSGRSVERRSDGGHFGSVDWRACVRIKVSGHLCIKCSCDLVGRRGDLVRVASWRRQGLGQAGNMFAARGGLRARRRSSGVGCPCPRLGSGEA

SEQ ID NO: 44131 - protein, 138 aa, Zea mays
  Coding DNA Sequence Number=SeqID_756
MTVSPGIAGPAVDRGVGALVNALRGDGDDGRLPGSRLQVQRMWRHGQRLLPALQLRGHGQGQCRVGCWHRHQTGRTYRTACQCHATDASASLPALRAGAEDRAAGSGAQGPGGRGWQRVQGRRRRQCQFMSHEFTAMR

SEQ ID NO: 44132 - protein, 461 aa, Zea mays
  Coding DNA Sequence Number=SeqID_757
  Gene Ontology: Mol. function=nucleoside-triphosphatase activity; Cellular component=cytoplasm; Biological process=response to DNA damage stimulus
  Homolog annotation: Hit_ID=A3A0L5; Match level="QueryCoverage=82%, HitCoverage=84%, E-value=1e-169, Identity=80%"; Hit description =Putative uncharacterized protein
  Pfam annotation: Domain name=Rad51; Domain location=92-354; Score= -88.9; E_value=7.2e-05; Accession=PF08423.2; Description=Rad51
  Pfam annotation: Domain name=RecA; Domain location=87-411; Score =605.9; E_value=3.7e-179; Accession=PF00154.12; Description=recA bacterial DNA recombination protein
  Pfam module annotation: Pfam domain module=Rad51::RecA; Domain location=92-354::87-411
MDPYFFSMHGKLRLKIVMYLCRAISKGSVAPHFIAESSHQKDFFLCFCYTLLSLPTGSVTDSSLAYVAKKKSSGTDSGEENMSKKDLALHQAIDQITSAFGKGAIMWLGRSQGHRDVPVVSTGSLDLDMALGTGGLPKGRVVEVYGPEASGKTTLALHVIAEAQKNGGYCAFVDAEHALDPALAESIGVDTNNLLLSQPDCAEQALSLVDTLIRSGSVDVVVVDSVAALVPKTELDGEMGDAHIALQARLMSQALRKLSHSLSLSQTILLFINQIRAKVATFGFGGPTEVTSGGNALKFYASVRLNIRRIGLVKKGEETIGSQIAVKIVKNKHAPPFKTAQFELEFGKGICRSSELFELGLKHKLIRKSGGSYYSFNGKAFNGKSNLKSYLTENKSVANDLEMELKRLMGTDASKEQEAGDSSQSDFPEESVTPEASSEEDLGAIIEVVQQEENSHCVKSW

SEQ ID NO: 44133 - protein, 219 aa, Zea mays
  Coding DNA Sequence Number=SeqID_758
MAERYQLPRSCVPPTTRRKDGGYPPSGGLEGGKPRCIREREDMVAFQRGHPPFKGGSPYLRPQPSRAESPPTHSKVFPYGAGAGSHTSCKPAQSRSQIVVRGGASGRRSERRFAFAIMTTTKKGPGKGDIPKRILPREGTRLRASLLIRGSKAGPSEGFDSRLRSRGPYTHYWSEVRRPAPQKGSTTASGYSGSAPTTDQGFEGWPPKGSQSPQTQSEG

SEQ ID NO: 44134 - protein, 48 aa, Zea mays
  Coding DNA Sequence Number=SeqID_759
MKAKSHHQPNQGGLTALAYNAPLTPATVVQWPHLYPPYLEWETQSQVA

SEQ ID NO: 44135 - protein, 248 aa, Zea mays
  Coding DNA Sequence Number=SeqID_760
  Gene Ontology: Mol. function=oxidoreductase activity; Cellular component=cytosol; Biological process=auxin mediated signaling pathway
  Homolog annotation: Hit_ID=P49249; Match level="QueryCoverage=59%, HitCoverage=48%, E-value=8e-69, Identity=86%"; Hit description=IN2-2 protein
  Pfam annotation: Domain name=Aldo_ket_red; Domain location=14-230; Score=-65.4; E_value=6.6e-05; Accession=PF00248.12; Description =Aldoketo reductase family
MAAATVSVPRIKLGSQGLEVSAQGLGCMGMSAFYGPPKPEPDMIKLIHHAVAAGVTLLDTSDMYGPHTNEILLGKALQGGVKEKVELATKFAVSFADGKREIRGDPAYVRAACEASLKRLGIDCIDLYYQHRIDKKVPIEVTDTNIAKGNMFPNEMNVDLHMFGALVLNGVGGHVDKTDVVTVYQGLLRHRSMQFSQQLSKPSGLSNGISNSTVFGFSTEARNRILALGRPVDQVVAEEDNIARGGSA

SEQ ID NO: 44136 - protein, 219 aa, Zea mays
  Coding DNA Sequence Number=SeqID_761
MTLEPHPLQPGWRSLDSESFGYRAEDTIEAIALHGLTTFCGFHPLELATHPIGLFPAEKEDDPMWKDRVEHAKDIWAIYPGQTAHLTVMRGEAMSHLMALLEATKITLDNREELVVDLSQEMVEKDLQVEQLSGEIHELEELVGTRENTIEVLEDQLLNTQQQLAEANEHLDMHHQEIHGGEADEDVDIEGGDESASSIDTAGSGRPPSPESSVASFAH

SEQ ID NO: 44137 - protein, 110 aa, Zea mays
  Coding DNA Sequence Number=SeqID_762
  Homolog annotation: Hit_ID=A2XFR6; Match level="QueryCoverage=71%, HitCoverage=22%, E-value=8e-13, Identity=48%"; Hit description =Putative uncharacterized protein
MAHVGPEWSHGMAYDDTRHTDVSKRGGGAREDRLNTLAGVVVGLNTDLDSATLDLSRVHLELEDAHARIAALEAQLQGRDPPEAQVPAMALSPPRKRIRYGELGSITRLL

SEQ ID NO: 44138 - protein, 355 aa, Zea mays
  Coding DNA Sequence Number=SeqID_763
MDNIDEVTDKRVTALGEIEKDKIIVAKAYNKKLHQKVGAYVEHQNEPPDGPALGPDENPKPCFRTWTVRPLVIDHPYLCREHRHRFSRSDWRQKKDTNTLLELRAAEAEHQHQHRNGGTAGGGAAGKAREAEWSALPLPCVEENKLLRVMAGCRRLCLPGISIEYCEVQAAWHFLIIDVGSILGLGINLVTVWCIGLKAKAPLKGHDPASPEPDLGQRQPTPEDSRLARGSPQATDTPSTRPRLSSGFGPRLDLGRWTLLRPTPGLGLNHDLEDDELRLARPQGSDSASAPEDDELRLARPQGSDSASAPEDDGLRLTRPQGSDSTSTSEESPPRPNSGPDRPCRQGRHHYPAPS

SEQ ID NO: 44139 - protein, 226 aa, Zea mays
  Coding DNA Sequence Number=SeqID_764
GRRHLWQAKRATLHLRHNDRVKKGTGKGDTLKGILLREGRGPRAPLLIRGSKAGPSEGFNSRLRALGLRAHYWSEVRRLAPRKGSTAASGHSGSAPTTDQGFVGWPPKGSTAALEHVERGMTLGTFDTQPRLGLRSRGTLGHFRDQRERFCNGIPPEGGIEPSDPVKRGPGPANHPQAKQGRMKKAESVLDRPLALRGGSGAALANLAPAKPLTASTYQPKNLGPD

SEQ ID NO: 44140 - protein, 98 aa, Zea mays
  Coding DNA Sequence Number=SeqID_765
  Subcellular localization annotation: CTP_CleavageSite=32; ConfidenceScore=5.55e-01
MDFASPDPRARTQPRLRRWRTPPRPTPGLGLSLGSGSRRTPPLPTPGLGLSLGSGRRWTPPRTTPGLGLNLDLGGIATAPKLGPEPATSPGGPSLPFP

SEQ ID NO: 44141 - protein, 133 aa, Zea mays
  Coding DNA Sequence Number=SeqID_766
  Subcellular localization annotation: CTP_CleavageSite=85; ConfidenceScore=5.22e-01
MQSACNRAKWARPFDSNAPSMEAQAHTSCNRRAGCHAGRSSGHVISQACVPSRGSERTLSHGVKTGPGKGDTPKRILLREGNRPRASLLIRGSKAGPSEGFNGRLRAIGFCAHYWLALEGFTVASDTERGMTL

SEQ ID NO: 44142 - protein, 106 aa, Zea mays
  Coding DNA Sequence Number=SeqID_767
MGWPWRPQQVGEGGWEGVAAADGAVAGGGEGWAAGGGEDNLELIPGVKDLRSMTIAIFSGEVIPLCRRLGSRVGVKDLRSMTIAVFSGEVIPLCRRLGSRVAALGA

SEQ ID NO: 44143 - protein, 37 aa, Zea mays
  Coding DNA Sequence Number=SeqID_768
MAWWWSGNNGRGWRRALMAGIVEQRGLIVHRFIATIN

SEQ ID NO: 44144 - protein, 195 aa, Zea mays
  Coding DNA Sequence Number=SeqID_769
MPEGFGPETSRWATWCFGCDKTPEGGTSSRLPGKGRSSSPRKRSFLPECLSCFSTTSKVDPENDGVHLKGAAAPSASTTPSARSGLASDGDAVGGSPLRRTTSAPCLGHRRQGLLQESGSSKRLGRPPRSLSQLSPEDISPARGIGDSTPASVPPVDDPARLRPTKSSFRANSASVRADTAASGFGSSKSGRGFL

SEQ ID NO: 44145 - protein, 256 aa, Zea mays
  Coding DNA Sequence Number=SeqID_770
MAAPRTTRPVSLTPRRDRRHLWQEKRTTLRLRHNDRVKKGTGKGDTPKGILLREGNGPRAPLLIRGSKAGPSEGFNSRLRALGLRAHYWSEVRGPAPRKGSMAASGHSGSAPTTDQGFVGCPRRVHSRLRRRARDDPGYVRYITKARATLPSSLETPCSAPSEGNMALPPPLLLAERRRKGGSDSGSAPEDDELRFARPQGSDSGSAPEDDELLFARPQGSDSGSAPEDDELRFARPQGSDSGSAPEDDELRFARP

SEQ ID NO: 44146 - protein, 154 aa, Zea mays
  Coding DNA Sequence Number=SeqID_771
MGRRETEHKGGKNSKGEAAAFVLSYAQGGCACSRGLQALAWERERLSASPFSRAATLSYESPRPSFYRRKERAQARRSPSSEVEVESEPWGRARRSPSFGVESILALNAPAIRSVGVAIWPRLLLREAYPSWASGESKLVTPISIKLQRPDGCD

SEQ ID NO: 44147 - protein, 233 aa, Zea mays
  Coding DNA Sequence Number=SeqID_772
MTSHGSSDDGNALTHTDGLAREGFPRILWEVLQGAGYTTPPQYAVQQFEKHTVPRCRVRMTLEPHPLQPGWRSLDSESFGYRAEDTIEAIALHGLTTFCGFHPLELATHPIGLFPAEREDDPMWKDRVEHAKDIWAIYPGQTTHLTVEQLSTDIQELEELVGTRENTIEVLEDQLINTQQQLAEANEHLDMHHQEIQDMEANEDVDIEGGEEPASSVDTAGSWRPPSPESSVA

SEQ ID NO: 44148 - protein, 89 aa, Zea mays
  Coding DNA Sequence Number=SeqID_773
  Subcellular localization annotation: CTP_CleavageSite=56; ConfidenceScore=5.46e-01
MKRLAGIPNSRSWKGVKLTTYPGGGVGSASLPGANQSGYGPPERGRSKPSVTRACRSSTVMVEKGHGLRGGMTVALSAIAELKRWKRRG

SEQ ID NO: 44149 - protein, 130 aa, Zea mays
  Coding DNA Sequence Number=SeqID_774
MEKGAGTRRWRLVERGSDRLAFINSQTRSLSCDPIPVHAFTVEISDSLNSPTRYDSCFCYDIWKHGSFNYILRFLGLLDHGSGRRMSTTEIWENSKPPPNLGNVSLWLTATQYPDIQLGLLADWYTQNYF

SEQ ID NO: 44150 - protein, 317 aa, Zea mays
  Coding DNA Sequence Number=SeqID_775
  Subcellular localization annotation: CTP_CleavageSite=58; ConfidenceScore=5.27e-01
VFPLLPSAAGEPQFPLSSPAVGDPFPPLPLSYRAALAAPLAAARTTTTVGAPPGHVLVAATAPSPPAAPSPPPPVLAPPLAPTPSSSPLAPAPVLAVPASPPPAAALAPAPVGASAPTLSHQYIGNAATHGAAPALTATILSLGFPSIAFSLPDAALLRSQLLAPGFPHVPLGTMVGAPVRDCTSPMTAYSQPSAITSSLCAPSDDAAAILAATRAAVTTARQRAQDAARALEQEQAVVDAIERHYTKTCRRLAGKGVSDGSPTSAHHCVDTFKSAPAPASTLRASLHAQAAAFTSIRATITDVLVPDSSQYPRWHD

SEQ ID NO: 44151 - protein, 241 aa, Zea mays
  Coding DNA Sequence Number=SeqID_776
MRKKHGSVPKLHTCSGPDSRNEQTHRHSKCHYERNSGSPSAGTNDPTPWGGPAEQQKTDERLAAARSDYGDSGPALLRSCSRPRRRSRGEDKYAGAMARGAGGGSDPVGDEDFSSRLRLGADGRGHQPPGRSPLKSSRTSGAPASARGRRPSAKAGPPQNTNAALTARDIVGGPPVHAVRRSPPGRKGRRKPSRRLRHAGGDDARRRSAPRCLSPRRPQGQRAPPPPNAAEKGDPRTRAGR

SEQ ID NO: 44152 - protein, 234 aa, Zea mays
  Coding DNA Sequence Number=SeqID_777
MKEAVVEVTTPSGIWRPGWIASVEVNRLQYKISERDTAIDWAINSRSFAWDCEAKVLARVAELSASLENLQAYYNTLHEEVHVLYDWLHPNVPLDVAAMGVGPSRTTNGGSNGGIDLFGAPPSMNLADERSPKAGTSRGGEDTPNPPPVPPTLAEAIAALVNATVDNMRFLHEMAGKQFQQHGGRVPPQGPQDTTYLEFSETCTPLFVKAEEPLEADQWVRVMEQKFGLIQCTE

SEQ ID NO: 44153 - protein, 215 aa, Zea mays
  Coding DNA Sequence Number=SeqID_778
  Gene Ontology: Mol. function=protein binding; Cellular component =nucleus; Biological process=regulation of transcription
  Homolog annotation: Hit_ID=Q53MB3; Match level="QueryCoverage=47%, HitCoverage=17%, E-value=4e-32, Identity=65%"; Hit description=GRAS family transcription factor, putative
MATTPEEFFIKDLMEQPPLSPPVFLELPHKPNASNEDRHQVPNNDMTLPYISRMLMEDDDNELGDHPALLQVQQSFAKILSSPPLVGTNTNNSEGTNDFLHEACSPRDTVLSNIRKMRPDVFIQSVVNQSYGSSFLSRFREILFYCTAMFDMLDATLPRESESRLVFEKLVLGCYVFNGISCEGSDLVLRPKKYRQWQARNERAGLFWMATKTRS

SEQ ID NO: 44154 - protein, 104 aa, Zea mays
  Coding DNA Sequence Number=SeqID_779
MARMLRWSPLLGRLLGAEVVAAASEAACCRGGCLRWRAARSRGSRRRWRAIGAEVVAAVGAEVVAFADQQTGHMRADLTGLAYTYAFPSYKREINSTPQTCSYG

SEQ ID NO: 44155 - protein, 348 aa, Zea mays
  Coding DNA Sequence Number=SeqID_780
MDTQSNTWGVTKFTSFTRLVIILFLRMLEEEAGTSPSVKEANRRTRSVQPPPRLHCNRWSNLWHGGLDPHVMQPAHRFLGAEKLHRRSRQYLASSRPSQKTEVINFQNQCSDSRHPAHGPTKTLSAEVTGQSAAGTSVAVGVAMGRPAVIASTGAQEKRANRQSNFGPTCRFAYSFEAGPGATVGTLNQGYPLLQYEDAVPEKPWHEQGSGTDTYPGLTLRMCSPLRRRPDAATWLVAHDISQRAEPDVRPLDCADSAFIAKRTRRLTTLLTGDVPPQHLLRPVHSAGRRHQGHPTDGVPVQSIVGTVRPCCAVHCAHHPLYEKLPPARRGYADLGCQGTRRLLQQQT

SEQ ID NO: 44156 - protein, 239 aa, Zea mays
  Coding DNA Sequence Number=SeqID_781
  Subcellular localization annotation: CTP_CleavageSite=62; ConfidenceScore=5.45e-01
MSCFFPTRGVLLPPSSLCPFAFKVFALRCRSLPWPCDFTPSTPKLSECSKWYTTCLDGMRRRSAEGFALALSTPMSLLLESLCLLSFLAGRCYRSCFSSAGGVWPCGSSALPPVLGFKDVHQPRDGGERAEPRFRLPHGLVPASSSSIRRKRMITNLVKEVNFVTPQGRQTRLGATVSLQPDHIYPWNLHELDCNLADGEYILVPEQGAAQEVAPDPAPEPAQEDLPATALEGKPRFYA

SEQ ID NO: 44157 - protein, 102 aa, Zea mays
  Coding DNA Sequence Number=SeqID_782
MLVDYTTGLLQQPGCLEVVQGASLAEVQGKAASQTPPPTEARGKSPAAPGPALAPSVDAPAPRAGDDAVSPPDWTDLAPCDEGGVPPGEKAKRGSQTYVQCT

SEQ ID NO: 44158 - protein, 94 aa, Zea mays
  Coding DNA Sequence Number=SeqID_783
  Subcellular localization annotation: CTP_CleavageSite=61; ConfidenceScore=5.23e-01
MTLPVDVAVCALGRATWVAVAEPEPRGRARRRSFGRGQGGVRALGSGGAGFVVFRVLARVRALGSGGAEFAVFRVLAQVRALGSGGAEFAVFRV

SEQ ID NO: 44159 - protein, 95 aa, Zea mays
  Coding DNA Sequence Number=SeqID_784
MADEAIKKSEIESHDAQVEAKEAEEAVERALIIASKFTNMLFITADLSPPPEPYNPEVDPIMKEALDVMKIANEVVDQVIDRLLHEAAERILKED

SEQ ID NO: 44160 - protein, 216 aa, Zea mays
  Coding DNA Sequence Number=SeqID_785
MWQDAKKSLTQMNVNGNLHNRIGIQMSQVKAIEIKETAEKGRNGESETAEKKRNVNHGFMGILCRDSDPMTNPPRTKLPRGKDPDGHEVEKWHLATGLVAALADVAVAAAPTVAAVIAPAAAVAAPAAAVAAPAAAVTVVASVVVVVVTFAVLLGRVLLVRGVLRLIRALEPRALNGPDVSLDLRGNPLRVVRVIGRRWGRDGSWRPLGLRGELLL

SEQ ID NO: 44161 - protein, 79 aa, Zea mays
  Coding DNA Sequence Number=SeqID_786
MGLLMGSNGNPTVGMGNPLDIRNPHGYGFGQNFIPVMGMSFLAGVFFFRGYEFGQVIPSGFLPIAISIYNHTKANTVLN

SEQ ID NO: 44162 - protein, 533 aa, Zea mays
  Coding DNA Sequence Number=SeqID_787
MDKDRQGAAQKRQAAVRLHEARPKRQRGAAKAAAPDGGKPPLAAKVGASAPSKAPEATAGAGGSKSTKVVPPASGVAKASKAARALPLSGKRVADFGTDITVDDYLGGPDEGQLAIVAPGAAIATAAIAPKARGEVSKSLGAGGEVSALAVVRDEAGAATRRLKGVTEALSQATEALSQVADFTSRTASGALTAALSAEVERLRSQHADAVREKSASDSKCRKLADKVAALEKEKADLRRQLAGERREANEAIAKEQAAQAEAKLARAEGNIAKELAGHLQERLAALESRARGAEAAMRAEAERTRTQLMDTYHELGARTGDFEVPDREPGLRCPEWVQEELQELPAVVGGFMSYASLVTCEGAVNALSREGCRHFEVFDQADEDFERDVYKVEDPVVKESAGALYDRMWGPHGREVVRERAEIARAQAARGERVDDFGALNSALPDPEPTLAKAVTGVALEPTPETAATAAPTSAAAGEDLPPKVAEGAPDAPAAAVPSVEDPAAVAAEATAEAAAEPTAEAPAASGPSQVA

SEQ ID NO: 44163 - protein, 421 aa, Zea mays
  Coding DNA Sequence Number=SeqID_788
  Homolog annotation: Hit_ID=Q6J9V9; Match level="QueryCoverage=20%, HitCoverage=31%, E-value=7e-07, Identity=40%"; Hit description =Putative uncharacterized protein
MQAACNRAKWARPFDFNKPSMEAGRSNGHVVSQAYVPSRGSEGALSHGVKTGPGKGDTPKRTLLHEGNRLRASLLIRGSKAGPSEGFNSRLRARGLHTHYWSEAGPRRVHSRLRHRARDDHGYVRYITKARAMLPSATLSNERRGWRNVAEDARSCGRGMVRLPTEIRGGTNDGARRRRCSASQFWSPVEPWRTAWSEFIAVGRCTILSDLRKSWGPPSLWPTTSAVLFDSAGHVLAAARAKGAAVCVGAAARLIWGKKKETPPRPTPGLGLGLSPGRRRTPLCPTQGSDSGSAPEDDELRSARPRARTRAQPRKTTNSASPDPGLGLGLSPGRRRTPLRLTQGSDSGSAPEDNELRLARPRGSDSVKGKCELVVLGNSSSTYGYNSPDCPVCTGLSGEPTVDRANGRPRDLRGTRGRTNG

SEQ ID NO: 44164 - protein, 294 aa, Zea mays
  Coding DNA Sequence Number=SeqID_789
  Gene Ontology: Mol. function=carboxyl- or carbamoyltransferase activity; Cellular component=ornithine carbamoyltransferase complex; Biological process=amino acid metabolic process
  Homolog annotation: Hit_ID=Q8SA97; Match level="QueryCoverage=36%, HitCoverage=22%, E-value=2e-10, Identity=44%"; Hit description =Ornithine carbamoyltransferase
MALVVDVAGPRPRPGDVGAPPKLGSNLSSVAEAEPEPLGRARRRSFGRGQGGVRALGSGEAEFVVFRVLARVQALGSGGAEFAVFRVLARVRALGSGGAELPMAPLARPECLSDSLCRVALQSEWRRRRCPSVRPLHADGGYQLRIRRLEANSASVRADTTTPSLGSSKSGRGVPLTKQEKPRTARPTEPRDSYASEIWIPHSSPLHGAPTATMNKRPASKVPLQTELQFHLRRYEQPHPIGGPAEQQKTDGRLAVARSGSNDNDPRSGWPNCSSDGLRAVISWPWDGMSWPKA

SEQ ID NO: 44165 - protein, 228 aa, Zea mays
  Coding DNA Sequence Number=SeqID_790
MGETAVFSPHRWRNATPWELVPFSHRSASRIFINQPDRSPSPGVTQDGNHQPLDGEERLDCGLCPAPSWSSSSRPGQDLGQAGALPLAWVGRPPPLPASGGGDHPPVPRRRRPPVMLGEAGCCYPARMQHSVLFLACVARTGVRTCRCALGRPAFAGDSPRARRSTGFSGGEVVRTCGDGTGVPFVMAFRMPRFFVHFGFRGLNTYVMSAQSRVFSSFLSTKTRLLFV

SEQ ID NO: 44166 - protein, 346 aa, Zea mays
  Coding DNA Sequence Number=SeqID_791
MDGNGNWDTMKGNKLAAEVAVAREVRSATCCACMSRLQIDLHLHISTSAQVPSSNGNFRTRFITSGGNVLAIHHEVEEEYVVRWMLGKQGTDQSPAPGFCLDLLAGALPMHLPFSYGADAEEELTERGEADVVPEAGTKMGRSRRVRRLSGRFPSDENSVIHPAPATVPTTKARLATVSRDLSRVQPQAQQGAPPRPTSGLGLNLGLGRRSPPRPTPGLGLSLGLGRGHNLARPQPQPQEKSSPHPTWASDRLRYRGYIITLPLASCLRLQRNKTGVPSKVTLVTGNDGSPCASMTSRVLSSLRKQDNVSRIHAAPTAVLLQGPRHFSDSHVKTRTGLKALLHEPR

SEQ ID NO: 44167 - protein, 194 aa, Zea mays
  Coding DNA Sequence Number=SeqID_792
  Homolog annotation: Hit_ID=Q2HVM1; Match level="QueryCoverage=32%, HitCoverage=12%, E-value=2e-08, Identity=43%"; Hit description=RNA -directed DNA polymerase
MEHHHKPGLRVRLRITAARRRAWLSACLRPPCRKPPRRDHSDSVHKVARREIGGGHRRPPRPAAPSSSSFSCPEKFRNFQLQCKDKLVNDKYSRQYVCFWVSLTWIPHNIPGMTKFAMTGRIVVNSNWSVDNIEKYKIEKKTTRRVVSVAKGRPHEGLYERLSAKEGKNDIYGMTRVRERKTRDFTKLSALKMK

SEQ ID NO: 44168 - protein, 602 aa, Zea mays
  Coding DNA Sequence Number=SeqID_793
  Homolog annotation: Hit_ID=A3ABZ8; Match level="QueryCoverage=13%, HitCoverage=15%, E-value=3e-14, Identity=58%"; Hit description =Putative uncharacterized protein
MPCGSGPGAADLWAMAAELERQFAGYKQRLAERTTTGATATARERHDAGDGAEEAGDDDEAGGGGGDVRGRKYEAYARRRDERLRDGWRARMERKEAEVKALWAQLELAAGRAGPGDPTTTATEDGDDGRKTERNDADDDRRRSSSGAALAPRRVTGKRHVRTRSFSSSTMSRNRTDVGRRRALSHEPPPSEPDASCGEADRKSRAWPAGRAAAATADTMRPRPKTSLRRRSTSVEGHGPAKTAAGRKLPRPLPRRDDSSGGPEDLGRDVALAVAQPSAETVAPPVPSRSAEYAATGGGTPGASPTKMSLAGRDDDGSGGNGAANTRATSPEPDRGAVDEAVSHGEPDATHDAGANEHGGEEKVDADGEVTSESEPEPSYVYVNNKDAAEERAVAALSEPWTLAGSAAAVGPDVKSSGETPAALAPPAEATTAAAAEVATTNAEEAPARESSDESYLSARSSVPSARASCSSRDQSAERLLEADAALARKKRAEKSAPAPSTPPGSRSSGAARSPRQATVRGFKRFLSFGRKHRGREVTVIDCTSPPVPSPVHDASGRWQPADGSVKRRMGSSDAASDDTKHGYPVSPQVGVEMLSLLKEIG

SEQ ID NO: 44169 - protein, 246 aa, Zea mays
  Coding DNA Sequence Number=SeqID_794
  Subcellular localization annotation: CTP_CleavageSite=59; ConfidenceScore=5.31e-01
MTRSPLPITACVTGTSSSASATASTWYGRSQISSPHYSGPWISRVTGRSTIHGRGGDIMSAEVPHFHPDVLLDQGGFGFGLGNTAVGGGSGRALRGEQHRAGLLRQPAGQLLTNAPAPPRDDRAGGRTRAGGRTPPDEMDDELYGVAGCDSRVAASLRCPSQSGAMAVWSSSKKPYGIWTSAGGPVPVLAHETYHLAGARLSDVGGLHYPLAACSGANASTAVVASELTLCPNSIASSDSTLNATE

SEQ ID NO: 44170 - protein, 100 aa, Zea mays
  Coding DNA Sequence Number=SeqID_795
  Gene Ontology: Mol. function=catalytic activity
  Homolog annotation: Hit_ID=A2Y3P0; Match level="QueryCoverage=87%, HitCoverage=39%, E-value=1e-14, Identity=41%"; Hit description =Putative uncharacterized protein
MYDKLPRSRRLDAVQSSCTALSIVKQGSLMVVANVDDSRVVLDTPNQESSVLVMSRAFDDYYIEDCVVILAPEVTQRRIDNSDQFVILATVRVAFMSAYL

SEQ ID NO: 44171 - protein, 17 aa, Zea mays
  Coding DNA Sequence Number=SeqID_796
MGLPPPLLLLRGQTTEI

SEQ ID NO: 44172 - protein, 268 aa, Zea mays
  Coding DNA Sequence Number=SeqID_797
MSGGFKAAAAPAISFGTTTASTEGDPPRGSVHRILRDQWQGRLVKPQLLETDGNLGYENQGQSDTRKKKERTLTRDMHPRSGRIKGWVRAPASSLPTVPVTRLWRSSAERGTEDICEPSKSTPGVISESSNRRSVKGSTLRRWMAATTPAANRPHETTCWHSEPPLMEGDETQHIPRRRGRGGSARRDHPLRLRVTGEGTKQAIGNKGLQIVRRDGGERPRVARWNDGYPVGHHQAKGVVAERTRDRERGYSERDPSPRRKRAPSPRY

SEQ ID NO: 44173 - protein, 70 aa, Zea mays
  Coding DNA Sequence Number=SeqID_798
  Subcellular localization annotation: CTP_CleavageSite=33; ConfidenceScore=5.53e-01
RPPACSPRRPLAASGPLPTAVPTTPAAHARRTVASTVVSIFVREDTCLPSHCGSAYTASRRHCTDPPQPH

SEQ ID NO: 44174 - protein, 171 aa, Zea mays
  Coding DNA Sequence Number=SeqID_799
MGKNNKRKREPTPPSEEFGDSEYSEEEFSSEPEGSPAPVSPPASSDDSDDSQGIAAEVWTYIRAVERAGLKGSDESECSSDEEDSDGGDEGEDDDDDDDGWGGGDGSRDSTKGSSRGSTKGGGGGSRDSTKGSSRGSTKGGGGGSRDSTKGSSRGSTKGGGGGRGRGRASG

SEQ ID NO: 44175 - protein, 48 aa, Zea mays
  Coding DNA Sequence Number=SeqID_800
MGSHDPRAKWESRLMDDDDDDGYDYGNGKEEGVEANLQELQDFDEFED

SEQ ID NO: 44176 - protein, 382 aa, Zea mays
  Coding DNA Sequence Number=SeqID_801
MGCSSIALLLLSLEERGLVEIGTFQPSLGFKDFCRAARLHSLTNGQFGGGKQAGLWPPPRPQLQGSSSSGLRQRSAPSGGLPPHGPVTLFFPQRLGEKGILQPCGGVLQPCGGRRNAAPWTGCSFPSFFRAAVVLRTGWPRPGLPRTVSRARGLPNTSYAARAVLAFWGGLGEDGSEDLPVRFGTAVVRRRGVGGFKPTVGALRLFSLNGLSSPLVWGRGRGPLHSSVFPEAVAVAVWSPEAEVIVAAVRGRRQATWSSLSRWPPGVEVVHTRGSETRVPFIRRYTRAGDSSVSADRRRVGSERDFVGPRDGGFLGRGRCGSSRWSLAKTPAGAVLASSLRWRSFCQGHRPRPGQVPPRVETMPRVLLFPLPTPEPAGTVCL

SEQ ID NO: 44177 - protein, 136 aa, Zea mays
  Coding DNA Sequence Number=SeqID_802
MGKNNKRKREPTPPSEEFGDSEYSEEEFSSESEGSPAPGIAAEVWTYIRAVERAGLEGSDESECSSDEEDSDGGDEGEDDDDDDDDDGGDGGGSGSGRGGGDGSRDSTQGDSRGSTKGSSRGSAKGGGGGRGRASG

SEQ ID NO: 44178 - protein, 192 aa, Zea mays
  Coding DNA Sequence Number=SeqID_803
  Subcellular localization annotation: CTP_CleavageSite=86; ConfidenceScore=5.67e-01
MQAACNRAKWTRFSDPPTRQRGGPGPRVTQPARRMLHASNCTATCATTALPRLRNQYRDSRRPSARPSGASLTRQSNAAKSGPAVMAVAGGREQRTGGASGRRSGRRFAFAEITAPKKGPGKGDTPKRILPREGTRLRASLLIRGSKAAPPKGSTAASDRVGPTPTTGQRFEGRPPKGFHGRLRLPGLRVHY

SEQ ID NO: 44179 - protein, 194 aa, Zea mays
  Coding DNA Sequence Number=SeqID_804
MELGGGTAVGAVESLLTSSCFRKGAESRRRHRACGAPSLPIWRSEPDGTPVLFPAARVGRCGSSSEAEVESEPPGRARRRLPAGAGAESEPWGRAKRSSSSSEAEPKSEPWVGRGGDRRLLGPSPSPSPGSGGVRRLPGLSPSPSPGSGGAEFAVFRDLARVRALGQAEFAVFRDLARVRAPGRAERSSPSSGT

SEQ ID NO: 44180 - protein, 175 aa, Zea mays
  Coding DNA Sequence Number=SeqID_805
  Gene Ontology: Mol. function=nutrient reservoir activity; Biological process=RNA-dependent DNA replication
  Homolog annotation: Hit_ID=Q9LGH0; Match level="QueryCoverage=81%, HitCoverage=39%, E-value=4e-13, Identity=29%"; Hit description=NAM -like protein-like
MGTDWNQVMAQYGTFLSEDDGTQFQNTAFAPPPEIPAQGSPAPPPVKKAPQRTKLANFTSEEDMRVCQAWLAVSCDPIVNTGQKRQGFWNRITEAYNSRRGSMPERSTKSLMSRWDSIKTQCSTFAGYMMVVLRQNPSGMTDADKHDTLNNQKSDEEVHLFAVHIVAWEKQNLRH

SEQ ID NO: 44181 - protein, 377 aa, Zea mays
  Coding DNA Sequence Number=SeqID_806
  Gene Ontology: Mol. function=GTP binding; Cellular component =intracellular; Biological process=protein amino acid phosphorylation
  Homolog annotation: Hit_ID=A3AZK0; Match level="QueryCoverage=59%, HitCoverage=27%, E-value=6e-58, Identity=53%"; Hit description =Putative uncharacterized protein
  Subcellular localization annotation: CTP_CleavageSite=52; ConfidenceScore=5.36e-01
MALPTLGNRESSKQTRAPKVRHTGAISRLGARLRLHADPSPASPRLRVLSTRRGKRSSSTLSPADCDDEGSLRHLFVLSRDPECPPRLLVVQPRLRPGSLLESKLAEALNLANSLEERRDGFYHSEFGAKRAPPHLVVQNPASRGRSHAGIQLYASDGGGRGFVCGLQAGGVALFCWPSTPAPQWGQLRRIYNGPTPLADLAVGADHVAAYDASGKVVLWWRGGGRFPARADGAFRSLVSGDGFSCAVQANASAAVRCWGPQGSTVQEGLANASAAPYLAAGGAHACAVLASGAALCSGLDASAGALPRDLFGYGLAVGDSHACALRRPDHTAVCWTLGGPTTTLYEPAMGISFGFLVAGDNFTCGNSRKRRIQTCP

SEQ ID NO: 44182 - protein, 147 aa, Zea mays
  Coding DNA Sequence Number=SeqID_807
MAVTSALPGRARVRINVSGHLCIKCSCDLVGWRDDLVRVASWRRQGLGRAGSEASLASPARGAACPAAELMRRGERFAGRPLRVREPFEERLFRFEFLNPAADLGGPQAREHFRSSLPLYNWFEGDSVGWLDDAINDKPLPASWAYR

SEQ ID NO: 44183 - protein, 141 aa, Zea mays
  Coding DNA Sequence Number=SeqID_808
  Subcellular localization annotation: CTP_CleavageSite=21; ConfidenceScore=5.54e-01
MTVAGGQEQQSRRQPSSRPIRGQRGKPPSRREDNAPVFRSSNGSRTRNGRPANHSPRRINSAGPGKGDTPKRILPREGTRLRASLLIRGSKAGPPEGGSKAGPPKGFTAASGYSGSAPITDHGFEGWPPKGSQPPQTLSEG

SEQ ID NO: 44184 - protein, 66 aa, Zea mays
  Coding DNA Sequence Number=SeqID_809
  Homolog annotation: Hit_ID=A3C9L6; Match level="QueryCoverage=96%, HitCoverage=6%, E-value=6e-08, Identity=39%"; Hit description =Putative uncharacterized protein
MTPYMEQFLHEFWRRSRDPTPQEYDTLLRKGAGNGLPDFISWFKRKGQRESSMSAELRQVANSFAY

SEQ ID NO: 44185 - protein, 461 aa, Zea mays
  Coding DNA Sequence Number=SeqID_810
  Gene Ontology: Mol. function=DNA binding
  Homolog annotation: Hit_ID=Q2A9E8; Match level="QueryCoverage=28%, HitCoverage=50%, E-value=9e-11, Identity=29%"; Hit description =Putative uncharacterized protein
MSSHDAKVVQNLVLNLASSVESRAVNIRTFLEEAFRHLGDEHYLLNALLAIRKEVDLMEQDAIESKARSDPEKERMEEQINLAQDAKPVPRQITFTPPSSPELYEASDNDSYDSDRSTRMADNNTNTPFRPPAASPNTGNQIFPPPMWDPQMWQPQGLDPTQASTFTTPSNSHMTNPTWSQGPNDPSGYTFRTPWNTYFGMTTPGGPPTQTCFGQPQLVPPIPCPLVSTHVPNQTDPITFESEAEHSVQEVNSPSKASDTPGTFRRTKEQNFKPDEDLLLCKTWLEISSDPVISTGQRKEGLWARIEKRYNELRGEFPLRLNRALSSRWDKIRAETGKFAGFYARVLRENQSGLTDNDKRGNAGTEPVQSLTPTGSVNEVHSDEGGSKGKRPLGRDSTKASRKKSMSNSSQSTDYLSRIHDIQIARLKQSEEKSDLKQQNIEFMKEVELKKLEVQSKEIEV

SEQ ID NO: 44186 - protein, 80 aa, Zea mays
  Coding DNA Sequence Number=SeqID_811
MRQNRMCNAATVTEKHGHSMHHQPQQFALGHSAVPKCVLLIQTPRVNGTERDCESGIGTERLRPIDFLERNGSGSEENIP

SEQ ID NO: 44187 - protein, 38 aa, Zea mays
  Coding DNA Sequence Number=SeqID_812
NNKEQVEKANSVDDTGIFTETSMRLFALTTPGASSHTR

SEQ ID NO: 44188 - protein, 32 aa, Zea mays
  Coding DNA Sequence Number=SeqID_813
MADSCGATANLGTRCGIGSRGHARGGGPMRIL

SEQ ID NO: 44189 - protein, 81 aa, Zea mays
  Coding DNA Sequence Number=SeqID_814
MAGWLLVLSADLLWGRRPAVAQIRLSHLVSHPNPTLLHNGDRWLERRCTDNSGKVQLLGVAGYLAAMEGEKLEFSENYCGG

SEQ ID NO: 44190 - protein, 634 aa, Zea mays
  Coding DNA Sequence Number=SeqID_815
  Homolog annotation: Hit_ID=A7P225; Match level="QueryCoverage=71%, HitCoverage=86%, E-value=5e-83, Identity=41%"; Hit description =Chromosome chr19 scaffold_4, whole genome shotgun sequence
  Pfam annotation: Domain name=CDC27; Domain location=68-519; Score= -21.7; E_value=3.8e-06; Accession=PF09507.1; Description=DNA polymerase subunit Cdc27
MQNRLVRWCSRKMPTHPPGKRTPRYVSLMYGDHRGVAFVLRGLCFVDSYGLGVVDDTDWILLVLVCVIMVSYKWLSRNFSVSSNDAKRLLQDFVNKHGTDLQVIYSVSGWLKSNPQNYCVKLISGPKLEEARQIFKDSCSVQIYSIQACIPKDTAVLWNPEFVQAEELFNQPFDYENCLRDNRFCGVLNSFVKRTSNGKHVSSLPPKPLNSAAAAAQSKPSVTPKEQFVTARRQDLPVSSKQGADTKSEKDNSTVLDKAGNGPVVKEQSVDAHASKSKAQNGKAMPSNGGSLANMWGRASAKPKPPSTTNSTAVASVAATADAQICAKEEADGNSSDDEHGIKYKRGSTNANNRKRRAVFDYSDDEEDDNIVSIASPELPKQHTPDPVVGIAEDAEVNQKNLETEHHVPNNGKGSSTGVDSDFTSECKIKTIDPMNDSGITLKEKSSDPPINDKKQDSAAEPASTSPKRRKVLKTRIDERGREVTEVVWENEASADDKAEQNVNTIDATASGQQASSSANQLRGRRVKVQGGRAEQFEYLCLVGMDPTGRECTHHHGLGGCELGTGGVASQQTADSNVGRELESQSHPIVSVSRLVNTCLLLVLQDDDSYTSLELESQSHPCGRPKPAAKQLNA

SEQ ID NO: 44191 - protein, 459 aa, Zea mays
  Coding DNA Sequence Number=SeqID_816
MESHDLRAEWESRLVGGYETVESGYDYGAASPLQPNRILAEYVDVYSPLLYTPNPPPQVVSIATTAQAKMKLWKETSRSSKITTSSRCGLAATPSRLPVKAVLSTFLFRTLIYCKNYMDVSDMARLRHTARKSVIPFLPSRLAERPLRRPVAGQSSHLERLHHRLREEQERRRQEQRSSSLSLHQEIESVRSCSPVLPLEPPPAPPLGAPASGVAAGGDPDDGGGDDSSSHDTDFSANPEPEGWVARPITRDAARGCHFHDALDTLLRRAFDRHTWSVEYRCVVYQHSRGVYPDRWEATCLVRCPEDSLQGAEACSEHYSISERDSAEAAMQDAARRALSHYCSVFGGAADGLDLKYYPRRSSGSTGGVIVSPVGEGNPRLSSTVNLAAVLNTELDHALDELSRARAEIALLRAERAERRFLDGGSPAPVGTQHPYRSPQRGHQSYGNPACKTKITLEP

SEQ ID NO: 44192 - protein, 60 aa, Zea mays
  Coding DNA Sequence Number=SeqID_817
  Subcellular localization annotation: CTP_CleavageSite=30; ConfidenceScore=5.58e-01
MGPVPAQPTSRPSRPRRPPPAPHARPLRVRLGTATAFQPSSLVKNRYRRMRRMEDAAMSL

SEQ ID NO: 44193 - protein, 150 aa, Zea mays
  Coding DNA Sequence Number=SeqID_818
MTVAGGREQRSRRRPGSRPIQGQQESPLSRREDDAPEERATLRLRRNNRTKKGWPPEGFNSRLRSRGPYTHYWSEAGPRRVHSRLRRRARDDQGYVRYITKARAALPRARTRAKPRKTANSAPPDPGLGLGLSPGRRRTPLRPTQGSDSG

SEQ ID NO: 44194 - protein, 93 aa, Zea mays
  Coding DNA Sequence Number=SeqID_819
  Gene Ontology: Mol. function=kinase activity; Cellular component =ornithine carbamoyltransferase complex; Biological process=amino acid metabolic process
  Homolog annotation: Hit_ID=Q6QP54; Match level="QueryCoverage=100%, HitCoverage=24%, E-value=7e-14, Identity=52%"; Hit description =Putative kinase
MALPVDVAGMCPRSGDVEAPPKPRSSLSSVAEAEPEPLGRARRRSFGRGQGGVRALSLSPSPGSGGAEFAVFQGLARVRALGRAERSSPSSGA

SEQ ID NO: 44195 - protein, 105 aa, Zea mays
  Coding DNA Sequence Number=SeqID_820
MCVERRRLKVANEKREQDAREWEAARVEKQRLGNLIGRLSASELDVPRTISHMRLVQDTYVQEKLATMELMEEEDTSRLIELIALIETELHWKGEDDTSRRTEQS

SEQ ID NO: 44196 - protein, 57 aa, Zea mays
  Coding DNA Sequence Number=SeqID_821
RARGYERPRELQRLVILDQRHCGIGGYEIDGSGYDYGAGEDEAVEGDFQEFQDYDEF

SEQ ID NO: 44197 - protein, 44 aa, Zea mays
  Coding DNA Sequence Number=SeqID_822
MGLGVCGSLCQGGDKDDVYAYGNGKEEDVEADLQEFQDFDEFED

SEQ ID NO: 44198 - protein, 18 aa, Zea mays
  Coding DNA Sequence Number=SeqID_823
MEARSVHRVLLCWWCWCD

SEQ ID NO: 44199 - protein, 39 aa, Zea mays
  Coding DNA Sequence Number=SeqID_824
MAEAEEKARVVVVGGGVAGSLLAKTMQGHADVVLLDPLA

SEQ ID NO: 44200 - protein, 62 aa, Zea mays
  Coding DNA Sequence Number=SeqID_825
  Homolog annotation: Hit_ID=Q53J81; Match level="QueryCoverage=69%, HitCoverage=6%, E-value=4e-07, Identity=58%"; Hit description =Retrotransposon protein, putative, Ty3-gypsy sub-class
MQLPLTAPTTLSTSLSLGVERQKEERAHRMQRLVYFISEILTDTKACYPQIQKLLFVVLITK

SEQ ID NO: 44201 - protein, 172 aa, Zea mays
  Coding DNA Sequence Number=SeqID_826
  Homolog annotation: Hit_ID=Q6QP51; Match level="QueryCoverage=33%, HitCoverage=25%, E-value=1e-15, Identity=68%"; Hit description =Putative growth-regulating factor 1
MQTACNRTKGTHPFDFDASSLEVQAHTSCNRRAGYYVQETTPPLAPVPCLLDCGTGAATRGDPAHDPIVPIEHIGHGRHLWQAKQATLHLRHNDRVKKGPGKGILRKGSFSVKEAGPEPPTDQRFEGWPLGRVQQPPQSTRAPRPLLVRGSKAGPSEGFNGRLRPLRLRAHY

SEQ ID NO: 44202 - protein, 331 aa, Zea mays
  Coding DNA Sequence Number=SeqID_827
MRQRPYPIPDKLLNKVALATHADSAPKGPFVFIILRYLELRGTNSMTSIEVLPVFGGHHSIRCQLVDLDLESTQDLRHESMRRQTKASGEKGLEDDQLAFWLGDHLRPRDTRHLPPKYPSCCMLCTRTKDIRDTPNSTVSPGCNSSAATLLSVSSDDAPAGSVSAAEEEEDGMATYRRRRRAVCFTRARSPTSRSKEGRRAVGFKRRLGFCGAQKEYLTRAAPPPFIYRTRRFGKPAVQQCHVHQRSHQKPPRNHFERGQHLHHLAKPSAPDDLVKLVPRRANVGAKAKTPPFARCLRCLVRCEGPHRIRPIVTGPTRLSALRAQFVKAFL

SEQ ID NO: 44203 - protein, 173 aa, Zea mays
  Coding DNA Sequence Number=SeqID_828
INGPDLMRPRSRHSPPIESYGPDRPSEGDPPTEKSGFTVELARRRAIPCVTVAPNPNWRRGQLPRAKTILPDPTPRAETLQPRRSTAAALLSGGYGRGGELGELLYPEQSPSEGEAVTGRSAILGGERAAPSSSGFRCEEGDVLTSGARAPVEQRRKARGGANGKWVRVVGAS

SEQ ID NO: 44204 - protein, 187 aa, Zea mays
  Coding DNA Sequence Number=SeqID_829
MRLILWYLFLTCGGCETARVSSHTFIAQQVVGNNVHELIKYGSSREVITQGQERISVRDSATSVQDGEFISIKPRDSFRFTTPIEDDESEAEESFDEKLLGHGKPMPNFPIQKSVIQRIMRQITWIGFSPAIGCKGARPRCERNPQRHQRNLVSSARRFNRSPGHQVVSPTRQGRNPSSELRRSSHD

SEQ ID NO: 44205 - protein, 72 aa, Zea mays
  Coding DNA Sequence Number=SeqID_830
MAAVGALQRGVGGGSALQRGHGAVVVRMEAGTRAGARLVPGFKGKLPSIFLGKGSSQSEEKLHYPMHAEDWA

SEQ ID NO: 44206 - protein, 166 aa, Zea mays
  Coding DNA Sequence Number=SeqID_831
AEDEDGEAEDDELDADAEDKENIESKAGSSLPNKRKRNNEDDANGYNPQNHTLPHPLTDDCSPEGTEVGSSGRRGGWWSGIEEFVAGLGLRHGDHGVAWAEPPVTPIGGGPTMATAEGLGAPARLGLREEERVRVVDLAIYGGDLKPSERFGWDPMAVGWERSARD

SEQ ID NO: 44207 - protein, 230 aa, Zea mays
  Coding DNA Sequence Number=SeqID_832
  Subcellular localization annotation: CTP_CleavageSite=51; ConfidenceScore=5.76e-01
MPSAPSSPRIAAFPSPFSSVRMVAAVTPTPLLRPQGSASSQPSRLHLRKIVVSLRVQGVRFQDHLGFEDFGCNLQLSKGFRDTLHDCQPHYLYDCILNPNLVEYLNGSDSIADKAIGRMQEIADKIFCVARETIRPGRGLTSFEATKLRVALEDIACMLEQDSLVLQEKLDNVNNVNNPADRSYEPSALSSPPPADEYLSPDWDFAEHFANFWGVEYDSDQMPSFSDNEV

SEQ ID NO: 44208 - protein, 140 aa, Zea mays
  Coding DNA Sequence Number=SeqID_833
MPSTLFASSIAYNLSAKRRSGAELAPERKTSELEDGLPVPGCDEEETLMTKIVLEQASRRTGPAWRVADVPVVALWGRRMGGRGQGWRCLAQAMAAWTPGGAAAAAPDGRGRTGTGTARTGGTAAATADWTDWAGGIPIP

SEQ ID NO: 44209 - protein, 26 aa, Zea mays
  Coding DNA Sequence Number=SeqID_834
MGNQMGILGLDTGDSKSTLRKLTLRP

SEQ ID NO: 44210 - protein, 80 aa, Zea mays
  Coding DNA Sequence Number=SeqID_835
  Homolog annotation: Hit_ID=Q8S467; Match level="QueryCoverage=46%, HitCoverage=8%, E-value=4e-07, Identity=67%"; Hit description =Putative gag protein
MPMFVESGTLMRAPPTPPPTRDTANISINKGLLFPNVSHKCLMAKDDKKKHRTVSGGAPDCPVCQRSNGYFAPTVVYRRH

SEQ ID NO: 44211 - protein, 258 aa, Zea mays
  Coding DNA Sequence Number=SeqID_836
MAPRALPDDGSSPPPYESKRTLRRSSDGHDITRTRCQNLSGCHDGMFNSSKTASLLAILAAYAPEHGHNRKFQQHMFNSPNDGCFGPTDVSARLGEEGLLTVLRGMIQQVARRREGASAGVAAREDESRSSAAARSRRGGWSGRRSPRIGVGVGDESQHSGAMVGCCFSERADAAVRASAMLACAAAARPRRAHHPSMISEVAHTDLRWALLGEDERITKHQPSIRLRAGSTSLLGKMACWLALYGKKIARSSIHHGS

SEQ ID NO: 44212 - protein, 275 aa, Zea mays
  Coding DNA Sequence Number=SeqID_837
  Homolog annotation: Hit_ID=Q6QP51; Match level="QueryCoverage=51%, HitCoverage=60%, E-value=9e-17, Identity=43%"; Hit description =Putative growth-regulating factor 1
MEFPRMSCTELRWDLEIIPRAASNESRRDLGACRPSIANGGEGRLDRPELSTYDGKGRRGRSGNKFLYRRGRRLRGRSMDEGEMEKGGCEVEICGACLGWDGRTGATWDGRRGSIVLDRRVYNGEERQLVKFPRQGRSDRSHFAPLLTVLIGKQHCTPRSGYCANHQGKAESRSPTSSASGTTGSSASPDLRPRPQPRPREKVSASPDLRPQPQPRPREKVSASPDPRPRPQPRPREESQPRPTSASASGEVSASPDLSLRPTTLQGIHHYPTPS

SEQ ID NO: 44213 - protein, 241 aa, Zea mays
  Coding DNA Sequence Number=SeqID_838
  Homolog annotation: Hit_ID=Q6J9V9; Match level="QueryCoverage=48%, HitCoverage=41%, E-value=8e-53, Identity=86%"; Hit description =Putative uncharacterized protein
MRDRERGVFRKGILLSEGNGPRALLLIKGSKVAPSGVRQPPQSTRAPSPLLIRGSKAGPSEWFDSRPRARRVRDDPGYVRYMAEARATLLRYPRTFPRPAGTICNGIPPEGGIEPSDLSEWVRGLVYQGTQPHPSPASASGRNISPGRIHASPEGLLRQELRLARPQASASGEGLRLAQPQASALGEGLRLARPQASTSASASGGVTTSPDLGLGLRRSLRLARPQPRTDYATRDTSLPYS

SEQ ID NO: 44214 - protein, 197 aa, Zea mays
  Coding DNA Sequence Number=SeqID_839
  Subcellular localization annotation: CTP_CleavageSite=48; ConfidenceScore=5.06e-01
MERFFAPADYSATSVQVSKKWAPFFLSNLMHEDSFSWSKKFMSSDIPSALLEPESMSLPFVLPRKCPEDKLPDLAVSEESADDTSVPADTTSSKPNIAIVESDLRRSKRLRDARAGFRQGSCHKKNCLMCQHKCEGPPSLSARAIRRLGERFCNLSEEDLADKVLKKKKNPPGCVGSSKSGKKDEGDRNQESSDDDK

SEQ ID NO: 44215 - protein, 451 aa, Zea mays
  Coding DNA Sequence Number=SeqID_840
  Homolog annotation: Hit_ID=Q6QP51; Match level="QueryCoverage=47%, HitCoverage=80%, E-value=3e-15, Identity=40%"; Hit description =Putative growth-regulating factor 1
MAERDRERGYSERDPSPRRKQAPSPPTDQRFEGWPLRRVRQPPQSTQAPRLLLIRGSKAGPSEGFDNRLRPLGLRAHYWSEVRRLAPRRGSTAASDHSGSAPTTDQGFVGWPPKGSTAASEHVERGMTLGMSDTWPRLGLRSRGILGHFRDQQERFCNGIPSEGGIEPSDPIKRDRVRQITCRVRLATAKSSLGRHRKLRLARPQGSDSTSTSKDGLRLARPQGSDSTSTSEDGLRLARPQGSDSTSTSEDGLRLARPPGLGLYLDLGRRSPPRPTPGARTLPRPRTTDRLARPPGLGLYLDLGRRSPPRPTPRARTLPRPRTTVSASPDPQGSDFTSTSDDGLRLARPPGPDSASTSEEPPPRPTSGLDRPRHRGAIITLPLASSGYGEQDQRPIWLAPVKQVMMAPRMLHDDGGSQPLTEARRRQQGSDSPDSCTSTGLKRSSDGHDIT

SEQ ID NO: 44216 - protein, 56 aa, Zea mays
  Coding DNA Sequence Number=SeqID_841
MALGSGGGVRALPGGWQINAGAAAVEEGFTVTADDIVGRLSSALLRITSIGGCKRP

SEQ ID NO: 44217 - protein, 257 aa, Zea mays
  Coding DNA Sequence Number=SeqID_842
MPGEANCCCPARVQHSVLCPRFRGEDGSEDLPVRFGAASARRCGVGGQVDAAVGAEVVAAGESFSTVEIVSATCGPTSGSLALIACPRPSSGDVGEGLVAAASALRSSLLLFGRPEWRSLSLLPERANPRPLYDELEPEAAVSAWTEAELALKRSFVGRSLAGPFTGRTSAGVGLMSSGDSWLRLRSGRSSRMLGPGSRRRPRRRWPRRGADRFLRGGDPSTVSSSEAGSDSAKGGVDAEGAAAPPLMSDPAETVYL

SEQ ID NO: 44218 - protein, 78 aa, Zea mays
  Coding DNA Sequence Number=SeqID_843
MDLDVGYMALGSRKLGRYSTMLDLRHHLKLKLSSFGRSFVSFQKMDPNLAAIIIGVNIIGANFSYVAADVASPRGSAS

SEQ ID NO: 44219 - protein, 73 aa, Zea mays
  Coding DNA Sequence Number=SeqID_844
MEERLTGEDDPRRSRAQNRRLRMNRWFFFLSSSAIRAGRPLVIPDHQRPKEITIGIKAIHRGEFWCRAGGLKT

SEQ ID NO: 44220 - protein, 69 aa, Zea mays
  Coding DNA Sequence Number=SeqID_845
  Subcellular localization annotation: CTP_CleavageSite=59; ConfidenceScore=5.60e-01
MPSLPPVRATPSPFSPFMFHFKKWTPTSAPSSLAPRGLGLFPEYLSVRTCSLRDHPRKQCNHEDGMGCP

SEQ ID NO: 44221 - protein, 151 aa, Zea mays
  Coding DNA Sequence Number=SeqID_846
MEHDAHAEAPPHAVPPPEVATVDDWARDDAEPMSVESGVAAAELTAADSGADAPLAPAPSAAVAAEVATQEGAHVVEDDVDETKRHLNVVFIGHVARAGQLRWEPTLVSFSMCRLDPCSSSPRRPDPRWDSAPVCFAKKSAPTPSNASFVC

SEQ ID NO: 44222 - protein, 96 aa, Zea mays
  Coding DNA Sequence Number=SeqID_847
  Subcellular localization annotation: CTP_CleavageSite=60; ConfidenceScore=5.13e-01
MAPVRLGADGPARRAAARPGELALAPVVMRIMVLVLTMVMVVRVATTAQEKMKPSRKTSRSSKIMTSFRRGLAATPSRLPVKAACIYVSFSRFDYC

SEQ ID NO: 44223 - protein, 275 aa, Zea mays
  Coding DNA Sequence Number=SeqID_848
MAKAWSPSVRTREHPRTMPRNQTPVNRDHGDGGRSPRFQARRTRWLGSWCICRMEVCKVMPEGSLPRHLYTDVGVMSEFVAMARRPRSSVSIGKKNSGTEPHMAETLPEFAPRGSLSCGPCGQWHASQERGPRRRLTQPSHMAEAVGSGPQQESRGTWSSAGASAGLRVIGVNWASSWKLAQVAETELYLVHCKLKFSTRVSGLELYVLDCCMACEQPKIRTEVKKISRKDIFPLSTSYFWDVMDKKGCCLESRLLGVSFSTEGPQDEETICDSS

SEQ ID NO: 44224 - protein, 195 aa, Zea mays
  Coding DNA Sequence Number=SeqID_849
MNAIIIEGDQPMRHEDDVTCEKRQKKFTSNRARPVGAAAFRAPAPSLSLCPWAQPVSPASLAPAPAFFSLCVAGPGCQPRRPRVTAAELLAPAFPAPTSRVELAPPRPRPLVPRAPLALTLSPHLRPTAAVDPGPRRVSVAAEESPEPALRPHQWSPRALSDLPDHSDCPRAPPVARASRLRRALRRGDERRRPS

SEQ ID NO: 44225 - protein, 101 aa, Zea mays
  Coding DNA Sequence Number=SeqID_850
  Homolog annotation: Hit_ID=A3ART2; Match level="QueryCoverage=55%, HitCoverage=19%, E-value=5e-23, Identity=89%"; Hit description =Putative uncharacterized protein
  Pfam annotation: Domain name=UPF0172; Domain location=1-101; Score= -54.7; E_value=0.00023; Accession=PF03665.4; Description =Uncharacterised protein family (UPF0172)
MKYHFLSDCVDGHIVLEFFETIRSSCTHLVYSACKELHTRDSSKSWRQAGSDGSSQLILKEPSTNVVLADHVTTKKWEKIVDFDDHLDDISKDWSNPGLLD

SEQ ID NO: 44226 - protein, 131 aa, Zea mays
  Coding DNA Sequence Number=SeqID_851
  Gene Ontology: Mol. function=aspartic-type endopeptidase activity; Biological process=DNA integration
  Homolog annotation: Hit_ID=Q2QWX3; Match level="QueryCoverage=75%, HitCoverage=8%, E-value=1e-08, Identity=30%"; Hit description =Retrotransposon protein, putative, unclassified
MENLVDSAAILGATCRMLDDEEILLMSVDEPPTFSNVERDPLLGRWSIGLKWAFKVKQDDLVAIAKHKWEGIDLEQVFTPVVCMESVRLLMASTTTKDWWAKEFVANLLRGRSSGCARPSTGCSRLHKPRT

SEQ ID NO: 44227 - protein, 89 aa, Zea mays
  Coding DNA Sequence Number=SeqID_852
MAKIDVDEESRAMHPVGRGSRAVFQLPREVLDGDDDFDGTAPQVSATCVPQQVPSDMDPSDLSQNHSMKKHKGNEGWNRAEAVRKGASA

SEQ ID NO: 44228 - protein, 340 aa, Zea mays
  Coding DNA Sequence Number=SeqID_853
MGDTRNPSSLSLGERNSMGVGTFQPSFGFKDFHHAARLRPLAGGHPRRFKDVHHPRWGGGRAEPELYLSRGFVGQPLLQHSRERALTGPASGADFDNAGLVDGGRRQLQRVGLAGLAPGAPSCRKGGCRVVRMGGPPKTSRAARAAFVFWGGPAFAPVRRPRAEESLGLVGLAVRGFSCLVKGTPRPLFDEPKPGVAVSARTEAELARKEDLVGRSLAGSSVSGTDAGVDLPRPRAGLMSSGDSWPRPRGDQPSRLLELDSWRRPWRRWPGRDDEVILQSGDPRTVSPSEARLDLAEGVVDAEAAAAPFNCQDPSLQDRIILYVVVDLALTVGQLVRSGL

SEQ ID NO: 44229 - protein, 93 aa, Zea mays
  Coding DNA Sequence Number=SeqID_854
MVLGGGMEVVVVVGDNTVVMLLGAAECDDITVTVNCPNQNDLAATSATPSRVRSPHHSRQSGAPILKFRSTLNLWRGVILTVRCPLPTARMLD

SEQ ID NO: 44230 - protein, 101 aa, Zea mays
  Coding DNA Sequence Number=SeqID_855
MGKSKKGGSLSHHSGDKRKREPSPPSEDFGDFEYSEEEFSSEFEGPPAYASPPVSSDDSDDSQGIVAEVWTYIRAVERSGLEGLNESEISSDEEDSSDSSE

SEQ ID NO: 44231 - protein, 257 aa, Zea mays
  Coding DNA Sequence Number=SeqID_856
  Gene Ontology: Mol. function=aspartic-type endopeptidase activity; Biological process=DNA integration
  Homolog annotation: Hit_ID=Q850V8; Match level="QueryCoverage=90%, HitCoverage=86%, E-value=6e-17, Identity=30%"; Hit description =Putative uncharacterized protein OSJNBa0037J17.18
MSSSRGLGGIRKKLAGRFKSKRPRADDADYTPTTDSETQSSAGGSVSIDIEDVPHTHPDYPIDNTGWTFPKRRFSMAEYCSRRTVNQYTLPSDTNVQFFHTQLQFDVLGHIDGYQLSQTLVMEDLIPKFETCGLYHFMGQRTDFSEMAVKQFLATAEIDIEEESITWMTGFKRYSATFAEFAAANSLNYGTISAGIDLYTKDSFEDFVQFYEPTRLGIPRRFGETAGLRHHPAVINKIARVTILPKSGNKSKIRDKF

SEQ ID NO: 44232 - protein, 51 aa, Zea mays
  Coding DNA Sequence Number=SeqID_857
MGLGICGSLCQGGDEEDGYDYAYGCPRCNHCSGEDEVVEEDFQEFQEYDEF

SEQ ID NO: 44233 - protein, 28 aa, Zea mays
  Coding DNA Sequence Number=SeqID_858
MAYGGGRGLCGRGRVHGEGMGERVFNSN

SEQ ID NO: 44234 - protein, 116 aa, Zea mays
  Coding DNA Sequence Number=SeqID_859
MISGVQRPSKSIILSLRGILPRQPYKMLHDMHFVVLLVVHVGGVIVSPVGEGNPRLNNMVNLVTMLNIELDHTLDELSKVWAEVAELRVECAARHYQDNGSLAPVGIQHPYRSPPL

SEQ ID NO: 44235 - protein, 304 aa, Zea mays
  Coding DNA Sequence Number=SeqID_860
MVALLSRVVSQRTSPYGEDRPIWVERRRSDGRPGSSLRLAGAAVLVPAAEGSPETRGTGDWRGSGAIRVVGEVGEGTGTPLVGSGSGQRHRRGAVHGGAARRRGYSTPASNQTQQRAKQGAIGAGEVPYLKAGSGDSSAATETRRGPGSTVAAARRTTGERGQREIGRGRGNWGAFWVADVGAELTGAKGAVELQRRRETELGTAGLWRRRSACAQRGGKRVYWAQMGGEGEGEWGSGHKWPRARWGESHARRGRGEGGREQLGGGYAGTTGLTSRARNAEREKKAALPAWPTPSLDYARLLLS

SEQ ID NO: 44236 - protein, 150 aa, Zea mays
  Coding DNA Sequence Number=SeqID_861
MGKSNKRKREPTPPSEDFGDSEYSEEEFSSESEWSPAPVSPPASSDDSDDSQGIAAEVWTYIRAVERSGLEGSDESEYSSDEEDSSDSSEEGDSGDVGVDDDDGGDGDDGDDGGDGGSRGGNGGSRGGNGGSSRGSNGGGSSKGSNKASG

SEQ ID NO: 44237 - protein, 52 aa, Zea mays
  Coding DNA Sequence Number=SeqID_862
MAHRTVRCATGAPTVRHREKTLPWTSLAPPGRGCTGQSGAHRTVPVPLSQKH

SEQ ID NO: 44238 - protein, 84 aa, Zea mays
  Coding DNA Sequence Number=SeqID_863
MADEAIRKNEKEPHDAQEEAKRAEEAAERARLIAQLSPPPEPYNPEADLAMKEMLNIIRIANEAVDEAVDKLLNEGAEKVLKED

SEQ ID NO: 44239 - protein, 153 aa, Zea mays
  Coding DNA Sequence Number=SeqID_864
  Gene Ontology: Mol. function=catalytic activity
  Homolog annotation: Hit_ID=A3B342; Match level="QueryCoverage=37%, HitCoverage=18%, E-value=2e-13, Identity=65%"; Hit description =Putative uncharacterized protein
MPLQIRPVTQRRPRRARYNGPDHTWASELNEAAPREGVVAGLRLVPNGAKGVPARFVSVRPATAAKASSEGWRLCPRPNTCHGYYLADEPGVHFVWQPNQESSVLVMSCTFDDYYIKDCGVILPPEVTQRRIDNSDHFVILATVRVAFVPACL

SEQ ID NO: 44240 - protein, 331 aa, Zea mays
  Coding DNA Sequence Number=SeqID_865
  Gene Ontology: Mol. function=hydrogen ion transporting ATP synthase activity, rotational mechanism; Cellular component=proton -transporting ATP synthase complex, catalytic core F(1); Biological process=ATP synthesis coupled proton transport
  Homolog annotation: Hit_ID=Q7G3Y4; Match level="QueryCoverage=44%, HitCoverage=45%, E-value=4e-62, Identity=85%"; Hit description=ATP synthase gamma chain, mitochondrial, putative, expressed
  Pfam annotation: Domain name=ATP-synt; Domain location=62-329; Score =75.8; E_value=1.4e-19; Accession=PF00231.10; Description=ATP synthase
MGCSACHLRHVVATDVPISMGCVACHLRHAILATDVTISIGSTACQFCHHILDAGVPISRGSAKFRHIIFADGVSVPMGDATRGSHDSTFISSIDGRLVGQHKGKSRKDASLAPVDLDTQGRDLALSDGHQQPRWPAISKCEHAATRAPLLVIVATCSRWLSMCSPFVQMASMGSRWLHTCKSNAQRIAVLADDILKNVEYDALRVIFNKFHSVISFKPTMVTILSPEVAEKEAEAGGKTGDLDSYEIEGGETKAEILQNLAEFQFSCVMYNGALENACSELGARMSAMDSSSRNAGDMLDRLTLTYNRTRQASITTELTEIISGASALEG

SEQ ID NO: 44241 - protein, 327 aa, Zea mays
  Coding DNA Sequence Number=SeqID_866
MNALSREGCRHFEAFDQADEDFGRDIYKVEDPVVKESAGALYDRMWGLYGHEVVRERAEAARAQAERGERVDDFGALNSALPDPEPTPAEAATGIALEPTPETAEDAPGAPTSAAAGEDLPPKVAEGAPDAPAAAVPSAEDPAAVVAEAAAEPTAEAPAALGPSQVQDFGPAHATATTEFLAASTAEGGNEYGGSVSEFFDFTDSGSSVEWTEESSEEDLDYFAALDVAAAEASPHAADAPDVPGPSTGRRRRRAVAKRRVSTEEGARLRFGCALRRLLRGVFAIDFGFFRTCCASPAAPLGDFCADSLRDRHRIFSHLLCLVRLHP

SEQ ID NO: 44242 - protein, 111 aa, Zea mays
  Coding DNA Sequence Number=SeqID_867
  Subcellular localization annotation: CTP_CleavageSite=65; ConfidenceScore=5.09e-01
MRQKQRKQDKSTLNDYQPRHIGPWVSSIFRFSKGFSFLPDFARAQAAAVWNLDSFTAAFLSFPVREGGGAGRPLRKRKVKRNKEEAGFEHQAAIMPDVPPPEQARIFLSFL

SEQ ID NO: 44243 - protein, 110 aa, Zea mays
  Coding DNA Sequence Number=SeqID_868
  Subcellular localization annotation: CTP_CleavageSite=24; ConfidenceScore=5.18e-01
MIPSLAPPQSPPSSWLRRVTFLLVLSLAQPNQQGLQEFFAELLTLARPSGTTTFPDWEGEEGCREAVEVPNSSRLSSCKIREETVVKSISNGKRREPLICDNGTNMFKIP

SEQ ID NO: 44244 - protein, 331 aa, Zea mays
  Coding DNA Sequence Number=SeqID_869
  Gene Ontology: Mol. function=sequence-specific DNA binding; Cellular component=nucleus; Biological process=regulation of transcription, DNA-dependent
  Homolog annotation: Hit_ID=Q5QMM3; Match level="QueryCoverage=72%, HitCoverage=90%, E-value=2e-99, Identity=74%"; Hit description =WUSCHEL-related homeobox 8
  Pfam annotation: Domain name=Homeobox; Domain location=94-155; Score =73.1; E_value=9.2e-19; Accession=PF00046.20; Description=Homeobox domain
MEWVDRTKASAAAAAAAADERAGGAEGLAGYVKVMTDEQMEVLRKQISIYATICEQLVEMHRALTEHQDTIAGIRFSNLYCDPQIIPGGHKITARQRWQPTPMQLQILENIFDQGNGTPSKQRIKEITAELSHHGQISETNVYNWFQNRRARSKRKQAASLPNNAESEAEVDEESLTDKKPKSDRSLQDNKAMGAHNADRISGMHHLDTDHDQIGGMMYGCNDNGLRSSGSSGQMSFYGNIMPNPRIDHFPGKVESSRSFSHLQHGEGFDIRGREAASACFGDCRLTSPIPWRHRPPGPGSSSSPVGSRHPNLGSDRAPISSTKLASPSGA

SEQ ID NO: 44245 - protein, 117 aa, Zea mays
  Coding DNA Sequence Number=SeqID_870
MARQLRQAVRAVHVWTAACGHCPMTDFPLDCLAAKRSLPASTFGSGAWYRLLGRGSKALILARNEKKVDVTLLYELYTLGSLLPKRYVAAYGNSEPTYTTLYGNPDATYTTQAYPDV

SEQ ID NO: 44246 - protein, 74 aa, Zea mays
  Coding DNA Sequence Number=SeqID_871
  Gene Ontology: Mol. function=tryptophan synthase activity; Cellular component=chloroplast; Biological process=tryptophan metabolic process
  Homolog annotation: Hit_ID=Q9FQ75; Match level="QueryCoverage=67%, HitCoverage=18%, E-value=2e-18, Identity=92%"; Hit description =Putative tryptophan synthase alpha
MDIMVDQFEHCASTKIFQSNLGSFQSAFISFITAGDPDLATTSKALKILNSCDSDVIEVGVPYSDPLADGPVIQ

SEQ ID NO: 44247 - protein, 226 aa, Zea mays
  Coding DNA Sequence Number=SeqID_872
  Subcellular localization annotation: CTP_CleavageSite=67; ConfidenceScore=5.15e-01
MKPQPPKQPLGRDAVDERTGQSAPVVGVLGPTAHPGLPLKCSFFSTIFTSLTTARCLLSSLSFYSTTGKSKKGGSSSHHSGDKQKRELTPPSEDFGDSEYSEEKFSSESEGSPVHASPPASSDDSDDSQGLAAEVWTYIWAVERAGLEGSDESEYSSDEENSSDSSEEGGGGDGGDGDDDGGDGDSGEGDGKGGDGGGKGGSGDGSKGSSRGSNKGSNKGSSKASG

SEQ ID NO: 44248 - protein, 186 aa, Zea mays
  Coding DNA Sequence Number=SeqID_873
MDAASPLQPHSPRAPLPQPPPAPSRRYVPMFVEIEYDLNCQYTSVLMEEQLEALGRAIVAGKSWEQFVLCYIWVHEVVYASGGKAHERCGLYISYIVLLVECNICSKSVVMLFVCKYTMFDNIIDSSQVRAQRGGSSRSAAHSSHLSTQDRAKVEQLREELNGVSTITRRCTLMVISDSDLPFYVL

SEQ ID NO: 44249 - protein, 533 aa, Zea mays
  Coding DNA Sequence Number=SeqID_874
MGLDEDTTRKGSSHFSSSSSTEAVVLIDSIFASSGVIASLPNKSFKESQDPVEGDPDPTQRGPEPVPGVRSVPAEVLDPAQRSGPDMQGSDTFPWGPGPLLIPWRILSSLPRGSPRAVLVVGSGVVHHATKDSCMDTSPSYCSNGNRRPRRMTRGPGPRARDWAVGFGGGEEAQYRRRGRTPLATDWSAPFDGGEETHYRRRWRAPHAAVRLLRTRRPMPKEYDSWARAPVSETGSLWRTSGERPFAFEFSALLCHRSHHGFARSSRAPLARGGTQLGAQPARMGSVGVRQKDLCRRLCPQRPHHRGVHALYLQPPQRSGAAESVFLRTVAREAWPPTSTHYALLHPSGGHHRLPPQDVRGGNAPSRFFLQHSGGRMFTSLVKVGSGLSCGSIPRASTSLGPAAPAAPPAPSATAGHAAPVPPEGSYKTSYAVEVATACPLLLGLDEVAAAASAEVVAAVGKPLGASFQRDPAGQQAGFMRAGLTGLAYTVRKRYSLSFSEVVTLGSAYFCRLEGSFPAGGEFAEPFSVQYLP

SEQ ID NO: 44250 - protein, 99 aa, Zea mays
  Coding DNA Sequence Number=SeqID_875
MAKVGGMFSKIKLDGESVKGLDRFNIGKDVPLPGSTLVRKWQISAASVPVVPKKKNKTEVREDSVLHIGSFAYNLSGGVVPPLVCIILLLSTRLFSSGL

SEQ ID NO: 44251 - protein, 106 aa, Zea mays
  Coding DNA Sequence Number=SeqID_876
MASNDVRILWELQCLADYDWRTPPIDPQVVYASGGKAHGRYTMFANVIDSSQVRVKRGGSSSRDCDLGRPRCSAGIFVKGAEAARQEFGIWAIDLGSNSSQHVPVR

SEQ ID NO: 44252 - protein, 370 aa, Zea mays
  Coding DNA Sequence Number=SeqID_877
  Homolog annotation: Hit_ID=Q8SBB2; Match level="QueryCoverage=60%, HitCoverage=18%, E-value=3e-08, Identity=24%"; Hit description =Putative copia-type pol polyprotein
  Pfam annotation: Domain name=zf-CCHC; Domain location=342-359; Score =13.0; E_value=0.016; Accession=PF00098.14; Description=Zinc knuckle
  Pfam annotation: Domain name=zf-CCHC; Domain location=97-114; Score =25.8; E_value=0.00016; Accession=PF00098.14; Description=Zinc knuckle
  Pfam module annotation: Pfam domain module=zf-CCHC::zf-CCHC; Domain location=342-359::97-114
MCRGEEPTSSKPYAFACDERKGKTKAPTPSSSSEEEEEEESDDNEDNQPCTSSSKDEEAIRRVGKVMGMIRKINLMGVPLQVEDLLFNIDRKKQRKRGCFACGEKGHFRDNCPNMAEPKKERSKGKALTSVRTWDDSSSEDELPRTRSHQSSSRSSRSSHKCLMARGLLEKFETFANLNCELSTKIELLESSAPTTATNDGLIKKNEKLKAKLASSQDTIENLLEKMEILSIHNNELSTKVENIGSTPGASLVEIPEIIKKNASTSCFDLIDDSNSYNQVLVENIVVETCSGEVAKEKEKLRKEVARLGKALYDKKCKAKQIRPPQDNTTAGVNKPMEGETVICRLCHMEGHKSFQCKAMTQDKQRQKLK

SEQ ID NO: 44253 - protein, 286 aa, Zea mays
  Coding DNA Sequence Number=SeqID_878
MSPIPPPAGGLSAAIVVVARRWKEYHVVAAVEGHELETPETEHRPGPERLLETAHLELDGKLFVSTQQAPTWRANCRRFETGGSPSRRPSPSHRVGRGGGRSAEARAESEPWVGRGGVSSSSGAEPESEPWVGRSGVRRLLGLSPSPSPGVGRSGVRRLPGLSPSPSPGLGGAEFAVFRVLARVRALGSGGAEFAVFRVLARVRALGSGGAEFAVFRVLARVRALGSGGAEFAMAPLARPTACQTHSVEWHCSRSGAGGAVLLSDWSVERWSDGGHFGSAGGRVSE

SEQ ID NO: 44254 - protein, 551 aa, Zea mays
  Coding DNA Sequence Number=SeqID_879
  Gene Ontology: Mol. function=cysteine-type peptidase activity; Biological process=proteolysis
  Homolog annotation: Hit_ID=Q109R5; Match level="QueryCoverage=56%, HitCoverage=30%, E-value=1e-33, Identity=30%"; Hit description=Ulp1 protease family, C-terminal catalytic domain containing protein
  Pfam annotation: Domain name=Peptidase_C48; Domain location=80-288; Score=22.4; E_value=3e-06; Accession=PF02902.10; Description=Ulp1 protease family, C-terminal catalytic domain
MESLFVGLSHNKPKKSVATAIVREVLSHDWLLLDYICTQGDLALIDFIKEISCEPRVEVVLIDDAFVERKWMECLFQSSAYLGDEVIDYYINLIKAQKHLKCRSGGRVHIENAFQFNFLKRDGDLEIKTEELYPIKDMAHICSAERRVLLYLDHDMVFIPINIRETHWYLAVIHARNMEIQVLDSLDTSQDRKDLTDSIKGLQRQIDMISQRKELKDHRWPDLQVASWPLREIDMGYAKQTDSSSCGLLLLNYIEYWTGDELSDSFTQEKMAAILLSSDLNKRRGCLLYKNEKEVDSGSPSDVEILENPTDSNKRKLLHVLDHSEVVYEDEEGPITQADLQRWFVDDWDKRAPVKVSTDGCTNDFLMVGLSTKDMPVTKADSIDVLCDYIMAIEDDTTLEYVLMPWKFNGCHALFVIDHVKKHVTFIDFTPTQYWCKHMPYKRFAEAIIMASKKYKIAYNKKRSGWAEDIFKWEHTIQTGVPIDLRGFNTSYLVLQAMATWGNDRRLKFVGDAKTLRRNFVIDLLSYEDNSCRYAIPANIQQRLVDIAKKD

SEQ ID NO: 44255 - protein, 477 aa, Zea mays
  Coding DNA Sequence Number=SeqID_880
  Subcellular localization annotation: CTP_CleavageSite=2; ConfidenceScore=5.58e-01
MSSSSLMRHVLPSSKPPDGGYPPSFCLLVGGTQLRGSWYLSAIVRLQGFSSRSLVVLLRRRSPKTVTSSSWMGRGKPGCDPAPSIGGVRHPRWGGERGEPGLYLLRGSADHLLFQLLVVAIALPCYDGDVLQSCRGRRTVAAQLGCNIPSFPSHLRRGRQRGSAGALGCGLLFGFDGWFASLERDREQEPPGGRVRPGPWLPPQRSLASLPMIVAPQARGRSYPRGRNRSSVCDGTSNASSSSLVKETPRPLFDEPRPGVAISVRTEVELARKWEPGWPEPSRVARHRGSMSESMTRGLGSGWRPWKMLGRGPRGNRPSRLLGPDSRRSPWTASPSEAGSDLAEGIVDAEGAAAPFSVKTRACRIRLSCSVCLLRPPRPENTPSLRCKAASSFLLFRASGLSVGNRDVCVGESCFSRKVTSEKVMSEDPLFEAVKKHERNSAKKRSFFEENFDAEGVSPLLAPEGGSGFAEARPTLP

SEQ ID NO: 44256 - protein, 88 aa, Zea mays
  Coding DNA Sequence Number=SeqID_881
MTGKKTTASSDGGTPKKAKVVVEDEEEAGLEDEEEATVTLSVEKDALECDICCLPFQSEVFMASQITMHCKNGHSGCAKCCIRTDESH

SEQ ID NO: 44257 - protein, 156 aa, Zea mays
  Coding DNA Sequence Number=SeqID_882
  Gene Ontology: Mol. function=protein kinase activity; Cellular component=membrane; Biological process=protein amino acid phosphorylation
  Homolog annotation: Hit_ID=A7PUH0; Match level="QueryCoverage=77%, HitCoverage=31%, E-value=1e-33, Identity=56%"; Hit description =Chromosome chr7 scaffold_31, whole genome shotgun sequence
MCQCIKECFPCPRSGQTFEYTPPEALLNSSWFQGSRSARLKYDIWSVGVVMLELMMGSPHVFQISDRTRILLDRHLGGWSEQTKELAYKGFMAVTADVVILFYFKGEFGLASWKCSEESFAHQVKIRDPLKIGLVFLFLSTSSLPPECLDHHHFHI

SEQ ID NO: 44258 - protein, 118 aa, Zea mays
  Coding DNA Sequence Number=SeqID_883
MVSPVSCKRVIRVDVRAPFVGGRLGAQRHAQKYLRVICRTRSPGDGAPQPKRRDGGTSGGAVTRMQQLARWLRDAWAWASKPARQKSEKRVHLARLRAACMAVRPSRPLVWAKVGNRL

SEQ ID NO: 44259 - protein, 156 aa, Zea mays
  Coding DNA Sequence Number=SeqID_884
  Gene Ontology: Mol. function=kinase activity; Cellular component =ornithine carbamoyltransferase complex; Biological process=amino acid metabolic process
  Homolog annotation: Hit_ID=Q6QP54; Match level="QueryCoverage=59%, HitCoverage=32%, E-value=3e-11, Identity=43%"; Hit description =Putative kinase
MAPPVDVVGPCPSLGEVEAPPRSRSSLSSKVEVESEPPGWTRRRPSAGARAESEPWGRARRSSSSFGAEPESEPWGRAKQSSSSSGAEPESEPWGRAKRSFPWRIGPDLAAVSLTLSSGTAVGAAQAALSPCQTGQWSGEVTTVTSALSTGERASG

SEQ ID NO: 44260 - protein, 148 aa, Zea mays
  Coding DNA Sequence Number=SeqID_885
  Gene Ontology: Mol. function=hydrolase activity; Cellular component =cytoplasm; Biological process=nucleotide metabolic process
  Homolog annotation: Hit_ID=Q7XDP2; Match level="QueryCoverage=35%, HitCoverage=25%, E-value=8e-23, Identity=92%"; Hit description =Inosine triphosphate pyrophosphatase, putative, expressed
  Pfam annotation: Domain name=Ham1p_like; Domain location=27-142; Score=-79.7; E_value=0.001; Accession=PF01725.7; Description=Ham1 family
MERSVAPNLGVCSPLSRQIQGSSPSPLSPEPDQIGKLLRQCINTPLSVLSSCAKSKSLESLIRPDNVMTDSFRILGEEDVGARTCPKLRPGKIVPARGPNNFGWDPVFQPDGFEQTYAEMPKSVKNEISHRGKALALVKEHFAKRWSG

SEQ ID NO: 44261 - protein, 206 aa, Zea mays
  Coding DNA Sequence Number=SeqID_886
  Gene Ontology: Mol. function=kinase activity; Cellular component =ornithine carbamoyltransferase complex; Biological process=amino acid metabolic process
  Homolog annotation: Hit_ID=Q6QP54; Match level="QueryCoverage=57%, HitCoverage=43%, E-value=1e-24, Identity=54%"; Hit description =Putative kinase
MGRRETEREGGGSRRETGVRGGIPRPSCLSRAQVGRKERIQPESAWGRVMMVPPVDVVGPCPSLGEVEAPPRSRSSLSPKVEVESEPPGRTRRRPSAGARAESEPWGRARRSSLSFGAEPESEPWGRAKQSSSSSGAEPESEPWGRAKRSFPWRLGPDLAAVSLTLSSGTTVGAAQAALSPCQTGQWSGEVTTVTLALSTGERASG

SEQ ID NO: 44262 - protein, 109 aa, Zea mays
  Coding DNA Sequence Number=SeqID_887
  Homolog annotation: Hit_ID=Q6J9V9; Match level="QueryCoverage=55%, HitCoverage=20%, E-value=3e-07, Identity=56%"; Hit description =Putative uncharacterized protein
  Subcellular localization annotation: CTP_CleavageSite=32; ConfidenceScore=5.05e-01
MTASKKGPGKGDTPKRILLREGNRPRASLLIRGSKAGPQRGLTAASERLGSAPTTGQRGSGAALANPAPAKPLTASTYQPENLGPDRASGLRPARMREQPDQPKHCARH

SEQ ID NO: 44263 - protein, 142 aa, Zea mays
  Coding DNA Sequence Number=SeqID_888
MAAENIHTLQDNPILQARILTVEGSSSTLGVNYTFGEVRPSLGRRSSRRISTLKDDISTPPGPSLPGSSPGIRLEQTARPATPRPRPANCGLGNSTPESVPPADDPARLRPTKSSFRANSASIPADTATPGSGSSKSGRGVP

SEQ ID NO: 44264 - protein, 211 aa, Zea mays
  Coding DNA Sequence Number=SeqID_889
MSSRSLMHRVFPPSEPPDGEHPQSFRLVVGGTQLRGSWYLSAIVRLQGFSSCSPAASPRRWSPKTVTTSPWMGRSKPGRDLGPALSFKDVHHPRWGGGRAEPELYLLRGFMGQPLLQHSRERALTGPARGADFDNAGLVDGGRRQLQRVGLANLAPSAPPAARAVVAPRAREDRPRRRALLGRRSCSGAVLPLHRYGAFARRSVLHSSGRI

SEQ ID NO: 44265 - protein, 182 aa, Zea mays
  Coding DNA Sequence Number=SeqID_890
MAFLSFNPGSFPTVTVTTERKRVARLTGDEGGSVKGWNKADRKQAVGLVGSVYSGLLTAVGLNQMAHGALRDAKDVIGTRNRRMAYRGARTTCGGDRLKSGDVDLASPARYCSILGSGSFTKVWRSYPKGRIGWRMAVLAGLRWSWLVRPLARGSLGKCWRTRARAGSGTRRGVRSRPRWDL

SEQ ID NO: 44266 - protein, 200 aa, Zea mays
  Coding DNA Sequence Number=SeqID_891
MTSHVSTEGGNAQSHTDGLAREGFPRILWEVLQGAGYATPPPGWRSLDSESFGFRAEDTIESTALHVLTTFCGFQPLELSTHPIGLFPAEKEDDLMWKDWVEHAKDVWALYPGHTAHLTVRCMSALYRLQALRGEAMSQLMGLVESTKITLDNREDLVVDLSTELVEKDLQVEQMVTKIQELEDQVEARENTIEVLEDQL

SEQ ID NO: 44267 - protein, 170 aa, Zea mays
  Coding DNA Sequence Number=SeqID_892
MVSHSGYGGYKCGHCTTAVGVSETLAEDTIESTALHVLTTFCGFQPLELSTHPIGLFPAEKEDDLMWKDWVEHAKDVWALYPGHTAHLTVRCMSALYRLQALRGEAMSQLMGLVESTKITLDNREDLVVDLSTELVEKDLQVEQMVTKIQELEDQVEARENTIEVLEDQL

SEQ ID NO: 44268 - protein, 290 aa, Zea mays
  Coding DNA Sequence Number=SeqID_893
MHDFLLELALLDCSGWLMGQEDELPGCLDAGIDFLPAGYSDGTAAAKETASVIAAGGSDANAGAGREGVVHQLVLEGINQSSQKAVLPLGIRVDILQGITRQLQKLVPVLSNGQWTLLQGEKLFLLHYHQSLRHMVATKVIPELLSSDGFRVGMGGKALEASGLALEDEVVVVAAMLAALLLKSDQLPGLLESASRTSAQWSSVVAVAIAAATELHPPRVPTIQAKHASHLYACSQTSVEITHIRSDSVVFQHKKRCIEDLHRTEQLTIFTDSFSDKEESGDKWVTQLNN

SEQ ID NO: 44269 - protein, 120 aa, Zea mays
  Coding DNA Sequence Number=SeqID_894
MAHRSFSGPPEATSPPVSPLCPWIHGLFPAIEFVVAPSSPLPNSGDPEATLARAYLSSSDLTAMEMSGASRSHLFSLGLISPLSDSDRMARTTGYRFAHARLTRPSPSVSAIRSRSSFPV

SEQ ID NO: 44270 - protein, 144 aa, Zea mays
  Coding DNA Sequence Number=SeqID_895
MAHRSFSDPPKATSPPLSPLYSWIHGLFPAIDGVADGLDLKYYPHRLTGSAGGVIVLPVGEGNPRLNNMVNLVVMLNTELDHALDKLGKVWAEVAELRAECATRHYLDGGPPAPVRIQHPYRSPPCGRFDYGTPDCRTHIDLDP

SEQ ID NO: 44271 - protein, 76 aa, Zea mays
  Coding DNA Sequence Number=SeqID_896
MGKPSPSLLVPSPAQYNGSSSLISCEKQTIRIEFLNLARPRIPMDLCPQTFIIPLSKWIQPIPDLARVLEKSLDFY

SEQ ID NO: 44272 - protein, 81 aa, Zea mays
  Coding DNA Sequence Number=SeqID_897
MASLGHPDRFQSEGELNLSGKARDHLGAYYFHTRPDSAVAYISTFGGVRWENWHGDWVIASAEANDRLVLPSNGLALDRKH

SEQ ID NO: 44273 - protein, 33 aa, Zea mays
  Coding DNA Sequence Number=SeqID_898
MAKAKWSLSMFMTQLRTTRCTSEHKRVYTGSCR

SEQ ID NO: 44274 - protein, 587 aa, Zea mays
  Coding DNA Sequence Number=SeqID_899
MRGPGGKDVFARAPGVFGADAEVMDKDRQGAAQKRQAVVRLHEARPKRQRGAAKATAPGGGQPPLVAKSVVPASNRAPEAAKAAAAGGSKSVKAAPVPSGVPEAAKAARELPPPGKRIADFATDISVEDYLVGSDEGQLVVVPPAGGEGAVRLVPVARFRRSLQSGTRRVLCPARLKELKEALSQATDFADRTASGALTVVVSAEVERLRTQHADVVREKSAADSKCCKLADKVAALEGEKADLRRQLAEERKEDNEALAKAQAAQAEANLARVEGSLARQRAEQLEERLRALQSRVERAEASTRTEAERTRKQLMDSYHELGARTAEFEVPEREPGLRCLEWVQEELQALPTIVEGFMSYASLANEDFERDIYKVEDPIVKESARALYDRMWGPHGREVVRERAETARGQAAHGERVDDFGALNSTLPDPESNPAAAVSEVALELPPETVEGAPDTPAAAAAGRGPPLETAEGIPDAPAAAAAGGGPPPTAAPRAEDPVTVAAETTAEAPATAGSSQESSDEDLDYFAALDVAAAEASPQAAGAEVVPGPSTGREGELRSLFAGEELRIMLFNYREMGIIPKVEPM

SEQ ID NO: 44275 - protein, 476 aa, Zea mays
  Coding DNA Sequence Number=SeqID_900
  Gene Ontology: Mol. function=calcium ion binding; Cellular component =early endosome membrane; Biological process=endosome transport
  Homolog annotation: Hit_ID=A2YGE4; Match level="QueryCoverage=97%, HitCoverage=97%, E-value=0.0, Identity=64%"; Hit description =Putative uncharacterized protein
  Pfam annotation: Domain name=Dynamin_N; Domain location=186-288; Score=18.1; E_value=1.8e-07; Accession=PF00350.14; Description =Dynamin family
  Pfam annotation: Domain name=MMR_HSR1; Domain location=187-289; Score= 5.0; E_value=0.00037; Accession=PF01926.14; Description=GTPase of unknown function
  Pfam annotation: Domain name=efhand; Domain location=18-46; Score =13.5; E_value=0.64; Accession=PF00036.23; Description=EF hand
  Pfam annotation: Domain name=efhand; Domain location=52-80; Score =21.2; E_value=0.004; Accession=PF00036.23; Description=EF hand
  Pfam module annotation: Pfam domain module=Dynamin_N::MMR _HSR1::efhand::efhand; Domain location=186-288::187-289::18-46::52-80
MGPDSSPKKLSLKEQRAAYLQWFALADEDGDGRLTGNDALRFFAMSNLSKPELKQVWAIADSKRQGYLGFYEFMTAMQLVSLAQAGNEINQDTLPNADLEKLQLPTMDGLAKKLKKNSGSKVESAIVACHPSEAPTMTASWFNSKSGKKIPLKSVTSIVDGLKKSYIEKLRPLEKTYQFHDFVSPLLFNLFYNKGAHIGPEPTTDRFVVITLLEHVTFVDTPGVLSGEKQRTQRSYDFTGVTSWFAAKCDLILLLFDPHKLDISDEFKRVIGSLRGHDDKIRIVLNKADQVDAQQASILMRVYGALLWSLGKVLNTPEVMRVYIGSFNDKPIRETAAGPLGMELFQKEQDDLLSDLNDIPKKACDRRINEFVKRARAAKVHAHIISHLKKEMPALMGKAKAQQKLLDGLDQQFAKVQKELHLPPGDFPSVEEYRELLSAYNFDRFEKLRPKMVQGVDDMLAYDIPDLLKKFRNPYD

SEQ ID NO: 44276 - protein, 33 aa, Zea mays
  Coding DNA Sequence Number=SeqID_901
PVNKYNGHRIARTDKASMPTVTAKFGKSESFTV

SEQ ID NO: 44277 - protein, 120 aa, Zea mays
  Coding DNA Sequence Number=SeqID_902
MPAGIRWLRARLLGRWRLADWEARRRGGRGRVTTWTGRDVWGRLRLESGARIGSDGPVLPASIASKLHFFSEALSFFGYNDLQTKVMKDTPSSFYGIINKNINKKTKEYKGIEIMSVIYP

SEQ ID NO: 44278 - protein, 18 aa, Zea mays
  Coding DNA Sequence Number=SeqID_903
TIVIVMNENMSYVNMSYV

SEQ ID NO: 44279 - protein, 75 aa, Zea mays
  Coding DNA Sequence Number=SeqID_904
MRSLEVGSSTSRVDVGLAHGDPCFSSCDVIASDLYIKRKGYCGYSFGLDPLGEVFNSDEGEFEVALGCGQWSNNI

SEQ ID NO: 44280 - protein, 52 aa, Zea mays
  Coding DNA Sequence Number=SeqID_905
MARVACTLHGKRLDGGVSVLSVKKQQTFVAFVPRWYRKKRIKTKAAGGKALR

SEQ ID NO: 44281 - protein, 296 aa, Zea mays
  Coding DNA Sequence Number=SeqID_906
MGGLGVSDGFARELMRTCATLGGRMSSPELRESSARMLRVAGGCWPRNVPIPRAAGEDFFTSRMVREWRVFPYGRNIAAVVSAVIDKDRQGAAQKRQAVVRLVEARPKRQRGAAKAAAPGGGKPPLAAKSGTPASSKAPEATTAQCREAAKAARALPSAGKRVVDFATDISVDDYLGGSDEGQLAIVAPAAATTTAAVVPKAKGGALSAGGEVLALAAVRDEAGAASRRLKEVTEALSQVANFANRTASGALTAVVSAEVERLQTQHADAVREKIGHRQQVPQAGGQGGRAGGIEG

SEQ ID NO: 44282 - protein, 194 aa, Zea mays
  Coding DNA Sequence Number=SeqID_907
MNALSREGCRHFEVFDQADEDFERDIYKVEDPIVKESAGAIYDRMWGLHGREVVRERAETTRAQVQDFGPAHATATTKFLAASTADGGNECGGSASEFSDFADSGSSVEWTEESSEEDLDYFAALDVAAAEASPHAADTEDVSGPSTGRRRRRAVAKRRVSGAEGGRLRASSARIVFAVDFGFFALVVLVRLHP

SEQ ID NO: 44283 - protein, 210 aa, Zea mays
  Coding DNA Sequence Number=SeqID_908
MGQPSISPRRDPAYGPNYTWTHLYNMEDCNALRLCGSTFRAFMVFGLEYAGVGSLSEGDVFAFVPTFALRGTSSTKSASVEDYRLARIKQTTCHRRRYVTMPSSSSSSSAASASLAMSSFEKTLSDSAVVDLQPGHTVEFGTSRIFLGHVLEMQRLGYFGSGVGRALGAKDVPKPEGELVVFESFFATGLRLPTHQFVVEVLRRFEVQIH

SEQ ID NO: 44284 - protein, 284 aa, Zea mays
  Coding DNA Sequence Number=SeqID_909
MELRVRDVAAFVREVEAEAIKIVAVRKRKLGMADDETGLRATGRFVEELMETWGELTTIAIAAGVATSVVQQLKFVTAFTEQVASGALTSQFVSDRRWLKVRIERLRMQHIEAVRDKSAVENKSRNLLERLSTVEKEREDIGRRLAEEKEDVKKARVESQAARKRAVDLELKNICGHREKTESSTHAGVERAHTLFVDAYSELGAQTAPFDESGEEVGLCFLGGCRKNWSRSHLSQWALCSMRPSLPVRGLRMPCPERDAGISKSSTGRMRTSIVECSRLKTMC

SEQ ID NO: 44285 - protein, 235 aa, Zea mays
  Coding DNA Sequence Number=SeqID_910
MDSSSHPAADNQGHLNSARNGSHLRRDSNGADLQPCPQDEVTAMVTRDSGTADAAGFDSSRICALPGRRILRRAGRAQERRADLRKSAIGAGTAGGPGAADRRRIRRTAAGRRGAAEGGSGGRRDGRGRIRRTAECAGRRRGESGSGGMRRSTARTARMCANLDGGCAGTMNPRRSGGQQAATAARKRDPRPRRRAGVEGLRQQPEKRKELAARTAQRRRDGDEKLDQGGLRRKP

SEQ ID NO: 44286 - protein, 104 aa, Zea mays
  Coding DNA Sequence Number=SeqID_911
MAPEAGLGGCQPHPDGWHSSRSSAGGAVFLSGQPVERLSDCGHFGPVDRGACVRIRCQTILALNAPAIRSVGVAIRPRLLLREACPSWASGELKNIPFIEWSMK

SEQ ID NO: 44287 - protein, 45 aa, Zea mays
  Coding DNA Sequence Number=SeqID_912
MGSRHSACSAEAGCRGCLWCNLCSSKEEGVEADLQEFQDFDKFED

SEQ ID NO: 44288 - protein, 53 aa, Zea mays
  Coding DNA Sequence Number=SeqID_913
MVGTSAVTARRQSGSVEHCTMQDVVDGVTWPTTLPPGWTIEWDVAPAGEEPEE

SEQ ID NO: 44289 - protein, 51 aa, Zea mays
  Coding DNA Sequence Number=SeqID_914
MARRGHWAAPPRSVDQGSLEDMVAGVTWPSILPPGWTIEWDPTSAEEEHEE

SEQ ID NO: 44290 - protein, 119 aa, Zea mays
  Coding DNA Sequence Number=SeqID_915
MGQSPKYEVYFCKTYPTKLQDEKSITRNFAVRSYHAPNENIFLQKDPSGSISLHDEVPDGAPNRGASSGELDQPYDATAGAPKLQGPNQMPTVPFPPINFARGGLSSSVHGDSAGDQVN

SEQ ID NO: 44291 - protein, 207 aa, Zea mays
  Coding DNA Sequence Number=SeqID_916
MGQRASLGAREDVSARNLKMAYRNARSTRGGRRPKSGEDDLGIPVKFCRVRGLGKLHGLMVKLTRWLARLGRDWRELGHSGRGSESLAGDGTACSGQIPVIFGSGRTCERAGSARGVIVSPVGEGNPRLNSMVNLAVVLNIELDHALDELGKVRAKVAELRAECTARHYLDGSSPAPVGIQHPYRSPPHGRFDYGTPDCRTRIDLDP

SEQ ID NO: 44292 - protein, 153 aa, Zea mays
  Coding DNA Sequence Number=SeqID_917
MARIRCTARKSVIPFLPSRLAEHPLRCTVSGQSSHLERLHRRLHEEQEHRRQEREQEQQDSSPSPQLEVESERPPSPAPQPEMPPAPPQGIPAVGGDPDEDGDDDAGCSSSHGTKRSEEPEPEGWIARPITRDVARGCHFHDALDTLLCQAFD

SEQ ID NO: 44293 - protein, 93 aa, Zea mays
  Coding DNA Sequence Number=SeqID_918
MQDAARRALSQYCSLFSGVADGLDLKYYPRHSTDGAGGVIVSQVGEGNPKLNNMVNLAVVLNTELDHVLDELGKMSENKRKGARHAQLKQQAP

SEQ ID NO: 44294 - protein, 28 aa, Zea mays
  Coding DNA Sequence Number=SeqID_919
MGNLVPSLLMLLLCRVGKPLPVWVILEV

SEQ ID NO: 44295 - protein, 117 aa, Zea mays
  Coding DNA Sequence Number=SeqID_920
MAVAPLWHPAVGQANGNNGSRSTSGLEGLTGDWNHRPSLTMNPPCWGKNLPSATLGDGETEAETCGDIMKLENGIRLNPSHETKPQRWGRPLMKEHIENSATPIAVTVVKLRNASGS

SEQ ID NO: 44296 - protein, 104 aa, Zea mays
  Coding DNA Sequence Number=SeqID_921
MQLVDDLKKDGLNQWMLAKRVYGGYKCGHCTAAAGVSGALYAKARPLVLPRRRDTHGRVRQTALNAPAQVPKPLEPRRGQPPRLWRALATGPSGATAPVSAPSR

SEQ ID NO: 44297 - protein, 103 aa, Zea mays
  Coding DNA Sequence Number=SeqID_922
MKKNSKSIKIKKATEKGRSWQGQSSDENGHKDDSFVGVLCQNGNPAPDSLGTQLLWRKNTSFDEVQKGEIVTNLIPTHHELASSFLGHYITLRYTTTYTMLYY

SEQ ID NO: 44298 - protein, 151 aa, Zea mays
  Coding DNA Sequence Number=SeqID_923
MSTDCSVPKVHNKPIKRPKKDSKIESKGQPKCALVWRTGLSGVPPDSVRCTRDSNSELLSFGNSGGRSAIIHRTVRWRTGLFGVPAEQRLLRANGRLQKALNALQCAPESELSQMAHRIVNSICLVAQKTEAPMVGIQWPGDVAGAPDNVR

SEQ ID NO: 44299 - protein, 215 aa, Zea mays
  Coding DNA Sequence Number=SeqID_924
  Gene Ontology: Mol. function=transferase activity, transferring glycosyl groups; Biological process=sucrose metabolic process
  Homolog annotation: Hit_ID=O24301; Match level="QueryCoverage=94%, HitCoverage=34%, E-value=1e-52, Identity=46%"; Hit description =Sucrose synthase 2
MRLTDAGDGQDAAGEIAAELQGTPDFIIGNYSDGNLVASLLSYKMGITHCNIAHALEKTKYPDSDIFWKNFDEKYHFSCQFTTDIIAMNNADFIITSTYQEIAGSGHLDDRSKPILFSMARLDRVKDITGLVEAFAKCAKLRELANLVVVAGYNDVKKSKDREEIAEIEKMHELIKTHKLFRQFRWISAQTNRARNGELYRYIVDTHGAFVQIYS

SEQ ID NO: 44300 - protein, 306 aa, Zea mays
  Coding DNA Sequence Number=SeqID_925
MNKTPAFKMPLQTELRFRPRGMDAATVRLSFASPLKGRELDIKAKEPEAGPNSSPSPAWLEDASSAELGDGFRHQKLEEEVASRPVREVEPWLASLSALARMVTTGEVVQPGHVMKILEAERWLKGTNSHEVAFLQRQGGRIAGVPHPGARKPSWAESSPTRSKVLPLRRGGWVPRVMQTGPGRSKRRFAFAIMIASKKAGPSEGFNSRLRALGFCAHYWSEVRRPAPRKGSTAASGHSGSAPTTDQGGNDLVTESHQREASSPRTPSKGDRVRQITSSSPETPCSAPAEGNMALPPSSLQKGDVG

SEQ ID NO: 44301 - protein, 108 aa, Zea mays
  Coding DNA Sequence Number=SeqID_926
MAEAETPRSFVLPRLSRPKLSLKERKELASFLVPLMSLTLAMNLYVVVAISDCSNKQLEKRYDLFYGRSVEDGFGEGNVLLASSFVNDFVVVLVDGLCDVDLSLCNTN

SEQ ID NO: 44302 - protein, 414 aa, Zea mays
  Coding DNA Sequence Number=SeqID_927
  Subcellular localization annotation: CTP_CleavageSite=26; ConfidenceScore=5.01e-01
MSSRSLMHRVFPPSEPPDGGHPQSFRLVVGGTQLRGSWYLSAIDRLQGFSSVSPAASPRWWSPKTVTTSPWVGRSKPGCDLGPVLSFKDVHHPRWGGGRAEPELYLSCGFVGQPLLQRSRERALTGPARGADFDNAGLVDGGRRQPQRVGLAGLAPGAPSCRGGGCRAACTGGPPKTSRAARAAFVFWGCPAFAPAEAAREVPVADGITATIRAASALRPSLLQFGHPERGSLSLLSERATASHPSVFCCSACPPIESLGSVGPAVRGFSCLVKGTPRSLFDEPKPGVVVSARTEAELAQKEDLVGQSLAGSSTGGNDTEIELSRPRAGLMSSEDSWPRPRGDRPSCLLEPDSWRRPWRRWPGCGDDVVLQSGDPRTASPSEARSDLAEGVVDAEGAAAPFNRQDPSLQDRIIL

SEQ ID NO: 44303 - protein, 117 aa, Zea mays
  Coding DNA Sequence Number=SeqID_928
  Homolog annotation: Hit_ID=Q53QR0; Match level="QueryCoverage=96%, HitCoverage=39%, E-value=7e-12, Identity=36%"; Hit description =Putative uncharacterized protein
MESLVGGHGVEGKESKTPIEAVAQVLASSKFLQNIGLVPATKKSGNGGDPTRVADLEAELESEKQNTLEVRAQLDALKKKVEESERARDKELEKINDLQKGADETNALLRRLFSLNK

SEQ ID NO: 44304 - protein, 360 aa, Zea mays
  Coding DNA Sequence Number=SeqID_929
MGSARVAFVLLLLEERNFAEVGTFQPLLGFKDFHHAARLHSLTNEASQAAASAPPASRIFIILARAGGRAEPELYLPYGSAGHLFLQRIEERALTSLAEGADFDNAGPIGHKRRQLEHAWFAGPAASGAASGATSHRWAECGYLPTVRAAVAPRAPGDRPRHRTPLGQRSCSWVVLPSLRHDASAQGSVLARPGGLEWGSTGRQVAIVVGAEVVAAGEGFSADETVSATRRPISGSLALIASPRPSSGDAGEGLVAAASALRSSLLLFSRPERRLLSLLMEQVAASQLEFVVLQALRCGGCSYPQEWNRSSVCNGTLSVGVCSLWLSGPEHLGIWVQYRVSSSFRAPGLARRLAKPLNQV

SEQ ID NO: 44305 - protein, 1183 aa, Zea mays
  Coding DNA Sequence Number=SeqID_930
  Gene Ontology: Mol. function=4 iron, 4 sulfur cluster binding; Cellular component=cytoplasm; Biological process=metabolic process
  Homolog annotation: Hit_ID=Q6YZX6; Match level="QueryCoverage=75%, HitCoverage=99%, E-value=0.0, Identity=78%"; Hit description =Putative aconitate hydratase, cytoplasmic
  Pfam annotation: Domain name=Aconitase; Domain location=341-851; Score=569.9; E_value=2.6e-168; Accession=PF00330.11; Description =Aconitase family (aconitate hydratase)
  Pfam annotation: Domain name=Aconitase_C; Domain location=979-1109; Score=198.5; E_value=1.6e-56; Accession=PF00694.10; Description =Aconitase C-terminal domain
  Pfam module annotation: Pfam domain module=Aconitase::Aconitase_C; Domain location=341-851::979-1109
MAMRQRRRWRSSPDGEELIGVAEAVNEENDLRCTLFFDGWINIDTGVTENDSMTRHEAHSGGERGSRNGGRDHRGWEFLRVAGHRGSRVGQWAGVASGVATTRGARAGACREMSEGWVGWGVVLSMEGEESNDIALEHLTEAGAAFPSAAFRFIRSSASIGRRAAKLQADGRDSGTTSCRRRRRLPLFHSDPWSSSSSVVVATRTRLRRQASPAPASAAAHGPSLFHRGATRFIRTSCCVPASSPTSPPAPSYNHATTLSIGSESESESLMTLVSTPDLNQGFYPTKHAFKRILTSLIKPGGGEYGKFFSLPALNDPRIDKLPYSIRVLLESAIRHCDNFQVTESDVEKIIDWENTSPKLAEIPFKPARCILMDNTGVPAVVDLAAMRDMMPKLGCDPYKINPLIPVDAVIDHAVRVDVAGTYDALDRNEELEFQRNKERFAFLKWASNAFHNMQVFPPGSGTVHQVNLEYLARVVFNEDGILYFDSVVGTDSHTTMINSLGVAGWGVGGIEAVVAMLGQPMGMVLPGVVGFKLSGKLQDGVTTTDIVLTMTQMLRKHGAIGKFVEFYGVGVGELSLPARATIANMSPEYGATMGFFPVDQVALDYLKLTGRSDETVSMIEAYLRANKMFVDKHEPETERVFSSYLELDLSEVEPCVSGPKRPHDRVPLKEMKSDWHACLDNEVGFKGYAVPKEQQGKVVKFDFHGRPAEIKHGSVVLAAICSSTNTSNPSVMIGAGLVAKKACELGLEVKPWVKTSLTPGSVVATEYLKHSGLQDYLNQQGFHVAAHGCATCVGNSGDLDGSVSAAITENDIVAAAVLSANRNFEGRVNPLTRANYLASPPLVVAYALAGTVDIGFEEEPIGVGKGGKEIFLRDIWPSNQEIDEVVESSVQTHLFKKVYDSIMERNPRWNQLPVPKEALYPWDDRSTYIRKPTYLEGMSMTPPGPPTVTEAYCLLNLGDSITTDHISYSGKIPEGTPAAKYLLEYGVEPKNFSSYGGRRGNNEVVMRGAFANMRIVNKLLNGEAGPWTIHVPTGEKLYVYDAAMKYKSEGHDMVIIAGSEYGSGSSRDSAAKGPMLLGVKSVIAKSFERIHRSNLVGMGIIPLCFQAGEDADSLGLTGRERYTIHLPTSTAEISPGQDVTVTTHDGRSFTCTLRLDTQLEVTYFNHGGILPYMVRNLAAQMK

SEQ ID NO: 44306 - protein, 98 aa, Zea mays
  Coding DNA Sequence Number=SeqID_931
MAAPPDLDAPATRCSQPNPICATRSTGQREPVGKELTRKRDTVGPGHDRLILLESASIGSWEATLTAGFVTPAGKELTTWARQSATERGEHVIHSGDR

SEQ ID NO: 44307 - protein, 149 aa, Zea mays
  Coding DNA Sequence Number=SeqID_932
MNTNPKARRTPQGMPPTANRSAVGHTHATAWLSPLLSKLLLLEISVASQVDVGEGRHRLILLESAAIGSWEETLTAGFVTPAGKELTTWTCQSATERGERVIQWRPIGGPWMSAQGIAGLRRSCAAATPGPRVGVQVTSWAEGSREVGR

SEQ ID NO: 44308 - protein, 241 aa, Zea mays
  Coding DNA Sequence Number=SeqID_933
  Gene Ontology: Mol. function=kinase activity; Cellular component =ornithine carbamoyltransferase complex; Biological process=amino acid metabolic process
  Homolog annotation: Hit_ID=Q6QP54; Match level="QueryCoverage=38%, HitCoverage=31%, E-value=4e-10, Identity=49%"; Hit description =Putative kinase
MATVVAVARRRKEYHVVAAVEGHELETPEMEQRPGLERLLETTHLELDGKLFVNTQQAPTWRANCRRFDPGGSLDRRVNFRCVPQPRWPKVGQGDDSSEVEVEAEPWGRARRRPSSEVEVEAEPWGRARRRPSSGVEVEAEPWGQARRRLSSGVEVEAEPWGRARRRPSSEAEAGAEPRGRVRRSFLWRLRLDSAAVSLTLAGGTAIEAGQTALFSCQVSQWRGEVTAVTSALPTKERASG

SEQ ID NO: 44309 - protein, 113 aa, Zea mays
  Coding DNA Sequence Number=SeqID_934
  Gene Ontology: Mol. function=transferase activity, transferring nitrogenous groups; Cellular component=endoplasmic reticulum; Biological process=biosynthetic process
  Homolog annotation: Hit_ID=Q10P02; Match level="QueryCoverage=95%, HitCoverage=20%, E-value=1e-30, Identity=62%"; Hit description =Aminotransferase, classes I and II family protein, expressed
MDMALPVVNATAAVLARVSAAFNGPLPAQSSLGSILMWPWEFSGHLVVEGLLIAVIVFQLSRKSYKPPKKPLTEKEIDDLCDDWEPEPLCPPIKEGAKIDAPTLERFALQLSF

SEQ ID NO: 44310 - protein, 135 aa, Zea mays
  Coding DNA Sequence Number=SeqID_935
MAHRTVRCATVYNKSDLNSYNFQTGIITSIVAKQCNSNECCGKKVNRQDFYTRQTAACTRCAVGRKDQIVNLQGGTATRSETVSFLDNELREGVFRTFGFLKPKRLFSRIKLVTKNDLAPRRGYCWVHASSPKVL

SEQ ID NO: 44311 - protein, 48 aa, Zea mays
  Coding DNA Sequence Number=SeqID_936
MAHRTVRCATGEPTGKDSVVDQPGPTWQRVHRTVRCTPDSPVPQSQKH

SEQ ID NO: 44312 - protein, 529 aa, Zea mays
  Coding DNA Sequence Number=SeqID_937
  Gene Ontology: Mol. function=aspartate kinase activity; Cellular component=chloroplast; Biological process=amino acid biosynthetic process
  Homolog annotation: Hit_ID=A3RL74; Match level="QueryCoverage=98%, HitCoverage=96%, E-value=0.0, Identity=89%"; Hit description =Aspartokinase
  Pfam annotation: Domain name=AA_kinase; Domain location=83-366; Score= 213.8; E_value=4e-61; Accession=PF00696.19; Description=Amino acid kinase family
  Subcellular localization annotation: CTP_CleavageSite=53; ConfidenceScore=5.05e-01
MAAALRFPGVARESLSLDAPVAASKLGRERRPAPASANPGPQCWRRRRGLAVRCQTGSTAPPVLRTEEAPAAAAGARNAQAGFTVVMKFGGSSLASAERMREVAGLILSFPDETPVVVLSAMGKTTNNLLLAGEKAVSCGAPKASEIPELAVIKDLHLRTVDELGLDRSIVSGLLDELEQLLKGVAMMKELTLRTRDYLVSFGECMSTRIFAAYLNKLGKKARQYDAFDIGFITTDDFTNADILEATYPAVAKRLHEDWMDDPAIPIVTGFLGKGCKSCAVTTLGRGGSDLTATTIGKALGLREIQVWKDVDGVLTCDPNIYANAIPVPYLTFDEAAELAYFGAQVLHPQSMRPARDGDIPVRVKNSYNRHAPGTVITKSRDMSKSILTSIVLKSNVTMLDIVSTRMLGQYGFLAKVFSIFEDLGISVDCVATSEVSISLTLDPSKLWSRELIQQAFNVLRRNGVNVQMISQGASKVNISLVVNDSEAKQCVQALHSAFFENGFLSEVEGADVPQNGASLNSNGAVYGN

SEQ ID NO: 44313 - protein, 191 aa, Zea mays
  Coding DNA Sequence Number=SeqID_938
  Gene Ontology: Mol. function=aspartic-type endopeptidase activity; Cellular component=chromatin; Biological process=chromatin assembly or disassembly
  Homolog annotation: Hit_ID=Q8W1D1; Match level="QueryCoverage=38%, HitCoverage=4%, E-value=1e-13, Identity=52%"; Hit description=Gag-pol
MQDVTRRALSHYCSVFGGVADGLDMRYYPHRPSGSTGGVVVSPVGEDNPRLSSTVNLDVVLNTELDHALDELSRARAEIAQLRAERAERHHLEDGSPALLPRYASEDVNTDAKRQYRFLRGLVDPMHYQLMNHTLPTFQHLIDREIMTEKKCKEMEDRKRKIGGPQPGSSNRPRFLGNPPQQFKHNQRLPQ

SEQ ID NO: 44314 - protein, 193 aa, Zea mays
  Coding DNA Sequence Number=SeqID_939
  Gene Ontology: Mol. function=nucleic acid binding; Biological process= DNA integration
  Homolog annotation: Hit_ID=Q8W0U5; Match level="QueryCoverage=17%, HitCoverage=10%, E-value=1e-08, Identity=84%"; Hit description =Putative GAG-POL
MAHPRKNGQVERANDMILQGLKPRIFNELNKFGSLDFLAIATGELRLVDLDMSAVTSVGPTRSTRSKAKKQRLKRCATALKQHLNRLVATIKKQVEATSLSTLVAVIGHQPTYILDLIKEDSSHGLTKPDFDVNEVAERACFMATPPWNDNGGGDEESPNREEECQHQACILIRKLDQIYGNIERKRLEVEKP

SEQ ID NO: 44315 - protein, 130 aa, Zea mays
  Coding DNA Sequence Number=SeqID_940
  Homolog annotation: Hit_ID=Q8S474; Match level="QueryCoverage=30%, HitCoverage=5%, E-value=2e-07, Identity=65%"; Hit description =Putative pol protein
MAARRRGESGKMRMRTASVGAVQAAVQAHGRSGDAAKHRTTRGRGEAQDYDAMRLQCGEALCRLDGSTPGANAGVKGSHSANKKIKFWIQQRSKEATEGPLVWEHRTMSGAPEDSNSNLPPSGISKALAL

SEQ ID NO: 44316 - protein, 202 aa, Zea mays
  Coding DNA Sequence Number=SeqID_941
MNKTPAFKVPLQTELRFHLRRYEQPHTIGGPAEQQKADGRLAVACSSSSDDDDFCSGGPNSSSDDLRADATAIRPSPMPSLERQGRVEGRRVGGQSVGGTGYLVGGETSSDCRGGRRRRKRLRSHSGRRAGHAAAASASNGERPSLRSLREGAGRRPRRDRPQLGALPSPALMMKILEAKGGAEATARLASPHPGAGGHRLG

SEQ ID NO: 44317 - protein, 213 aa, Zea mays
  Coding DNA Sequence Number=SeqID_942
MTALKKGPGKGDTPKRILPCEGTRLRASLLIRGSKAGPSERFNSRLRARGLHTHYWSEVRRPAPRKGSTTASGYSGSAPTTDQGFKGWPPKGISPFEGLNRASPEPSLGQGQPTPEDLRLARGPPPAANTFPARPRPCLRQEATPTKSQEHLMQSAAYAAPTVVPLDRVRLTGSRARPHTMGNSAPPDPWLELGLSPGRRRTPLRPTQGSDSG

SEQ ID NO: 44318 - protein, 106 aa, Zea mays
  Coding DNA Sequence Number=SeqID_943
MAPPVDVAGPRPRLGDVEAPPRSRSSPSSMAEAESEPLGWARRSSSSSGAEPKSEPWVGWSGVRRLPGLSPSPSPGSGGAEFAVFRGLARVRALGRAERSSPSSGA

SEQ ID NO: 44319 - protein, 147 aa, Zea mays
  Coding DNA Sequence Number=SeqID_944
  Subcellular localization annotation: CTP_CleavageSite=43; ConfidenceScore=5.18e-01
MALVAPPPPPPSTGKRTGRARRLFFHHAGKTSSIPPPAGGLLVATVAVARQWKEYHVVAAIEGHELKAPEMEHRPGPERLLETTHLELDGKLFVNTQQAPTWRANCRRFETGGSPSRRVKCRRVPQPRWVDARPSAKGGKRGGRRWA

SEQ ID NO: 44320 - protein, 302 aa, Zea mays
  Coding DNA Sequence Number=SeqID_945
MKGYSPSSPCEWDDQGLPGLGEGLRCWLSRSLNLNSYGPNPRVMKAGEHREDKEGECFVRFGHGGGLTPFGITVKMEGSLVIRTSYCSEVEGFPHHLRSCALRMGIRKKPDNKNTPTWRKRLQALSRRDPTEDDPTIVYMAGYLHTLDNHYDDLSSHCTHLNSRVESLEQQVKELKKEKVSLQESLEIAEGEEANTREAYRTLKMDYDKKLKKLAPTKKIRKKTKNQGCQTERKKEAPPALPPSRIENLSDVEDMSLASLDDLLKEFGDTLEREFRRFPLGAEGEAGGEGSETHPPHLRSCH

SEQ ID NO: 44321 - protein, 106 aa, Zea mays
  Coding DNA Sequence Number=SeqID_946
  Gene Ontology: Mol. function=carboxyl- or carbamoyltransferase activity; Cellular component=ornithine carbamoyltransferase complex; Biological process=amino acid metabolic process
  Homolog annotation: Hit_ID=Q8SA97; Match level="QueryCoverage=89%, HitCoverage=21%, E-value=3e-14, Identity=45%"; Hit description =Ornithine carbamoyltransferase
MAPPVDVAGPRPRLGDVEAPPRLRSSLSSMAEAESEPLGRVRRSSSSSGAEPKSEPWVGRSGVHRLPGLSPSPSPGSGGAEFVVFRGLDRVRALGRAERSSPSSGA

SEQ ID NO: 44322 - protein, 202 aa, Zea mays
  Coding DNA Sequence Number=SeqID_947
  Subcellular localization annotation: CTP_CleavageSite=77; ConfidenceScore=5.44e-01
MQAACNCAKWAHPSDFQRTQHGGPGPHVMQPARWLLRASNCTATRTTTAPPRLRNQVPRLEATLRMTQQCQPGASITGQSAAGEGATVDAAKNGPTVMAVAGGQKQRDRERGIPRKGILLREGNRPRASLLIRGSKAGPSEGFNSRLRALGLRAHYWSEVRSAPRKGSTAASGRSGSVPTTDQGFVGWPSKGSQSPQTQSEG

SEQ ID NO: 44323 - protein, 254 aa, Zea mays
  Coding DNA Sequence Number=SeqID_948
  Subcellular localization annotation: CTP_CleavageSite=17; ConfidenceScore=5.21e-01
MTVEKGHGSRGATMVTRSAITKQRRRSGWRFAFAIMTTSKKGPGKGDTPKGILLREGNGPRAPLLIRGSKASPSEGFNSHLRELGLRAHYWSEVRRLAPRKGSTAASGHSGSAPTTDQGFVGWPSEGSGAALANPAPAKPLTASTYQPENLGPDRAPGLRPARMRRHRKLRLARPRARTRAQPRKTTNSASPDPGLGLGLSPGRRRTPPRPTQGSDSTSTSEDRLDLDLGGASASPYPGLGPTTPQEEPSLPYP

SEQ ID NO: 44324 - protein, 365 aa, Zea mays
  Coding DNA Sequence Number=SeqID_949
  Subcellular localization annotation: CTP_CleavageSite=41; ConfidenceScore=5.56e-01
MSSHSPHASRPSTFRAPGWGALALLSSCCRWRNATSRKLVPFSHRSASRIFIRQPGCIPSPVVTQDGDHQFEGGDKQAGLRPLPLPQLQGCSSSVLGRGVRRVGAYLRADSGPLLPSVIGGKGVRRPWRWQLPRVWLSGLSGFGAASGATSHRGSRKRFLRRRDSRCHPRTDLQLYGLGSLSSPLEWGRGRGPCRSSVCPEVIAAAVWSPEAKVVVAAAGAGVGEPSRESLDSVGLAARGFTCLVEETLGRSAVSRGRGQRCQRGQRRSWLEKGSFVGRGLAGSSTGGINAGVELPRPRAGLSGDPPTVLPSKARSDFAEGGVDTEGAAAPLPLLSEPAGSALSVVACSSVAESFVRARVISHER

SEQ ID NO: 44325 - protein, 170 aa, Zea mays
  Coding DNA Sequence Number=SeqID_950
MQAACNRTKGAHPFDFDASSMEARAHTSCNWRAGYYVRETAPPLVPVPRLLDYGTGATTRGDPAHDPTVPTEHIGHGDRERGYFERDPSPRRKRPRAPLLIRGLKAGPSEGFNSRLRALGLHDHYWSEVRRLAPRKGSTAASGHSGSAPTTDQGFIGWPERELGLHLVPN

SEQ ID NO: 44326 - protein, 139 aa, Zea mays
  Coding DNA Sequence Number=SeqID_951
MSKSDPLFMERSRFPGEVDRGRRSLSMQEPEADHAKHIYRICNEKLPLGKGLTAFEVKELREALEFAAEGLELDSLFCQEDLDATVKEEQLEHDEKVALEMIESPLPSPDSDCFLSLEEHIEKFWGVDYNSDQMPSYSD

SEQ ID NO: 44327 - protein, 63 aa, Zea mays
  Coding DNA Sequence Number=SeqID_952
RIRGVVRFVVVPSMGLGVRGSLCQETFWFTDGNETDGFGYDYGAGEDEAVEGDFQEFQDYDEF

SEQ ID NO: 44328 - protein, 327 aa, Zea mays
  Coding DNA Sequence Number=SeqID_953
MARLRHTARKSVIPFLPSRLAERPLRRPVAGQSSHLERLHHRLHEEQERRRQEQQGSSFSLQQEIESVRSCSPVLPLEAPPAPPLGAPASGVAAGGDPDDGGGDDSSSHDTDLSADQEPEGWVARPITRDAARGCHFHDALDTLLRRALNRRTWSIEYRCVVYQHSRGVYPDRWEATCLVRRPENSLQGAEACLEHYSISERDSAEAAMQDAARRALSHYCSVLGGVADGLDLTGGVIVSPASEDNPRLSSTVNLAAVLNTELDHALDELSRARAEIALLRAERAERRHLDDGSPAPVGTQHPYRSPRCGHQSYGNPDCKTKINLEA

SEQ ID NO: 44329 - protein, 412 aa, Zea mays
  Coding DNA Sequence Number=SeqID_954
  Gene Ontology: Mol. function=ubiquitin thiolesterase activity; Cellular component=nucleus; Biological process=ubiquitin-dependent protein catabolic process
  Homolog annotation: Hit_ID=Q9FPS2; Match level="QueryCoverage=27%, HitCoverage=15%, E-value=3e-23, Identity=52%"; Hit description =Ubiquitin carboxyl-terminal hydrolase 25
  Subcellular localization annotation: CTP_CleavageSite=64; ConfidenceScore=5.26e-01
MELAERPLPASASSHAAACSPSFSLLCFPCSPWNSLRRARLLLQIARLLRADAGALDSPAKVIRCMPLFAEHFRWGRQEDAYEFLRYVVDACHTADLRMHKRLRAAAASGNCGEDVRGQGVCLFMRETFGGALLRQVKCLECKGESDETDEIMDISLDLPGSSSVADALARLCPMLQLTPSVCSHYWVGSAWRAHHHARGIPRTSLLRVGRSHRNSLLRPAEFAQVTSIYVLASSCSLVVHPCSSLLVIASARSGKTELIKKKAKPYSSCIHLVWNWCYEFWGRNSEKLVDGDDDVRAILVRRSTKKPNSGVATPSSSSCGNRRADTPIPSIVIPCSISSSNFASALVVVFHPPARHETWCRAPFLTNAEPAPAPAFANSLNSSITLARCSIEDFSGRPSSFRQLPSQIATW

SEQ ID NO: 44330 - protein, 631 aa, Zea mays
  Coding DNA Sequence Number=SeqID_955
  Subcellular localization annotation: CTP_CleavageSite=72; ConfidenceScore=5.02e-01
MTKDHQDAAQKRRAVIRMADLRREAKRARGSAMAAAFGSSQPVPAAKSAAPGSSKSSAGVKTAAAGGTKSPLAEAAKGRELPSPGKRVTDFGTNISVEDYFVGSGEGQMVVVPPSVATALPLAEVRARGTAQDPWAAFCVSGEILTAAAAKDVAGTMSQRLREASQRLSQQLSQAADFADRVASGVLTADVAAEVERLRAQHADVVREKSVVESKSRRLAEKAAQAEAKVARAEGSLASQRAEEWEVRFNALRGRVDKAEASTRSEVERTLAQFVSSYRELGARTADFEVPDREAGLRFLEWLQEELLVLPTIVEGFMSFASLVTCEGAMNALSREGCRHYEVFDQADESFEREIFKAEDPVVKQSAGGLFDRMWGAHGREAVRERSDWAREQVKMEHVEDVEDFGSLVGVPPEAVEVNPVLPLDAGEGPSTVVVPAMAGGEDPVSAPAPTIEGALTVADEPPVEDPTTAAGTSQGFGPTHATATDTANFMAASTVVAEDVSDDSVSKFFESGDSGGSVVWTEESSDEDLDYFVALDVAAVEASPRVVGVEVIPSASAGRRRRRAVAKRRVSEVEGSHLRVDGAGKRELLSLPTGTSVGEGELRNLFEGEELRIMLFNYREMGIIPKVEPM

SEQ ID NO: 44331 - protein, 87 aa, Zea mays
  Coding DNA Sequence Number=SeqID_956
MEAKRPTARDGSGSGKVRVSHLPARQHIRVSGVYPYPRELAGKIFDPYPYPQDIRGYRATRYPPENNMCVCDHVHFTKCINSLTDII

SEQ ID NO: 44332 - protein, 172 aa, Zea mays
  Coding DNA Sequence Number=SeqID_957
MAQCSALTILFGKPYTSRELPPLKVGQLRRDAIEGPHGPRHQVGSTTVGTGRGPQAPPLRSRRQVGYTHLNDVRGQRDTSVAPEIGRNILRRLAPRHGRRRGRHSPPRHQVVQAMQALRHRSTYSHVRGARSISIVNNAAVRPSAVGVMAARPKGSTFNILHRMMVLELLQL

SEQ ID NO: 44333 - protein, 17 aa, Zea mays
  Coding DNA Sequence Number=SeqID_958
MMLFQKRRTMLTELESY

SEQ ID NO: 44334 - protein, 271 aa, Zea mays
  Coding DNA Sequence Number=SeqID_959
MADAGDAVVRVPSLSLAVGEPLAGYFALLVEIPGENDLVEEPEELAGEAPEQQSIGGGNHLERLHHRLHEEQERRQQEQEQQGSSFSLQQEIESVRSCSPVLPLEAPPAPPLSAPAAGVAAGGDPDDGEHYSISERDSAEAAMQDAARRALSHYCSVLGGVADGLNLKYYPHRPSGSTGGVIVSPVGEDNPRLSSTVNLAAMLNTELDHALDELSRACAEIAQLRAGRVERRHLDDGSPAPVETQHPYRSPRRGHQSYGNPDCKTKINLEP

SEQ ID NO: 44335 - protein, 52 aa, Zea mays
  Coding DNA Sequence Number=SeqID_960
MVLGVAWPSLAPSSPQRGSARAVPRIWMYVCTRIDNGLVAESEEIAGEDPEQ

SEQ ID NO: 44336 - protein, 209 aa, Zea mays
  Coding DNA Sequence Number=SeqID_961
  Gene Ontology: Mol. function=carboxyl- or carbamoyltransferase activity; Cellular component=ornithine carbamoyltransferase complex; Biological process=amino acid metabolic process
  Homolog annotation: Hit_ID=Q8SA97; Match level="QueryCoverage=41%, HitCoverage=21%, E-value=4e-20, Identity=55%"; Hit description =Ornithine carbamoyltransferase
MALPVDVAGLRPRLGDVEAPPKPRSSLSSMAEAEPEPLGQARRRSFGRGQGGVRALGSGEADPSPSPGSGGAEFVVFRDLARVRALGSGGAEFAVFRDLARVRALGRAERSFLWCLWQDLTACESHSVKWHCSRSGAGDAVLLSGRSVERRSDGGHFGSAGGGLGRAGDVSAVGGDPRARRKSSGLYADGGYQLRIRSLEGTPNYGPRQ

SEQ ID NO: 44337 - protein, 525 aa, Zea mays
  Coding DNA Sequence Number=SeqID_962
  Homolog annotation: Hit_ID=Q2QVF2; Match level="QueryCoverage=58%, HitCoverage=37%, E-value=3e-12, Identity=24%"; Hit description =Transposon protein, putative, CACTA, En/Spm sub-class
MEKEPLDMVESSVRVIETHVDIIRSLVTDGVVDTSEPESVYTLKTTLFQIGDVCDMLEKCALSIKKYADSKRAKIIQDEALQYAEDDEAADDLEELPSPDLLTQADILENILELRLVNYKDNPVPPHYVVVQVLEITDSGCEDWEIGFPVEGIITLQEAMNELVLWHRRNIKLGDEPILSHVSRHKSPTPNSTPVQLKDSSIIPYPMVQENIAPTSTKIVETIISPLAKELDEGDVDKIVPQNVDANIKKEAKVDTNVEGPTTSKKIHQRIATDDVKKPSESMARYLHKLQRVMTNQSKAESASRGVRTRSQIDNFEVWEEDGMIHTRESLRLKINIPVYKKEAVPPKFVNGRPFLMMVQLSKLSTPEIRMHEWYMVASNKYKLEDFTFVVPEDAFWSKDNIDPVRHLFFDDLWSLYHRQRMETNYLTLFCFAYRFYWKDLAGEHPEDKPNLSISLFPYGDKQPPGTILCGYYVCEWCRVTFHYMVNREDVPKSKINAEWLERDMVSVGVAKVALHHKRFLEPPV

SEQ ID NO: 44338 - protein, 176 aa, Zea mays
  Coding DNA Sequence Number=SeqID_963
  Gene Ontology: Mol. function=kinase activity; Cellular component =ornithine carbamoyltransferase complex; Biological process=amino acid metabolic process
  Homolog annotation: Hit_ID=Q6QP54; Match level="QueryCoverage=51%, HitCoverage=37%, E-value=6e-25, Identity=61%"; Hit description =Putative kinase
MALPVDVTGLRPRLGDVEAPPKPRSSLSSVAEAESKPLGRARRRTAESEPWGQAKRSSSSSGAEPKSEPWGRAERSSPSSGAEPKSEPWGRAEWSSPSSGIWPESEPWVGRSRVRRLPGLSPSPSPGVGRSGVRRLPGFSPSPSPGSGGAEFAVFRDLARVRALGRAKRSSPSSGT

SEQ ID NO: 44339 - protein, 275 aa, Zea mays
  Coding DNA Sequence Number=SeqID_964
  Subcellular localization annotation: CTP_CleavageSite=68; ConfidenceScore=5.42e-01
MSSRSLMHRISPPSKPPDGGYPPSFRLIVGGTQLRGSRYLSAIIRLQGFSSCSPAAPLHRRSPKMVTSSLMVGESEPGCGLCPSLSLKDFHHQGWGGESAELGCSVPGFRTRVASEPLVAPASATAAGRGSSADEIARAAHGPTSNSTAFCPSLPHKFGHERGPPSSSTRPEVSAAAVRPPGAEVVVVAAAGAGDGALFVGLLLLRRPTPIEWGYSPVDYLNRFTKHESPRVKVTSETASPSEARSNLAEVVVDAEGAAAPSQRQDPSLQDQIVL

SEQ ID NO: 44340 - protein, 112 aa, Zea mays
  Coding DNA Sequence Number=SeqID_965
  Gene Ontology: Mol. function=carboxyl- or carbamoyltransferase activity; Cellular component=ornithine carbamoyltransferase complex; Biological process=amino acid metabolic process
  Homolog annotation: Hit_ID=Q8SA97; Match level="QueryCoverage=90%, HitCoverage=21%, E-value=7e-12, Identity=45%"; Hit description =Ornithine carbamoyltransferase
MALPVDVTGLRPRLGDVEAPPKPRSSLSSVAEAESEPLGRARRRTFGRGQGGVRALGPSPSPGSGGAEFAVFRDLARVRALGSGGAEFAVFRDLARVRALGRAERSSPSSGT

SEQ ID NO: 44341 - protein, 283 aa, Zea mays
  Coding DNA Sequence Number=SeqID_966
  Gene Ontology: Cellular component=integral to membrane; Biological process=molting cycle, collagen and cuticulin-based cuticle
  Homolog annotation: Hit_ID=Q6Z750; Match level="QueryCoverage=37%, HitCoverage=20%, E-value=2e-52, Identity=96%"; Hit description =Ankyrin-like protein
  Pfam annotation: Domain name=Ank; Domain location=193-226; Score =18.3; E_value=0.03; Accession=PF00023.21; Description=Ankyrin repeat
  Pfam annotation: Domain name=Ank; Domain location=227-257; Score =29.6; E_value=1.2e-05; Accession=PF00023.21; Description=Ankyrin repeat
  Pfam annotation: Domain name=Complex1_LYR; Domain location=90-156; Score=46.1; E_value=1.3e-10; Accession=PF05347.6; Description =Complex 1 protein (LYR family)
  Pfam module annotation: Pfam domain module=Ank::Ank::Complex1_LYR; Domain location=193-226::227-257::90-156
  Subcellular localization annotation: CTP_CleavageSite=54; ConfidenceScore=5.06e-01
MAAAVPAISLVADLAPAPATAPPSALLLQALSLSHGTRRNPMIWGKTKSKHNPCQSLDEKSKPKPSAFSWVPVGFYVGKDDMDSRPKLFGIQKQVLALYRGFLRTARLKAPEERRRIESVILAEFRDNARSVDRRNFVHIEYLLRRGKKQLEQLKNPDITRLATLVVKNEDHLDVVNAILDTDDSCIRIVRKNGKTSLHTAARIGYHRIVKALIERDPGIVPIKDRKGQTALHMAVKGKNTDVVEELLMADVSILNVRDKKGNTALHIATRKWRPQGSGITGA

SEQ ID NO: 44342 - protein, 122 aa, Zea mays
  Coding DNA Sequence Number=SeqID_967
MQDAARQALSQYCSLFSRVDDGLDLKYYPRRSIGSAGGVIASPVGEGNPRLNNMVNLAVVLNTELDHALDMLGKMSENRHRGARRAQPEQQAPQEEAASQQHLPPPPPMTIEQMFLMQTQAV

SEQ ID NO: 44343 - protein, 188 aa, Zea mays
  Coding DNA Sequence Number=SeqID_968
MSLSFCHDVMVPGRREEYHVWATFWTAMTKDFAMTTVLPPYEDIVASYLIRNCFGSKCPSYMWSWGGLYDGGYGVACSSAAKGEASSKAFLTKLPVLGPSILFILNKMTHFFSGFVDLTLKISQSRHLLLLPLYLLMDDLHIPDLWSNSSSGVLDGGFPFLGFEPFRRERVFWVWGPSGLQCSGSLGA

SEQ ID NO: 44344 - protein, 251 aa, Zea mays
  Coding DNA Sequence Number=SeqID_969
MTERSPWILEEENKRGVKVESVSLPVAEELGLEGNLGLVSGAPPPFVDNVLELDDEGAKKPQQGHVVHLVPRREQVGSVFNKNVVAPGGVVWGCEVEDDENKRGGLHVLDTHRLNLEVSNDYGLILRGKGNHRRGGRRGQCDRAADASPRRVAWREYQPQCTRAPMSEQQATMALAIKIATTRVDWATATSEEDTIGDGDMKRVLWALKGYEQRPVVAPRLANPLARTQWRSPVAVELGAAVRSEARQQGG

SEQ ID NO: 44345 - protein, 167 aa, Zea mays
  Coding DNA Sequence Number=SeqID_970
  Subcellular localization annotation: CTP_CleavageSite=56; ConfidenceScore=5.05e-01
MGLGACGSLCQGGDEDDGYDYAFGNGAAFRTPLSQLAAVVSSARHSQAPARRRPPSCSVRLCLSQLASPVARPECHRSFPGSQLARVSDATPARSGLRSAVGRSPLLQLAAQATRRPDVRDGSAIGRQLAPPPQATTPSAAAVLHGSTAGCCSLHRELPRYTMRAVL

SEQ ID NO: 44346 - protein, 77 aa, Zea mays
  Coding DNA Sequence Number=SeqID_971
MVPYFLVEAPTKSRVSYNPNPPFAYHKGEKTPAQLPGGKFSWCMVKELKKLNSAEVKFSWKPQLQLKKFSCFSARTL

SEQ ID NO: 44347 - protein, 127 aa, Zea mays
  Coding DNA Sequence Number=SeqID_972
MAGSKDHTDISSDNILKPTVESLTTEGQQHYKDYMRQAKEKFLSQYMVDRRQKVVKHGETHVASLLYSLHVPNPQPLYGMPMNSYPGKIPPPPSLLSRSAPLDTVGPSELVPRQSSPYANCLSFPAG

SEQ ID NO: 44348 - protein, 163 aa, Zea mays
  Coding DNA Sequence Number=SeqID_973
MALPVDVASLCPRLGDVEAPPKPGSSLSSMAEAESEPLGRARRRSLAEAESEPLGRARRRSSAEAESEPLGSGEAEFVVSRGRVRAPGSGEAERPSPSPWGWARWRSSAEAESEPLGRARRRSSAEAESEPLGLGEAEFVVFRGLARVRALGRAERSSPSSGA

SEQ ID NO: 44349 - protein, 276 aa, Zea mays
  Coding DNA Sequence Number=SeqID_974
  Subcellular localization annotation: CTP_CleavageSite=76; ConfidenceScore=5.18e-01
MSSSSLMRRIFPPSKPPDGGCPPSFRLIPGRTPPPAVTQDGDLRLDGGGKRTGLRPLPLPQPQGFSSPGLGRGVCRVEVGPRVGGSPLLHSVTGGGSSCRPRRWHLQRAWLSDASGFGAARGAGVCHGSWKRFFRRRDSQGWPWTDPQLYGLLPVLASRVLGHGRGPPGSSIRPEVITAAVWPPGAEVFIVAAAGAGDDEPLVGLLSLRRPTPMEWGYLSVDYLNRFTKRESPRVKVTSEESLGSVGLAVRGSSSSVKGTPRPLFDEPRPGVAISV

SEQ ID NO: 44350 - protein, 157 aa, Zea mays
  Coding DNA Sequence Number=SeqID_975
MALPVDVASLCPRLGDVEAPPKPGSSLSSMAEAESEPLGRARRRSSAEAKSEPLGRARRRSSAEAESEPLGSGEAEFVVSRGRVRAPGSGEAEVVRRGRVRAPGVGRGGAIQSGLPLNEGKASGKPEMCPPLKGGLGRDGNPFGVGCPCPRLGSGEA

SEQ ID NO: 44351 - protein, 163 aa, Zea mays
  Coding DNA Sequence Number=SeqID_976
  Subcellular localization annotation: CTP_CleavageSite=40; ConfidenceScore=5.18e-01
MPRLSLCVVSAQQQMSSNKETRRINTSRPKPVCVERISCRGENAVYPLQSTHARSPSSPSWGPKPGREHNHQRWYPLPTSHVTHLPRDRDFPYTSTEEARQEHEWVKEVIKGTTCLGLEIPVYHGTGLGVKFIKVQGARGKNPQTQRTGSLDCGLISLFYGDS

SEQ ID NO: 44352 - protein, 200 aa, Zea mays
  Coding DNA Sequence Number=SeqID_977
MCEINEDLYLMRFDRQRQKEEADLNYGNDQPHTDYHFRKYLTWYAGVTRCKIKGQWTAADYVEQESSDDEDTSFDITARLGSQIKAAPILDRVVRSCLLNLVMLIRYNMSCFVDANVLTFEYGNSMLVSVGELERISWRTSDTTTLYLLSVSQDVIGPSQLQDAPTTQLSQFTPRRRCPRDPYTPGTDALAAKGKAWENC

SEQ ID NO: 44353 - protein, 545 aa, Zea mays
  Coding DNA Sequence Number=SeqID_978
  Gene Ontology: Mol. function=amino acid binding; Cellular component =chloroplast thylakoid membrane; Biological process=metabolic process
  Homolog annotation: Hit_ID=A2XHY2; Match level="QueryCoverage=80%, HitCoverage=95%, E-value=0.0, Identity=78%"; Hit description =Putative uncharacterized protein
  Pfam annotation: Domain name=ACT; Domain location=129-193; Score =13.5; E_value=0.3; Accession=PF01842.16; Description=ACT domain
  Pfam annotation: Domain name=ACT; Domain location=222-294; Score =35.7; E_value=1.7e-07; Accession=PF01842.16; Description=ACT domain
  Pfam annotation: Domain name=ACT; Domain location=358-429; Score =23.4; E_value=0.00085; Accession=PF01842.16; Description=ACT domain
  Pfam annotation: Domain name=ACT; Domain location=436-502; Score =40.1; E_value=7.7e-09; Accession=PF01842.16; Description=ACT domain
  Pfam module annotation: Pfam domain module=ACT::ACT::ACT::ACT; Domain location=129-193::222-294::358-429::436-502
MGSWEEHVRRFLLEEEEDDDELFFVILPAIIPYLSEEFAIAFHNIIRGHNGDEGWLDNQPDYMSPSQYVDVPEVDNIYPNDTESSDGTALADGEADYSSWDSDDEYQKFIQNMNPPRVTIDNTSCPNATVIHVDSANKYGILLEVVQVLTDLKLIVKKAYISSDGGWFMDVFTVTNQSGHKITDESVLQGIKDYIYKSIGPDSCFLPSRRRAVGVEPSSDHTLIELTGTDRPGLLSEVSAVLTSLECNVVSAELWTHNGRAAAVMQVTDRESGLAVSDAERVGRIKGRLYNVFRGRSRDAKTAVATTGATHPERRLHQMMFEDRDYERRGKDDGRAAASGSNPGPVVSVVNWLQKYYSVVTVRCRDRPKLLFDTVCTLTDMQYVVFHGSVDTEGPEAYQDYYIRHIDGCPVNSEAERKRIIQCLEAAIERRVSEGLKLELSTGDRVGLLSDVTRIFRENGLTVTRAEVSTRGDEAVNTFYVRDAAGSAVELRTLEAIRQEIGQTVLQVKGHPEQPKPPVAAQDSPTRFLFSSLLFRPRSLCNLGP

SEQ ID NO: 44354 - protein, 209 aa, Zea mays
  Coding DNA Sequence Number=SeqID_979
  Subcellular localization annotation: CTP_CleavageSite=45; ConfidenceScore=5.62e-01
MVAFQGGHPPFKGNSPHLRPQPSQTESSPTRSKVFPLRHGGWVPRVMQAGPGQKEPKPPRVVRVTAQRLQAFLHFRPDQRVKERTAMQAACNRTKGAHPFDFDASSMEAQAHTSCNQRAGYYVQETAPPLAPVPRLLDCGTSAATRGDPAHEPTVPTEHIGHRTGDTFGRRSRRRFTSAIMTASKKGPGKEILRKGSFYAKEAGPEPHY

SEQ ID NO: 44355 - protein, 224 aa, Zea mays
  Coding DNA Sequence Number=SeqID_980
  Subcellular localization annotation: CTP_CleavageSite=25; ConfidenceScore=5.05e-01
MTQTYPAVDGGLFSRKRRGSLRKVYGDGNSGTAAPLFTRTTAQPTYSGAIAAPGTEALTSGPPIADLPGGRTFNPPGYGESELRREKRKVCYAGEEIPSSSRSRSAAPWRRNHVSVGGRGTSCPRAHGLLGEKFGRRNSHYRARPVNLARISPTIGRTRRVPRRSFAMVKKKLRRGTHGQPLRLVELVVVVEVVVVVVSPTALGLFLGGPDVEDLEDSFLFAVA

SEQ ID NO: 44356 - protein, 130 aa, Zea mays
  Coding DNA Sequence Number=SeqID_981
MARLASSEPMPRRQHLRARALVGVGWLTKPPSPAQPIGRRLLATFPAPLVPAIRRKAEADYEQTLTEARSPCASLQWQPAQHSQHHSGLAAGKGGVEATKSCTKKTEGPKQESGSKESETVHASKIKDWW

SEQ ID NO: 44357 - protein, 143 aa, Zea mays
  Coding DNA Sequence Number=SeqID_982
MVQDIFPNSPARDGGATQEPRRSITGVQSILELWFPILKSHRSYELLQVRPRGWQLTEARGGCGEATRGESGFQSSRDDRRAIASCPATVSTRGRRDTLQEDLGTSLADPRAADASGNSISTPRLSLSRGGEEIMAPSYDGAG

SEQ ID NO: 44358 - protein, 86 aa, Zea mays
  Coding DNA Sequence Number=SeqID_983
  Subcellular localization annotation: CTP_CleavageSite=52; ConfidenceScore=5.02e-01
MGGGLLAAASSLRSALPLLGPSEQKSSSSPLLEQGCLCERELLLAEGTSEVSVSQRRGNPSARSALPFTRTFTRSRGPVPDLVEKA

SEQ ID NO: 44359 - protein, 283 aa, Zea mays
  Coding DNA Sequence Number=SeqID_984
MATTAVESRGTRMQRGAESSKAKERSSWRECESVTAACEVNPFSRKTLLLAPRDTAENLARRAPKQPAYDTGAQVHKSYSWATSHTPWASVPECRKSEPPLAPVLRLLGAAAEDKEDMAVGVTEGGMAMITSANTRKRRANHQSSFGPTYRLVSSPEVVPGATVGTLKQGYPLLQHEDAATHSRVPGFWDKEYPGLNQGQAGVRSRHVSGPYHVRLCSLLRRSPDAATWPIARDVSQRAKPDARPLGHMASTFIADNARRLSIPLAGDVPPRHLMSPVHSTGR

SEQ ID NO: 44360 - protein, 118 aa, Zea mays
  Coding DNA Sequence Number=SeqID_985
MAPGEAVELGGWHSNYLAADKAPGAALDVLDVCAGVCCRAECTTTTPGAGRLVARGVEDAASSSTGKSSGMKSWCSTMWTTVSSRKTSKNLMPSPYLARQKSERKFSGRVAERTRPKS

SEQ ID NO: 44361 - protein, 129 aa, Zea mays
  Coding DNA Sequence Number=SeqID_986
MSMGLAPSTSLFCHFFVLVKSGKAKDHLGAYYFQTRSDSAVAYIPILRMNSIASCSGLVSSPLNFTSISCGCGAGRGRLRQLQSHDPAISLEPVIAGLVANTEDAAQEAIQDAVETVAARFQLDPADAE

SEQ ID NO: 44362 - protein, 813 aa, Zea mays
  Coding DNA Sequence Number=SeqID_987
  Gene Ontology: Mol. function=transferase activity, transferring glycosyl groups; Cellular component=chloroplast; Biological process =carbohydrate metabolic process
  Homolog annotation: Hit_ID=Q9ATK9; Match level="QueryCoverage=87%, HitCoverage=78%, E-value=0.0, Identity=77%"; Hit description=Alpha 1, 4-glucan phosphorylase L isozyme
  Pfam annotation: Domain name=Phosphorylase; Domain location=170-810; Score=686.9; E_value=1.6e-203; Accession=PF00343.11; Description =Carbohydrate phosphorylase
  Subcellular localization annotation: CTP_CleavageSite=54; ConfidenceScore=5.67e-01
MATTTSPPLQLASASRPHASASGGGGGGGVLLAGGSGGGVAPGWGRGRLQRRVSARSVASDRDVQGPVSPAEGLPSVLNSIGSSAIASNIKHHAEFAPLFSPDHFSPLKAYHATAKSVLDALLINWNATYDYYNKMNVKQAYYLSMEFLQGRALTNAIGNLEITGEYAEALKQLGQNLEDVASQEPDAALGNGGLGRLASCFLDSLATLNYPAWGYGLRYEYGLFKQIITKDGQEEIAENWLEMGYPWEVVRNDVSYPVKFYGKVVEGTDGRKHWIGGENIKAVAHDVPIPGYKTRTTNNLRLWSTTVPAQDFDLAAFNSGDHTKAYEAHLNAKKICHILYPGDESLEGKVLRLKQQYTLCSASLQDIIARFESRAGESLNWEDFPSKVAVQMNDTHPTLCIPELMRILMDVKGLSWSEAWSITERTVAYTNHTVLPEALEKWSLDIMQKLLPRHVEIIETIDEELINNIVSKYGTTDTELLKKKLKEMRILDNVDLPASISQLFVKPKDKKESPAKSKQKLLVKSLETIVDVEEKTELEEEAEVLSEIEEEKLESEEVEAEEESSEDELDPFVKSDPKLPRVVRMANLCVVGGHSVNGVAEIHSEIVKQDVFNSFYEMWPTKFQNKTNGVTPRRWIRFCNPALSALISKWIGSDDWVLNTDKLAELKKFADNEDLHSEWRAAKKANKMKVVSLIREKTGYIVSPDAMFDVQVKRIHEYKRQLLNILGIVYRYKKMKEMSTEERAKSFVPRAKRIVKFITDVAATVNHDSDIGDLLKIGEGLKRGIDGQEHRPGASAHDRARGGFLPSNSCLL

SEQ ID NO: 44363 - protein, 185 aa, Zea mays
  Coding DNA Sequence Number=SeqID_988
MGSRPRGSIGAPPERGAEAYTVWSGHVLAPDPRLALIKAWVFFVPESQDPAVSGPDPTQRGPKPILGVRFAPVEVLDLTLRSGLYTQGSDTFPWGSGPTVDTLEYIVFSGHVAAPELSTWWGWVLFTMRLEIAAWVPRLHVVVRGTPVSGYRQWPLGPPQGRIRAYRWGQSLIGDWRAAFVCLLT

SEQ ID NO: 44364 - protein, 94 aa, Zea mays
  Coding DNA Sequence Number=SeqID_989
MEGGAVQQLVSGGADSGASLLLASRSAWDVVDQCQWMEASSKEERGEGYKYKCAGAQGHADVAQRIQNVDTLLTITAEGNIGSVWLVSLANLVV

SEQ ID NO: 44365 - protein, 60 aa, Zea mays
  Coding DNA Sequence Number=SeqID_990
MAVGRGAVDGRTRQSGVPESLDKFGICFSYLSQERFTRHADITIIGVTRMRKQLHELTFI

SEQ ID NO: 44366 - protein, 366 aa, Zea mays
  Coding DNA Sequence Number=SeqID_991
  Homolog annotation: Hit_ID=A2XD85; Match level="QueryCoverage=99%, HitCoverage=65%, E-value=1e-134, Identity=69%"; Hit description =Putative uncharacterized protein
  Pfam annotation: Domain name=DUF936; Domain location=1-366; Score =279.0; E_value=9.9e-81; Accession=PF06075.3; Description=Plant protein of unknown function (DUF936)
MASLTPGILLKVLKHINSDVKVCGEYRSILLQVISIVPAITGSELWPDHGFFIKVSDSSHSTYVSLSKEDNELILSNKLQLGQFIYVEKVQSSIPVPVLVGVRPVPGRNPCIGNPKDLMQMSTPSGVMEALDHQRTTSKSADLSESEKENLQRKVVIKEQKTVVASRYMLGVSSNNGKITNLNSSIDSEKSNGGSTISESNKKSVALKVRQEAKPQERSNNTSPSNAKLVSTKQEISKDTRKNIGTSPSPNGSAVVKKQMPKESKKEVATERRSPPKLHRSSPTPARTSPTKLSPAAKQNGNSGPVSSVSTVKKRVSETISWDSLPTSLINSGKAVVRRKNIALIVAAEAQREAAAAAYLVKGLGK

SEQ ID NO: 44367 - protein, 85 aa, Zea mays
  Coding DNA Sequence Number=SeqID_992
  Subcellular localization annotation: CTP_CleavageSite=49; ConfidenceScore=5.34e-01
MVKNFGRKTVQIAMNAVVRRQSARVFTPGAHPLALAARWTAGTNSKLCKVFKGKATKLTQRRSCEAGKLRHVRRKGNRLKDEKAI

SEQ ID NO: 44368 - protein, 246 aa, Zea mays
  Coding DNA Sequence Number=SeqID_993
  Homolog annotation: Hit_ID=A0EVH6; Match level="QueryCoverage=35%, HitCoverage=26%, E-value=2e-07, Identity=40%"; Hit description=Milt putative polyprotein
MAGSKDHTKISTTNIIKPAMEALPADDQMPFEDLVMRDKKEVMRQWNEQRDKEEAELLHKLSERRKEAADKYLSHFTIDRHQKIIRQGEIDMESLLPPLHGPAPQPLGTRQVLDTAGPSEHHLRQSGYTADRPAYFAGPSDQMQARTQNTQVAPYMAGPSGYNPEHFGPITDRPVHHAGPSGYVADRPPSYAKVAFFKERQTLNKNRGGPSGQARTISSPGGKDLKVLRVDRSPGASPDDVESPRN

SEQ ID NO: 44369 - protein, 187 aa, Zea mays
  Coding DNA Sequence Number=SeqID_994
  Subcellular localization annotation: CTP_CleavageSite=69; ConfidenceScore=5.20e-01
MMVLALVATTLFAILFLFSLLSCLHLRATSFLTEGVGASASSPYSSDTSPDTDSRSGYCTSMRTFHIMRATSFLSSSDVLFVFPAFVRFFHPNLLPRPRFESRADRCTHEIRAGSSLEPSYLLTIDEPIGLTNQSWPPSLYIVVDAGTGRVGHAPGLSPCVPSRRTWWRLPRLGYLSDESKSEILDN

SEQ ID NO: 44370 - protein, 341 aa, Zea mays
  Coding DNA Sequence Number=SeqID_995
  Gene Ontology: Mol. function=metal ion binding; Cellular component =cytoplasm; Biological process=cell redox homeostasis
  Homolog annotation: Hit_ID=Q6Z303; Match level="QueryCoverage=99%, HitCoverage=99%, E-value=1e-116, Identity=60%"; Hit description=Zinc finger-like
  Pfam annotation: Domain name=Extensin_2; Domain location=5-296; Score= -130.7; E_value=0.035; Accession=PF04554.4; Description=Extensin-like region
  Pfam annotation: Domain name=zf-C3HC4; Domain location=200-240; Score= 41.0; E_value=4.3e-09; Accession=PF00097.16; Description=Zinc finger, C3HC4 type (RING finger)
  Pfam module annotation: Pfam domain module=Extensin_2::zf-C3HC4; Domain location=5-296::200-240
MSSTTAPARHRTCRMYWCYQCGRALRIISYPSTDVFCPRCFGRFLHEMDLPARPAFPPPHFLPHPFHPQRQHDGHPRRWVIYGGEPATTVPGRAFRQPAAPAQGPTTPPAPAPAPVRRRVPSPPPPPPPPPPPPPPVLRRPTTAPAVDLGNYFTGPNLNNLIEELTQNDRPGPAPAPPSAIDSLPTVRITGAHLSDGSQCPVCKEDFELGEAARQLPCKHVYHSDCIVPWLRLHNSCPVCRYQLPGAGSTSNGGSQAAPRGGSDGDRNSRNGERGREPPTLVRWGPFSWLFPPHGMDDPDDAWEHGRRGRHDAADAGGNDMTALQSFVLVATCVFFFSFLV

SEQ ID NO: 44371 - protein, 1285 aa, Zea mays
  Coding DNA Sequence Number=SeqID_996
  Gene Ontology: Mol. function=ATPase activity, coupled to transmembrane movement of substances; Cellular component=integral to membrane; Biological process=transport
  Homolog annotation: Hit_ID=Q71CZ3; Match level="QueryCoverage=97%, HitCoverage=91%, E-value=0.0, Identity=59%"; Hit description =Multidrug resistance associated protein MRP2
  Pfam annotation: Domain name=ABC_membrane; Domain location=324-595; Score=53.2; E_value=9.1e-13; Accession=PF00664.14; Description=ABC transporter transmembrane region
  Pfam annotation: Domain name=ABC_tran; Domain location=670-825; Score= 105.2; E_value=2e-28; Accession=PF00005.18; Description=ABC transporter
  Pfam annotation: Domain name=MMR_HSR1; Domain location=1178-1277; Score=-19.4; E_value=0.064; Accession=PF01926.14; Description=GTPase of unknown function
  Pfam module annotation: Pfam domain module=ABC_membrane::ABC _tran::MMR_HSR1; Domain location=324-595::670-825::1178-1277
MAATPAWDWEESLVFFLQPFFLHGVSAAAHLILALAVAGRLLFRRLSASRTKDGEVGGGDASRGVGRFRYWYGVSVCTTWAMGAFEVLLAVYSWYANGGAGWSRDAVVEQVDAAARAVSWLLLAAYLQFDFWWRRQRQERFPVALRLWLALFMLLSVVTVGVHAAMILDGSLVPGRSWALDAVSVTAAAVLLSVSAGFFGRKEGEGGGHASEAHEPLLNGAHEGSGDDDENSSSAADASLFTGAGFLSVLTFSWMTPLLGVGHRKTLVPEDVPGLEPGDSVAGVLPPFKANLEALTGDGGRSSRKAVTAFKLTKALLRTLRWHVAVTAFYTLVYCVAVYVGPYLIDSLVQYLYLNGDERYASKGQLLVLAFVVAKVLECLSQRHLFFRLQQAGIRARSALVAVLYQKSLALSSQSRRSHTSGEMINIVSVDADRVGIFSWYLHEVWQVPLQVVMAMFILYSTLGVASLAALGATVATGLATVPLGRMQERFQEKLMDSKDGRMKATSEILHSMRILKLQGWEMRFLSKIIELRKTEANWLKRYLYTSATMTFIFWGTPTFVAVVTFGACMLMGIPLETGKMLSALATFRVLEEPIYELPGTIAMVIKTKVSLDRIASFLCLDELPSDAVQRLPRGSSADFAVSVGNGCFSWEASPDAPTLKDLNFQARPGMRVAVCGTVGSGKSSLLSCILGEIPKLSGEVRTCGTTAYVSQSAWIQSGKIQENILFGMEMDRDKYDRVLESCALKKDLENLPFGDQTVIGERGINLSGGQKQRIQIARALYQDADVYLFDDPFSAVDAHTGSHIFKVMKDGRIAQAGRYDEILGSGEEFMELVGAHEESLTALDVVDAMNENEANVSSSPSSRIETPNLSRSLSLAEKKHGATNEAEGDDDDARSGQLVQEEEREKGRVGFWVYWEYLTQAYKGALVPLVLLAQTLFQIMQIASNYWMAWATPASKDAEPPVSAPTLLFVYVVLALGSSLCILASTDQSEVDTNIADQMGTVAFSIIQLVGITAVMSQVAWQVFVVFVPVFAACVWYQRYYIDTARELQRLVGVCRAPIIQHFAESIAGSSTIRSFGKEDQFVSTNSRLTDAYSRPKFYNAGAREWLCFRLDVLSSLAFAFSLIFLINLPAGLIDPGIAGLAITYGLTLNTLQAQVKYAPQLPFVLKGLTVAFPGGVKTGIVGRTGSGKSTLIQSLFRIVDPAVGQIVIDGIDIRTVGLHDLRSRLNIIPQEPTMFEGTVRSNLDPLGEYSDDQIWEALDCCQLGDEVRKQELKLDSPGLNLIQ

SEQ ID NO: 44372 - protein, 326 aa, Zea mays
  Coding DNA Sequence Number=SeqID_997
  Gene Ontology: Mol. function=protein binding; Biological process =polarity specification of adaxial/abaxial axis
  Homolog annotation: Hit_ID=A2CIR7; Match level="QueryCoverage=99%, HitCoverage=63%, E-value=1e-144, Identity=83%"; Hit description =Ankyrin-repeat protein
  Pfam annotation: Domain name=Ank; Domain location=126-159; Score =18.9; E_value=0.019; Accession=PF00023.21; Description=Ankyrin repeat
  Pfam annotation: Domain name=Ank; Domain location=161-193; Score =36.3; E_value=1.1e-07; Accession=PF00023.21; Description=Ankyrin repeat
  Pfam module annotation: Pfam domain module=Ank::Ank; Domain location =126-159::161-193
MVEKASIEDVMKVLMASRKQDLHQLWTTCSHLVAKSGLPPEVLDKHLPIDVVAKIVELRLKSSMSRRSPFLAHHHPHHHPAAGGMEASSAADIDEHHKIRRMRRALDSSDVELVKLMVMGEGLNLDEALALHYAVENCSWEVVKALLELGAADVNHPAGPAGKTPLHVAAEMVCPDMVAVLLDHHADPNVRTVEGVTPLDILRTLTSDFLFKGAVPGLAHVEPNKLRLCLELVQSAAMVMSREDAHTAVNPAAAPMYGEPSGGGAVYSASGTSSSMVNLSLDNRMVYLNLGMDAQFGKMDDGGDGDDGGGRGQGGPPSLFSPHGYH

SEQ ID NO: 44373 - protein, 296 aa, Zea mays
  Coding DNA Sequence Number=SeqID_998
  Gene Ontology: Mol. function=cellulose synthase (UDP-forming) activity; Cellular component=membrane; Biological process=cellulose biosynthetic process
  Homolog annotation: Hit_ID=A2Y0X2; Match level="QueryCoverage=33%, HitCoverage=9%, E-value=3e-49, Identity=96%"; Hit description =Probable cellulose synthase A catalytic subunit 1 [UDP-forming]
MSSDSDLFVDAHDLWTRIKIKYSESNCTTSTPYVACDTNLSKGEEKRWQPNDESTSPTSLSSTSYKCLIANNDSGDERDDEEEYEDDSEDESSPQGTFSCIASTDNNDRENEIVDVEEEEIRRFYTHLNKEDKVLLVKLLRRNKEQGEMLLRLEETLIKTNDSLEKMTKEHEELKCSHDNLVQRWSSVGIEDWWRNEQFWVIGGTSAHLFAVFQGLLKVLAGIDTNFTVTSKASDEDGDFAELYVFKWTSLLIPLTTALVINLVGMVAGISYAINSGYQSWEKVDKATNAAGPDAF

SEQ ID NO: 44374 - protein, 133 aa, Zea mays
  Coding DNA Sequence Number=SeqID_999
MQAACNRAKWARPFDSNEPSMEGPGKGDTPKRTLLHEGNRLRASLLIRGSKAGPSEGFNSRLRARVRRLALEGFTVASDTERGMTMGDRVRQITRKYFWALLWASSRPLSNGAQTSARITCQQLTGDTMFGAT

SEQ ID NO: 44375 - protein, 139 aa, Zea mays
  Coding DNA Sequence Number=SeqID_1000
  Homolog annotation: Hit_ID=Q3I0N3; Match level="QueryCoverage=39%, HitCoverage=31%, E-value=6e-10, Identity=59%"; Hit description=P23
MEGVLEFAPTYKYELGSRRSLIVSIIIQATLGSGSMVMMTQKSTHSKCGVHEGFELPVLYSPGQSTSQSCATDRVFLTIELPDAKGVKQSLKPKGHFNLSSSDDSPCEFDLELFDVVDLIHVELAFQILIDEDGEDVGC

SEQ ID NO: 44376 - protein, 467 aa, Zea mays
  Coding DNA Sequence Number=SeqID_1001
  Gene Ontology: Mol. function=transcription regulator activity; Cellular component=nucleus; Biological process=regulation of transcription
  Homolog annotation: Hit_ID=Q10CH6; Match level="QueryCoverage=50%, HitCoverage=57%, E-value=7e-36, Identity=42%"; Hit description=Helix- loop-helix DNA-binding domain containing protein, expressed
  Pfam annotation: Domain name=Auxin_inducible; Domain location=124 -219; Score=77.1; E_value=5.7e-20; Accession=PF02519.5; Description =Auxin responsive protein
MVINLVGYAWALLGARGPARHDPLANPVWIADIQGEGGGSIDRCSQSKGDARWFSNDAGCGRPVHLQKHQLPHLEQMVVDRWLLPKDLRNGHVFDRWRPMSGRQQAASLSPGIEAPTRRLHQIQKTEVEKRSEPKQASFKNKGRGEEEATGLPSDVPRDHFAVYVGERRRRFVVPITLLDRPEFRYLLRRAKEEFTSVGGALILPCEEVAFHSLTSALACARNPDEMDGNTRSAAESQKKPIVPDDDLVELLWHNGSVVAQPQAHHRPAPPSDRDPLGTNDITAEETAAWFPDTLDDPLEKDLYTQLWYSTIADAAPQHEGTFPGPTSHPSPPLPPVGSSNVESSWAGDICSTFCGSNQVPRTPTGIRGKDAALQSEVPSGVGAHDGTSSSGGSGSNYGGSGLPSDSVHGHKRKGMCRDESDSRSEDVECEESTEETKPWQRNGPKRRTRAAEVHNLSERRYWLLLM

SEQ ID NO: 44377 - protein, 17 aa, Zea mays
  Coding DNA Sequence Number=SeqID_1002
GIQGIGHLLYAHSTVKT

SEQ ID NO: 44378 - protein, 106 aa, Zea mays
  Coding DNA Sequence Number=SeqID_1003
MDTGLLKMDRDDLVLGAGERWLGARHGGGDLGTRRGSYVLTTDFFAFSIFFEKYLRFRPLDEVFLDLDSKLDVMGFGAELTRLGSSCLSVELADMASIVAPSSAPS

SEQ ID NO: 44379 - protein, 23 aa, Zea mays
  Coding DNA Sequence Number=SeqID_1004
MAPVHGCALQEVVSIFRYARYYS

SEQ ID NO: 44380 - protein, 490 aa, Zea mays
  Coding DNA Sequence Number=SeqID_1005
  Gene Ontology: Mol. function=protein binding; Biological process =polarity specification of adaxial/abaxial axis
  Homolog annotation: Hit_ID=A2CIR7; Match level="QueryCoverage=99%, HitCoverage=99%, E-value=0.0, Identity=75%"; Hit description=Ankyrin- repeat protein
  Pfam annotation: Domain name=Ank; Domain location=295-328; Score =19.1; E_value=0.017; Accession=PF00023.21; Description=Ankyrin repeat
  Pfam annotation: Domain name=Ank; Domain location=330-362; Score =36.3; E_value=1.1e-07; Accession=PF00023.21; Description=Ankyrin repeat
  Pfam annotation: Domain name=BTB; Domain location=13-162; Score=34.3; E_value=4.4e-07; Accession=PF00651.22; Description=BTBPOZ domain
  Pfam module annotation: Pfam domain module=Ank::Ank::BTB; Domain location=295-328::330-362::13-162
MEDTLKSLSMDYLNLLINGQAFSDVTFNVEGRLVHAHRCILAARSLFFRKFFCGAEQAAAGPGALLLDHLSPRSPSGTSSPRGASAAAPGAAVIPVNSVSYEVFLLLLQFLYSGQVSLVPQKGEPRPGCGERACWHTHCAAAVDLALDTLAAARSFGVEELALLTQKQLAGMVEKASIEDVMKVLMASRKQDLHQLWTTCSHLVAKSGLPPEVLAKHLPMDVVSKIDELRLKSSLSRRSPFLAHHHHPAPGGGMEASSAADIDDHHKIRRMRRALDSSDVELVKLMVMGEGLNLDEALALHYAVENCSREVVKALLELGAADVNHTAGPAGKTPLHVAAEMVCPDMVAVLLDHHADPNVRTVEGVTPLDILRTLTSDLLFKGAVPGLAHIEPNKLRLCLELVQSAAMVMSREDAHTAVNAAPMYGEPSGGGGCGVYSASGTSSTSLVNLNLDNRMVYLNLGMDAQFGKMGDGDDGGGRGPSSLFSPHGYH

SEQ ID NO: 44381 - protein, 146 aa, Zea mays
  Coding DNA Sequence Number=SeqID_1006
  Subcellular localization annotation: CTP_CleavageSite=37; ConfidenceScore=5.20e-01
MEYTIRHQWGSSSTLGVDSTFGGIRPGLGRQHGRRISTSKEPVGTTPGPSPLGNPTPALVRPVDSPSQAPGQRSFFWSQPCPLFHADTRCLRLRLIAERPRVSLTKQEKPRATRPTEPRDSYASRIRIPHSSHSARDDSHLVKRFG

SEQ ID NO: 44382 - protein, 386 aa, Zea mays
  Coding DNA Sequence Number=SeqID_1007
  Homolog annotation: Hit_ID=Q7XDY7; Match level="QueryCoverage=100%, HitCoverage=100%, E-value=9e-51, Identity=35%"; Hit description =Expressed protein
  Pfam annotation: Domain name=WRC; Domain location=166-211; Score =58.1; E_value=3e-14; Accession=PF08879.1; Description=WRC
  Subcellular localization annotation: CTP_CleavageSite=39; ConfidenceScore=5.04e-01
MRIRKSASRLLGSAYSASAAPTVDAAPRLDLLPPPHPAPCSAPESCGGSAFSSPSVSTAEPCELSRSPWDLIADLSLSDKKVEDELVDKYFVHVTTRASWLFSSTVSATTSTKKKKKLPAAVYEDSTQLRREAAKKTATNREEGETKKKAKVKKEEVQQDGAAAAAAQVWKCKKNDGRRWHCNRPVSQPNTLCEYHFVQKRSYLNPGFEFHSTAELEGAAPAPAPVHAASSKLSTSNKPRKKKKPGNDFSATEGFYYYAGFGPFRTKRQCRSGGTNEPLPAKQEEEEETPEYASHHTEEEEKEAKVAGFTNQAASQDDVSSCDDDIAGIAGVDEESSDGDYDGIGLGGCNVDGAADPQASIGEVRRKAPWKRWRKPVKARSLKSLM

SEQ ID NO: 44383 - protein, 135 aa, Zea mays
  Coding DNA Sequence Number=SeqID_1008
  Homolog annotation: Hit_ID=Q75GP7; Match level="QueryCoverage=43%, HitCoverage=6%, E-value=3e-08, Identity=47%"; Hit description =Putative transposase
MTNAGALPVGTTIAADNNDADHRDYIIVDDLFDDDAGDRGGDHDVAATLLELEDTELFENIANCLDEDDVLFCLETRDTGFNELLDVLAKAFPEGNKVKVNTYRAKKLIRPVAMKLKKFDVCPNQCILYLASTRD

SEQ ID NO: 44384 - protein, 110 aa, Zea mays
  Coding DNA Sequence Number=SeqID_1009
MAAKCSEKLEITFSSVGARSRERNFVDADIVRAMKWIDGEVVDFQENIRRSSVKSSNWGKKFLIDIWKIKGKEITLEESKKNRKKVQRVAQKAAAIGEALQSKETEASPS

SEQ ID NO: 44385 - protein, 100 aa, Zea mays
  Coding DNA Sequence Number=SeqID_1010
MAMMGSTSEKMYLCQDLVDVGLLIEDLLTGHMPHHGSRRRPPPPVLVARVAPTTSDADPHTDVTGVTSRTSLTTLPELYCRRGFCAMSVTHANSRPRTLL

SEQ ID NO: 44386 - protein, 172 aa, Zea mays
  Coding DNA Sequence Number=SeqID_1011
MATCIGIPPDNSLRLIFFLTVVRRIELTFGAMDVLMIRYLRDDQQGLGKGQGVEEEQDKPSWRGHSCLTGDNQRSRGVVIARNRSLGALDHQRRDLHSIKLSHLTEDRATSTINWYQISRLPMSAGPKNQMDKDKGPKLNDDECVSQLELKEMMRAMTEAFKKIPGLCGDIL

SEQ ID NO: 44387 - protein, 51 aa, Zea mays
  Coding DNA Sequence Number=SeqID_1012
MVKNFSSRTVQIAMNAVVTSHLLVCLYSTAAFENKSPTGVMTGKDEMELKF

SEQ ID NO: 44388 - protein, 214 aa, Zea mays
  Coding DNA Sequence Number=SeqID_1013
MTVSVQLSYQPKSAACGLSSLNETQPLIRPSTHAQSLGIVKQKLEPVWMSSAQPLITYKYIVILYMRKYMYCMVDYIRTCPLILLEWEPDHLGQQMPSRTRAHDGAGTSRGREDTPNPLPVPPTLPEAIAALVNATAENTRFLREMVHSTLVNCVSELTLGAMDVLMIRNLGEDQQGFGKGLGIEEEQQGRPQQEGDHVRLGCGSISGSRTNLH

SEQ ID NO: 44389 - protein, 329 aa, Zea mays
  Coding DNA Sequence Number=SeqID_1014
  Gene Ontology: Mol. function=extracellular-glutamate-gated ion channel activity; Cellular component=integral to membrane; Biological process=G-protein coupled receptor protein signaling pathway
  Homolog annotation: Hit_ID=Q6ZGL7; Match level="QueryCoverage=89%, HitCoverage=31%, E-value=1e-117, Identity=72%"; Hit description =Putative glutamate receptor
  Pfam annotation: Domain name=Lig_chan; Domain location=17-257; Score =216.1; E_value=8.1e-62; Accession=PF00060.17; Description=Ligand -gated ion channel
  Pfam annotation: Domain name=SBP_bac_3; Domain location=3-215; Score=- 73.1; E_value=0.0038; Accession=PF00497.11; Description=Bacterial extracellular solute-binding proteins, family 3
  Pfam module annotation: Pfam domain module=Lig_chan::SBP_bac_3; Domain location=17-257::3-215
MEHLAMNKELKSCNLDWLKKICLHYHNVFHVILWFSFSTLFFAHRENTMSTLGRGVLLIWLFVVLIIQSSYTASLTSILTVQQLDTSIRGLDDLKNSDYPIGFQVGSFVEEYMIKELNISQSRLKALGSPEEYAENLKLGPKKGGVMAIVDERPYVELFLSTYCKIAVAGSDFTSGGWGFAFPRDSPLQIDLSTAILTLSENGELQRIHDKWLKTGDCSTDNAEFVDSNQLRLESFMGLFLICGAACVLALLIYLGITIRQYLRHEQPGPAISVDAGSSTSKRSLRKFISFADDKQPPPKKKRAMSLSRSSMPTMPMSNRPGADIDVES

SEQ ID NO: 44390 - protein, 308 aa, Zea mays
  Coding DNA Sequence Number=SeqID_1015
  Subcellular localization annotation: CTP_CleavageSite=31; ConfidenceScore=5.55e-01
MKLWKETFRSSKTTTSSRRGLAATPSRLPVKAAMARLRHTARKSVIPFLPSRLAERPLRRHVAGQSSHLERLHHRLHEEQERRRQEQQGSSFSLQQEIESVRSCSPVLPLEAPPAPPLGAPASGVAAGGDPDDGGGDDSSSHDTDLSADQEPEGWVARPITRDAARGCHFHDALDTLLRRALNRRTWSIEYRCVVYQHSCGVYPDRWEATCLLRQPCKMLHGVRFALLLGSRWVNLAAVLNTELDHALDELSRARAEIALLQAERAERRHLDDGSPAPVGTQHPYRSPRRGRQPYGNPDCKTKINLEP

SEQ ID NO: 44391 - protein, 149 aa, Zea mays
  Coding DNA Sequence Number=SeqID_1016
  Subcellular localization annotation: CTP_CleavageSite=86; ConfidenceScore=5.28e-01
MQAACNRAKWARPFDFNEPSMEVQAHASCNRSSQVRRSNAVKVGPAVMAVTGGQKQRSRRQPSSRPIQGQRESPLSRREDGAPVIRSSNGSRTRNGHPANHSPRRINSAAGHAASDRLGSAPTTGQRFDGRPLEGFNGCLRPLGLRAHY

SEQ ID NO: 44392 - protein, 322 aa, Zea mays
  Coding DNA Sequence Number=SeqID_1017
  Subcellular localization annotation: CTP_CleavageSite=42; ConfidenceScore=5.30e-01
MAQLRAMSIYSASGRWSRISSKTRGGRKERRTLAQRLGVYCRGSYSGEPQRARVSRGGAMESESHATHGREAAITGVLIDFYRGDTVRWPEFFNGWSLPTAAYTGVTHLPREQCGPAVARITAAIGRRRLGLGLSPGRGRTLLRLTQGSDSGSDPEDGELRSARPRARTRAQPRKTANSAPPDPGLGHGLNPGRRRTPPRLTPGLRLGLSPRRRRTPLRPTQGSDLGSAPGDDGLRFARPQGSDSALASADDLRLARPRGSDSTTATEDRLDLDLGGASTSPNLGHGPTTSAGGAIITLPRADSGYVEQDRRPIWLTPPDRQ

SEQ ID NO: 44393 - protein, 103 aa, Zea mays
  Coding DNA Sequence Number=SeqID_1018
MAQSKLEEVVTSRREILAPPVTVLAPRGSGWKNPLTDQTHTSVRVRAWVSEAHQTVTDGVERGKVGCAGELLGPHREEVRVLVGRELFPNLSLSHKWEYKVQQ

SEQ ID NO: 44394 - protein, 263 aa, Zea mays
  Coding DNA Sequence Number=SeqID_1019
  Gene Ontology: Mol. function=transferase activity, transferring pentosyl groups; Cellular component=imidazoleglycerol-phosphate synthase complex; Biological process=histidine biosynthetic process
  Homolog annotation: Hit_ID=Q10NW0; Match level="QueryCoverage=73%, HitCoverage=33%, E-value=5e-78, Identity=77%"; Hit description =Imidazole glycerol phosphate synthase hisHF, chloroplast, putative, expressed
  Pfam annotation: Domain name=GATase; Domain location=46-232; Score =80.0; E_value=7.9e-21; Accession=PF00117.19; Description=Glutamine amidotransferase class-I
  Pfam annotation: Domain name=GATase_3; Domain location=74-191; Score=- 21.0; E_value=5.2e-05; Accession=PF07685.5; Description=CobBCobQ-like glutamine amidotransfe
  Pfam annotation: Domain name=SNO; Domain location=53-202; Score= -63.5; E_value=0.034; Accession=PF01174.10; Description=SNO glutamine amidotransferase family
  Pfam module annotation: Pfam domain module=GATase::GATase_3::SNO; Domain location=46-232::74-191::53-202
  Subcellular localization annotation: CTP_CleavageSite=37; ConfidenceScore=5.69e-01
MANVAAILTVPCSAGRRPKRSSQPRGCGSVSVSVSVRASSGANTVTLLDYGAGNVRSVRNAIRYLGFDIRDVQSPEDIVAAERLVFPGVGAFGSAMDVLNRTGMANALREYIQRDRPFLGICLGLQLLFDSSEENGPVSGLGVIPGVVRRFDSSNGLIVPHIGWNALQITKDTPLLQGADGQHVYFVHSYRVLPMLIETGFPPYATMVTALYPPSQWATFRQFNFTQKRVEINNAPSERRESSDPVLSSSNQKPELKPSPTKP

SEQ ID NO: 44395 - protein, 351 aa, Zea mays
  Coding DNA Sequence Number=SeqID_1020
  Gene Ontology: Cellular component=intracellular; Biological process =signal transduction
  Homolog annotation: Hit_ID=Q10Q51; Match level="QueryCoverage=85%, HitCoverage=38%, E-value=1e-85, Identity=55%"; Hit description =RhoGAP domain containing protein, expressed
MKAAALNSSYGKRLYKRGNSIGTLALSFSSPELVLSYNLNETLYLQARKGLPTEEDGCSSDNDKAHITKLENKKTHLQSKLTEEEKENTVLQANLEKRKEALHKRRVALEKEVENLRDQLLKERSLRASLESGLMNMRRGQVSFPSTIDTKTKADLEEVAAVEADIMNLKQKVSDLRGQLNNQVQLSSTSLCESCNNKRSINADKLVEGEQNAALSPQIASVEAPPIVGSYSVPDMFWATNQMVQKMLYSKGEIAKDGQDGSLTSRWNFAQRPHSNSPVMSRVQGSDAYSSTKTEESGGAPSSALAKLTTRLNFLKERRALLASEMQNLDLGRSQAQRHTAPPKAETPTEK

SEQ ID NO: 44396 - protein, 337 aa, Zea mays
  Coding DNA Sequence Number=SeqID_1021
MGSARVAFVLLLEERNLTEDDDHQFDGGEKQAGLRPLLRPQLQGSSSSELGRGAGQVGACLHARAAAIRWRSTDAQVPAVVDAEVVVARGGFSADETVGTTHGQTSGPLALIACPRPSSGDVGEGLVTAAFALRSSLLLFSRPEQRSLSLLVKWSTASHLEFVVPQALRCGGCSYPREWNRSSVCNGTMNVGNLRSLCDELEPEVAASAWTEAESTRKEVSSARELVASLAEEAEVLGGQLAEATGQPTEDLFVGSRIAYPSESYFSRKVMSEDSVIDIVEKAQKSFSQKSFRVIPLSKLSKSAKDVLAERLFPRKILTHSSPEGGSGFAEATLTLP

SEQ ID NO: 44397 - protein, 117 aa, Zea mays
  Coding DNA Sequence Number=SeqID_1022
MDRRSAEGYRSCHSVVAKNLSILVMVGLACSFDQVPILAVKEHLVNAGVEFCFSDVATAIRSVGGSWQCIGPCRELQFGALKSHPNGDPQYASGWSVSLTAKDVHKYLVCKDVIQGT

SEQ ID NO: 44398 - protein, 82 aa, Zea mays
  Coding DNA Sequence Number=SeqID_1023
MSGAPEDSTFKVVTFGKFQRRLRYNSPDCPRGNGYFGANGYLRRIKCARCARRGQARPCWNFVFQVIEKRKLTRSEGPFERG

SEQ ID NO: 44399 - protein, 158 aa, Zea mays
  Coding DNA Sequence Number=SeqID_1024
  Homolog annotation: Hit_ID=Q6QP51; Match level="QueryCoverage=74%, HitCoverage=57%, E-value=1e-25, Identity=54%"; Hit description =Putative growth-regulating factor 1
  Subcellular localization annotation: CTP_CleavageSite=44; ConfidenceScore=5.12e-01
MMTASKKVAPCRVRRPPQSTQAPSPLLIKGSKAGPPEGFDSRPRACRVRDNPGYVRYMAKARATLPSLGRNRELRLARPQASASASASGEGLRLARPQASASASTSGEGLRLARPQASASGGVTTSLDLSLCLRRSHRLARPRPRTDCATGDTSLPYL

SEQ ID NO: 44400 - protein, 140 aa, Zea mays
  Coding DNA Sequence Number=SeqID_1025
MQDWRKWRCGFFARGNRPPDGVHRCCLLLSAVGGAQPRGGWRSLVIARLQGFSSCSPAAVPHQWSSRMMTISLVAEKSEPAYGLPPALSFKDVHHPCWGRGQAELGSCLPHGLATRFFLQHSGEKGVHQPCGGGELPPAA

SEQ ID NO: 44401 - protein, 101 aa, Zea mays
  Coding DNA Sequence Number=SeqID_1026
  Homolog annotation: Hit_ID=A3CJ03; Match level="QueryCoverage=89%, HitCoverage=31%, E-value=1e-07, Identity=35%"; Hit description =Putative uncharacterized protein
MDIISFRLDALAEVHDGKIALDNGAMFGFEDESVCLPIPKEMAFNGELGGASGDDAVAAAHDNVDKVAGEGVVEPGTDDAVHPHPVERVEGEDGQEGDMVC

SEQ ID NO: 44402 - protein, 156 aa, Zea mays
  Coding DNA Sequence Number=SeqID_1027
MASASVGGIGGGFGVASLPREAADVASQFIDSVVIHDPNVNPALEFCLKLIYFCFKINDQIITPTTAILVPWGKLMTWYPNWAKKGFAPILAMIEPPKSLGPPTVVLVQRTSDNPVGAPELLDKFGICFSYLSQERFTHHADITDHRRYENAEAIT

SEQ ID NO: 44403 - protein, 141 aa, Zea mays
  Coding DNA Sequence Number=SeqID_1028
  Subcellular localization annotation: CTP_CleavageSite=96; ConfidenceScore=5.06e-01
MTWIVLSLYEGKETSAGPRAAPSATLLQGSSTSPLATLARSYTPICTAGSPPCIYKRRCLGPSHGTLRGRRRRTRSNIKLLFATLDFSSDLGPVPSLAKLVTPTTSTPVQDNISLIPLLCFILHQSIWAGTRGTKFTSRFG

SEQ ID NO: 44404 - protein, 88 aa, Zea mays
  Coding DNA Sequence Number=SeqID_1029
  Gene Ontology: Mol. function=oxidoreductase activity; Biological process=electron transport
  Homolog annotation: Hit_ID=Q10BT2; Match level="QueryCoverage=51%, HitCoverage=13%, E-value=5e-13, Identity=76%"; Hit description=Cell death suppressor protein Lls1, putative, expressed
  Subcellular localization annotation: CTP_CleavageSite=63; ConfidenceScore=5.18e-01
MNINCCILTKIGMSCNAALKAMKALEAALQVASVVVVGFLAVAKGTVLTSTVQRVTIVSAVVLCFAASRWLANFIQNFYFQDYIHVYK

SEQ ID NO: 44405 - protein, 194 aa, Zea mays
  Coding DNA Sequence Number=SeqID_1030
  Homolog annotation: Hit_ID=Q6J9V9; Match level="QueryCoverage=33%, HitCoverage=33%, E-value=8e-08, Identity=45%"; Hit description =Putative uncharacterized protein
  Subcellular localization annotation: CTP_CleavageSite=28; ConfidenceScore=5.08e-01
MQSACNRAKWARPFDSNAPSMEAQAHTSCNRRAGCYVRATAPPLAPLLRLLDCGTSTATRGNPAYDPAVPARRDGQYGQKWAGINGGGRRAGAAVTSRSKRRFTFAIMTASKKGPGKGDTPKRILLREGNRPRASLLIRGSKAGPSEGFNGRLRALGFCAHYWSEVRWPAPRKGSTAASGHSGSALTTDQGFVG

SEQ ID NO: 44406 - protein, 196 aa, Zea mays
  Coding DNA Sequence Number=SeqID_1031
MAARIGCKVGQYNRGGPRLRELSRRRKTNYVTTNLRRVKKKRESNWQHRDSVEGEESRPWNTAPAKHRDGSEYEGGGAGQRKATDWEGKENTRLGAMAAGAEGGGVAGPSQGEQKFRWARPRISPVFACARWRWVPQMVAEQRGRRGGRGGSAWGGGWGSSEPSRSRRGMTCGRDWRSGLPASAGLAGAGGNAEIA

SEQ ID NO: 44407 - protein, 15 aa, Zea mays
  Coding DNA Sequence Number=SeqID_1032
MALSVDVVDLKALTL

SEQ ID NO: 44408 - protein, 606 aa, Zea mays
  Coding DNA Sequence Number=SeqID_1033
  Homolog annotation: Hit_ID=A2X1H0; Match level="QueryCoverage=9%, HitCoverage=8%, E-value=3e-12, Identity=61%"; Hit description =Putative uncharacterized protein
  Subcellular localization annotation: CTP_CleavageSite=37; ConfidenceScore=5.25e-01
MTTKRLSPKRLAPAPSAATTTRTNSTILDPHPRSIAVVGMESAMQQILEALGQMEERLMTTLGSRCDAIEHRSTTTVENLRGRRGPTTTSSVAAPRYDDDAFGSSATSAYDDEFGSSATSVYDDVFTTVARFAAPSPCHDDDLLGAFGIFIPDREALNGKATAHNRFDTAPRMESESESEFLTSLAAQASSAEEAMVTAADAGSPARLNPRYPCLPEGAVLFHRDPDEKVIIDGTELSGEVHRLCFSLSSPDQAMNPATRSQRRSAGPCSSSSWKRGTCDCVRTCVGVDVPVAHSELKVFDQMLSPCFDGEPIFVEDPNYSIPDFVNISCHDNDSVQGLQLERLDLAGRASDLGTLAVLPGLHTLRISDNVRSGAFSNISTLAVLNMSAEVMGLSESGNGGNEHPQEQGDTSVGVVRDVFNPCLSESGFDKHLTRAIFIDLDSTNVGTGFGLWSSGANNKNTSMVEQMPSAVEALAKANVDQDSMHNEGHSTLHYVVVYEIEYIAVAEVFVKHHVNLQIKDKVLNSLPNIQPWPPPMLLVILADGVQVRPLPWPSFYCHAGGVYYGDVCIIPVLVHGTNPARLKAQTISIPMEFECLDYAWPPANW

SEQ ID NO: 44409 - protein, 23 aa, Zea mays
  Coding DNA Sequence Number=SeqID_1034
MGKRGSEGDAGDFDGDFIDDDEY

SEQ ID NO: 44410 - protein, 159 aa, Zea mays
  Coding DNA Sequence Number=SeqID_1035
MEEREKDGGWDLEEEKQDVSLGLLLACMKGERGKRVGMDNADKQYISRFQQQQQSLSPKQVGLSSISTKLSKKAYTKGYPIATPSIAKAKSLLVRLAVRSPGVSGGGSTGPDLSDPPAGQSASQSGSQTGRQSADLSGGGSTALGGGSTGFLQGFWSNG

SEQ ID NO: 44411 - protein, 146 aa, Zea mays
  Coding DNA Sequence Number=SeqID_1036
MMRSKEVVRQVRGKVFLPRLVRGRSTPRRILGRRVRGRLARIPVIRRRDKLLTIIKISFFFFFVDVVCCHKRHPVCLLVPLVDLRRRRMERKMPQTRGPSGHPSLGHDLDHDHVAWEIRGQGRDARHRQQQQQDQQMDPQMYEHES

SEQ ID NO: 44412 - protein, 217 aa, Zea mays
  Coding DNA Sequence Number=SeqID_1037
  Gene Ontology: Mol. function=RNA binding; Cellular component =spliceosome; Biological process=nuclear mRNA splicing, via spliceosome
  Homolog annotation: Hit_ID=A2Y8C3; Match level="QueryCoverage=33%, HitCoverage=39%, E-value=7e-25, Identity=78%"; Hit description =Putative uncharacterized protein
  Pfam annotation: Domain name=Cwf_Cwc_15; Domain location=1-172; Score= -18.2; E_value=4.8e-06; Accession=PF04889.3; Description=Cwf15Cwc15 cell cycle control protein
MSKPDKTFPLLILPVLPSLHNPGVGPLFEEIELQQNLAFEGHPVADRDGNFTRGFGRLPAQPQAAAGRQKGQTAEPSALRPASLPSRSGCRGAGEPKRQQAEEEAKMKEAELMRGNPLININNVGSFSVKRRWDDDVVFKNQARGETKTLKRFINDAIRSDFHRKFLQRNLTGILPTLKRMRVELLNLGDFNSLKYLITRVLRGLLLLLLLDQAAEK

SEQ ID NO: 44413 - protein, 392 aa, Zea mays
  Coding DNA Sequence Number=SeqID_1038
MAVRQEPCIGASYKLQQGLILSKALRAQKEADDKSCQIALGNLRSEEKQEISEWTSSRLEKNVEELRDSRERCYEKSLNCAKKLKDSFAKLTSLPPSEPYNLEADPVMKEALDVMQICRRFETGGSLSRRGDVGVPPKPRLSLPSVAVAEPEPEPRGRARRKSFGRGQGGVRALGSGEAEFRRLPGVSPSPSPGVGRSGGRSAEARAESEPWGRAKRSFVVFRVLARVRALGSGGAEFAVFRVLARVRALGSGGAEFAVFRVLARVRALGSGGAEFAVFRVLARVRALGSGGAEFAVFRVLARVRALGSGGAEFAVFRVLARVRALGSGGAEFAVFRVLARVRALGSGGAEFAVAPLARPDCLSDSLCRVALQSEWRRRRCPSVRLASGAVE

SEQ ID NO: 44414 - protein, 279 aa, Zea mays
  Coding DNA Sequence Number=SeqID_1039
MWQPERSGHPAGVMSWLSEGDVGVPPKPRLSLPSVAVAEPEPRGRARRKSFGRGQGGVRALGSGEAEFRRLPGVSPSPSPGVGRSGGRSAEARAESEPWGRAKRSFVVFRVLARVRALGSGGAEFAVFRVLARVRALGSGGAEFAVFRVLARVRALGSGGAEFAVFRVLARVRALGSGGAEFAVFRVLARVRALGSGGAEFAVFRVLARVRALGSGGAEFAVFRVLARVRALGSGGAEFAVAPLARPDCLSDSLCRVALQSEWRRRRCPSVRLASGAVE

SEQ ID NO: 44415 - protein, 65 aa, Zea mays
  Coding DNA Sequence Number=SeqID_1040
MEQRLPAQRLTSTVTAKRYRSSQPTSIGGDFGGLYYIKYKGAGFDLHFLEEVAKKGSDGEDIVDV

SEQ ID NO: 44416 - protein, 166 aa, Zea mays
  Coding DNA Sequence Number=SeqID_1041
  Gene Ontology: Mol. function=sequence-specific DNA binding; Cellular component=nucleus; Biological process=response to brassinosteroid stimulus
  Homolog annotation: Hit_ID=Q2RB28; Match level="QueryCoverage=37%, HitCoverage=60%, E-value=4e-21, Identity=73%"; Hit description=ZF-HD protein dimerisation region containing protein, expressed
  Pfam annotation: Domain name=ZF-HD_dimer; Domain location=27-86; Score=105.6; E_value=1.5e-28; Accession=PF04770.3; Description=ZF-HD protein dimerisation region
MKRMVIVRRCHPPPPPPVLLFGGCPSAGGVRYGECRRNHAASMGGHAVDGCREFLAEGEEGTAAVLHCAACGCHRSFHRRMVQRSCCFCCDSADVAVAAAAAAAAAAERWDDDCSPESSASSSTPSELYARSQLPLEAILEVQISQKYKGEVLVFISWKKVDKKVA

SEQ ID NO: 44417 - protein, 101 aa, Zea mays
  Coding DNA Sequence Number=SeqID_1042
MRRGARLGDQLQTAYQEKAALEEEIETLKGSATAEGKGVEEGCDSVAARAGTPKDHGVVPPALYYYASDGMVLSLIDPFAKANAEESGVDLGTKDYVHMRI

SEQ ID NO: 44418 - protein, 181 aa, Zea mays
  Coding DNA Sequence Number=SeqID_1043
MPRARQCRTPAWRQPSRSLSTFSLCSRSALGCSNGDVSIVLADGQLEEVIGINTQGQGRDGCNGPGFSSVHSGNRTTGARAFCCAPAQEEGADEMAPSAATLRPSPSDRQMGPHAFAALVTVEARPGDDKADIPSGPPQRNLARAQPFTSVVSKGLANPGDMGYTTCGYRVQPLQSVKLVY

SEQ ID NO: 44419 - protein, 80 aa, Zea mays
  Coding DNA Sequence Number=SeqID_1044
MVSHSGYGGYKCGQCTTAVGVSEALYAKAMTSHGCSDEGNAHSHTDGLAQEGFPRILWEVLQGAGYTTPPQYAVELFEKH

SEQ ID NO: 44420 - protein, 121 aa, Zea mays
  Coding DNA Sequence Number=SeqID_1045
  Subcellular localization annotation: CTP_CleavageSite=46; ConfidenceScore=5.53e-01
MINLNHNNFSKNLVKIFTNTLKTQLVLLANQPLSQTASWSRGRGVVSSHRVRYRIWFVGAFLFRRKLRLWDEGSLSGESMCDMEHLRTRTNMVDGVTWPSTLPPGWTVEWDAALTGEGQEE

SEQ ID NO: 44421 - protein, 183 aa, Zea mays
  Coding DNA Sequence Number=SeqID_1046
MARTRKTARNSTGPFGVPRHQLASRHEGSSSGSNNPIGDLEARVEQLRSELRHRNKAHEQDSYRIAELSAEVSRLQYEISERDTTIDWAINSPSFAWDCEAKALARVAELSASLESLQMPSWTRAHDGAETSRGREDTPNPPPVPSTFAEAIAALVNATTDNTRFLREMAGNQFQQHGGRAPP

SEQ ID NO: 44422 - protein, 64 aa, Zea mays
  Coding DNA Sequence Number=SeqID_1047
METGSLHPNVPPEVAAMGAGTSGAAGGGPYGELDLFGAPPSMNIADERSPEAGSGAGAAKDEDN

SEQ ID NO: 44423 - protein, 25 aa, Zea mays
  Coding DNA Sequence Number=SeqID_1048
MAPPATERAAAVGVGAVVPSLLKFL

SEQ ID NO: 44424 - protein, 54 aa, Zea mays
  Coding DNA Sequence Number=SeqID_1049
MGLQVHAIYTPKAKSEPEKGDEDTHNSFLLHSPGLFVKSIIIRIFEAESIHHSI

SEQ ID NO: 44425 - protein, 104 aa, Zea mays
  Coding DNA Sequence Number=SeqID_1050
  Subcellular localization annotation: CTP_CleavageSite=43; ConfidenceScore=5.43e-01
MDQRACPPRSLATSPAHAPQFPFELRSHPHSLPCLISRKLTLSRALLSPLGLARVPRPPCWTSNPPEAAQSDPELRPESSAAAVRRARSVTGRISPVWCPCIGP

SEQ ID NO: 44426 - protein, 40 aa, Zea mays
  Coding DNA Sequence Number=SeqID_1051
MGISSPRAERELRLVGKVKKKEKDVKVDLHEFQDFDEFED

SEQ ID NO: 44427 - protein, 496 aa, Zea mays
  Coding DNA Sequence Number=SeqID_1052
  Gene Ontology: Mol. function=kinase activity; Cellular component =ornithine carbamoyltransferase complex; Biological process=amino acid metabolic process
  Homolog annotation: Hit_ID=Q6QP54; Match level="QueryCoverage=9%, HitCoverage=17%, E-value=2e-12, Identity=81%"; Hit description =Putative kinase
  Pfam annotation: Domain name=zf-CCHC; Domain location=121-138; Score =25.1; E_value=0.00024; Accession=PF00098.14; Description=Zinc knuckle
MEDLSNMTPTIVIGKIAAFEMSRKMCRGEEPTPSRPYAFACDERKGKKKASTPSSSSEEEEEEESDDDEDNQPCTSSSEDEETIRRVGKVMGMIRKINLMGVPLQVEDILFNIDRKKQRKRGCFACGKKGHFRDNCPTMAKPKKERSKGKALTSVRTWDDSSSEDEPPRTCSHRSSSRSSRSSHKCLMARGNKSIPSSSDENSSDDEGEGKPSVDELAEAVEFFQDGNDGASCDVLGLSPGLGEVEAPPRSRSSLSSKAEVESEPLGRAKRRLSAEARAESEPWGRAKRSSSSSGAEPESEPWGRAERSSPSSGAEPESEPWGRAERSSPSSRAEPESEPWGRAERSSPSSRAEPESEPWGRAERSSPSSGAEPESEPWGRAKRSFLWHLRPDLADVSITLSSGTTVGAAQAALSSCQAGHPCIKCPCDSVGLAWRLGPRLLLGEDWVSGEPKLCADGGYQLRFRSLEARVHGRVPSSQAGMLTLSTVWPEPGEST

SEQ ID NO: 44428 - protein, 570 aa, Zea mays
  Coding DNA Sequence Number=SeqID_1053
  Pfam annotation: Domain name=HR1; Domain location=213-283; Score=6.0; E_value=0.058; Accession=PF02185.7; Description=Hr1 repeat
  Subcellular localization annotation: CTP_CleavageSite=31; ConfidenceScore=5.27e-01
MDKDRQGAAQKRQAVVRLHEARPKRSRGTAKAAAPGGSQPTLAAKSATPGSSRVPEAVKAAAAGGTKSVPAGAAKARELPPPGKRVADFATDISVDDYLVGSGEGQLVVVPPAVATAAAVVVPRAKGSALGAGGEILALTAVRDEAGAVSRRLKKALSQAADFADRAASGALTAVVSAEVERLRAQHADAVREKSAADSKCRKLADKVAALEGERTDLRRQLAKERKEANESLAKAQSTQAEANLAQAKGSLARQRAEELEERLNALQARVERAEASTRSEAERTRKQLMDSYHELGARTADFEVPDREPGLRCLEWLQEELLALPAIVEGFMSYASLVTCLGAMNALSREGCRHYEVFDQADEDFEREIYKVEGPVVKESAGALFDRMWGPHGREVVRERSETARGQAARNEKVEDFGALNSVQPDSESNPVAAVTEAAPAPPPETVEGAPEAPAATAAGSGSSPTTAPRAEDPVKMAAEPAAEDPATAGSSQVQDFGPAHATATANFLAASTVDDGNESDESVSKFSDFGDSGTLVEWTEESSDEDLDYFAALDVAAAEASPRAVDAE

SEQ ID NO: 44429 - protein, 144 aa, Zea mays
  Coding DNA Sequence Number=SeqID_1054
MAPAANGHLRDQRVTRGRANGHLVAPDCPVCTGQCPVRQGDRRSNGRLRRKRKEIGHRTSHPTVRNFKSAATYSKGFFIPLRSSLRVESIGKIVFRHEMPNLEAILVKDAKHDWKSVGRPILGFLKPSTNPPHSTLPLEEANQG

SEQ ID NO: 44430 - protein, 279 aa, Zea mays
  Coding DNA Sequence Number=SeqID_1055
MCCVANKNDSGSTNEDEEEERNFVHLYARLSQEDKAVMLKLLERAREQSEARQRLEDILSIKMQHLDELTKEHEELKCSHVDLVQSKSSFELEFAGTNDDSYQKLKEENERLKKSLTQLKGKCIAQPSQDNCDHMVKKLETGTTVACTTSLEENVKDLRIAMRREQNMKFNTSSKSLNHASTKGNIQEGKVHKPHGLIFTQKKKGKRRIHDSFMQLVIRLIYANNNLKKITSCRTLSCAKYFHILSLSIGLKHLRLRTKHNEESVSMRRYKRVKSLPFI

SEQ ID NO: 44431 - protein, 152 aa, Zea mays
  Coding DNA Sequence Number=SeqID_1056
MALNRVDLPTLGRPMIPARRLMLIRGPRLDENRRARQARPQRQCWSNADEPHREYRVTVTGPTGQPLRHPPRIRRPVVPSPPSLPRRLFTAVSSPHRKVWHRFVLLPLTSVLAKLTDGNPAAKLRHLPADSPLPTSSDQIEATSRSAIPSPC

SEQ ID NO: 44432 - protein, 135 aa, Zea mays
  Coding DNA Sequence Number=SeqID_1057
  Gene Ontology: Mol. function=carboxyl- or carbamoyltransferase activity; Cellular component=ornithine carbamoyltransferase complex; Biological process=amino acid metabolic process
  Homolog annotation: Hit_ID=Q8SA97; Match level="QueryCoverage=99%, HitCoverage=21%, E-value=1e-20, Identity=50%"; Hit description =Ornithine carbamoyltransferase
MALPVDVAGLCPRLGDVEAPPKPGLSLSSMVEAESEPLGRARRRSSVTPRPIPGPVPWARTSHPRGQDITSSAEAESEPLGRARRRSSAEAESEPWVGRSGVRRLPGLSPSPSPGSGGVEFAVFRGLARVRALGR

SEQ ID NO: 44433 - protein, 148 aa, Zea mays
  Coding DNA Sequence Number=SeqID_1058
  Homolog annotation: Hit_ID=Q6F390; Match level="QueryCoverage=27%, HitCoverage=16%, E-value=3e-08, Identity=65%"; Hit description =Expressed protein
MAPSSAPRSMAPSLVPRRCHDVRFCQRNTHLGAIAYGAELCYLGVIGYCAEQRDPDGSVPFHWGVDTDGPLAVSDDAELVNHVYGRSSALFPEGKAPKGKQTSRSGSLSLCTRFSPADAWAHDACAASGRLLHDVRRADELRAPMNEG

SEQ ID NO: 44434 - protein, 241 aa, Zea mays
  Coding DNA Sequence Number=SeqID_1059
  Subcellular localization annotation: CTP_CleavageSite=60; ConfidenceScore=5.47e-01
MGASPFFYLWPAASSSPTSLRPSPPWAAYPARPSPPLYFPVRAQRLLHGRRPPAASQAPPLSHGWAAALLAPSHGASTSLRALCPSSSPGRATTQSSGSSFLGRRPEIPAELAPFFFLPGRRFPLLLARQPWRAAPAASSSLALLSDVPATTSLPRRAANSIANLRSKLRAAAAAMRSRPCRQRRPDLRSGAGPPQQHHAAPLICAVRLSPRLASPNLRSADVPSWEPVVRPRCPALFVFD

SEQ ID NO: 44435 - protein, 80 aa, Zea mays
  Coding DNA Sequence Number=SeqID_1060
MELRNREPWRERTQGRRVLSVPAGMELGHGNCSLRLHQGRSDNEQLVVPECVAEDPSEQQPGGDAGNMEDFEEFQDYDEF

SEQ ID NO: 44436 - protein, 74 aa, Zea mays
  Coding DNA Sequence Number=SeqID_1061
MEVPEAAEAVGVSGGMKLSIQRHEKSKKDIEVVGIKGLSCVENQSLQHGGKPKDGNTYVFKCKYLQLPFLLCLV

SEQ ID NO: 44437 - protein, 453 aa, Zea mays
  Coding DNA Sequence Number=SeqID_1062
MQAACNRTKRAHPFDFDASSMETQAHTSCNRRAGYYVRETIPPLAPLPRLLDCGTGAATRGDPAHDPTVPTEHIGHGSVNRGRRRDGRYGQKWAGSNGGGRRAEAAVKSSASSRPLLGQQESPLPRSEDDAPVFRSSNGSRTHNGCPRTTRLVALTLRQDRRHLWQVKQATLHLRHDDRVEKGTGKGDTSKRILLREGSGPRAPLLIRGSKAGPLEGFNSRLRALGLRAHYWSEVRRSAPRKGSTAASGHSGSAPSTDQGFVGWPRRVLTAASEHAERGMTLEDSAACVAPTAVPLERVRLTAAKSGLERHKKLCLARPQGSAPVSASDDELRLARPQGSDSASAPEDDELRLARPQGSNSASAPEDDELRLARPQGSDSASAPEDDELRLARAQGSDLALASDDGLRLARPGARTRPRPRKTDSPRPRRSLRLAQPRARTNHVTGGPSLPYP

SEQ ID NO: 44438 - protein, 127 aa, Zea mays
  Coding DNA Sequence Number=SeqID_1063
MSQLMALVEATKITLDNREELVVDLSTEMVEKDLQVEQMANQIQELEELVGAKENTIEVLEDQLINTQQLEEANQHLDMHHQEIQDMEANEDVDIEGGVEPEPASSLDTAGSGRPPSPESSVASFVH

SEQ ID NO: 44439 - protein, 53 aa, Zea mays
  Coding DNA Sequence Number=SeqID_1064
MGMRVYKTEIGIRIKVWYCSLEDMVAGVTWPSILPPGWTVEWDPTSAEEEHED

SEQ ID NO: 44440 - protein, 89 aa, Zea mays
  Coding DNA Sequence Number=SeqID_1065
MARQRTQAWFACGGGLSLLGNGARRRWIDLELDPQQENGIGESGAEAARYMRRSKSAVQQPHARLGTGVTLTRSTITFSEKQQTSKGEY

SEQ ID NO: 44441 - protein, 289 aa, Zea mays
  Coding DNA Sequence Number=SeqID_1066
MTSHGSSDKGNALSHNDGLAQEGFPRILWEVLQGAGYTTPPQYAVQQFEKHRVPRCRVRMTLEPHPLQPGWRSLDSESFGYRAEDTIEAIALHGLTTFCGFHPLELSTHPIGLFPAEKEDDPMWKDRVEHAKDIWAIYPGQTAHLTVRCMNALYRLQVMRGEAMSHLMALLEATKITLDNREELVVDLSTEMVEKDLQVEQLLNEIQELEELVGTRENTIEVLEDQLINTQQQLAEANEHLDMHHQEIQDMEANEDVDIEAGEKPASSLDTAGSGRPPSPESSVASFAH

SEQ ID NO: 44442 - protein, 124 aa, Zea mays
  Coding DNA Sequence Number=SeqID_1067
  Subcellular localization annotation: CTP_CleavageSite=50; ConfidenceScore=5.08e-01
MHHRVQREKEKTGRSSKDIPKGMQSTTKLQKAVPKGAQPGLQKSNSCTPRSNQGTEVAMPSYDFVKIINFTFNMLEGTRQVFSRRSELLAAGSNKIEHLLQLLNASIAELQAFILKACQRFFQL

SEQ ID NO: 44443 - protein, 111 aa, Zea mays
  Coding DNA Sequence Number=SeqID_1068
MQDRGMSTKKDGAKARIVIDKKENATKGRVGKTPFSNRDGKEDISKGRHKLSIMGRSRDYKGTGCNLRKITFKSFIIDYNNDTKHQGSLSQSIFKSVWPFVFEIYHCAEAL

SEQ ID NO: 44444 - protein, 212 aa, Zea mays
  Coding DNA Sequence Number=SeqID_1069
  Homolog annotation: Hit_ID=Q6QP51; Match level="QueryCoverage=57%, HitCoverage=48%, E-value=1e-14, Identity=42%"; Hit description =Putative growth-regulating factor 1
MTLGTSVTWPRLGLRFQGTLGHFRDQQERFCNGIPSEGGIEPSDPIERVRVRQITCSRQGRSDCSHFALPLTDLIGKQRRSPRSDCCATHQGEADNGQVQPQAQQEAPPRPTLGLSLGRRSPPRPTPGLSLNLGLGRWSPPRPTPGLGLNLGLGRNRVLARPRPRPQEKSPPRPTLGSDRPRHGGYIITLPLASSGYGGTRPASHLARPGNK

SEQ ID NO: 44445 - protein, 297 aa, Zea mays
  Coding DNA Sequence Number=SeqID_1070
MGDCCAVRIRGSSKTPYAAWAAFVFLDCPHSGTTPPRGGRCLPVHEDLSGDLPVQAGAASIRWRSAGVQVAAVVGAEVVVARGGFSADETVSAARGQTSGSLALMACPRPSSGDVGEGLLTAAFALRSSLLLLTRPRWRSLSLLMERSPTSHPEFVVPQALWCRGCSYPREWNRSSNLRLLCDELEPEAAVSAWTEAESARKEASSAEEQVASQAEEVQRRRLELGQVIRERDQPRSHAAEADLFVGSRIAYPSESYFSRKVMSEDPAIEAVEKRERRYGKKTFFEENFDAEGVPPF

SEQ ID NO: 44446 - protein, 69 aa, Zea mays
  Coding DNA Sequence Number=SeqID_1071
MEPICKHTSSTTPPTHIPAPGDRVTPEAGVSGSDPAAGTGFVDSLFAFPPPGGGGGSGQSSNHPSGGYL

SEQ ID NO: 44447 - protein, 196 aa, Zea mays
  Coding DNA Sequence Number=SeqID_1072
MTGTGLILGEPSSYLLFTIFFSLLTFHFSLPLSFSLLFPLEESIDEYYHHTEEETEDYEPCTTVFNPRITKHCDLRGEGVENGVACDLAEGIFIWRVLFLGWELRELVRKFYRRAVCEVVLGCGVVVVEQVPCGSGCDGGERGHGVAGSDGGCGALQRWRGRRWCAWRRARVQGARASRGSGQSEEKLHYPMHAEG

SEQ ID NO: 44448 - protein, 329 aa, Zea mays
  Coding DNA Sequence Number=SeqID_1073
MRDEKRAVSVLNDVFKKCMMKGIHPRHFFEWDDQGLPGLGEGLRVMKAGEHREDKEGECFVRFGHGGGLTPSGITVKTLLFFYQMEASLVIRTSYCSEVERFPHLLRSCALRMGIRKKPEYDWKEYHENGTEKCSMAVYLGESRSYPNHPPFQVTFSGHRFPDSCQNVARKALRQLCQNYSREVFETPLRYFPPSNKNTPAYRKSLQALSGRDPTEDDPTIVYMAGYLHTLDNHYDDLSSHCTHLNSRVESLEQQVKELKKETASLQESLEIAEGEEANTREAYRTLKMDYDKKLKKLAPTKKIRKRTKSQGCQTKRKKEASHQNRELV

SEQ ID NO: 44449 - protein, 331 aa, Zea mays
  Coding DNA Sequence Number=SeqID_1074
  Subcellular localization annotation: CTP_CleavageSite=58; ConfidenceScore=5.57e-01
MKIPQFYPCIRSNASLNLSPCAAALGSRRRWWSPSPWRRAALPLQLCRRPRFPSPLVVAVAVEARGAAPVVAPYTLDHAAAPRPEPGRHRRRWWSSWRRTALPLTWLQAPWATRSPSPAVAPECFGNRRCSPSEGREIHAANPTPSPFARRGRQIHDGATPELALLLFALALLLFALAFALLPPRADLSTGLRTVGLRGRTLSEGGGHDPSVAWGGASSAGSADSGRRREDWDLALLLFASVEVGCGDGPTGGQWAATAGLLHLPARRREDSSTSRRVKVWRPFSIGELLAQLSTAGQAGTHMTVTPTRRKRREMAKLSTAWHTRVKNEYG

SEQ ID NO: 44450 - protein, 291 aa, Zea mays
  Coding DNA Sequence Number=SeqID_1075
  Subcellular localization annotation: CTP_CleavageSite=55; ConfidenceScore=5.35e-01
MPAPPPPPSAGKVTGQTRTFLFRHVGKTSSIPPPAGGLTAAIVVVARRRKEYHVVAAVEGHELKTPKTKHRPGLERLLETTHLELDGKLFVNTQQALTWHANCRRFDPEGSLDRRVNCRRVSQPRWVGVRRNTKGGKTAKRKPATFVLSCAQVGSEPEVGRGGGSSEVEVESEPWGQARRRPSSEVEAESEPWGRARRSPSSEVEAESEPWGRARRSPSSSVEVESEPWGQARRSFLWRPRLDLAGVSLTLSSGTAVGAGQAALFSCQFGQWSGEVTAVTSALSTEERASG

SEQ ID NO: 44451 - protein, 506 aa, Zea mays
  Coding DNA Sequence Number=SeqID_1076
  Gene Ontology: Mol. function=transferase activity
  Homolog annotation: Hit_ID=Q5QPY7; Match level="QueryCoverage=100%, HitCoverage=99%, E-value=0.0, Identity=77%"; Hit description =Glycosyltransferase
  Pfam annotation: Domain name=DUF563; Domain location=126-369; Score =364.7; E_value=1.6e-106; Accession=PF04577.5; Description=Protein of unknown function (DUF563)
MGGEMKPGRGLRTWAQRHLNVTFAVGFLLVLLTYLVVSRQLAVAAPGGAASRVVAGKQVVVRDAGDNAEGASKRRQEWQPKQAAAEEEETSGAVPTEEEESYPKRDEADGKPSAEAETTTTTTSKAVCNTDGPVSETCDLDGDVRTNGSALSVTFVPASPSERREWKVRPYSRRTMVGVDRVTVTRLGSPDDPAAPCAVAHSVPGVLFALGGLTGNYWHDFSDVLMPLYAASRRYGGEVLFLVSNMQPWWLGKYEAVVRRLSRYDAVDLDRDARVRCFRRLTVGLRLHKELGVAPELTAPDRLTTADFTAFLRETYALQRGAPAAVPTTEGRKPRLMLIHRAHYRRFVNVPEITRAAEAAGFEVAVASPRGDAPVEETARAVNSCDALLGVHGAGLTNAVFLPPGAVLIQVVPYGRLERMARRDFGDPAEDMGLRYLEYSVSAEESTLLEMLGPEHPVIRDPDSVHRSGWDKVAEYYLGKQDVRIDVDRFAPTLAQAMDHLRHRHQ

SEQ ID NO: 44452 - protein, 57 aa, Zea mays
  Coding DNA Sequence Number=SeqID_1077
MESHDLRAEWESRLVGGYETVESGYNYGAGCQHCNPCSGEDEAVEGDFQEFQDYDEF

SEQ ID NO: 44453 - protein, 766 aa, Zea mays
  Coding DNA Sequence Number=SeqID_1078
  Pfam annotation: Domain name=HR1; Domain location=457-527; Score=6.4; E_value=0.053; Accession=PF02185.7; Description=Hr1 repeat
MEVVELVPCARNKWGNWHEFWFYVAEGTVEDHPGLPVAEMCSHYYSAYPQFEVAEEDASEGALRCTAGLSSVRDLVEEFVAYGVWPLAHGWALGEVCPHQMPSHGRKLVRSPTFALDLHSRDLAAFVREAEDGAVRIVGQYVPKTEGQRSWDIRGSNDRLNRVFELNRLSYGGYRGQDDVDRRGKKPAAEAGDDPAPAAAPSSKKRKLGIATGGLGVSDGFARELMRTCAAPGGRMSSPELRESSARMLRVTGGWWPKNVPIPSAVGEDFFTSRMVHDWRVFPYGRNIVVVVSAVMDKDRQGAAQKRQAVVRLHEARPKRPRGTAKAAAPEEASRRWRRSRPPLGSGEGQLVVVPPTVATAAAAVVPGAKGSALSAGGKIPALTAVRDEAGAVSRRLKEALSQAADFADRAASGGLTAVVSAEVERLRAQHADAVREKSAADSKCRKLADKVAALEGERTDLRRQLAEERKEANEALAKAQSAQAEANLARVEGSLARQRAEELEERLNSLQTRVERVEASTRSEAERTRKQLMDSYHELGARTADFEVPDREPGLRCLEWLQEELLALPAIVEGFMSYASLVTCEGAMNALSREGCRHYEVFDQADEDFERDIYKVEDPVVKESAGALYDRMWGPHGREVVRERTETARGHVIFDFCLVFIECGLYVGLLNLCVVSQAARGEKVEDFGALNSAQPDSESNPVAPVSEAAPEPPPETVEGVLDAPAATAAGEGPSPTAAPRAEDPVKTAAEPAAEDPATARSSQVA

SEQ ID NO: 44454 - protein, 77 aa, Zea mays
  Coding DNA Sequence Number=SeqID_1079
MTLLELALWRKVIQRGYDVTDYGEGIERRVASSPSPQHLPSEGPVRLSHLVPKTSLDGGDAALARSGSAGVFDMTVD

SEQ ID NO: 44455 - protein, 384 aa, Zea mays
  Coding DNA Sequence Number=SeqID_1080
  Gene Ontology: Mol. function=binding; Cellular component =mitochondrial inner membrane; Biological process=transport
  Homolog annotation: Hit_ID=Q9LD54; Match level="QueryCoverage=100%, HitCoverage=100%, E-value=1e-121, Identity=59%"; Hit description =Putative peroxisomal Ca-dependent solute carrier
  Pfam annotation: Domain name=Mito_carr; Domain location=191-278; Score=92.5; E_value=1.3e-24; Accession=PF00153.18; Description =Mitochondrial carrier protein
  Pfam annotation: Domain name=Mito_carr; Domain location=281-369; Score=88.6; E_value=2.1e-23; Accession=PF00153.18; Description =Mitochondrial carrier protein
  Pfam annotation: Domain name=Mito_carr; Domain location=44-187; Score= 15.2; E_value=0.00012; Accession=PF00153.18; Description =Mitochondrial carrier protein
  Pfam module annotation: Pfam domain module=Mito_carr::Mito_carr::Mito_ carr; Domain location=191-278::281-369::44-187
MSRHRVETCDSWRPPRKNHAGAPPLLRAGPRLLAFASLSVRDGGDSAAAVAKAVEEAVVVRSDEVKEAVAGEERKKTKSTERRLPPAAQLTHSVRVAGESAKKGVGFLETLPSELTFSVEISHLLRYVLCGKFTSVEYSEAMADIGKKDGLKGYWKGNLPQVIRIIPYSAVQLFSYEVYKKIFRRKDGELSVFGRLAAGACAGMTSTLVTYPLDVLRLRLAVQSGHSTLSQVALNMLREEGLASFYGGLGPSLVAIAPYIAVNFCVFDLMKKSVPEKYKNRPETSLATALLSATFATLMCYPLDTVRRQMQMKGTPYNTVFDAIPGIVERDGLTGLYRGFVPNALKNLPNSSIKLTVFDTVKTLIATGQKEMDKLIQENEEKRS

SEQ ID NO: 44456 - protein, 244 aa, Zea mays
  Coding DNA Sequence Number=SeqID_1081
  Gene Ontology: Mol. function=nucleic acid binding; Cellular component= nucleus; Biological process=chromatin modification
  Homolog annotation: Hit_ID=Q9FF61; Match level="QueryCoverage=90%, HitCoverage=25%, E-value=1e-43, Identity=43%"; Hit description =Putative SWI/SNF-related matrix-associated actin-dependent regulator of chromatin subfamily A member 3-like 1
  Pfam annotation: Domain name=HIRAN; Domain location=23-116; Score =53.2; E_value=8.7e-13; Accession=PF08797.2; Description=HIRAN domain
MAASSSRGGAAASADDDDEPYLLGFIISKIVGMLYYRGKVAGREPLNQYDNNAIVVFNARNDQVGHLPGVLAAVLAPLLDSHLLVVAQGIMPRSGSKINPNAYSLPCQVHLFARPAAASVVEAALHEAGIDLIHVDHPEFTLSQAGVVMEQFKKPDRDHDVDKLFSLVGKEGKNQTQRMDPPGDVVLSELFGHQKEALGWMVHREESADLPPFWQEGEDGGFENVLTNQKTEKRPPPLKGRDLC

SEQ ID NO: 44457 - protein, 149 aa, Zea mays
  Coding DNA Sequence Number=SeqID_1082
MGKNNKRKREPTPPSEEFGDSEYSEEEFSSESEGSPAPASPPASSDDSDDSQGIAAEVWTYIRAVERAGLEGSDESECSSDEEDSDGGDEGEDDDDDDDDDGDGGGSGSGRGGGDGSRDSTKGDSRGSTKGSSRGSTKGGGGGRGRASG

SEQ ID NO: 44458 - protein, 193 aa, Zea mays
  Coding DNA Sequence Number=SeqID_1083
MARTRKTTRKSTGPFGVPHHQLAPRHEGSSSGSNDPIGDLKAKVEQLRSEPHHRNRAWAQDSQRIAELSSDVSRLQYEILEQDLAIDWVVNSRSIAWDRETKARARARVAELSVALDSLQVYCNTLHEEVHVLYARLHPDVPSNAAVMGVGPSGTTNEGPDEELDLFRPPPSMNLANERSPATGNEATKDDED

SEQ ID NO: 44459 - protein, 35 aa, Zea mays
  Coding DNA Sequence Number=SeqID_1084
MARVACTFCGKMLDGGGTQGRAPTVKSREDVGLPL

SEQ ID NO: 44460 - protein, 48 aa, Zea mays
  Coding DNA Sequence Number=SeqID_1085
MAESTGLISSRPRGSRWADVIVDITPQPITLNQRSKSDKYHKNKHSSS

SEQ ID NO: 44461 - protein, 201 aa, Zea mays
  Coding DNA Sequence Number=SeqID_1086
  Homolog annotation: Hit_ID=Q8S463; Match level="QueryCoverage=21%, HitCoverage=2%, E-value=5e-08, Identity=63%"; Hit description =Putative prpol
MVENILDTDLVDFVAILSSAEFARELVASHAFLLEQLAEGGLERGGDPSRGRGQVLASHVATLWAVRAVVGVGEQHPVFVPRPPSLWKEQCSTVPRRSQSSEVRGAPDCPVPQEDKASNGRPAPNPNSWVRGGAPDKERCLSGEPIAISLPNGYGSGWTLFFDGALMSTGAGSGVLFIHVGGKHLRYVRCLCLPAYNDVVK

SEQ ID NO: 44462 - protein, 259 aa, Zea mays
  Coding DNA Sequence Number=SeqID_1087
  Subcellular localization annotation: CTP_CleavageSite=49; ConfidenceScore=5.38e-01
MALFPPSSLRKGDAGARQSRSDRSHFAAPLTGLTRGQRRLRRSDCCATRQSEADSSQVWPQAPEETPHRPTPGLGLGLSPGRRRTPLRPTPGLGLGLSPGRRRTPLHPTPGLGLGLIPERRQTPLRPTPGLRLGLSPGRRRTPLRLTTGLGLGLSPGRRRTPHRPTLGLELGLSPGRRRTPLRPTPGLGLSPGLSRRSPPRPTQGLGLDLGLGRQTRPRPRRSLHVAQPRARTDHVIGGAIITLPQANSGYGEQDRRPI

SEQ ID NO: 44463 - protein, 135 aa, Zea mays
  Coding DNA Sequence Number=SeqID_1088
  Pfam annotation: Domain name=RVP_2; Domain location=48-135; Score= -35.6; E_value=0.00062; Accession=PF08284.2; Description=Retroviral aspartyl protease
MARENEEEIEVTEEKTPPPSDSQAENCFYFDICGSEPDSPTNEGKPCLCNRFRISISPMFYNVCKTGETFLESKATKSEKKAYQVPVTLAERDFPINMIVLKGQDIDVILGMNWLAQYKAILNPDMRTIRLSYGQ

SEQ ID NO: 44464 - protein, 231 aa, Zea mays
  Coding DNA Sequence Number=SeqID_1089
MNKTPALKVPLQMELRFHLRRYEQPHMIGGPAEQQKADGWLAAARSNSDDDDFCSEGPNNSSDDLRADAAAIRPSPTPSLERQGRAEGRRVGGQSAGGTDYLVGGETSSGCRGGRSWWSPSWVTTDEGMRPGCLMKILEAERWMKGTNFHEVAFLQRQGGRIAGVPHPGARKPSRAESSPTRSKVLPLRHGGWVPRVMQAGPGQKKPNRRARCMQLPSGYKHSSTFAQTSG

SEQ ID NO: 44465 - protein, 458 aa, Zea mays
  Coding DNA Sequence Number=SeqID_1090
MKILEAEGGAEAAARLASPHHQTGGRRLGKTKATRALPIRGLGRWKDAMHEGSAKAWLPSKGVTPFLKVTLPTYVLNRRGLSLHQHAPRSSPCDTGAGSRASCKLAQGRRSQTVARRAHQQVKGRTAMQAACNRTKGAHPFDFDASNMEAQAHTSCNRRTGYYVRETAPPLAPVPRLLDCGTGAATRDDPAHGPTVPTEHIGHGSVSRGRRRDGQYDHKWADSNGDSRRAEATIKSTAGSRPLLEQQESPLPRREDDAPVFRSSNGSRTHNGCPANHSSHRINSAAGQAAPLAGTGKRDTPKGILLREGSGPRALLLIRGSKAGPSEGFDSRLRALGLHAHYWSEVRRLAPRKGSTAASGHSGSAPTTDQGFVGWPPKGSTAASEHTERGMTLGTSDTWPRLGLRSRGSGAALANPAPAKPLTASTYQPENSEPGYAPRLRPVRMREQPDRLRHHERH

SEQ ID NO: 44466 - protein, 196 aa, Zea mays
  Coding DNA Sequence Number=SeqID_1091
MPGKANCCCPARVQHSVLCPGDGGQPHRGVSQHVVRREGGTRVLGQSHSRFRDEDGSEDLPVRFGAAGARWCGVGGQVDVTVGAEVVAAGESFSADETVSATRGPTSGSLALISGSRPPRGDTNESLPAAASVLGPSPLLQRSLASRPEFVVPQALRCGGCSYPWEWNRSSVCNGTLSVSVCSLWLSGPEHLCILA

SEQ ID NO: 44467 - protein, 113 aa, Zea mays
  Coding DNA Sequence Number=SeqID_1092
  Subcellular localization annotation: CTP_CleavageSite=49; ConfidenceScore=5.06e-01
MARGALFAWNTSPMAFQRALAVWVLSVMARLRTASEVVLYIHPRTQKSACAHAASVGREVERTSEKEKKQSKRKSSNEYGKSLSLVTRVLCGIGEDLISLNVSRIECLALVSG

SEQ ID NO: 44468 - protein, 115 aa, Zea mays
  Coding DNA Sequence Number=SeqID_1093
MSGAHRTVRFQLQGHGDVELDVDGGKGAEDRSRIGSIGDGAHGAGKGKERADGAVWLRRRGWRREAPFHIVIIVVFDADRYHPNSVLYQHKHRRYNLHVYVYVVARVYEQGLSVV

SEQ ID NO: 44469 - protein, 319 aa, Zea mays
  Coding DNA Sequence Number=SeqID_1094
  Pfam annotation: Domain name=zf-CCHC; Domain location=218-235; Score =18.5; E_value=0.0024; Accession=PF00098.14; Description=Zinc knuckle
  Pfam annotation: Domain name=zf-CCHC; Domain location=31-48; Score =23.8; E_value=0.00038; Accession=PF00098.14; Description=Zinc knuckle
  Pfam module annotation: Pfam domain module=zf-CCHC::zf-CCHC; Domain location=218-235::31-48
MGMIRKINLMGLPLQVEDILFNIDRKRQRKRGCFACGEKGHFRDSCPTMAKPKKERSKGKTLTSVRTWDDSSSEDEPPRTRSHRSSSRSSRSSHKCLMAREKMEILSIHNDELTTKLENIGSTPVASLVKIPEIIKKDASTSCFDLINDTNPCNQVLVENIVIETCSDEVAKENEQLRQEVARLGKALYDKKGKAKQIRPPQDNTTVGVNKPMEGETVICRLCHKEGHKSFQCKTMTGDKQRQELKQKPSSKISNTYIKKEDKKTATPYLIKKKKNGKVIAIKANKQANKGKGAKRIWAPKEIISTMKSTKKVWIPKGK

SEQ ID NO: 44470 - protein, 145 aa, Zea mays
  Coding DNA Sequence Number=SeqID_1095
MRNPKPRVKKKACKDVGAKKCQSRSSQADLMIYESNIKAQACEMKQKEEEKERGAKGLVVYSQGSAQSGCTGLSGGSPDSVRSEQTEEGVEIDSKTRRHPDPVPGSKRTFTLPCHTFFVGPEGIAYVGTLLFVAERYEANFKIND

SEQ ID NO: 44471 - protein, 30 aa, Zea mays
  Coding DNA Sequence Number=SeqID_1096
MAARAARLLAWVRLLARPQLRRTAFGMAFH

SEQ ID NO: 44472 - protein, 47 aa, Zea mays
  Coding DNA Sequence Number=SeqID_1097
MFGLQVAMRLMVLGFDSGNGCPYCNHCSGEDEDVEGDFQEFQDYDEF

SEQ ID NO: 44473 - protein, 347 aa, Zea mays
  Coding DNA Sequence Number=SeqID_1098
  Gene Ontology: Mol. function=NADH dehydrogenase (ubiquinone) activity; Cellular component=integral to membrane; Biological process=ATP synthesis coupled electron transport
  Homolog annotation: Hit_ID=P0AEW2; Match level="QueryCoverage=56%, HitCoverage=90%, E-value=1e-89, Identity=88%"; Hit description =Hydrogenase-4 component E
  Pfam annotation: Domain name=Oxidored_q2; Domain location=257-347; Score=50.4; E_value=6.3e-12; Accession=PF00420.15; Description=NADH -ubiquinoneplastoquinone oxidore
QDMKRLLAWSTITQLGWMFFGLSLSIFGSRLALEGSIAYIVNHAFAKSLFFLVAALAITGVPPFNGFFSKFPLFAAGFALSVEYWILLPAMILLMIESVASFAWFIRWFGRVVPGKPSEAVADAAPLPGSMRLVLIVLIVMSLISSVIAATWLHVKSYRLSCGFYACQSLVLVSIFATLSCLFAAEQLLIWSASAFITKVLLVPLIMTYAARNIPQNIPEKALFGPAMMALLAALIVLLCAFVVQPVKLPMATGLKPALAVALGHFLLGLLCIVSQRNILRQIFGYCLMENGSHLVLALLAWRAPELVEIGIATDAIFAVIVMVLLARKIWRTHGTLDVNNLTALKG

SEQ ID NO: 44474 - protein, 70 aa, Zea mays
  Coding DNA Sequence Number=SeqID_1099
MEEDNTEEDDQLGEDLVDYGASPEHPGDDETVVAQFDFGSKEVIFTKPKRIGQPFIAALCARSYRWNTGC

SEQ ID NO: 44475 - protein, 144 aa, Zea mays
  Coding DNA Sequence Number=SeqID_1100
MTTSLVVERSESGCGLPLPSASRMFIIRAGEGGELSWGPTFRMGWRPASSSSIWGRRVFASLAKEANFGYAGPADCRRRQPPRARCLGLGGFGAASDAGSCCLVEAWLPVHRTGDGRARWPPPSALRWSPPLASRLELAIPRPY

SEQ ID NO: 44476 - protein, 29 aa, Zea mays
  Coding DNA Sequence Number=SeqID_1101
MAGSELSENEEQRRMTTRDEFRFATRALD

SEQ ID NO: 44477 - protein, 127 aa, Zea mays
  Coding DNA Sequence Number=SeqID_1102
MKKIDEEVQRQKDQVLKAADKWFLSHFRVDCHQKTVQEREINAESVLQIQSRRAAPASPGLSALRARADAAPSAARSSSVDALPTPRKRPGLHADPKPKPKPTTAAGTRGIDSEMASTSSAGDVGDS

SEQ ID NO: 44478 - protein, 187 aa, Zea mays
  Coding DNA Sequence Number=SeqID_1103
  Gene Ontology: Mol. function=kinase activity; Cellular component =ornithine carbamoyltransferase complex; Biological process=amino acid metabolic process
  Homolog annotation: Hit_ID=Q6QP54; Match level="QueryCoverage=55%, HitCoverage=35%, E-value=9e-17, Identity=50%"; Hit description =Putative kinase
MAPPVDVVGPCPRLGEVEAPPRSRSSLSSKVEVESEPPGRTRRSPSAEARAESEPWGRAKRSSSSFRAEPESEPWGRAKRSSSSSGAEPVSEPWGRAKRGEAEFPMTPEAGLGCCQPHSVEWLSSQSGAGGAVLLSDRSVERRSDCGHFGSINWRACVRIKVSGHLCIKCPCDLVGWRGDLAKVASR

SEQ ID NO: 44479 - protein, 328 aa, Zea mays
  Coding DNA Sequence Number=SeqID_1104
MGNTCNPSTLSSEGRDFEEAGTFQPSFGFKDFHQAARLHPLAGGHPRRFKDVHHPCWGGGQAEPELYLPCGFVGQPPLQHSRERALTGPASGANFDNAGLVDGGRRQLQHVGLAGLAPDAPSRRKGGRRAVRTGGPPKTPRAARAAFVFWGCPVFAPVQRLRAEESLGSVGLAVRGFSCLVKGTPRPLFDEPKPEVMVSARTETELARKEDLVGRSLAGSSTGGTDARVELPRPQAGPMSSGDSWSRPRGGRPSRLLEPDSWRRPWRRWPGCGRWPGCGADVVLQSGDPPTASPSEARSDPAEGVVDAEGVAAPFNCRRPSLQDWVVL

SEQ ID NO: 44480 - protein, 133 aa, Zea mays
  Coding DNA Sequence Number=SeqID_1105
MEILIPIILVEEALLVKLSVLGPSVLLILSKMTYFFSGFVNLPFSSSWGVGLVAFLFWLQASRRERVSWFGSSGCRAAVPVAEAFFGGMTKVDACRRWSKRVHRRNDNKLQIYLRLERRQKYKRDTKANAKSA

SEQ ID NO: 44481 - protein, 137 aa, Zea mays
  Coding DNA Sequence Number=SeqID_1106
MGKNNKRKREPTPPSEDFGDSEYSEEEFSSESEGSPAPVSPPASSDDSDDSQGIVAEVWTYIRAVERSGLEGSDESEYSSDEEDSPEEDGEGDDDDDDDVGGDGGNDGDGGGRGGDGGSSRGSGGGGSSKGSNKASG

SEQ ID NO: 44482 - protein, 46 aa, Zea mays
  Coding DNA Sequence Number=SeqID_1107
MEDKFTDESHLPALCHVPEYLHRTAVIGVECLNNSCITFLELDYPP

SEQ ID NO: 44483 - protein, 63 aa, Zea mays
  Coding DNA Sequence Number=SeqID_1108
  Subcellular localization annotation: CTP_CleavageSite=43; ConfidenceScore=5.07e-01
MVPYFLVESPTKSRVSFNPNPPFADHKGENHSSTARRQVQLVYGQRGSQLKLSSGVLEKAQLS

SEQ ID NO: 44484 - protein, 499 aa, Zea mays
  Coding DNA Sequence Number=SeqID_1109
  Homolog annotation: Hit_ID=Q6J9V9; Match level="QueryCoverage=38%, HitCoverage=49%, E-value=5e-15, Identity=36%"; Hit description =Putative uncharacterized protein
MQATCNRTKGAHPFDSDATSMGAQAHTSCNQHAGYYVRETAPPLAPVPRLLDCGTGAATRGNPAHGPTVPTEHIGHGSVSRGRRRDGRYGQKWADSDGGGRQAEAAVKSSAGSRPLLGQRESPLPRSEDDVPGRQHLWRAKQATLHLRHNDRIKKGTGKGDAPKGILLREGSGPRAPLLIRGSKAGPSEGFNSRLRALGPRALLLIRGSKAGPSEGFDSCLRALGLRAHHWSEVRRLTPRMGSTAASSHSGSAPTTDQGFEGWPPRGSTAASEHVERGMTLGTSDTWPRLGLRSRGTLGHFRDQQERFCNEIPSEGGIEPSDPTKRDRVRQITCRKAMHGHMKKVESALDRPLALWGGSGDALANSAPAKPLTASTYQPENLEPDYAPELRPENSATCPAPTAVPLDRVRLTAAKSSLGRHRKLRLARPQGSGSNSTPDDGLRLARPQGSDSASTSEDGLRLARPQGSDSASTSEDGLRLARPRARTEHVTGGPSLPYP

SEQ ID NO: 44485 - protein, 368 aa, Zea mays
  Coding DNA Sequence Number=SeqID_1110
  Subcellular localization annotation: CTP_CleavageSite=41; ConfidenceScore=5.44e-01
MNRHRHPRCHYKRNSSSTPAGTNNPPHRRACGTTTSRWLTAAHSYSSDNDLRSGWPNSSSDDLRADAAVTRPSPTSPLERQGQAIKAKEPEARSADGADDLVGDEAFSSCYHLSTDDDSHLPTGRASTNHRAEASRQSKGRTAQDRRRQTAARGARNCPAVTSTPPLSPKPAAWRPRPTRHVTGAPVTTCEKLHRHLRQYRAFSTAEPMPRLEATLCMAQQCQPSTSITGQSAVGEGETVDMAKSGPAVMAAAGGRKQLSNHLQAHVPSWDSERALSHGVKTMRPCSVPRTAHACTTAAPRTTRPVALTLRDRERGYSKRDPSPRRKRALSPPTDQRLAPRKGSTAASGHPGSAPTTDQGLEGCPPKG

SEQ ID NO: 44486 - protein, 135 aa, Zea mays
  Coding DNA Sequence Number=SeqID_1111
MNDDDADEERARPREERGWDGTPAVRRPREASGRVGAGGTAGQPGQGGGDACGARRGWRVGAAALMARWPWQGWAGGGDRGGRGRAGRRWPGEEHRPWWSAGRGRMEGGAGMRRRRAARGPLAAEGGAAGLRMAA

SEQ ID NO: 44487 - protein, 100 aa, Zea mays
  Coding DNA Sequence Number=SeqID_1112
MSLASSDTHEHIGVDLLGAQIIFWAMDLLRHGGVVMKAAVDGGVASTQGTRSRLARAQPRAKAADPEGFTSRPRVPSSNGRTFDPPEAQLGQASRRSNLG

SEQ ID NO: 44488 - protein, 91 aa, Zea mays
  Coding DNA Sequence Number=SeqID_1113
MVKLQGTWHPIDGRPTPVNLSEPAAKQQGYDGQPPVLPCGEDLLPRSVIRSPMSTNHNGGVNPGAQLTGGEVLCAGVLIQLLYHREVIQLV

SEQ ID NO: 44489 - protein, 46 aa, Zea mays
  Coding DNA Sequence Number=SeqID_1114
MTQLFEFYEAEDPEHLFGGDEEDGYDYAYGNGNGKEEGVKADLQEF

SEQ ID NO: 44490 - protein, 310 aa, Zea mays
  Coding DNA Sequence Number=SeqID_1115
  Gene Ontology: Mol. function=diaminopimelate epimerase activity; Cellular component=chloroplast; Biological process=lysine biosynthetic process via diaminopimelate
  Homolog annotation: Hit_ID=A2ZLS4; Match level="QueryCoverage=99%, HitCoverage=98%, E-value=1e-126, Identity=68%"; Hit description =Putative diaminopimelate epimerase, chloroplast precursor
  Pfam annotation: Domain name=DAP_epimerase; Domain location=181-303; Score=163.5; E_value=5.7e-46; Accession=PF01678.10; Description =Diaminopimelate epimerase
  Pfam annotation: Domain name=DAP_epimerase; Domain location=71-180; Score=43.3; E_value=8.8e-10; Accession=PF01678.10; Description =Diaminopimelate epimerase
  Pfam module annotation: Pfam domain module=DAP_epimerase::DAP _epimerase; Domain location=181-303::71-180
  Subcellular localization annotation: CTP_CleavageSite=43; ConfidenceScore=5.83e-01
MSPAAATTTFVAISIAVPNPTAPSRGRVRLPLGGVPAAPRRAVASMAVSAPRSGAATSFLERRESERALHFVKYQGLGNDFIMVDNRDSSVPKVTPEEAAKLCDRNFGIGADGVIFVMPGVNGADYTMRIFNSDGSEPEVKVDMGEPILSGLDIPTKLLATKNKAVVQAELAVEGLTWHVTCVSMGNPHCVTFGANELKVLQVDDLKLSEIGPKFEHHEMFPARTNTEFVQVLSRSHLKMRVWERGAGATLACGTGACAVVVAAVLEGRAERKCVVDLPGGPLEIEWREDDNHVYMTGPAEVVFYGSVVH

SEQ ID NO: 44491 - protein, 89 aa, Zea mays
  Coding DNA Sequence Number=SeqID_1116
  Gene Ontology: Mol. function=protein binding
  Homolog annotation: Hit_ID=A2XVA0; Match level="QueryCoverage=49%, HitCoverage=8%, E-value=2e-09, Identity=70%"; Hit description =Putative uncharacterized protein
  Subcellular localization annotation: CTP_CleavageSite=28; ConfidenceScore=5.28e-01
MEQRASQARASQQSSTSIQQGTAGLPPSASGKAAARKAKQTHHGRSITEVFKNIRSLEVCGGLINDAGVKNIKDLKALTLLTVSLFRVV

SEQ ID NO: 44492 - protein, 185 aa, Zea mays
  Coding DNA Sequence Number=SeqID_1117
  Homolog annotation: Hit_ID=Q9SDX4; Match level="QueryCoverage=18%, HitCoverage=3%, E-value=4e-07, Identity=77%"; Hit description =Dynamin homolog
MRLDASLPADDDPSDETASRRPSIILNAVVLGNIDAGKSTVWNSLIGHPVLPTEAGKPRVVDRREPGRGGILRGGLLVRPESLTRANSSPCARRISWPATSALQSLEIPPSAGRRVTLRAIDLGRVSWIVRTRTDRDHFKSGPLMVNPMEPYSIPVRFNEGSNRDRITQIQWLVVIHTPSAIRFA

SEQ ID NO: 44493 - protein, 500 aa, Zea mays
  Coding DNA Sequence Number=SeqID_1118
MSIILQYLVLTCGVCETARGVTLTAVVSAEVERLRAQHADAVREKSAADSKCRKLAEKVAALEGERTDLRRQLAEERREANEALAKAKSVQAEANLAWVEGSLARQRAEEWEERFNALQTRVERAEASTRSEAERTRKQLMDSYHELGARTADFEVPDQEPGLRCLEWLQEELLALPTIVEGFMSYASLVTCEGAMNALSREGCQHYEVFDQSDEDFEREIYKVEDPVVKESVGALFDRMWGPHGREVVRERSDTARGQATRNEKVEDFRALNSAQPDSESNPVAAVSEVAPAPPPETIEGAPDAPAATAAGGGSSPTAAPRAEDPVKMAAEPAAEDPAMARSSQVQDFGPAHATSTANFLAASTVDDGNESDESASKFSDFGDSGSLVEWTEESSDEDLDYFAALDVAATEASPRAVDAEVVPGLSAGRRRRRAVAKRRVSEADGGRLRVGRAGRQELLSLPAVASVGEGELRGLFAGEELRIMLFNYREMRIIPKVEP

SEQ ID NO: 44494 - protein, 304 aa, Zea mays
  Coding DNA Sequence Number=SeqID_1119
  Gene Ontology: Mol. function=protein serine/threonine kinase activity; Cellular component=integral to membrane; Biological process=protein amino acid phosphorylation
  Homolog annotation: Hit_ID=Q2QNF5; Match level="QueryCoverage=48%, HitCoverage=14%, E-value=8e-36, Identity=53%"; Hit description =Protein kinase domain containing protein
  Subcellular localization annotation: CTP_CleavageSite=47; ConfidenceScore=5.03e-01
MENRHELDANCISAQSLGSPGWFRNNLSENSPFSLAVVLRESPMELVSTGGSQARPTCVFFSLTHGFISIDCGVAEAYQDPDPDRGLTYVSDAGFVDAGEGLNAPVRPPYVDKGLAQRYLNVRYFPVVTGAGAGGGGAARTRTRSCYTLRPVAQGSRNLVRATFYYGNYDGLNSRPAFDLHLGVSRWATVNVTSNTGVYIFEAVTVSPADFMQENTSASMERLFVRAWHTEIFVGTCSPAQVDPMGRVQRRPRAKGGIFAFSPQHLPSEGPVRLSHLVPKMLLDGGDAALARSGSAGVFDMTVD

SEQ ID NO: 44495 - protein, 22 aa, Zea mays
  Coding DNA Sequence Number=SeqID_1120
MALAPCALPRSQENKLNYVMYL

SEQ ID NO: 44496 - protein, 259 aa, Zea mays
  Coding DNA Sequence Number=SeqID_1121
MAPRTLYDDGGLHPLTEARGRQQGLDSPDSCPSARLRHSFDGHDITRTGCQNLSGCHDGMALLQKVGRAGKDGTTLAPQASLLIRGSKAGPSEGFNSRLRALGFRAHYWSEVRRPAPWKGSMAASGHSGSAPTTDQGGNDLVTESHQREASSPRTPSKGDRVRQITRSAACAAPTAVPLDRVRLTAAKSGLRRHRKLCFARPQGSDSGSALEDGELRSARPQGSDLGSAPEDDELRSARPQGSDSGSAPEDGELRSARP

SEQ ID NO: 44497 - protein, 137 aa, Zea mays
  Coding DNA Sequence Number=SeqID_1122
  Gene Ontology: Mol. function=kinase activity; Cellular component =ornithine carbamoyltransferase complex; Biological process=amino acid metabolic process
  Homolog annotation: Hit_ID=Q6QP54; Match level="QueryCoverage=61%, HitCoverage=29%, E-value=4e-24, Identity=69%"; Hit description =Putative kinase
MGRRETECKGGRKPEGDGRERWNPAAFVFVPRPGRPESAWGRVMMAPPVDVVGPCPRLGEVEAPPRSRSSLSSKVEVESKPSGRMRRRPSADARAESEPWGRAKRSSSSFGAEPESEPWGRAKRSPSSSGAEPESEP

SEQ ID NO: 44498 - protein, 66 aa, Zea mays
  Coding DNA Sequence Number=SeqID_1123
MTVEAKAMMRRNMRMIARMNLHHHKTTDQAKDGGKKSFEVPSAREKVKEAEEPKAKGEEEGLQSQG

SEQ ID NO: 44499 - protein, 77 aa, Zea mays
  Coding DNA Sequence Number=SeqID_1124
MGKPVPSLLILLLCRGRYNGSSSLISCEKQTIQIEFLSLQVTALVPTITGMGDHVSGRVRGKVYCQVQSGFSNHYAK

SEQ ID NO: 44500 - protein, 264 aa, Zea mays
  Coding DNA Sequence Number=SeqID_1125
MAVGVSEALYAKAMTSHGSSDEGNAQSHTDGLAREGFPCILWELGWRSLDLESYGYRAEDTMEAIALHGLTTFCGFHPLELSTHPIGLFPVEKEDDPMWKDRVEHAKDIWAIYPSQTAHLMVRCMNAPYRLKVMRGEAMSHLMALLEATKITLDNREELVVDLSTEMVEKDLQVEQLSNEIQELEELVGTRENTIEVLEDQLINTQQQLAEANQHLDMHHQEIQDMEANEDVDIEGGEEPASRLDTAGSGRPPSPESSVASFAH

SEQ ID NO: 44501 - protein, 126 aa, Zea mays
  Coding DNA Sequence Number=SeqID_1126
MQDAARRALSQYCSLFSGVADGLDLKYYPRCSTGSAGSVIVSPVGEGNPRLSNMVNLVVVLNTELDHTLDELGKMSENRRRGARRAQPEQQAPQEEAAQQQQLPPPPPMTIEQMFLIQTQAVQAMG

SEQ ID NO: 44502 - protein, 126 aa, Zea mays
  Coding DNA Sequence Number=SeqID_1127
MDGGLIFKKSRGSLERKPGRRGIVDSEPSDPGSRRDRGYGYSDEEESGAVGLGAAAPRGGGQGSARREDLGVEDGDRLELEHECSDMELAGVLTTAQGEPTRRGSRRGTGPTPWLGGGAAGGARRW

SEQ ID NO: 44503 - protein, 119 aa, Zea mays
  Coding DNA Sequence Number=SeqID_1128
MQESLAGPPSQQNPPEGLPRNPLQDRHHSKILPRAFPGIPCRTAITAKSSRGPPYTDHSPTALAPFGYQDDLQVARDLTAKRSNTDKDGIGKINITPNIRINCVILFYAKLRDRRNENH

SEQ ID NO: 44504 - protein, 394 aa, Zea mays
  Coding DNA Sequence Number=SeqID_1129
MPSSTPSVVAEEAPTAPIATIEVGAGGVASSNPPPTPEETEVIFGRWLRSGAEPEAAPIPLPRMLSRAHKALQETGAAFLREWEALKAEHQHLSDWRTQLEERTKATSHQFAFEQSELERDRKDYKKDLQKVFARELEVTRKEKRLAKKEVHLDQREEVITELQAKLKALNKIVEEQRADQTVAAESLQRLQRELDGKARDAALAEEKLKAKGESLDRREADLVGRAADLTRREKDLAFKKEMLERQEKSLAEHELEAEEKERMLEERVRQFEVAQAAQAAPGPQAVEAMKKTLKNLQVEQRAGVQRIATWAGEASTTLVPLGILGARLEAEGSWLYRAVIEYILTCFRSHDLAISLEPVISGLAADTEDTAREGIQDTVEVVAERFQRDPTDD

SEQ ID NO: 44505 - protein, 164 aa, Zea mays
  Coding DNA Sequence Number=SeqID_1130
MQEQMNVLLKYQITLLQGGIRPRTYPLSCLVFPGLLRLRDGSASHGCRASNHDCLLPAVVHSVLLGHWGPAVVEPSFSGTASPSGPALHIGSILCLLLALGLPDCSDWLLGQENEVPGYPVSGTDSLLVDYSGGTATVAEGTTFGITVDADAGSAADILEGDSA

SEQ ID NO: 44506 - protein, 226 aa, Zea mays
  Coding DNA Sequence Number=SeqID_1131
  Subcellular localization annotation: CTP_CleavageSite=45; ConfidenceScore=5.21e-01
MQPGCTPPPVVTQDGDLQLDGGGKRAGLRPLPLPQPQGFSSSRPRWRMRRVGGLPPRGSVTLFFPWRLGENGILQLRGDFLQPRRDRWAAVTQPGRGTTPSVRTTVAPRTARAAPTLWAVLARAKTCRRASRRRQPEMASLPMRLPTPPVALDSPVDYLNRFTKHESPRVKVSSEHEQRRSWLENENLVGRSLAGLSVSGTDAGVDQPRPRVGLAPLEDGQPRPQR

SEQ ID NO: 44507 - protein, 456 aa, Zea mays
  Coding DNA Sequence Number=SeqID_1132
  Subcellular localization annotation: CTP_CleavageSite=2; ConfidenceScore=5.46e-01
MSSSSLMRRVFPSSKPPDGGYPPSFRLLVGGTQLRGSWYLSAIVRLQGFSSHSLVAPLRRWSPKTVTSSSWMGRGKPGCDPVPSIGGVRHPRWGGERGEPGLYLLRGLANHLLFQLLVVAIVLPRCDRDVLQSCRGMRTIAIQLGCNIPSFPSHSRRGRQRGSAGALGSGPLFGFDGWFASLERNREQEPSGGRVHPGPWLLLQRSLASLPMFVTPQARGRSYPRGRNRSSVCDGTLNASVFVRRGCRGLNILVKGTPWPLFDEPRPGVAISVRAEAELARKWEPGWLEPSRVVRRRGRRRSRSAEASGRAGALGRWLAEAPGVTGRAACSGRIPGEVPGPHRRPRLGRISLKASSMPRVLQPPSSVKTRACRIRLSCSVCLLRPPRPENTPSLRCKAASLFLLFRASGLSVGNRDVCVGESCFSRKVMSEVSVSQRRGSPSARSALPLTRTFARP

SEQ ID NO: 44508 - protein, 159 aa, Zea mays
  Coding DNA Sequence Number=SeqID_1133
  Gene Ontology: Mol. function=carboxyl- or carbamoyltransferase activity; Cellular component=ornithine carbamoyltransferase complex; Biological process=amino acid metabolic process
  Homolog annotation: Hit_ID=Q8SA97; Match level="QueryCoverage=100%, HitCoverage=24%, E-value=8e-22, Identity=46%"; Hit description =Ornithine carbamoyltransferase
  Subcellular localization annotation: CTP_CleavageSite=18; ConfidenceScore=5.11e-01
MALPVDVAGLRPRLGDVEAPPKPSGVRRLPRLSPSPSPGSGGAEFAVFQDLARVRALGWAERSSPSSGTQPESEPWVGRSGVRRLPGLSPSPSPGSGGAELPMVPLAGPDCLSVSLCQVALQSEWRRRRCPFVRPLYADGGYQLRIRSLEGTPNYGPRQ

SEQ ID NO: 44509 - protein, 175 aa, Zea mays
  Coding DNA Sequence Number=SeqID_1134
  Homolog annotation: Hit_ID=Q6QP51; Match level="QueryCoverage=28%, HitCoverage=22%, E-value=7e-13, Identity=71%"; Hit description =Putative growth-regulating factor 1
MQAACNRTKGAHLFDFYASSMEAQAHTSYNQRAGCYVQETAPPLAPLSRLLDCGTSITTRGNPTHDPTVPTRHIGHEPVNRGRRRDGRYGQKWADSNGGGRDRERGYPERDPPPRRKRAPSPPTDQRFEGWPLGGVQQPPQSAWAPRPLLVRGSKAGPSEGFNGRLRPLGLRAHY

SEQ ID NO: 44510 - protein, 361 aa, Zea mays
  Coding DNA Sequence Number=SeqID_1135
MHRALPPSEPPDGERPRCLRLVVGGAQPHGGGHPSAIARLQGFSSGSPAAFPHQWSPRTVTTSSMVGRSKSGCGLCPALSFKDLHHPCCGGGRAEPEPYLPHGPVDHLFLQHSGERALTGLAEGADFDNAGPAGRKRRQLQHAWLAGSAGSGAASGATSHRWGGAWLSAHRTGDCCAVRTGEPSKTSHAARGSTGACWGGRHFIGVAPARRCPLSSVLEVMVARGGFSADEIVGATRGQTSGSLALTACPRPSCGDVGEGLHAAAFALSSSLLLFSRPRRRSLSLLLQWSAASHPEFVVPQALRCGGCSYPREWNRSSVCNGTLSAGVCSLWLSRPEHLGIFSAIPCFFLISSTRTRLSVS

SEQ ID NO: 44511 - protein, 141 aa, Zea mays
  Coding DNA Sequence Number=SeqID_1136
MTLGTSDTWPRLGLRSRGTLGHFRDQQERFCNGIPSEGDIEPSDPIERDRVWQITCRVRLTTAKSSLKRNRKLRLARPQGSASPSASEGGLCLARPQGSASTSTSGGIVSSPDLGLRRSLRLARPWARTDRAKEDTSLPYP

SEQ ID NO: 44512 - protein, 151 aa, Zea mays
  Coding DNA Sequence Number=SeqID_1137
  Homolog annotation: Hit_ID=Q6QP51; Match level="QueryCoverage=29%, HitCoverage=20%, E-value=1e-13, Identity=82%"; Hit description =Putative growth-regulating factor 1
MQVACNRTTGTHPFDFNASSMEAQAHTSCNRRAGYYVRETALPLAPMPRLLDRGTSAVTRGNPAHRPTVLIDHIGHGDRERGYFERDPSPRRKRAPSPPTDQGFEGWPLGRVRQPPQRTRASGSLLIRGSKASPSEGFDSRLRALGLHAHY

SEQ ID NO: 44513 - protein, 582 aa, Zea mays
  Coding DNA Sequence Number=SeqID_1138
  Homolog annotation: Hit_ID=Q6JAD6; Match level="QueryCoverage=95%, HitCoverage=96%, E-value=4e-67, Identity=50%"; Hit description =Putative uncharacterized protein
MPRTKNVSAPGGGDDEDPRCPFRQVKGKTVYLEQQEGCKKRRMDREARAVAAAAEQAELGDQPQTPSDQIAYRVCRLASRPRSTPTTASTPPPTLPAPVTPAAPSTTSTTPASTAPPPAPASAPPIPPARFRERDETELRPLAADPRLFDLQRATATQIALRVHRLLDLPAFLLAAGADSEVHLSYLPRLLTLLTTSGRYVEESYAMAPLTLLVALMVVLLLLMRRTLLPRMGYREAATHIQLWLLGALVSHSEFDVVDFLICEIEDTVLDGLRARRQLPYAHYLCHIFAQLIRPPQFQGTLEASRVLFGSYRPAPEDPVPAPAPVFDTQAEDTALHQFEAQDATVDDDDDDFGILPPPPMPPCSHDHEVVSSSGAAPAAPPAIDPALAAILQTLTQQQAHLAAVQQQMSERMLSMFQTIQDRQGSLQQQLLQDRAENLAFMTLMLQHTSVSIPPVQSAPPPPLQALVVPAIQLGPPLPIVGPSSSPLRPVTLVSTSPVFSSVCPQPPVPPASAVTTIAVAVSVTTPDLAAPAAYPQSESVPAPASTADPGSETDSDPELAFALLPRPRPDAPPPPSPSSAV

SEQ ID NO: 44514 - protein, 123 aa, Zea mays
  Coding DNA Sequence Number=SeqID_1139
MAETVCEVVYTCESEKKSFEAASRIPPLDPIASSTTVLFRKFGPKDDVAINKRRFMELKEHMQGDFGAENEAYESSAQSISAIWKGEAENGSSIDSSTGMEVKPSDQESGGTAMNMESSPIAM

SEQ ID NO: 44515 - protein, 68 aa, Zea mays
  Coding DNA Sequence Number=SeqID_1140
MALLLSHAKSAEEKNPTARSRVSAMERRRRPREQVAGEADRGAPLVGAVERSPDGLVRFFLSSNHIVK

SEQ ID NO: 44516 - protein, 42 aa, Zea mays
  Coding DNA Sequence Number=SeqID_1141
MAEALAAMAGGIELAGAKERWLAGERFELGIKVNILDLWLKV

SEQ ID NO: 44517 - protein, 155 aa, Zea mays
  Coding DNA Sequence Number=SeqID_1142
MHVIEHQKWRRYHAEFDLIPEGICAASIHLVESMDELLAICYLYMDFDPTNISSARIFKMEKTCGDEELVAWHLVDDVGDRVFLLTGTNMATWCYACTNNPRGSTLYFLVHLVAGHRDLCIYDVQKQTMEVGQVHDHEDLEIMHTQSYWINVPPC

SEQ ID NO: 44518 - protein, 72 aa, Zea mays
  Coding DNA Sequence Number=SeqID_1143
MGVDWEHTYYHAGDLLNCFSLQVVQSPMEDEVPADSTSETDLLLTDCSGDSDTGAEDTAFGIAAAEVDAGSA

SEQ ID NO: 44519 - protein, 221 aa, Zea mays
  Coding DNA Sequence Number=SeqID_1144
MARLRHTAQKSVIPFLPSRLAERSLRRPVANLERLHHRLHEEQERRRQEQEQQGSSFSLQQEIESVRSCSPWRRPLHHHWAPQPLEQLLEETQTTEVATAARTTTPTFLLTRNRKDGLLDPSLATLLAGVTSTMRSTPCYVRHLTGILGPSSIIVWSTSIVTGSTRAAGRRPAWCAVRRTVSGVRRSAQSTIPSFSGTQLRRPCKMPHGVRFRTTAQCSMG

SEQ ID NO: 44520 - protein, 59 aa, Zea mays
  Coding DNA Sequence Number=SeqID_1145
RIQGVVRLAIVPSMGLGVCGSLCQAGVAMRLMVLGFDSGNGEDEAVEGDFQEFQDYDEF

SEQ ID NO: 44521 - protein, 546 aa, Zea mays
  Coding DNA Sequence Number=SeqID_1146
  Gene Ontology: Mol. function=isomerase activity; Cellular component =nitrate reductase complex; Biological process=biosynthetic process
  Homolog annotation: Hit_ID=P58292; Match level="QueryCoverage=39%, HitCoverage=72%, E-value=1e-115, Identity=96%"; Hit description =Uncharacterized isomerase yddE
  Pfam annotation: Domain name=Nitrate_red_del; Domain location=1-107; Score=160.1; E_value=5.8e-45; Accession=PF02613.6; Description =Nitrate reductase delta subunit
  Pfam annotation: Domain name=Nitrate_red_gam; Domain location=129 -353; Score=294.0; E_value=2.9e-85; Accession=PF02665.5; Description =Nitrate reductase gamma subunit
  Pfam annotation: Domain name=PhzC-PhzF; Domain location=326-546; Score=230.8; E_value=3.1e-66; Accession=PF02567.7; Description =Phenazine biosynthesis-like protein
  Pfam module annotation: Pfam domain module=Nitrate_red_del::Nitrate _red_gam::PhzC-PhzF; Domain location=1-107::129-353::326-546
AEWCEVFDRGRTTSLLLFEHVHAESRDRGQAMVDLLAEYEKVGLQLDCRELPDYLPLYLEYLSVLPDDQAKEGLLNVAPILALLGGRLKQREAPWYALFDALLQLAGSSLSSDSVTKQVNSEERDDTRQALDAVWEEEQVKFIEDNATAWLRYDYGQYTWRASSSQMLDKRGMVIWSNLFHIGILGIFFGHLFGMLTPHWMYAWFLPVAAKQLMAMVLGGICGVLTLIGGAGLLWRRLTNQRVRATSTTPDIIIMSILLIQCLLGLSTIPFSAQYPDGSEMMKLVGWAQSIVTFRGGSSEMLNGVAFVFRLHLVLGMTIFLLFPFTRLVYHVDAFTSQPFRGNSAGVVFPADNLSEAQMQLIARELGHSETAFLLHSDDSDVRIRYFTPTVEVPICGHATVAAHYVRAKVLGLGNCTIWQTSLAGKHRVTIEKHNDDYRISLEQGTPGFEPPLEGETRAAIINALHLTEDDILPGLPIQVATTGHSKVMIPLKPEVHIDALSPDLNALTAISKKIGCNGFFPFQIRPGKTNDGRMFSPAIGICGRS

SEQ ID NO: 44522 - protein, 82 aa, Zea mays
  Coding DNA Sequence Number=SeqID_1147
MSALGSSQVFDLCVVGDPSRKEIEIQGSLRKQNEEETVVEEVVSQAENPPAKNNFYFDIYGVDPEPPATQGKPRCVISFLVF

SEQ ID NO: 44523 - protein, 99 aa, Zea mays
  Coding DNA Sequence Number=SeqID_1148
  Homolog annotation: Hit_ID=P77216; Match level="QueryCoverage=59%, HitCoverage=14%, E-value=1e-29, Identity=98%"; Hit description =Uncharacterized protein ybdN
MMIGIRADESYNRFVAIASLNKQRFADDKPWTTAAPGGHSWYIYPIYDWKVADIWTWQAFLCVICEFANLLARSNDKDYGSITLSNRIAGLLCAHESAG

SEQ ID NO: 44524 - protein, 209 aa, Zea mays
  Coding DNA Sequence Number=SeqID_1149
  Gene Ontology: Mol. function=DNA binding
  Homolog annotation: Hit_ID=P77174; Match level="QueryCoverage=100%, HitCoverage=100%, E-value=1e-117, Identity=100%"; Hit description =Uncharacterized protein ybdM
  Pfam annotation: Domain name=ParBc; Domain location=51-146; Score =81.8; E_value=2.2e-21; Accession=PF02195.9; Description=ParB-like nuclease domain
MGDTMQQRLTQDLTQFLASLPEDDRIKAINEIRMAIHQVSPFREEPVDCVLWVKNSQLMPNDYNPNNVAPPEKKLLQKSIEIDGFTQPIVVTHTDKNAMEIVDGFHRHEIGKGSSSLKLRLKGYLPVTCLEGTRNQRIAATIRHNRARGRHQITAMSEIVRELSQLGWDDNKIGKELGMDSDEVLRLKQINGLQELFADRQYSRAWTVK

SEQ ID NO: 44525 - protein, 348 aa, Zea mays
  Coding DNA Sequence Number=SeqID_1150
MPNHAFFDCLEMQRTIRLKSPRNSQEKPLSSSGNEIDGSGYDYGTASPLQPNKILAEYVDVYSPLLYTPNPPHTQVVSTATTAQAKMKLWKETSRSSKTTTSSRHWLAATPSRLPVKAAMARLRHTARKSIIPFLPSRLAKHPLRRPVAGQSSHLERLHHRLHEEQERRRQEQEQQGSSFSLQQEIESVRSCSPVLPLEAPPAPPLGAPASGVAAGGDPNDGGGDDSSSHDTDFSADQEPEGWVARPITRDAARGCHFHDALDTLLRRALNRRTWSIEYRCVVYQHSRGVYPDRWEVTSLVRRPENNLQGAEVCSEHYSISERDSADAGHARCCTACAFALLLGARWG

SEQ ID NO: 44526 - protein, 48 aa, Zea mays
  Coding DNA Sequence Number=SeqID_1151
MPWYEAGLIRSPRAGEGADERGKEEGGEGEGGGGGSLTVGGGGRGGGG

SEQ ID NO: 44527 - protein, 243 aa, Zea mays
  Coding DNA Sequence Number=SeqID_1152
MTTVPIDSPFASRPHRLGIQCSTDPGYRRAVTALAAELVGDEESALSRAQLINQMGQRASPGIKEDRRPKSGEDDLGFPVKFCRVRELGKLHNLLAKLTEWLARLGSDQGGLATVAEARVAMAGGRELAGAKEGRLAGKGEHGVRCLTIGPKEACMLSRSGVPNKRRYPISSSYLLSTSVDSGADVLDADPCSACYSVDFGSHALQMPKMPQDKRGGFMRGHPQNYSPSNVMTKRRFCMVPVK

SEQ ID NO: 44528 - protein, 134 aa, Zea mays
  Coding DNA Sequence Number=SeqID_1153
MEKGAEGLTGGETALGIIDQSNGSESFTRDQGSEVLPGSRVWKLHKLLANLTERLARLGSDQGGLATLAEARVAMAGGGELAGAKEGRLADEGLQVLLTGSRDREGRNRVCLTATHREKIPGIKVNTLGLWLKG

SEQ ID NO: 44529 - protein, 33 aa, Zea mays
  Coding DNA Sequence Number=SeqID_1154
MADACFTWFYLLLFLHLMQKTGDGFYMDVPGLQ

SEQ ID NO: 44530 - protein, 28 aa, Zea mays
  Coding DNA Sequence Number=SeqID_1155
MAKGFWFAQWRSICAVTADGKGNLDPYH

SEQ ID NO: 44531 - protein, 820 aa, Zea mays
  Coding DNA Sequence Number=SeqID_1156
  Gene Ontology: Mol. function=RNA-directed DNA polymerase activity; Biological process=RNA-dependent DNA replication
  Homolog annotation: Hit_ID=A2Y9N4; Match level="QueryCoverage=54%, HitCoverage=19%, E-value=1e-13, Identity=22%"; Hit description =Putative uncharacterized protein
  Pfam annotation: Domain name=zf-CCHC; Domain location=79-96; Score =21.3; E_value=0.00091; Accession=PF00098.14; Description=Zinc knuckle
  Pfam annotation: Domain name=zf-CCHC; Domain location=98-115; Score =18.0; E_value=0.0029; Accession=PF00098.14; Description=Zinc knuckle
  Pfam module annotation: Pfam domain module=zf-CCHC::zf-CCHC; Domain location=79-96::98-115
MVTAPAPAVRPACNREKCDSGVQKRFVSSTGVAQVDRNTEKTEQLVDGWQLVESKQSKRRRLKMERQRQKRPVPEDLAGRCFNCLSHDHFAFQCTQKTRCFRCRKQGHRSFDCNLLKRPMRLEAVKVAVNNSAASRPETKISVWRRINLPEPSTTSGDRLREQPRPETRLSVWRRLSSSSATSVIKVKKKRLVWRRKDNQHPPSDSGIAVRHQETSTMEGDGGGLISLDAVGVQSKRQRTRKRRRRAKPISDLDKRPAGPVSPTEDDKPCILRWSQQMTRAEDDLQKAVVITVISDREKVPVEEIAELIAPRLELEEGTLIIRQYSQSSFILFLPGCDMVEMLVGNWPFLRAATFTITCRKWSRFLNSRGVVLPVLLDFELQGIPIHAWETITVEQLLNPFASVHQVHPDTLELKDVAVYRCSAWCLDPSLVPASRELWIVEPPVAVDGISSGRRTLMYPIRITFSSAPRRDGSDPKLHAITSGGDGSGHVQQGSPPFSRPPHSSGRRGDHGHSGRLSVHERLGPRDVSMQQRSISSGVAVSDLKRTLESDGGNLPPRLAEMTDDMVIVSPVKAKQLKVYFRQRLKNVLNQEEAGTPNSVTVLPPSPSDVAAADTDPSEYPVSDVDAVLATPSRTLTSSLSDVAAAHAAPSEANALDVDAELAAPSEEDISATTIAALAAPSEDPPATTQDSVEICAQEQFISKLSNQITRILPIPKSVRRQSSIPLAVPRRSRRVAGVGVEFKIQDWGKRSKKQAMVALNIIEDNEGFSRQALDDYAKLFKNTLSRSHVQALAALFGWSVPDNLEFITGTGDITAASLV

SEQ ID NO: 44532 - protein, 212 aa, Zea mays
  Coding DNA Sequence Number=SeqID_1157
MQPGCTPRRRSPKTVTTSLWVGRSKSGCDLGPTLSFKDVHHPRWGGGRAEPELYLPRGFVGHPLLRRSRERALAGPAGGSDFDNAGPVDGRRRLPQRVGLVGLARGAPSCQKAAPYRCKGRTALEHATGRSVPCSSGRIRVGICRRADGPCRRCRGGGGSRSPRRRRDHRHHPRFGPPALCTCPRPSSVGVGEGKVAAAFALRLSPLQFGHP

SEQ ID NO: 44533 - protein, 466 aa, Zea mays
  Coding DNA Sequence Number=SeqID_1158
  Homolog annotation: Hit_ID=Q6J9V9; Match level="QueryCoverage=13%, HitCoverage=33%, E-value=5e-07, Identity=45%"; Hit description =Putative uncharacterized protein
MAERYQLPRSCVPPTTRRKDGGYPPSGGLEGGKTRCIREREDMVAFQGSHPPFKGGSPYLRPQPSWAESPPTHSKVLPYGAGAGSHTSCKPAQSGRSQTAVRGAYNRPAVTSDSPLLPRPTGERGGQPCRRHATAQSGRASPTPNTPSMEAQAHASCNRRAKCFVHATAPPLAPLPRLLDCGTNTATRGDPARNPAAPAWRDGQCGQKWPGSNGGGRRAGAAATSRSGRRFAFAIMTASKKGPGKGDTPKRILPREGTRLRASLLIRGSKAGPSEGFDSRLRSRGPYTHYWSEVRRPAPRKGSTAASGYSGSVPITDQGFEGWPPEGFTAASDAERGMTMESHRREASNPRTPSLGDRVRQITRSSPETPCSTPIEGNMALSPLLLAERRRRGVCKKFESVPDRPLALCRGSGAALANPAPAEPLTTSTYQPENLGLDRTTGLRPARMRDDQTSRSITRGIKTSEE

SEQ ID NO: 44534 - protein, 233 aa, Zea mays
  Coding DNA Sequence Number=SeqID_1159
MPCTKNVSAPGGGDDEDPPRPFRQVKGKTVYLEQQEDRKKRRLDRAARAALAAATAAEQMSAQIALRVHRLLDLPAFLLAAGADSEAEDTAFHQFETQGAAIPDDDDDYDDDHDFGAPVVPAIQLGPPLPAAGPSSSPLQPVTLVFTLHVISSVSTQPLVPPAPAVTTAVVAVSVISSAPAASAAQPPSKSVPAPASTADPGSEIDSDPQLAFALLPRPRPDAPPPPPFSSDV

SEQ ID NO: 44535 - protein, 194 aa, Zea mays
  Coding DNA Sequence Number=SeqID_1160
MEELDERAFLFVVETGTDDHGLAFMRESEVDSFSFSGRIEVVEGASFEGIIKYSSTDLPSTCTGRATEGPVVRAVRMVPRKHSAAPWKSTRMALGVENLIQCPYPLHGVRRRLEWQVARRWYGLCAFNEVLSPLIRGDVDVRLPEQLFRGGGCFLKYGSDKSRIIGSPVELFDHSCLSDLGDTIPHCLKLLRNE

SEQ ID NO: 44536 - protein, 241 aa, Zea mays
  Coding DNA Sequence Number=SeqID_1161
MTSHGSSDDGNVLSHTNGLAREGFPRILWEVLQGAGYMTPPQYAVQQFEKHRVPRCRVRMTLEPHPLQPGWRSLDSESFGYRAEDTIEAIALHGLTTFCGFHPLELSTHPIGLFPAEREDDPMWKDRVEHAKDIWAIYLGQTAHLTIRCMNALYRLQVMRGEAMSHLMALLEATKITLDNKEELVVDLSTEMVEKDLQEIQDMEANEDVDIEGGEEPASSVDTAGSGRPPSPESSVASFAH

SEQ ID NO: 44537 - protein, 211 aa, Zea mays
  Coding DNA Sequence Number=SeqID_1162
MELPLDAQSSGRRLDVDERVEQCRAVAGVLHVLARFVQVLQMQHLRGIHTYREEAPRTELLGSRRRLGEGESPSPRSGEAETPPEIEVEVEVEPWGRARRRPPSEVEVEAEPWDRARRRPPSEAEAGTEPWGRARRSPSSEAEAGAEPWGRARWSFLWRLRLDSTTVSLTLAGGTAVGAGQAALFSCQASQWRGEVTAVTSAPPTEERASG

SEQ ID NO: 44538 - protein, 107 aa, Zea mays
  Coding DNA Sequence Number=SeqID_1163
MGTNGHLDLDTEGKSVDQKVPKVHTKPIKRPRMGSIKESKGQPKAALVWRTELSEESDSDLASFGFPLRYNSPDMSGFHLRVAAMGVLHDLVDDKLRVATSVEAPDP

SEQ ID NO: 44539 - protein, 311 aa, Zea mays
  Coding DNA Sequence Number=SeqID_1164
  Gene Ontology: Mol. function=endonuclease activity; Cellular component=intracellular; Biological process=DNA repair
  Homolog annotation: Hit_ID=A2ZYQ5; Match level="QueryCoverage=43%, HitCoverage=37%, E-value=1e-25, Identity=50%"; Hit description =Putative uncharacterized protein
MSLRPQSVRHHQMDAGAMPSPDGRHFGMPLARSVILAPSSSPLVWPLDRRLHPQDPPPHALRRPGRPAANQKHPWHRIISIHPSVQEPDDDLFLQPDLLAGRSELPVGRVVRVSARADLGGTRRYVGVGDHQGQSQRGDGRRTPAWCDRVLSYDKGLELLGYRRSELALSDHRPVTATYATKVEVFSSRKLQRALTLTDAEVEGGQERNVDLFKNLVHEYDYTCWSCSVARLGYSGTAVISRVQPISVQYGLDITERDQEGRLITLEFDDFYLVNAYVPNSGRGLRRRNYRMRFLLHIYCPQDFFIHSFLY

SEQ ID NO: 44540 - protein, 305 aa, Zea mays
  Coding DNA Sequence Number=SeqID_1165
  Homolog annotation: Hit_ID=Q6ZHL1; Match level="QueryCoverage=54%, HitCoverage=79%, E-value=4e-11, Identity=36%"; Hit description =Putative uncharacterized protein OJ1218_C12.13
MEYLFDEPCSHQLVDLLAYGSTLFFVESAQRLLHGSGSSSDIQRVLGNIPRYARHVRGTPRKNLGVCAEKVDEHCFLFGVELGVDPDLLGGVVAGVERDGLNRLSWLEVAGVALRIWHLLGEALQVDDEGLRFGEGLGVLHALHVAFLRVSVRGADGDDPVGARHLELEVGVVGDDHELGIAWSPQHCVVGSSEPDHLEREGFLSEVGGSPEADGQIELPKGLDAFPGDDPVKGHRAGPDRGQIDLQEPEGLGVDDVEAAASVHEDLGKPDVADDGIDNERVLSRARHAVGVVALVEGDGLVGPV

SEQ ID NO: 44541 - protein, 435 aa, Zea mays
  Coding DNA Sequence Number=SeqID_1166
  Gene Ontology: Mol. function=protein serine/threonine kinase activity; Cellular component=integral to membrane; Biological process=protein amino acid phosphorylation
  Homolog annotation: Hit_ID=A7QRK5; Match level="QueryCoverage=28%, HitCoverage=17%, E-value=1e-18, Identity=36%"; Hit description =Chromosome undetermined scaffold_151, whole genome shotgun sequence
  Pfam annotation: Domain name=LRR_1; Domain location=109-131; Score =9.5; E_value=5.2; Accession=PF00560.24; Description=Leucine Rich Repeat
  Pfam annotation: Domain name=LRR_1; Domain location=133-156; Score =6.9; E_value=16; Accession=PF00560.24; Description=Leucine Rich Repeat
  Pfam annotation: Domain name=LRR_1; Domain location=85-107; Score =12.0; E_value=1.8; Accession=PF00560.24; Description=Leucine Rich Repeat
  Pfam module annotation: Pfam domain module=LRR_1::LRR_1::LRR_1; Domain location=109-131::133-156::85-107
MLPGSPVKRLLRRAAKGRREKAEMAELAAAAATLLLLRAASLRCSADPRVATPFSWQGSWVVSLSLPDTFLNLSSLPPPLATLSSLQLLNLSACNVSGAIPPSYASLSALRVLCVHDNLLNGTIPASLRALAALQQFRVGGNPALSGPIPASLDALSNLTLFGAAVTALSGYSIVVDKIDFYRSLQKVTEDGRLTVPIWRAFELHNTKLANDCSEVEAESEPRGRARRRPSSEVEAESEPWGRARLSPSSEVKGESEPWGRARRSPSSEVEVESEPWGQARRSPSSEVEVESEPWGRARQSPSSEVEVESEPWGWARRSFLWRPRLDLAVVGLTLASGTAVGAGQAALFSCQAILALIAPAIRSVGVAIWPRLLLREACPSWASGESKPVWLFPHANWSLPGCIVRFQVLGLGAEHGVSSELLTGDPSGHSCPVR

SEQ ID NO: 44542 - protein, 98 aa, Zea mays
  Coding DNA Sequence Number=SeqID_1167
  Subcellular localization annotation: CTP_CleavageSite=30; ConfidenceScore=5.23e-01
MTSTRGGGGSSIRSSGGGSQVGGGDSPIQRASGGVPELPRRRHFQGRRASGDVPEVPRRRHFQGRRASDGVPEVPRRQHFEGRRASDDRRRASSDGDA

SEQ ID NO: 44543 - protein, 80 aa, Zea mays
  Coding DNA Sequence Number=SeqID_1168
MAPRRQRSTPPEKERDPHRTVSAVHRTVRCAPDCPVCQATEGKICLPGMLSTAPSCLGAIKGTPRRMEKDTKHSLSIPKL

SEQ ID NO: 44544 - protein, 150 aa, Zea mays
  Coding DNA Sequence Number=SeqID_1169
MGENNKRKREPTPPSEEFGDSEYSEEEFSSEPEGSPAPVSPPASSDDSDDSQGIAAEVWTYIRAVERSGLEGSDESEYSSDEEDSDGGEEGEDDDDDDDDDDDDGGSGGGGDGDGRGGTKGGSGGSGDSTRGSSRGSTRGGGGGRGRASG

SEQ ID NO: 44545 - protein, 69 aa, Zea mays
  Coding DNA Sequence Number=SeqID_1170
MSHCPRALSPLPRLPLRAHTRLPLAPVQLRYNSPDYPVCHRTVRCTSGATAIYAQRSTLTDEQCSIVSR

SEQ ID NO: 44546 - protein, 106 aa, Zea mays
  Coding DNA Sequence Number=SeqID_1171
MAPKRATSKADEAAKAAVLAEKKGKTLVDTTHQEACEDDTLSKRQCNEQPTPEGSLRTCSSGGQPQQPPGFAPPEGADATEDGEVIGVSAEEQLQLHALRIKNRNL

SEQ ID NO: 44547 - protein, 397 aa, Zea mays
  Coding DNA Sequence Number=SeqID_1172
MGSARVVFVSLWEERNLVEVGTFQPSLSFKDFHQAARLHPLTNASRIFIILAGEEGEASRGLPSPGLASRFFLQLLGVETILQLCGGGALQPCRGRRTAAAQPGCNIPSFVWATVASRTGGSHNTSYAARAVDAVAGAEVVAAGESFSADETVSATRGPTSGSLALMSRSRPSSGDANESLPAAVSALGPSLLLQRSPASHPEFVVPSPSAQSALPLKASLAQLKRTLGRSAMSRSRRQRCERGQRRSWLEKKLRRPEPGRVVHWRDQPWSRAAEAMSRAGVLGGQLAEARDGNGYPKPEYPTGFTRYEGGRSVDIFLRGGDPPTVLLSEAGSDSAKGGVDDEGAAAPPTDDLYVGSRIAHPSESYFSWKVMSEESLGSVGLAAYVYSVIFRIPLSK

SEQ ID NO: 44548 - protein, 372 aa, Zea mays
  Coding DNA Sequence Number=SeqID_1173
  Homolog annotation: Hit_ID=Q6J9V9; Match level="QueryCoverage=17%, HitCoverage=33%, E-value=3e-08, Identity=46%"; Hit description =Putative uncharacterized protein
MPCKLAETKEAKPLRAERVTAQRLQALLHLRLTQRVKGRTTMQAACNCTTGMRPFDFDASSMEAQAHTSCNRRVGYYVRKTAPPLTPILRLLDCGTGAATQDDPTHSPIVPTRRIGHESVSRRRRRDDRYGQKWADSNGGSRQAEAAVKSSAGSRLLLGQQESPLSWRDTFGRRSGRRFTSAIMTASKKGTEKGDTPKGILLCEGSGPRALLLIRGSKAGPSEGFDSRLRALGLCAHYWSEVRRLAPRKGSTAASGHSGSAPTTGFEGWPPEGFDSRLRTRRARDDSGYVRYMAEARATLPRGSGAALANPAPAKPLTALLGRRQRHHPSLEAFADNRWSDRDRTGRDTLRSIRCQTKTGDEVIPQRGLVQL

SEQ ID NO: 44549 - protein, 149 aa, Zea mays
  Coding DNA Sequence Number=SeqID_1174
MGKNNKRKREPTPPSEEFGDSEYSEEEFSSEPEGSPAPVSPPASSDDSDDSQGIAAEVWTYIRAVERAGLEGSDESEYSSDEEDSDDGEEGEDDDDDDDDDDDGGSSGGGDGDGRGGTKGGSGGSGDSTRGSSRGSTRGGGGGRGRASG

SEQ ID NO: 44550 - protein, 36 aa, Zea mays
  Coding DNA Sequence Number=SeqID_1175
MERRSVGSLAQVASESRDKLTQDLNRMSNIWPGDSK

SEQ ID NO: 44551 - protein, 52 aa, Zea mays
  Coding DNA Sequence Number=SeqID_1176
MVVDEEDDEVKNENDLVILEGINRNIVELQVYLQSEGDNSTSVTQKANAKSA

SEQ ID NO: 44552 - protein, 134 aa, Zea mays
  Coding DNA Sequence Number=SeqID_1177
MANEAIRQNEEGSHTALEEARKAEEATERERLIAELSPPPEPYDPEANPVLKGALDVIKIANEAVDETGSGTFPWKSGPTDDVLEYITSSGHVASLEPTTRRGRVLPWVPSSHPCLRQAAAWSHIWHPHHTTRR

SEQ ID NO: 44553 - protein, 468 aa, Zea mays
  Coding DNA Sequence Number=SeqID_1178
  Gene Ontology: Mol. function=protein serine/threonine kinase activity; Biological process=protein amino acid phosphorylation
  Homolog annotation: Hit_ID=A7QMH3; Match level="QueryCoverage=13%, HitCoverage=5%, E-value=1e-21, Identity=82%"; Hit description =Chromosome chr19 scaffold_126, whole genome shotgun sequence
  Subcellular localization annotation: CTP_CleavageSite=25; ConfidenceScore=5.27e-01
MVDPCPQIPSWPLQPPVHPCGCVVVAASPPAQSCSARAPRLPLRCPLTHPRLQRPGHTPALPPPPRSSDPPADADARASAPLHPHPRHERDLQPTRGCRSTRIGHGPYAEPRKDGSLLVLPIGSLRPLCGNLLVNLRDPRRPICKVGYFGLSRIKRNTLVSGGVCGTLPWMAPKLLNGSNNKVSEKASFFPTILLIALCIWNPDRLIRNEYLVLHMQVKCTKFKLIEGLKHFMSLKNLVLEYRSEPRKDSSLLVLPIGRSNNPDSLASSFVQMVELGYKSMAHFLIATHRASSDNSEDSSPAGKEKSLSTKSESSCISDHDGPDANERPEDGETSSKAKVKKATRRKGKKSSDGDKEDSRSESVVTSECQDGHQANTEAGCVTQSSKSVSRKRKGSVPFAMKLWRFHLQAVHGMLAKMFSFSRECILIEENKGLLSTSSFDRPRARSHVAVNFFIPNMMQNTIATHCY

SEQ ID NO: 44554 - protein, 122 aa, Zea mays
  Coding DNA Sequence Number=SeqID_1179
MSSIPPAAGGLSAAIVVVARRWKEYHVVAAVEGHELKTPETEHRPGPERLLETAHLELDGKLFVSTQQAPTWRANCRRFETGGSLSRRVGRRGGSSEAEVESVFQGRGRARAPGSGEAEVVR

SEQ ID NO: 44555 - protein, 313 aa, Zea mays
  Coding DNA Sequence Number=SeqID_1180
MGHRRPLGLPASSSPETPCSAPSEGNIALSPLLLAERRRKGVCKKVESVPDRPLALYRGSGAALANPAPAKPLTASTYQPENLGPDRAPGLRPARMRGTTRPTEALREALRPRRSQTTPPRPRRLHPAGALARTHRNKTQPRKAGPLAKKCDKSLQASINTPFEARGLLSGTIIRGTLKAPNSQLSRSDHSHFAAPLTDLTEGQRRLRRSDCCAARQSEADRQSGPASGTIGNSAPPDPGLGLGLSPGRRRTPLRPTQGSDSGSAPEDGELRSARPRARTWAQPRKTANSAPPDPGLGLGLSPGRRRTPIRPT

SEQ ID NO: 44556 - protein, 80 aa, Zea mays
  Coding DNA Sequence Number=SeqID_1181
MQLKKKLAHPGSFGYSISNNTIFSLGTGAGNSILSLGRPGDKAIAKEHCIAGGGIACIGTTSPVSIKVNHLLSLWRRAKH

SEQ ID NO: 44557 - protein, 418 aa, Zea mays
  Coding DNA Sequence Number=SeqID_1182
  Gene Ontology: Biological process=pollen maturation
  Homolog annotation: Hit_ID=Q6Z8U1; Match level="QueryCoverage=81%, HitCoverage=35%, E-value=1e-144, Identity=71%"; Hit description=C2 domain/GRAM domain-containing protein-like
  Pfam annotation: Domain name=GRAM; Domain location=119-185; Score =67.2; E_value=5.5e-17; Accession=PF02893.11; Description=GRAM domain
MEPGGGTAVGAVGSLLTSSCFRKGAESRHRHRACGAPSLPIWRSWPDGTPVGFPVARVSSGDLEIGELARAQHTNHRTKLHLRIFLNNSKGTGMVTEYLSKMEKEVGKKMTLRSPRTNTAFQELFSLPAEEFLISSFTCYLKRKLPTQGQVFLSPRTIGFYSSMFGRKTKCYFLWEDIEDIQGIPQSISSWSPSIIITLHKGRGMDAKHGVKSMDNGKLKFCLQSFASFSVANRTIMALWKARSLSTEFKVQLAEEQSQINTLQSEDNGVFVGIEDAKSLQMTEVFSSTISTNMASLMEVCLGGSLEMKFSKKLSPVGGEVTGTQQKSLMPNKKGWVIEEVMELQGVLLGDFFTLHIKYQVEDLAPKQRASNVQVSLGIEWSKTSRHQKRIEKNVLSSSSARLKEMFNLALRELSHAR

SEQ ID NO: 44558 - protein, 476 aa, Zea mays
  Coding DNA Sequence Number=SeqID_1183
MAERYQLPRSCIPPTMRQKDGGYPPSGGLEGGKTRCIREREDMVAFQGGHPPFKGDYSYSCPQPSRAESSPTRSKALPCGVGAGSHMSCKPAQSRRSQTAARGAHDRPAVTSDPPLLPRPTGERGGQPCRRHATAPSGRASPTPNTPSLEAQAHASCNRRADCFVHATAPPLAPPPRLLDCGTNTATRGDPVHDPVARSGRRFAFAIMTAPVKAPSLPTDQRFEGWPPEGFDSRLRSRGPYTHYWSERLGGCSRKPGSGRTVDSVNIPARELGTRPYTRATASSHEGTTRPAEALREALRPRRSETTPPRPRGLHPAGALARTHRNKTQPRKAGPLAKKCDESLQASANTPFEARGLLSGTIIRGTLKTPNSQLSEADRQSGPAGGIIGSSASPDPELGLGLSPERRRTPLRPTQGSDSGSAPEDGELRSARPRARTRAQPRKTANSALPDPGLGLGLSPGIRRTPLRPTQGSDSG

SEQ ID NO: 44559 - protein, 589 aa, Zea mays
  Coding DNA Sequence Number=SeqID_1184
MGTCAALGGRMSSPEHRESSARILKVTGGQWPRNVLIPRAAGEDIFTSCLACVMKIFPYGWNIAAVVSALMDKDRQDAAWKPQAFARVGDPSHEVKRARGGVKSTAPGSSKPLPAAKPAVPGPSKSSAGSRAAASGAGKPPSAEPMKERRPPSLVRTDEAAAGGADFDMDICVEDYLVGEFFYVGLGLEQGYGVGSDAGQLAVVPAPVAATSPTVAVGAKGTSQDPWSKFCASGEISSAAAAKDVAGSASKQLRHASWQLKHATVFVDHVASAALTSEFAAERQQLEGRIERLQVQHTDAIRDKSAAENKSRRLANRLAAAKAEKEDLRCQLAEERRDANKACAEAQSAQAKGKLAWVEASITHQRAKEMEARHDGCDRLDKMEASTRAKVEWTHMQLEELEVLPTIVTGLMSYASLITYEGAVNALSREGCGHFEVFDQSDGGFECGIFQVEDLVLKRSAGALFDRMWGPHGQETVRERSDRAMDQMTHDEEVEDLGDLDNALPEATGVELAPPSNAGEGPSATPAPTGAGEDPVPTTALTGEDAPKVESSDEGLDYFAALDVAAAESSPRVEGAGAADLPSASIEYR

SEQ ID NO: 44560 - protein, 197 aa, Zea mays
  Coding DNA Sequence Number=SeqID_1185
  Homolog annotation: Hit_ID=Q6QP51; Match level="QueryCoverage=25%, HitCoverage=23%, E-value=8e-12, Identity=66%"; Hit description =Putative growth-regulating factor 1
MARGLGPTRHANWPRAEEAKPPRAVHATAQRLQAFLHFRPDQRVKGQTAVQAACNRAKWARPSDFQHTQHGGPGPRVMQPARRLLRASNCTATRTTTTPPRLRNQYRDSRQPCVRPSSASQARRRSERRFAFAIMTVSKKAPSLPTDQRFKGWPLGGVQQPPQSVWAPHPLLVRGSKAGPSEGFNGRLRPLGLRAHY

SEQ ID NO: 44561 - protein, 112 aa, Zea mays
  Coding DNA Sequence Number=SeqID_1186
MAPRAGLGRCQPHSVEWHSSQSGAGGAVLLSDRSVERRSDCGHFGSVDWRACARIKGERTVKDILDFFTYAPASPFRKEEGGSAMFPSEGAEHGVSGELLAGNPSGRPCPIC

SEQ ID NO: 44562 - protein, 144 aa, Zea mays
  Coding DNA Sequence Number=SeqID_1187
MFIILAGAEAGLELYLPRGFVGQPLLQHSRERALTGPARGADFDNAGLVDGGRRQLQRVGLAGLAPGAPSCRKGGCRAARTGGPPKMSRAARAAFMFWGCPAFAPNRFTKRESPRAKVTSEVSVSRRRRSPSTRSALLSEASLA

SEQ ID NO: 44563 - protein, 223 aa, Zea mays
  Coding DNA Sequence Number=SeqID_1188
MPDLLTGPAPFGTAPIPAPPATDNTWLWPLPMGPSGECGAADASGSDVQIPLHTAEDLNLLPAGLLDSPPAQIEGPSQDHQHTNDTMILPTADNGVSMSTPISEVQDEDRDIQAFLKEHFVPRSAPLLLINNEESISAPSPGQGASRRRVSTRLALKPAAKLGSIARCQMIIMKKLETITSGSSVKEEHKKRLKELFNEPASEQVVHAVDELFDVAYPSPNAN

SEQ ID NO: 44564 - protein, 279 aa, Zea mays
  Coding DNA Sequence Number=SeqID_1189
MWRLGDVRYPGESSASRGGEKSERAVVPSLATSIDLGEGASRRGSSAEPGKLGSKRPCSSGSGGGPLSVVGGKEVAREETEIQGSGATVGVRRRRTAIAKKLRRSTQPTKEGAQKRKRISSPPSSSSSTSSGAPHPKRKRSRVYGYANTHSMLVGFIEQLTMDSENAKLRRALAHLIRVVEERCADIVDVVHGAFQPVSGPVLNEMNRALVQIEDLANDLDQLALEKDWEMEHMTPTPIVESSQTEDELLIDYDSELNNDDIVGYDDGRDYSTDDTYPY

SEQ ID NO: 44565 - protein, 113 aa, Zea mays
  Coding DNA Sequence Number=SeqID_1190
MAPKRASSKAAPSVDKAAKAALLAEKKGKALADNTPQEACEDEALSKRQRNEHPTPEGTLGTCSSGGLPQAPPPGFTPPEGEDATEDGEVIGVSAEEQLQLRALRIKNHNLQK

SEQ ID NO: 44566 - protein, 299 aa, Zea mays
  Coding DNA Sequence Number=SeqID_1191
  Homolog annotation: Hit_ID=A2GBN7; Match level="QueryCoverage=70%, HitCoverage=33%, E-value=4e-08, Identity=28%"; Hit description =Putative uncharacterized protein
MQELGHGKQRRLKARLLRDILEPDTFSKVPPHHSAVFLKLTREAGYHSALPLKRRSRVQSLGITSKMPTPTFNHSALPLKRRPRVRSLGITSKMPTPTFNHSALHLKRRPRVQSLGITSKMPTPTFNHSALPLKRRPRVRSLGITSKMPTPTFNHSALPLKRRPRVRLLGITSKMPTPTFNHSALPLKRRPRVQSLGITYKMPTPTFNHSALFLKYQPRILSLGITSKMPMPTFYHSALPLKRWSCVRLLSVTSKTLMSIFTIARRCFYYIKRIVSTFSKSSDKSSKRGDKRQSSLKGS

SEQ ID NO: 44567 - protein, 539 aa, Zea mays
  Coding DNA Sequence Number=SeqID_1192
MDKDRQGAAQKRQAAVRLHEARPKRQRGAAKAVASSGGKPPLAAKAGASAPSKAPEATAGAGGSKSTKVVPPASGVAEASKAARALPLSGKRVADFGTDITVDDYLGGSDEGQLAIVAPGAAIATAAIVPKARGEALGAGGEVSTLALVRDEVGVATRRLKGVTEALSQATEALSQATEALSQVADFTSRTASGALTAALSAEVERLRTQHADAVREKSASDSKCRKLADKVAALEKEKADLRRQLAGERREANEAIAKEQAAQAEAKLARAEGNIAKELAGHLQERLTALESHAKGAEAAMRAEAERTRTQLMDTYRELGARTGDFEVPDREPGLRCLEWVQEKLQELPAVVGGFMSYASLVTCEGAVNALSREGCRHFEVFDQADEDFERDIYKVEDPVVKESAGALYDRMWGPHGREVVRERAEIARAQAARGERVDDFGALNSALPDPEPTPAEAVTGAALEPTPEIAAIATAAPTSAAAGEDLPPKVAEGAPEAPAAAVPSVEDPAAAAVETTAEVAAEPTAEAPAAPGPSQVA

SEQ ID NO: 44568 - protein, 134 aa, Zea mays
  Coding DNA Sequence Number=SeqID_1193
MSRLLNCRTSAATQGSPARDPTVPTMCNDHGFDYHRHNRAQEGGNRRCKTPDIAGVARASSCDSFVSSRHCAPVVASHRHEPPGMLMEARGGDCDLEDSSEVGVWEERTVTGVWVTALLSFGENPLTALTFTST

SEQ ID NO: 44569 - protein, 92 aa, Zea mays
  Coding DNA Sequence Number=SeqID_1194
MVQYPESDQTASAAASSPTTGPRRDSRHRRGIRIADDPIRPPENEEEIEVTEEKTPPPSESQAGNCFYFVICGSEPDSPTNEGKPRCICHLP

SEQ ID NO: 44570 - protein, 1288 aa, Zea mays
  Coding DNA Sequence Number=SeqID_1195
  Gene Ontology: Mol. function=protein serine/threonine kinase activity; Cellular component=nucleus; Biological process=protein amino acid phosphorylation
  Homolog annotation: Hit_ID=A2ZRG0; Match level="QueryCoverage=99%, HitCoverage=95%, E-value=0.0, Identity=78%"; Hit description =Putative uncharacterized protein
  Pfam annotation: Domain name=HEAT; Domain location=561-597; Score =13.1; E_value=0.3; Accession=PF02985.13; Description=HEAT repeat
  Pfam annotation: Domain name=HEAT; Domain location=760-796; Score =0.7; E_value=21; Accession=PF02985.13; Description=HEAT repeat
  Pfam annotation: Domain name=HEAT; Domain location=872-907; Score =9.4; E_value=1.1; Accession=PF02985.13; Description=HEAT repeat
  Pfam annotation: Domain name=Pkinase; Domain location=2-199; Score =99.9; E_value=7.8e-27; Accession=PF00069.16; Description=Protein kinase domain
  Pfam annotation: Domain name=Pkinase_Tyr; Domain location=6-198; Score=-17.5; E_value=2.5e-11; Accession=PF07714.8; Description =Protein tyrosine kinase
  Pfam module annotation: Pfam domain module=HEAT::HEAT::HEAT::Pkinase:: Pkinase_Tyr; Domain location=561-597::760-796::872-907::2-199::6-198
MGSAKTVYKGRKKKTIEYFAVKSVDKLQSSKVLNEVRMLHSLDHANVLKFYSWYETTVHFWLVLEYCVGGDLKGLLEQLCDFGLARRLKDIEKTNPGDVPQPMRGTPCYMAPELFRDGGVHSYASDFWALGCVLYECYTGRPPFVGREFTQLVKSVISDPTPPLPDNPSRSLQNLIDCLLMKDPAERLQWSELCEHNFWRTSILMIPLPPQPAFDNMIELSATPYLAERNGDKPSRQLTPPKHRENIGLRKKDENSTKPSMTPVKNVQSGKKNSAKPKAVGFKGVNILRMSRIAKLNLQRERDKENYRRPPTETTENETEVNIENNDMELDFGENPEGDAPDDTDGSDNPGSAGNENPQSTDANEENYMENQVDMLTDEGSVKPDIMVETEQNSCSDNLDVAASPPSSMRKAHRAKVTPCPATGSEPSNIFEAFWHPTDLAVKPVMPIRKADKAVDMIPTLPFEALTAGDYTKLPKEQMNAFNSQILQSLSGTYQVSQKQNTIRYLEMLSMNSDAANKITNGPIMLLLIKMLRLSKTSVLRVQIASLMGLLIRYSTALDVELASSGIFNALSDGLRDKHDKLRRFCMATLGELLFYISTQSDQDNKEINTQESPLKGNRPATSWQVPSAVIALVSSILRKGEDDLDQLYALRTIDNICSQGTEWTSRFASQDVIGHLCYIYKATGKQESTRLIAGSCLARLSRFSPSCIHLILEKISFRDIASTLIKGNGREQQINLNILNSALVNSHTVTSMNRYILSLSDDKQLVPGLISLIEQGTDVLRGKAFLFVALLCKNSRRWLPHFFCNAKLISAVDRFGKEKEGFIHQCTEAFVQLVASLVPGILETVSSDIQQIMCGKRHGPVTALAGRAHPKSTIHLFPVILRLLGSASFKHRVVTGHVLLQLANLIKILEAPFQARDDFQMTLLRVLEAATEEPSVILDEHTIFTSRIIPSLSVLYNGNKDGDARFLCLKILSDVMIVIFSDSSLTSDEQILTDLKSISQRHFLPLYPSFAEDEDPIPIFAQKLLVMLMEHGYIKVSDILHKATVSQCFDFLLGDLSNANVSNVKLCFALASAPEMNTHILSQLQVVRRIGNLLEFVAAKDMDDFLEPTLEFCRAFIIRGTGSNRSGVALSENPALLVDSAFSMSIAVDQQTCVTDICDFGGNMGTFLELVGNSDPQISNLASDCVVLLSKAAPREATVGLLTNLPKLSTAMDLLKHESSLRLIRLLYGLAFSCRQYLAQGMILSISVSALMRVEALVSVFKGSNDSLLADAASYLSAELQRLPRCG

SEQ ID NO: 44571 - protein, 120 aa, Zea mays
  Coding DNA Sequence Number=SeqID_1196
  Subcellular localization annotation: CTP_CleavageSite=61; ConfidenceScore=5.50e-01
MAMRVVKIFGTPQGDAPHVRLSRSYPNPLNPILSLRTTPNSSPCMLQREVKGSQSRSRELKDSSVVGTCALGEGELDGGAERGSCRRSRCGRRLLLVVVSRTRGEEGADGVGLEVVQDGG

SEQ ID NO: 44572 - protein, 168 aa, Zea mays
  Coding DNA Sequence Number=SeqID_1197
  Homolog annotation: Hit_ID=Q6JAD6; Match level="QueryCoverage=86%, HitCoverage=20%, E-value=3e-45, Identity=66%"; Hit description =Putative uncharacterized protein
MAPLILLVALTAELLLLWLLGALVSHSEFDVVDFLICEIKVTVLDGLRARRQLPYAHYLCHIFAQLIRPPQFQGTLEASRLLFGSYRPAPEDPVPIPAPVVDTQAEDTAFHQFETQGATVDDGFGVPPPPPSPKPPRTLDHEAGSSSGAAPPTIDPALAAILQTLTQQ

SEQ ID NO: 44573 - protein, 125 aa, Zea mays
  Coding DNA Sequence Number=SeqID_1198
  Homolog annotation: Hit_ID=Q6JAD6; Match level="QueryCoverage=100%, HitCoverage=16%, E-value=1e-19, Identity=48%"; Hit description =Putative uncharacterized protein
  Subcellular localization annotation: CTP_CleavageSite=79; ConfidenceScore=5.53e-01
MTLMLQHTSVLISPVQSAPPPPLQARIVPVIQPGPPLSTVGPSSSPLRPVTLVFTLPVIGSVNTQLPVPPAPAVTTAVVAVSVTSSAPIAPAAQPPSESVPAPASTADPGSETDSDPQLAFALLP

SEQ ID NO: 44574 - protein, 172 aa, Zea mays
  Coding DNA Sequence Number=SeqID_1199
MSSPSRSSSSIDVACHWRLPGVLSFALRRCNFRFWDRVNPAGHHQGMEYFGSAVLMVYAPLPDWSAFEAEYSGTLVGLVPDDRIERRSIGLVLEVPIYRIQMFGVPPKRGTVASQMDMVACPTFDLGHMVEGQTIRWNYPDRPAWSRIIRACVSDRPGCVARVPAPWPVLAP

SEQ ID NO: 44575 - protein, 251 aa, Zea mays
  Coding DNA Sequence Number=SeqID_1200
  Homolog annotation: Hit_ID=Q6J9V9; Match level="QueryCoverage=43%, HitCoverage=38%, E-value=1e-45, Identity=82%"; Hit description =Putative uncharacterized protein
MEAWAHMSCNRRDGYYVQGNHIATRANAASSRLQNQCRDSRQPCADRKGDISKRILLSEGNGPQALLLIRGSKVVPSGVRQPPQSTRAPIPLLIRGSKAGPPEGFDSRPRARRVRDDPGYVRYMAEARATLPRYPRTFPRPAGMICNGIPPREAPSPRTLSNGSGSSKSPTGLGLSLGLGRRSPPRPTLGLGLSLGLGRSHILARPQASASASASGGVTSSPDLGLRRSLRLARPQPRTDYATGDTSLPYS

SEQ ID NO: 44576 - protein, 51 aa, Zea mays
  Coding DNA Sequence Number=SeqID_1201
  Homolog annotation: Hit_ID=Q8W0X4; Match level="QueryCoverage=76%, HitCoverage=2%, E-value=3e-08, Identity=71%"; Hit description =Putative pol protein
MTKSNDSGSGHKRKDGKKKRTDASREIVYYDSDEVLFLSKDGPTHDKQGNP

SEQ ID NO: 44577 - protein, 123 aa, Zea mays
  Coding DNA Sequence Number=SeqID_1202
  Homolog annotation: Hit_ID=A2Y3P0; Match level="QueryCoverage=32%, HitCoverage=11%, E-value=7e-09, Identity=75%"; Hit description =Putative uncharacterized protein
MSHERKRKDRSPVGTRPSREKEPLGRGRHYRRPRPPPGRRARHRRRLRSLLARLLLRLRLALAPAGRRGHSIHRLDVVQSGCTALSIVKHGDLMVVANVDDSRVVLGIATYDDAITPSSSSST

SEQ ID NO: 44578 - protein, 18 aa, Zea mays
  Coding DNA Sequence Number=SeqID_1203
MALNLVLLLSTGGNKIIP

SEQ ID NO: 44579 - protein, 167 aa, Zea mays
  Coding DNA Sequence Number=SeqID_1204
  Gene Ontology: Mol. function=aspartic-type endopeptidase activity; Cellular component=chromatin; Biological process=chromatin assembly or disassembly
  Homolog annotation: Hit_ID=Q75HA0; Match level="QueryCoverage=61%, HitCoverage=30%, E-value=2e-09, Identity=30%"; Hit description =Putative uncharacterized protein OSJNBa0056E06.12
MATQIQELEEQAGARENTIEPPPQPYGGGDHQRPPAAATYQEFLGTQPPLFTRVEDPLDVDVWLRVVESKFPLLNGVCSDMAKYAGYHADTDEKKRDKFRRGLSTKLHDRLNTVRANSYNELVNMAISQEDCITARQAEKNRKTTLAGPSAPPQRFRIVSDTQSRGP

SEQ ID NO: 44580 - protein, 229 aa, Zea mays
  Coding DNA Sequence Number=SeqID_1205
  Gene Ontology: Mol. function=hydrolase activity; Cellular component =cytoplasm; Biological process=purine base metabolic process
  Homolog annotation: Hit_ID=A2XNQ9; Match level="QueryCoverage=46%, HitCoverage=41%, E-value=3e-50, Identity=88%"; Hit description =Putative uncharacterized protein
  Pfam annotation: Domain name=dCMP_cyt_deam_1; Domain location=111 -213; Score=116.8; E_value=6.3e-32; Accession=PF00383.13; Description= Cytidine and deoxycytidylate deaminas
MARFATRVTGDDDALECRSVAYSFITVDVGLRPQPRQLREGGRTQRCIHWDLSGGISRSIDAVWLCDMFAMRRGRLLTIRGGFGTRRESTLKLGGTGGSWRWRQRHGVSCARQGSQILDKTVEEAYRGVDCGDGGPFGAVVVRNDEVVVSCHNMVLKHTDPTAHAEVTAIREACKKLGKMELSDCEIYASCEPCPMCFGAIHLSRIKRLVYGAKAEAAIAIDLQCTTLL

SEQ ID NO: 44581 - protein, 300 aa, Zea mays
  Coding DNA Sequence Number=SeqID_1206
MRKWARPSPLLLVLLSCRSSIPLDRPTRWQGGRPSHTINHFLNGTCKNYATSKAEYTNTQLDLPGYKGSSSLISCEKQTIRIKFYPCKGRREALNYNYYLTVENPLGSSKPNPRSFPKSNSTRGRRKGGGAYRRRDCSGEVAEGVGEVLTVTMMCGSPSGMVGVGRSACAGGGARRRRGVRPIQGKIDQSNGSESFTREQGRGVREELKNGSLESSVHAAGGRPKSDEVDLGLPVKFCRVRGLGKLHGPLAELAEALARLGGSWSGLATVAEALAAMAGGKELAGAKEGWLAGDGEHGVK

SEQ ID NO: 44582 - protein, 194 aa, Zea mays
  Coding DNA Sequence Number=SeqID_1207
  Subcellular localization annotation: CTP_CleavageSite=13; ConfidenceScore=5.34e-01
MGGIHSGRCSSVRGRSKPSPTRSSRSLAVTVEKGHGSRGEMMVTRSAITERKGWRRKGQGGRFPLLWLSLSGCENLIGRQKEGQRTIARPSPEYIRTQGPGKGDTPKRILPREGTRLRAPLLIRGSKAGPSEGFDSRLRSRGPYTHYWSEVRRPAPRKGTTAASGYSGSAPTTDQGFEGWPPKGSQPPQTPSEG

SEQ ID NO: 44583 - protein, 317 aa, Zea mays
  Coding DNA Sequence Number=SeqID_1208
MDVLMIRNLGEDQQGLGKGQDVKEEKLGRSQQEKAKSNSTSSPPRSLGPVYIKTDAQDASELRLDAQHILFCAKCQRDANGKIKPKVHRTVSRAQAGSPSEQTALGKNSARRGYNSPDCLVSLPHPHQRSATQSAGDAWTLPMVTKPHRTVRCATGAVAAKNESKPFKRNGVQAGGEGDAVHRHRDFIGATLPSHLVAIGHSDGGVAATHKGKALGGGDGGVDEVVGGAGVEQREEMLVVDGGGDLHGLCFPHCSHGEERDDRRVTVRHRSTLGGGFLILISHVQVEKALTTVTTHKRLTTVVTQALFVLFRHFCRG

SEQ ID NO: 44584 - protein, 242 aa, Zea mays
  Coding DNA Sequence Number=SeqID_1209
  Gene Ontology: Mol. function=carboxyl- or carbamoyltransferase activity; Cellular component=ornithine carbamoyltransferase complex; Biological process=amino acid metabolic process
  Homolog annotation: Hit_ID=Q8SA97; Match level="QueryCoverage=33%, HitCoverage=15%, E-value=2e-15, Identity=55%"; Hit description =Ornithine carbamoyltransferase
MVPPVDVAGLRPRLGDVEAPPKPRSSLSSVTEVESEPPGRARRRSPADAGAESEPWGRAKRSSSSSGAEPKSEPWVGRGGDRRLPGLSPSPSPGSGGVRRLPGLSPSPSPRSGGVRRLLGLSPSPSPGSGGVRRLPGLSPSPRPGSGEAELPMVPSTGPGRLSASLCRVAPQSERRRRRCLSVRLRFGQSCFLAKTGPRASREHIRRWRGASGETEILRGRLPLSEARLGRGVIGSLVWTNP

SEQ ID NO: 44585 - protein, 227 aa, Zea mays
  Coding DNA Sequence Number=SeqID_1210
  Gene Ontology: Mol. function=protein serine/threonine kinase activity; Biological process=protein amino acid phosphorylation
  Homolog annotation: Hit_ID=Q6L5E0; Match level="QueryCoverage=17%, HitCoverage=4%, E-value=5e-11, Identity=82%"; Hit description =Putative uncharacterized protein OJ1651_G11.5
  Pfam annotation: Domain name=DUF1296; Domain location=1-51; Score =17.8; E_value=0.0015; Accession=PF06972.2; Description=Protein of unknown function (DUF1296)
MVQSLKGILADRSEGEIYATLCDCGMDPDIAVERLISQTPAQLRWSLTKQEWLLATGLTGLLNPYGLWSPRHSQSDVSSSEMEFGTARQYDTTDLDEALQRESFEALNPRAVAVVIDPIQKRTIDFRFWLLNPYGLWSPRHSQSDVSSSEMEFGTARQYDTTDLDEALQREISKERSSKLEKRSKGPPAVAGHMSLTAFHRLKQKKALFSVAAGAQCPKVVVKGFLF

SEQ ID NO: 44586 - protein, 409 aa, Zea mays
  Coding DNA Sequence Number=SeqID_1211
  Subcellular localization annotation: CTP_CleavageSite=31; ConfidenceScore=5.04e-01
MAGQGFVYSRNAISPRPSPALGENNNPRRILASPEGLLKQRAHPRLAQSPARACFVVKQPWPNRLTNRPYRRRIQCEDRLTPYPDTRASVGKIEQLSPASGATGSSASLDIGPRPQEEVSASPDPRARPPPRPRKVVSASPDPRAQPQPRPRKVVSASPNPRARPQPRPQEESRPRPTPASASGGVSASPDLGLGPTTPQEGSSAPPTATTPCTQGSSTSPTATLAWPSCGRVVAREDGLTDRLSLSLVNACNPYCKRIPLAQDNTSHVFPPCVPSRANPSGLGHAATILLVGPGTPRGRNADMDILKGILLREGSGPRALLLIRGSKAGPSKGFDSRPNSGFMLITNQGGSKAGPSEGFDSHSEHAERGMTLGTYVTWPRLGLRSREARGLPSQSGNGQTVDSVNKPA

SEQ ID NO: 44587 - protein, 284 aa, Zea mays
  Coding DNA Sequence Number=SeqID_1212
MARWLSWLWCCFRCHLLPLGRSMAVCPPAGAQVAAVVGAEAMVARGGFSTDETVGATRGQTSGSLALIACPRRSGEDVGEGLATAAFALRSSLLLFSRPRQRSLSLLLQWSPASHPEFVVPQALRCGGCSYPREWNQSSVCNGTLSVSLWNPRLLYDEPEPEAAVIREWDQLRSHAAEAVSRADVLGGQLAEAMERPVEILPPVSPSEVGPDPAEGGNDAEGAAAPSVDDLFVGSRITYPSESYISRKVMSEDPAIEAVEKRERRSGRKTFSEENFDAEGVPPF

SEQ ID NO: 44588 - protein, 218 aa, Zea mays
  Coding DNA Sequence Number=SeqID_1213
  Homolog annotation: Hit_ID=A2Y3P0; Match level="QueryCoverage=39%, HitCoverage=39%, E-value=1e-13, Identity=38%"; Hit description =Putative uncharacterized protein
  Pfam annotation: Domain name=DUF834; Domain location=102-170; Score= -1.7; E_value=0.093; Accession=PF05754.5; Description=Domain of unknown function (DUF834)
MYDKLRRSRRLDAVQSGCSALSIVKQGNLMVVANVGDSRVVMPSQESSVLGMSRAFDDYYIEDCGVILAPDVTQWRTDNNDQFVILATVGSNWMGQIGSWDAREDMGARNWSETHWIARSTRGGGRPKSGEVDLGLPVKSGRVRGLGELHGLLAELAEALARLEGGWSGLATVAEALAGRNELAGAKERGLAGEEIWSQEIRSVSLLKPEANPGFCRV

SEQ ID NO: 44589 - protein, 369 aa, Zea mays
  Coding DNA Sequence Number=SeqID_1214
  Pfam annotation: Domain name=SlyX; Domain location=260-327; Score= -7.1; E_value=0.043; Accession=PF04102.3; Description=SlyX
MKLAKPSDPARLHRKPEIDLIGLRSSAAARGPSYPAGLLAADEHPRLRAWTDRLRPSPTINSPTPASGGDSHFSSDFLSRDGFPSILWEVLNSTGYPTPPLYTVQLYEEHRVPRCRVWLTLEAHPLQPGWRSLDSEMIGLRTDDTVEAAAMKTLTTFCGYHPLEMVMHPLGLFSTEKKDDPMWCNRVSHVKDVWAMYPDLVGRVTVQCMSALYRLQALQSDAMALLANTAQTAKLTLDSREDFVVDLFTELVEKDLQVERLSQRITTLELQVEIRDNTIDFLENQLHDLQREFEEANDHLDMHHLEMEANEAGSEGEEAPEELGPAPGANETTSAMPPSPMAARQRRGHNEQVPPPPPPAPTVQELMAQ

SEQ ID NO: 44590 - protein, 56 aa, Zea mays
  Coding DNA Sequence Number=SeqID_1215
MAEMSSPELRRGDWPVKRYGARKSGPSPCSNPRQIQGFVVYRARVPMPSSGTRQRG

SEQ ID NO: 44591 - protein, 100 aa, Zea mays
  Coding DNA Sequence Number=SeqID_1216
MELRHGSRERARDSSHIAELSVEVDRLQREIVERDRAIDWALHTNVPSDIAAMGAGTSGEADGGPYGELDLFGAPPSMNLADVRSPEASGGAGAAKDAED

SEQ ID NO: 44592 - protein, 91 aa, Zea mays
  Coding DNA Sequence Number=SeqID_1217
MPEIDLPKQQKLQGGYPHTLGYRASGTKQISNRFSLADPQIFLRSPWHLCPLELEAEDNSAAAPKPGKPGRNIAASAAGFPCHHSGWNESI

SEQ ID NO: 44593 - protein, 72 aa, Zea mays
  Coding DNA Sequence Number=SeqID_1218
MEILILVIFVEEALLMKLSVLRASVLLILSKMANFFRGFVYLPLQVFETQKVEVSSPEVGANVGDLFSNAKS

SEQ ID NO: 44594 - protein, 145 aa, Zea mays
  Coding DNA Sequence Number=SeqID_1219
  Subcellular localization annotation: CTP_CleavageSite=68; ConfidenceScore=5.00e-01
MAPPVDVVGPGLSPPSSGTEPESEPWVGRSGVRRLPGLSLSPSPGSGEAEFPMVPEAGPDRLSASLCRVAQQSEWRRRRCPSVRPLAWRLGQGCFLANTGPRASRKCVRRWRGASGETEILRGRLPLPEAGLGRGVIESLEWTDP

SEQ ID NO: 44595 - protein, 169 aa, Zea mays
  Coding DNA Sequence Number=SeqID_1220
  Homolog annotation: Hit_ID=Q8W0Y2; Match level="QueryCoverage=15%, HitCoverage=1%, E-value=8e-07, Identity=96%"; Hit description =Putative gag-pol
MALLHSARYQQSLRRYHARGVRSRDLQARILTVEGSSSTLGIDYTFGEGPLQESGSSRWLGWSPRGLGQLSPEDISPARGLGRSTPASVPLTDDPARLRPTKSSFRANSASVRADTATPGFGSSKSSRGVPLTKQGKPRTARPTEPRDSYASGIRIPHSSPLHGATHAW

SEQ ID NO: 44596 - protein, 346 aa, Zea mays
  Coding DNA Sequence Number=SeqID_1221
MAERYQLPRSCVPPTTRRKDCGHPPSGGSEGGKTRCIREREDMVAFQGDHPPFKGDSPYLRPQPSWAESPPTRSKALPLRRGGWVPRVMQAGPGQKKPNRRARCMQPSSGYKRPSIFAQTSGPTRHATGAPDATCEQLHRHSRHCHASSTAEPVPRLEATLRTIQQRQRGVTVNTAKNGPVVMAMVGGQEQRSRRQPSLRPIRGQRENPLSRHEDGAPVFRSSNGSRTHNDHFANRPLRRVNSTARQAAPLAGEGPGKGDTPKRILLREGTRLRASLLIRGSKAGPSEGFNSCLRARGLHTHYWSEVRRPAPRKGSTAASGHSGSAPTTDQGFVGWPSKSSQPPQT

SEQ ID NO: 44597 - protein, 119 aa, Zea mays
  Coding DNA Sequence Number=SeqID_1222
MAGRSWARGCYIIHLPETHNVGHEPWDVVDPVLPAMFARFEGKEDGALPLYVDHRPITEPHGSSDTGVKLGEEAARSRHVVCRPGIKHPPARGHNLLLLLTVEMEENLALVDVDRSLRG

SEQ ID NO: 44598 - protein, 211 aa, Zea mays
  Coding DNA Sequence Number=SeqID_1223
  Subcellular localization annotation: CTP_CleavageSite=34; ConfidenceScore=5.15e-01
MQRAPPPPSTATCLRPLSCLRLVPCHGELRLAVRCSRHPSLCPSPLCFVRFVLTGAILAQPELRLRSPVESLCLRRCFVTPALPLKQHGSSSLISCEKQTIRIEFLNLASDRTCTHHNRNGRPRLRSREEGNLLPGSLSGRQILWYRLGCWIWGYLLSSSLLRHEDILSVSKVTVYRNAMNMVSSVGLNYNRGLIYSKNYVKIIVGCQGSL

SEQ ID NO: 44599 - protein, 86 aa, Zea mays
  Coding DNA Sequence Number=SeqID_1224
MVEAQRLDRATVAELRLRKDRSGERGPDETERGREHRRVSRAADSEAELTVARDDPLELQGLPLATALLVLTSISSTETHETHRAL

SEQ ID NO: 44600 - protein, 60 aa, Zea mays
  Coding DNA Sequence Number=SeqID_1225
MAAGVSKALYAKVVRPGRERGIDGDGTLQDMVDGVTWPTTLPLGWTVEWDAAPAGEEQEE

SEQ ID NO: 44601 - protein, 94 aa, Zea mays
  Coding DNA Sequence Number=SeqID_1226
  Subcellular localization annotation: CTP_CleavageSite=64; ConfidenceScore=5.44e-01
MESSDFGSGAGSCRLGNVAVSQVGVPRQILPRSCLTAEFCSQISPGCVQASSPRRPVALVNAIVCMRPVHLVVCAEPLTITVVRALSSHTLTIV

SEQ ID NO: 44602 - protein, 218 aa, Zea mays
  Coding DNA Sequence Number=SeqID_1227
MAHDKEVEDLGDLDSTLPEASGVELAPPSDAGEGPSATPAPTRAGEDPAPATALTGVDALKVVVEPTAEDPGPSQVPTFRPAQATAAGNTDFVAASTVVPVDANLFGSVSECFESDGESGSSFSWTEESLDEGLDYFDALDVAAAETSPRVEGSEDLPSASTGYRRRRVVAKHSVGEFSRSGRRRRMGMERGHLRVDRIGKQELLSSPIGASIGEGDL

SEQ ID NO: 44603 - protein, 121 aa, Zea mays
  Coding DNA Sequence Number=SeqID_1228
MVEQGIESRTPSASVKNSARHVHMEQELGAKTARGRVETRVSSDGGQGTTGEGARRAHPPGGAMAKKTSNGGQLWPDPEKMREAGASLSRERALGRHGRGSPVTGTKKRRLREETGGERPA

SEQ ID NO: 44604 - protein, 16 aa, Zea mays
  Coding DNA Sequence Number=SeqID_1229
MGVADNDASGRDNGFN

SEQ ID NO: 44605 - protein, 202 aa, Zea mays
  Coding DNA Sequence Number=SeqID_1230
MPPAPPQSIPAAGGDLDGDGYDDDADGSSSHDTELLEEPESEGWIARPITHDAARGCHFHDALDTLLRRAFDRHTWSIEYRCVVYQHCRSGVADGLDLKYYPHRSTGNVGCVIVSPVGEGNPRLNSMVNLAAVLNTELDHTLNELGKVRAEVAELHAECAAHHYLDGGSPAPVGIQHPYRSPPRGRFEYGTPDWRTRIDLDP

SEQ ID NO: 44606 - protein, 112 aa, Zea mays
  Coding DNA Sequence Number=SeqID_1231
MPRRSSFGPPETFSLPFFPLCPRIHGPFPAIEFVVAFSPSLPNPGEPGTPLEHACLNSGDLTAAERSSAARSRSSLPDNEQSEVPECVVGKLPEQQPGEGKCPLTYYVLHTL

SEQ ID NO: 44607 - protein, 24 aa, Zea mays
  Coding DNA Sequence Number=SeqID_1232
MAGVSLAAGGGWLSEEHIFSYEAY

SEQ ID NO: 44608 - protein, 71 aa, Zea mays
  Coding DNA Sequence Number=SeqID_1233
  Homolog annotation: Hit_ID=Q8W1D4; Match level="QueryCoverage=52%, HitCoverage=9%, E-value=2e-07, Identity=78%"; Hit description =Cinful1 polyprotein
MSKVDALLKVVEHLRTSPQHWCPPPVNSLPLFELMASFNNQSEATLATKLVLSIIGGSCSEPANKKQKKEA

SEQ ID NO: 44609 - protein, 151 aa, Zea mays
  Coding DNA Sequence Number=SeqID_1234
MGKRMGRANHESVGAPVEDEKHREGLMEVKRRKRCEPISLSNDKASTRAKRSRFMLRCVRKEGKVFFAFGSKNTSFVHIQAVHTQMESFGSLLFGFVILYITKYYKVNSSFKEKDGDIVAEPPELLQLKCLSPTLEARPHLNGNNTSVPRI

SEQ ID NO: 44610 - protein, 57 aa, Zea mays
  Coding DNA Sequence Number=SeqID_1235
MVGTSAVTARRQPGPVDIVCQGGTNQEMVDGVTWPTTLPPGWTVEWDVAPAGEENEE

SEQ ID NO: 44611 - protein, 148 aa, Zea mays
  Coding DNA Sequence Number=SeqID_1236
MGKNNKRKREPTPPSKEFGDSEYSEEEFSSESEGSPAPVSPPASSDDSDDSQGIAAEVWTYIRAVERAGLEGSDESECSSDEEDSDGGDEGEDDDDDDDDGDGGGSGSGRGGGDGSRDSTKSDSRGSTKGSSRGSTKGGGGGRGRASG

SEQ ID NO: 44612 - protein, 44 aa, Zea mays
  Coding DNA Sequence Number=SeqID_1237
MELKHVFKGEAQKIQRLTQRRSCEAGKLRHVRRKGNRLKDEKAI

SEQ ID NO: 44613 - protein, 262 aa, Zea mays
  Coding DNA Sequence Number=SeqID_1238
  Subcellular localization annotation: CTP_CleavageSite=35; ConfidenceScore=5.49e-01
MARARAYKALPGFDCTLPRTLKPHRSLARRRLPVRSVSAAAQSLCHRRPANRAIPNPVQPSEKAVHTSMKLPERGIGVCFAGEASPRSPELSTPPEYVDRVIHSTILRFLVHTVTTLPHEAHRALGLNQFAVVWPVHSPPTRTPACARGPSDSGHPRRQAVPRRDRQSLSEPTPPFAGPPSPPDNLEKPYKNNPKDTRAIQIPYVYPQQKKTKPKDCNLADGEYILVPEQGAAQEVAPDPAPEPAPEDLPATALEGKPRFYA

SEQ ID NO: 44614 - protein, 58 aa, Zea mays
  Coding DNA Sequence Number=SeqID_1239
MAENGHGRELGTAGVQGGNEIDGFDYDYGAGCQHCNHCSGEDEAVEGDFQEFQDYDEF

SEQ ID NO: 44615 - protein, 99 aa, Zea mays
  Coding DNA Sequence Number=SeqID_1240
MGLPFRMGRGGGVAELRLYTQGATRGRCTEAENPRRVWRSPRGAIGKLLKTSPTCGPRGPERGREERARLIIFSGLVSLIRGRVVVYGQVDISLQIRLK

SEQ ID NO: 44616 - protein, 124 aa, Zea mays
  Coding DNA Sequence Number=SeqID_1241
MGLPFRMGRGGGVAELQLYTQGATRGRCTEAENPRRVWRSPRGAIGKLLKTSPTCGPRGPERGREERARNLGVTGLHPGHVWMPVFTWACLHGCSLVMFGGLVGELGQATTMQDSSGSQAHHIR

SEQ ID NO: 44617 - protein, 131 aa, Zea mays
  Coding DNA Sequence Number=SeqID_1242
  Pfam annotation: Domain name=Vicilin_N; Domain location=16-117; Score= -68.3; E_value=0.036; Accession=PF04702.3; Description=Vicilin N terminal region
MSQRWCGKSAKQRNGPLTRTAFDPLPLPTDVPVPMCFCGDPCKWIDKEISQKDKKWLENLKKWDTEDKERIEKRREELAAEQQRVDEQEMRCVAECREEKEKKLECARHAKDAMEENPDAFRKGKWPRCTQ

SEQ ID NO: 44618 - protein, 197 aa, Zea mays
  Coding DNA Sequence Number=SeqID_1243
MAYDQSTRVGTQVETAPILDRVALGNTLKRSIQDIERISPNVSDSVIHNFLDDVHVPSLVVPREGTSTHQVVMPAGQGFGYDDTPDDIGPSQLPDAPPSQPSQPLERRRHKIGQSACMENCGFTRWVDPRPIFPHAEYISYLHNMIFDLEREVSNINEKEGGDNNNGGGSQVQVCLDPYCGYPCHNKNVGPPSPPQP

SEQ ID NO: 44619 - protein, 499 aa, Zea mays
  Coding DNA Sequence Number=SeqID_1244
  Subcellular localization annotation: CTP_CleavageSite=52; ConfidenceScore=5.06e-01
MVAILRGHPPFKGDSPHLRPQPSWTESSPTRLQGLPPTTWGLGPTRHASWPRAEEAKPPRAERVTAQRLQALLHFCSGRRVKGWTAMQAACNRTKGAHPFDSDASSMGAQAHTSCNRRAGYYVRETAPPLAPVPHLLDCGTDAATRDNPAHGPIVPTERIGHGSVSRGEGAMVDMAKSGPAVMAAAGERKQRSSRLQAHVPSWDSERALSHGVKTTTGDTFGRQSRRRFTSAIMTASKKSRLRALGLRALLLIRGSKAGPSEGFDSRLRPLELRAHYWLAPEGFDSRLRARRARDDSGYVRYMAEARATLPRSGKSPAGSGAALANPAPAKPLTVSTYQPENLEPDYAPGLRPVKAPSTQGTRSRLARAQPRAKAADPGGFTSRPRENSAAYPAPTAVPLDRVRLTATKSSLGRHRKLHLARSQSSGSTSTSDDELHLAGPQGSDSASTSDDGLRLARPQGSDSTSTLDDGLCLARPQGSNSTSTPDDGLRLARPQGSD

SEQ ID NO: 44620 - protein, 161 aa, Zea mays
  Coding DNA Sequence Number=SeqID_1245
  Subcellular localization annotation: CTP_CleavageSite=36; ConfidenceScore=5.41e-01
MNAVVTSHLLVCLYSAAGKKAKRQNFYTRRTPARTRCVVDRRDRTVTLQGGAATRWEIESFLDNELREAFENKSPTAVAPRAPGDRPRRRALLGRRPCSWAVLPLLRYDAPARRSVFARPGGPEWGSAGGQMAAVVGAEVVAAIEVLVTNETTATILAPGL

SEQ ID NO: 44621 - protein, 154 aa, Zea mays
  Coding DNA Sequence Number=SeqID_1246
MEVSHRGRRPSPEPRRNPSIAGDLGIQSTNRTRCDEALDETNAAGVTSAEATAPVGGSLTYGDHHLSTDDNGHLPTNTAPVNGSRPNAHRQVLTPVLATGARMRLSQNTNAALVAYDVLCDPLVHPAAQEGPGRGPAPEAAPKLLRSGSQTRDS

SEQ ID NO: 44622 - protein, 189 aa, Zea mays
  Coding DNA Sequence Number=SeqID_1247
  Homolog annotation: Hit_ID=Q6J9V9; Match level="QueryCoverage=55%, HitCoverage=37%, E-value=9e-33, Identity=70%"; Hit description =Putative uncharacterized protein
MCSGVPTLRHGGWVPHIIRADPKREEGKPPHAKHGKRHLWQVKRAPFHLRHDDRVKKGTGKGDISKRILLSKGNGPRALLLIRGSKVAPCGVRQPPQSTRAPSPLLIRGSKAGPSEGFDSRPKACKVRNDPGYVRVQRERFVMESHRREAPSPRTLSNGSGSSKSPAEARGLLSHQGYGQIIDHVDKPT

SEQ ID NO: 44623 - protein, 334 aa, Zea mays
  Coding DNA Sequence Number=SeqID_1248
  Homolog annotation: Hit_ID=Q6QP51; Match level="QueryCoverage=60%, HitCoverage=90%, E-value=2e-46, Identity=52%"; Hit description =Putative growth-regulating factor 1
MKAWARRSCNRRDSYYVQKTAPPLAPMPRLLDCGTSAATRGSPAYDPTVPSECNDHGDRERGYFEKDPSQRRKRAPSPPTDQGFEGWPLERVRQPPQSTRASRPLLIRGSKAGPSEGFESRPRARRVRDDSGYVCYMVEARATLLSRQGRSDRSHFTLSLTDLTGKHRRSPRSDCCATHRGKTDNNRVQPRAQQKALPRPTLGLGLGRRSPPRPTPRLGLSLGLGRNRVLARPRPRPQEKSPPRPTLGSYRPRHRGYIITLPLASSGYEGTRSVSHLARPGLRHFSDDHVIAYTGLRRFSDGHVIAYTGLKHFSDSHVGMYTGLRHFSARHVSA

SEQ ID NO: 44624 - protein, 54 aa, Zea mays
  Coding DNA Sequence Number=SeqID_1249
MARIYVDTTWVTQEREEHGKNLCYVKAFSTVLTSCVCQLALFAFYSCGKHMGVA

SEQ ID NO: 44625 - protein, 108 aa, Zea mays
  Coding DNA Sequence Number=SeqID_1250
MDNIDEVINKRLTALREIEKDKTMVAKAYNKKQFATATVNGGSAVVLWLQRAIPYTRTGPEVRKSTPELPCRGLARPADQDLHGRRGDRGYGSADEEELSAVSGGRRR

SEQ ID NO: 44626 - protein, 137 aa, Zea mays
  Coding DNA Sequence Number=SeqID_1251
MAMMDSTSEKMYLCQDRLDVGLMIEDPLAGHMPRHGARTRAKSQKTANSAPPDPGLGLGLCPGRRRTPLRPTQGSDLGSAPEDDELRSARPQGSDSAPASADGLRLARPRGSDSTSATEEWKTDSTSASEELPHRPT

SEQ ID NO: 44627 - protein, 21 aa, Zea mays
  Coding DNA Sequence Number=SeqID_1252
MARIGYRFGVFEDLIWAVGAK

SEQ ID NO: 44628 - protein, 69 aa, Zea mays
  Coding DNA Sequence Number=SeqID_1253
MPNHAFFDCLEISAAPYSSAAPPLGRPVPVPGEPSPLPSLSPPLPLPGQAAARPNRPCPRAQPPLGRPC

SEQ ID NO: 44629 - protein, 465 aa, Zea mays
  Coding DNA Sequence Number=SeqID_1254
MKILEAERWLKGTNSHGVAFPQRQGGRTAGIPHPGGSEGGKTRCIREHEDMVTFQGGHPPFKGDSPYLRPQPSWAESSPTRSKVLPLRREGWVPRVMQAGPEQKKPNRRARCMQPPSGYKRLSTFAQTSGRKGGQPRRRHATAPSGRTSPTSNTPSMEAQAHASCNRRAGCCVRATAPPLAPLPRLLDCGTNTATRGDPAHDPAAPAWRDGTGKGDTPKRILLHEGTRLRASLLIRGSKASPSEGFNNRLRARGLRTHYWSEVRRPAPRKGSTTASGYSGSAPTTDQGFEGWPSKGSQPPQTQSEDISETSGNDLVTESHQREASSPRTPSTGDRVRQITRRYFWARLWASSRPLANGARTSARITRQQLTGDTMFGAHRGQHGAFPPPPCGRRRRGVCKKVEFVPDRPLALCRGSGAALANPAPAKPLTASTYQPENLEPDRAPGLRPARMRERPDQPKHYARH

SEQ ID NO: 44630 - protein, 59 aa, Zea mays
  Coding DNA Sequence Number=SeqID_1255
MAMMDSTSEKMYLYQGRKNSSAGSTLVSISAKTESLNIEKPYLDSHIPSIPLRVFSLVG

SEQ ID NO: 44631 - protein, 160 aa, Zea mays
  Coding DNA Sequence Number=SeqID_1256
MKFPEQGIELCLTEDAGSRSPDFTRLPVNVDRAPRPEHMPPTSSPACARGPVDSDHHRRRAAPRCDRKDLPKPTPPFVGPSSPPVVPPFFLSREVTPDPAPEPALEDLPAPALEGKPRNPFEMDTSSLEDMVAGVTWPSILPPGWTVEWDPTSAEEEQEE

SEQ ID NO: 44632 - protein, 192 aa, Zea mays
  Coding DNA Sequence Number=SeqID_1257
MVHCLGLERSQAADSRKEWVFVSEPGIMLRSFPLALLRMETIAVSRIAAFVECPVLRSFSCFRCLIPGYGLSRIPLPRLVVTPNVTALVPTVVCLTLRVLLPQYSGLVVVDGCILYSSLEKRTPEKKELGVVSRASTVSHVSRAARTVAGVAPAASLVTRLSTPFCRVIRVHTRVGDVDRGVRRDMGAALVG

SEQ ID NO: 44633 - protein, 308 aa, Zea mays
  Coding DNA Sequence Number=SeqID_1258
MARLRHTARKSVIPFLPSRLAERPLRRPVAGQSSHLERLHHRLREEQERRRQEQQGSSFSLHQEIESVRSCSPVLPLEAPPAPPLGAPASGVAAGGDPDDGGGDDSSSHDIDFSANHEPEGWVARPITRDAARGCHFHDALDTLLRRAFNRHTWSVEYRCVVYQHSRGVYPDRWEATCLVRCPENSLQGAEACSEHYSISERDSAEAAMQDAARRALSHYCSVFGGAADGLDLNQPSRRANTELDRALDELSRARAEIALLRAERAERRHLDGGSPAPVGTQHPYRSPRRGHQSYGNPDCRTKITLEP

SEQ ID NO: 44634 - protein, 262 aa, Zea mays
  Coding DNA Sequence Number=SeqID_1259
  Gene Ontology: Mol. function=carboxyl- or carbamoyltransferase activity; Cellular component=ornithine carbamoyltransferase complex; Biological process=amino acid metabolic process
  Homolog annotation: Hit_ID=Q8SA97; Match level="QueryCoverage=35%, HitCoverage=21%, E-value=5e-09, Identity=43%"; Hit description =Ornithine carbamoyltransferase
MALPIDVAGLCPRQGDVGAPPKPRLSLSSVAEAESEPLCRARRRSFGRGQGGVRALGSGEAEFRRLPARVRALGSGGAEFAVFRVLARVRALGSGGAEFAVFRVLARVRALGSGGAEFAVFRVLARVRALGSGGAEFAVAPLARPDCLSDSLCRVAPQSEWRRRRCPSVRLLYADGGYQLRIRRLEGALNGMAMVQYLKWIRPPAQFLTADDLSASIRAAAVSIRAQVDRIALRVTQISSPWITPASKLFRPSYRTHHGGIG

SEQ ID NO: 44635 - protein, 57 aa, Zea mays
  Coding DNA Sequence Number=SeqID_1260
MESHDLRAEWESRLVGGYEIDGFGYDYGAGCQHCNHCSGEDEAVEGDFQEFQDYDEF

SEQ ID NO: 44636 - protein, 317 aa, Zea mays
  Coding DNA Sequence Number=SeqID_1261
  Homolog annotation: Hit_ID=Q6QP54; Match level="QueryCoverage=22%, HitCoverage=24%, E-value=3e-08, Identity=47%"; Hit description =Putative kinase
MGRRETEREGGKKPEGDRHKRGNPRPSCLSHAQVGRKERIQGNDGASCDVVGPSLGSGEVETPPRLRSSLFSEAEVESKPLGRARRRPSAEARAESEPWGRARQSSSSSGAKPESEPWGRARRSSSSSEAEPESEPWGRAMRSSSSSGAEPESEPWGRAKRSSSSSGAEPKSEPWGQAKRSSSSSGAEPESEPWGRAMRSSSSSGAEPESEPWGRAVRSFLWRLRPDLAAVRLTLSSGTAVGAVQAATFALNAPAIRSVGVATWPKLLLGEDWASGEPKLCADGGYQLRLGVLRGAEHGVSSELLTGNPSGRPCPIC

SEQ ID NO: 44637 - protein, 237 aa, Zea mays
  Coding DNA Sequence Number=SeqID_1262
MPPAPPQVIQAAGGDPDGDGDDASGSSSHGMELSEESESEGWIARPITRDAARGCHFHDAHDTLLRRAFDRHTWSIEYRCVVYQHRRGLYPDQWEATCLVRRPDDDLQGADAFSEHYSITERDIAETAMQDATRRALSQYCLLFSGVADGLDLKYYPRRSTDSTRAAVLNTEQDHALDELGKVRAEVAELCAECAARHYLDGGSPAPVGIQHPYRSPPHGRFDYGTPDCRPQIDLDP

SEQ ID NO: 44638 - protein, 143 aa, Zea mays
  Coding DNA Sequence Number=SeqID_1263
MALPVDVAGLCPRLGDVEAPPKPRSSLSSMAEAESEPLGRARRRSSAEARAPESEPWVGRSGVRRLPGLSPSPSPGSGGASYGAFGMDWLPVSITLSSGAAVGVAQAALSFCQAGQWSGEVTAVTSALPEGACQEKGVRPPLR

SEQ ID NO: 44639 - protein, 398 aa, Zea mays
  Coding DNA Sequence Number=SeqID_1264
MSTKESYERVRVHVSGKANRAEGLLRLRDTDTSLITYCEKLKCRWRGSSSTLGVNSTFGEVRPSLGRQHGRRISVPKDDVSTTPGPSPPGSPPGTRPEQTARPAAPKPQPAVPRGHQPDSWPRQLDSGVGLGQAPANEAPFFEPTLPLSVLAPLPPALAHRRAAEGLDSHNEQTPALKVPLQTELRFHPRSGNNLRPGRQDSCSNGFRADAAAERLSPTKDENQPFKPGDGGPGVQAELAVSSAEKPSPAAATPTPHQQALAALKRTGRSSLPPSPRPPQNMSTALAAHDVLGDPLARLSARGRPGRGRPFAFPGMAGGSLRGVGGCLFPPNAGGRKGLLTHAEATPHSVRSSAPARMMKILEAEGGAEAAARLTSPHHRTGGHRLGRPPARGCSRAA

SEQ ID NO: 44640 - protein, 123 aa, Zea mays
  Coding DNA Sequence Number=SeqID_1265
  Gene Ontology: Mol. function=kinase activity; Cellular component =ornithine carbamoyltransferase complex; Biological process=amino acid metabolic process
  Homolog annotation: Hit_ID=Q6QP54; Match level="QueryCoverage=54%, HitCoverage=23%, E-value=2e-10, Identity=55%"; Hit description =Putative kinase
MALPVDVAGLCPRLGDVEAPPKPRSSLSSMAEAESEPLGRARRRSSAEARAVSEPWGRAKRSSSSFGDWLPVSITLSSGAAVGVAQAALSFCQAGQWSGEVTAVTSALPEGACQEKGVRPPLR

SEQ ID NO: 44641 - protein, 238 aa, Zea mays
  Coding DNA Sequence Number=SeqID_1266
MAERYPLPRSCAPPAMRRKDDGYPPSGGLEGGKTRCIREREDMVAFQGGRPPFKGDYPYLRPQPSRAESSPTRSKALPCGAGALSHMSCKPAQSRRSQTAVRGTLGHFRDQRERSCNGIPSEGGIEPSDPVARGPGPADHPQLTGDTMFGAHRGQHGAFPPPPCGKATQGRMKKAESVPDRPLALCRGSEAALANPALAEPLTASTYQPENLGPDRTPGLRPARMREQPDQPKHYARH

SEQ ID NO: 44642 - protein, 174 aa, Zea mays
  Coding DNA Sequence Number=SeqID_1267
  Homolog annotation: Hit_ID=Q6QP51; Match level="QueryCoverage=32%, HitCoverage=25%, E-value=2e-12, Identity=61%"; Hit description =Putative growth-regulating factor 1
MQAACNRTKGARPFDFDASSMEAQAHTSCNRRAGCYVQETAPPLMPLPCLLDCGTSTATQGNPAHDPTVPTRHIGHGTVDTFGRRSRRRFASAIMTASKKGPGKGIPRKGSFSAKETGPEPPTDQRFEGCPLGRVQQPPQSTRAPRPLLVRGSKVGPSKGFNGRLRPLGLRAHY

SEQ ID NO: 44643 - protein, 112 aa, Zea mays
  Coding DNA Sequence Number=SeqID_1268
  Gene Ontology: Mol. function=ion channel activity; Cellular component= integral to membrane; Biological process=ion transport
  Homolog annotation: Hit_ID=Q4VDM4; Match level="QueryCoverage=58%, HitCoverage=12%, E-value=3e-17, Identity=60%"; Hit description =Cyclic nucleotide-gated ion channel 2
MASWSSSDTISFSEVSPFDTILHLLQLMWSFKPCLYMDFGLASAVTTLWTCTDVTHLVHVLLQFRLVWCGKLIRYARAVAAHYVCSVKGLCFDLFIIRGRNRTFNACWRCTM

SEQ ID NO: 44644 - protein, 190 aa, Zea mays
  Coding DNA Sequence Number=SeqID_1269
MNELTGIRSAITNGTPVPPPQVQTTPLRGGRPAEQRKADEWCAVARSSSSDDNAFCSEGPSSGSANLGLDAAARKPPPMPKLVRQGRVEGHRVGGTGEGGYPERDPSLRRNRAPRPPLLIRGSKAGPPRVQQPPQITWARHPLLVRGSKASPPKGSMAASGYSGSAPITDQGFEGWPPKGSQSPQTPSEG

SEQ ID NO: 44645 - protein, 166 aa, Zea mays
  Coding DNA Sequence Number=SeqID_1270
MAERYRLPWSCVPPTTRRKDCGHPPSGGLEGGKTRCIREREDMVAFQGGHPPFKGDSPYLRPQPSWAESSPTRSKRAKGWAAMQAACNRAKWAHLSDFQRAQHGSPRPRVMQPARRSLRASNCTATRTTATPPRLRNQYRDSRNPAYDPAVPARRDGQCGPKTGGQ

SEQ ID NO: 44646 - protein, 315 aa, Zea mays
  Coding DNA Sequence Number=SeqID_1271
  Subcellular localization annotation: CTP_CleavageSite=48; ConfidenceScore=5.08e-01
MAGESKPGCGLCPSLSLKDFHHQCWGGDRRVPGSRTRVASEPLPAPPSATAAGRGSSADEIAGAAYGPTSNSTAFCPSLPHEFGHGRGPPGSSIRPEVIAAAVWPPGAEVVVVAAAGADDVVPFVGLPLLRRPPPSEWGCSYMRRWNRSSVCNGTLNESLGSVGLAARGFSCLVKGTPRPLFDEPKPGVAVSARTEAELARKEDLVGRSLAGSSVSGTDAGVDLPRPRARLMSSGDSWPRPRGDQSSRLLEPDSWRRPGRRWPGRDDEVVLQSGDPRTVSPSEARSDLAEGVVDAEGAAAPFNRQDPSLQDRIIL

SEQ ID NO: 44647 - protein, 327 aa, Zea mays
  Coding DNA Sequence Number=SeqID_1272
MAERYRLPWSCVPPTTRRKDCGHPPSGGLEGGKTRCIREREDMVAFQGGHPPFKGDSPYLRPQPSWAESSPTRSKVLPLRHGGWVPHVLQAGPGQKKPNRRARCMQPPSGYKQFSTFAQTSGRKGGQPCRRHATAPSGRTSPTSNAPSMEAHAHASCNRRAGRYVQATAPPLAPLPRLLDCGTSTVTRGNPAYDPAVPARRDGQCGQKRAGSDGGGRRAGAAVTSSAKLTSHPGAGPGKGDTLKRTLLCEGNRLRASLLIRGSKAGPSEGFNSRLRARGLHTHYWSEVRRPAPRKGSTAASGHSGSAPTTNQGFVGWPSKGSQPSQT

SEQ ID NO: 44648 - protein, 116 aa, Zea mays
  Coding DNA Sequence Number=SeqID_1273
MGKSKKGSSSSHHSGDKWKHDSQGIAAEMWTYIRAVERAGLEGSDESEYSSDEENSSGSSEEGGGGDGGDDGGDGDGGGDGGEGDDKGGDVGGKGGSGDGDNGSKGSSRGSNKASG

SEQ ID NO: 44649 - protein, 305 aa, Zea mays
  Coding DNA Sequence Number=SeqID_1274
  Gene Ontology: Mol. function=protein binding; Cellular component =protein complex; Biological process=protein catabolic process
  Homolog annotation: Hit_ID=Q9LT08; Match level="QueryCoverage=100%, HitCoverage=100%, E-value=1e-129, Identity=80%"; Hit description=26S proteasome non-ATPase regulatory subunit 14
  Pfam annotation: Domain name=Mov34; Domain location=24-135; Score =82.8; E_value=1.1e-21; Accession=PF01398.12; Description=Mov34MPNPAD- 1 family
MERLQRIFGASGMGQPPTDSPLLDSSEQVYISSLALLKMLKHGRAGVPMEVMGLMLGEFVDDYTVRVVDVFAMPQSGTGVSVEAVDHVFQTNMLDMLKQTGRATIDTGNVTTNGSITLKVVDELILLSFEALNPRAVAVVIDPIQSVKGKVVIDAFRLINPQTMMLGQEPRQTTSNVGHLNKPSIQALIHGLNRHYYSIAINYRKNELEEKMLLNLHKKKWTDGLILKRFDTHSKTNEQTVQEMLNLAIKYNKAVQEEDELPPEKLAIANVGRQDAKKHLEEHVSNLMSSNIVQTLGTMLDTVVF

SEQ ID NO: 44650 - protein, 148 aa, Zea mays
  Coding DNA Sequence Number=SeqID_1275
MGKSKKGSSSSPRSGDKRKREPTPPSKDLGNSEYSEEEFSSESEGSPALVSPPASSNDSDDSQGIAAEVWTYIRAIERSGLEGSDESEYSSNEEDSLDSSGEGSGGDGGDDDDEGDGGGGGDSGRGGSKGGNGSGSKGSSNGSNKASG

SEQ ID NO: 44651 - protein, 106 aa, Zea mays
  Coding DNA Sequence Number=SeqID_1276
  Subcellular localization annotation: CTP_CleavageSite=63; ConfidenceScore=5.12e-01
MAGGNTLAGAKERWLAGEGTGSCSVTKVPVSECLVPRLSCAKTVSNGFGLSSNFPRMCSRETLGDTGVSQPSPLKGISSRDSGQSPPGVKRRKEVLFKFYLLVTSF

SEQ ID NO: 44652 - protein, 235 aa, Zea mays
  Coding DNA Sequence Number=SeqID_1277
  Homolog annotation: Hit_ID=Q8MW55; Match level="QueryCoverage=43%, HitCoverage=9%, E-value=5e-07, Identity=39%"; Hit description =Precollagen-NG
  Subcellular localization annotation: CTP_CleavageSite=73; ConfidenceScore=5.17e-01
MALPVDVAVCALGRATWGFLRSRGRVRLLLPWPSPSHGVGRGGSRSAEARAKSEPWGRARRSFVVFWVLARVRALGSGGAEFAVFRVLARVRALGSGGAEFAVFRVLARVRALGSGGAEFAVFRVLARVRALGSGGAEFAVFRVLARVRALGSGGAEFAVFRVLARVRALGSGGAEFAVAPLSRPDCRSDSLCRVVLQSEWRRRRCPSVRLLYADGGYQLRIRRLEGTPNYGPRQ

SEQ ID NO: 44653 - protein, 295 aa, Zea mays
  Coding DNA Sequence Number=SeqID_1278
MNSRLVTWAVRKAWHFIERAKREARRRPLAAITQNIVDDSSLNIINAGKTARTTGFSPRVDGVVGGAVYNTKPFIGILSSTRRACAARDCRGWRHGEGIVGLLLGNAHGRRGWNLGAGHGSRRWCHGRLGTLLLDCREQAPGGVLVSIHCRGSGDSRPWSREVKNSMAGACGAGRRGSGRSLAGQGRAGEADAMEGGEQSCWLLMAGEQEDDGWGKWQPGGGHSHGKIIGQRGARPCPGTGAMGKLELAGRGTTICCRVHAGAWGREMPWRQQRASAKPCRTPARSWFPCEDERW

SEQ ID NO: 44654 - protein, 137 aa, Zea mays
  Coding DNA Sequence Number=SeqID_1279
MRRWTAQDKLGVDAVESEGGITEKMATQRWVSASQVFPPRTRRSCGRKPRLRRTPLSLSLSWCCSYTGVIEWLKRKEGAQASAGLVLIVQGSRRNGRGPCGRDVDGVRRRGEDLQDAHDSIGDVDTDDLGPSGGDAS

SEQ ID NO: 44655 - protein, 199 aa, Zea mays
  Coding DNA Sequence Number=SeqID_1280
MPPCDVVGPSPGSGEAEAPPRSRLSLSFDVEVESEPRVGRDGGSSEVEVESVFRGRGRVRAPGRARRRPSSEAKAESEPWGRARQSSSSSGAEAESEPWDRARRSSSSFEAEAESESWGRARWSLSSSEAEAEFESWGWARRSFLWRPKPDLAAVSLTLSSGTAVGATQAALSSCQAGQWSGEVTAVTSALSTEGRASR

SEQ ID NO: 44656 - protein, 101 aa, Zea mays
  Coding DNA Sequence Number=SeqID_1281
MNNIKLHLYLQLDRSSHIILPKVFLLGGPSMKKQAPNSHLLIPEASSQKGASTLNSNATSGKSPKLVQSTALYQNRSTYTEEYPTSKVLLYFMPFHFLYEK

SEQ ID NO: 44657 - protein, 32 aa, Zea mays
  Coding DNA Sequence Number=SeqID_1282
MTLGCSPTYINHQEPPFETWVLFACSKLFLAQ

SEQ ID NO: 44658 - protein, 210 aa, Zea mays
  Coding DNA Sequence Number=SeqID_1283
  Subcellular localization annotation: CTP_CleavageSite=17; ConfidenceScore=5.40e-01
MVPPPPPALFAAASNRRCAAAPPRRRAFPAELDRPCRAPGRPGAARPLAGAARLATPLSRARQRRREPGRPSPPRARPLPSCPPSLVSAVPHTAHIAAGPPNVLTNAAAAASRSVVAASSSVAAAPKRRLRPRSHLRTNYDTHKRDCLTHTLYSYTAAIMGDRRDWMYEGFKKGYKVWYLHSEDAERVAEVEVDDGEDDVDRMDQMLEDL

SEQ ID NO: 44659 - protein, 219 aa, Zea mays
  Coding DNA Sequence Number=SeqID_1284
MRALEVQQLLEDDPTVVYLTAYLLTLDAQYDFLARHHRQMIARAEDAEKRNHKLHVDLTTTQARVAALESREVIAVEALKQAKDEHVQKLMDAYLVTHNQRHPVSIRGEKKAWELPEGAIVLEGIPVFPQAMDKQEHPESSQDPPQELFEPLTMKKIPAPSREIKEESASTPPAPPPSEELQEPVPLEEEFNLVLPSQSPPEEAINISSLLTHPGDVSD

SEQ ID NO: 44660 - protein, 29 aa, Zea mays
  Coding DNA Sequence Number=SeqID_1285
MGTMRLHTLRDDVVLYPQRCLLLIKGSGK

SEQ ID NO: 44661 - protein, 355 aa, Zea mays
  Coding DNA Sequence Number=SeqID_1286
  Homolog annotation: Hit_ID=A2XFR6; Match level="QueryCoverage=51%, HitCoverage=52%, E-value=1e-27, Identity=38%"; Hit description =Putative uncharacterized protein
MDSDAHMLCIRFCPQNRMVRTIQTTRTNTNYIPLPRQIPVYLVVIKEIPVDLPCIRVENRVILEYSSEEFLPTPTPLAESVAFTARSSSSASPAPAVQASAPGGDDPDDSGDDDEDDDDEEEEEENINEEANDEQQDHYVGLWPVTEHYTSMFETGHFSNLLQDVLHVLGTYVRPLYETRQVCEPPRACYYITRIHVRVMDASDRGFRTLSAHESLTPLSTYAASVSDAARQTLWSLSHTYRQELHNTKYKHLPLRLRGESQTSIVPGGAEEDRLNTLAGVVAGLNTDLDSATLDLSRVHLELEDAHARIAALEAQLEGRDPPEAQIPAMALSPPHKRIRENQYPSPGCYRFFTL

SEQ ID NO: 44662 - protein, 359 aa, Zea mays
  Coding DNA Sequence Number=SeqID_1287
MGGAEPGSFAEKDPSRATGVPVARRVGLGPRLACQKLEKRVHLARLHAACMAARPFCPLVWAEMGGRLNATPWELVPLSHRSASRIFITQPGRTPSPAVTRDGDLQLDGGGKRAGLRPLPLPQPQGFSSPRLGRGECRVGVSPCVGGGPLLHSVMGGEAGIARGVRQLQRAWSSAASGFGAPCGVGVCHGSRKRFFRRRGGRDRPRADLHLLRPSARPCLTSFGTGGGLLTAASTLRDPSAALWWIEAGGSDISMNRGRVGSRMGNLVGRSLAVSPVSGADAQVGQSRPRIGLAPLEAGCPRPQGKPVEPPTRAGFPEVPLDLGAARGWVGLCCRCRRCRGCYGSPRREDPSLQDQIIL

SEQ ID NO: 44663 - protein, 238 aa, Zea mays
  Coding DNA Sequence Number=SeqID_1288
MEALPADDQRPFEDLIMRDEKEVMRKWNEQRDKEEAELLHKLSERRKEAAEKYLSHFTVDRHQKIIRQGEIDMKSLLPPLRVLLATRGQRIGYKWVTLDPTIICPGPFGSIANRPALYARTVRTIRPLMLDRPDMRTQSRELRNTHSSHIHRSNIMVPRQQHIIIMPYHLMDIGLNTVRPQESLRGIGQELVTLIGHLTHTSNTLGRKADRVMSGNLRFPPTNSMDGRQTWQRGSETR

SEQ ID NO: 44664 - protein, 126 aa, Zea mays
  Coding DNA Sequence Number=SeqID_1289
  Subcellular localization annotation: CTP_CleavageSite=52; ConfidenceScore=5.60e-01
ENSAARPSPTAVPLARVRLTTTKSSLRHNRKLRLARPWASASGGGLRLARPQASAPASPSEGGLRLARPQGSVSTSASEDGLRLAQPQGSGLNLDLRRNRVLTRPRASASAGVSASPDLRLGPTAP

SEQ ID NO: 44665 - protein, 104 aa, Zea mays
  Coding DNA Sequence Number=SeqID_1290
  Homolog annotation: Hit_ID=A6MZE4; Match level="QueryCoverage=34%, HitCoverage=40%, E-value=5e-07, Identity=69%"; Hit description =Senescence associated protein
  Pfam annotation: Domain name=B12D; Domain location=4-89; Score=1.6; E_ value=0.00069; Accession=PF06522.2; Description=B12D protein
MAIPQVYPLFMTMGVAMGICGLQLFWNITGNLEVRFGSIIFTPFAYSILARDVLFHLEQGDVGNSAAITEMGNLVPEPSYEEVMTNNNNCCACYKITCVLTATM

SEQ ID NO: 44666 - protein, 107 aa, Zea mays
  Coding DNA Sequence Number=SeqID_1291
MRMRLKLMKGKVKKMSHLKMMAMIKGEMQMIKKRRMRKNQGHHTQESTKQSNEITPSTPSSATFIRGVEEALQDSDWVVAMQEELNNFTRNEEPNGSSATSKMSMVW

SEQ ID NO: 44667 - protein, 117 aa, Zea mays
  Coding DNA Sequence Number=SeqID_1292
  Gene Ontology: Mol. function=kinase activity; Cellular component =ornithine carbamoyltransferase complex; Biological process=amino acid metabolic process
  Homolog annotation: Hit_ID=Q6QP54; Match level="QueryCoverage=67%, HitCoverage=37%, E-value=3e-15, Identity=51%"; Hit description =Putative kinase
MALPVDVAGLCPRSGDVEAPPKPGSSLSSMAEAEPELLGRARRRSFGKGQGGVRALGSGEADPSPSPRSGGAEFAVFRGLSPSPSPGSGGAEFAVFRGLARVRALGRAERSSPSSGA

SEQ ID NO: 44668 - protein, 302 aa, Zea mays
  Coding DNA Sequence Number=SeqID_1293
  Gene Ontology: Mol. function=RNA binding; Cellular component =nucleolus; Biological process=biological_process
  Homolog annotation: Hit_ID=Q6VBQ7; Match level="QueryCoverage=72%, HitCoverage=100%, E-value=1e-102, Identity=87%"; Hit description =Partner of Nob1
  Pfam annotation: Domain name=KH_1; Domain location=141-193; Score =27.6; E_value=4.6e-05; Accession=PF00013.20; Description=KH domain
MASATGVSSSEMAVDHATGPGAVDKPRFDALTPNEMSGGRPQFRKVPVPQHRFAPLKRCWMEIYTPVYEHMKIDIRMNLKARRVELKTRQDTPDVSNLQKCADFVHAFMLGFDIADAVALLRLDDLYVDSFEIKDVKTLRGEHLSRAIGRLSGKGGKTKYAIENSTRTRIVIADTKIHILGSFVNIKVARDSLCSLILGSPAGKVYSKLRAVSARLAESFADRLHAFYKVDRLEDARRTYRRMVFLRFEPNNQTYPSLINGYVSSEKYFSVLILWSVDRRGFFGMAMQVTEKAQEFKIFVDK

SEQ ID NO: 44669 - protein, 179 aa, Zea mays
  Coding DNA Sequence Number=SeqID_1294
MEIISQWLEGNHSHERTPIHTSILSGKNMSKNFYKDISSSHAGSNREARELGTALGLQGHVDRSWDGAGMREPGEPAVNATDPGGRHGSRRGKGQLTAHGEGRGGSRREILGDGAGPRELGGDGGSRGREAAAHSVEVVAHSGGSAGPREPWGGGVLEKWRRSSWRNGEAAGSERIGKK

SEQ ID NO: 44670 - protein, 123 aa, Zea mays
  Coding DNA Sequence Number=SeqID_1295
  Homolog annotation: Hit_ID=A2WVX9; Match level="QueryCoverage=100%, HitCoverage=51%, E-value=1e-20, Identity=49%"; Hit description =Putative uncharacterized protein
MGNCAVAQHAVTSWADDGEWDVPSAAEDEAGGAAGTSGWEWDKDRAAAEVTIRIPRRQLQELMEKRAPAAGGLLRGLASRGAAAQAQLLLADVMNAGHVYLHRCRAAHWKPALQSIPEAAVES

SEQ ID NO: 44671 - protein, 102 aa, Zea mays
  Coding DNA Sequence Number=SeqID_1296
  Subcellular localization annotation: CTP_CleavageSite=32; ConfidenceScore=5.57e-01
MRAPLFLPSSDVLFFFPAFVLFFLPNLLSPPTVAAVSRPMLVDAGTRRVGHAPGLSLCVTSRRTWWHLPRLVYLGDEKYSGILPMYPPDAQIFVVSFSGNEQ

SEQ ID NO: 44672 - protein, 387 aa, Zea mays
  Coding DNA Sequence Number=SeqID_1297
  Homolog annotation: Hit_ID=Q2QRT9; Match level="QueryCoverage=40%, HitCoverage=32%, E-value=3e-13, Identity=33%"; Hit description =Putative uncharacterized protein
  Subcellular localization annotation: CTP_CleavageSite=43; ConfidenceScore=5.18e-01
MAIASTAAATTTVTLVVWHRGACWRMCPWTWRCWSPGSRRSRRCSDEGGWRGRRSCVDFQLLQQQVRSCLCERGERPVHLEDGHLVAELTTEAAKEREHHLPIADGIAELGKGSRHRFELAAAVGDAQGLLAEVAEFCFEQKRPRLPLAEELVLEVAPRPASGALPHHQRLLQVAGNGAVDPCQDTTIGLNPCRARWERFIFKDVTSQGIFAKDSEEHATPLGVGICRLIEKDRDERLHVDDDSGLRPEGLMGMLIRVQSGSTEAAFLGAASVFGTACCSLSRRALVLGGSVVVVRHREGDATAGQPIWSRCRLDEREARRRLARSGGSTAPGQRERPRDLDGNQPRETRRGSADLEPRRISERGGRVDQRPHPAATATGRAIERTA

SEQ ID NO: 44673 - protein, 355 aa, Zea mays
  Coding DNA Sequence Number=SeqID_1298
MRGVPRCRCIAFENFTFPVFRGGPEEARYWRERQFDSSASRNRCPWIMTRGPGPPCQQLGCWFRRRGWAAAFDGDEEAHYHRRWRAPHAVVHLLRTRRLTPKEYDSWARTPRVRGWVTLARIGRDLVQRLGASVGNLSLKGDSPERGSHSHHSLCPFALEFSALFCRRSRHGLARSSRASPARGGTQLGAQPARMGCTGVRRKNLCRRLSSRRSHHRRVRALRLQPPQRSSVADFVFPRAAAGGARPLISALHALLHPTGDHHRLPLQGVRGGDASSRFFLQHPEERMFTSLMKVESGLSCGSIFRASISLALMALGPPPMVTAGLTAKDAAREVVQDVAEMAAARFQRDPTDVE

SEQ ID NO: 44674 - protein, 75 aa, Zea mays
  Coding DNA Sequence Number=SeqID_1299
  Pfam annotation: Domain name=zf-CCHC; Domain location=29-46; Score =23.7; E_value=0.00039; Accession=PF00098.14; Description=Zinc knuckle
MKNQGCASSKITLTKENDEQQASCQVERRFCYKCGEQGHISKVCYKGGKEKISKKWSNQDLGTSVSQEIGISSRE

SEQ ID NO: 44675 - protein, 85 aa, Zea mays
  Coding DNA Sequence Number=SeqID_1300
  Homolog annotation: Hit_ID=A3A3H6; Match level="QueryCoverage=47%, HitCoverage=10%, E-value=4e-12, Identity=87%"; Hit description =Putative uncharacterized protein
  Subcellular localization annotation: CTP_CleavageSite=46; ConfidenceScore=5.32e-01
MRSRLRSRVMDRSYSAGVRATPVVLNVPVCSRPVFGFFKEKKEAANAASARARLALARRTAAGTAPPAGGASARDLGSGFRNITL

SEQ ID NO: 44676 - protein, 756 aa, Zea mays
  Coding DNA Sequence Number=SeqID_1301
  Homolog annotation: Hit_ID=Q6AU54; Match level="QueryCoverage=64%, HitCoverage=86%, E-value=1e-124, Identity=53%"; Hit description =Expressed protein
TKPCDLGENKEGDPNNNDLDWDRDVEMQVAAKNLHTAGASTVWISSIDRRVRGTKRCEIRNLRVRSMWGDEEGADARSVGVAGGWIQAGARRVVWDGWRNLRLAGMARGGGARCSPVDVETMEEEEATAADPMDDGEAAGDSAAAEPMEDDAPTSSPTPSAPSATAAVEDSTIARRSPSIGTSPPPAAAAASSAASSIASQRNPPENSMGIPSRLPDHEEEEEYDDALFYEDIQAPKFVDLTAPDAGLPDDDPAWFCLRVGCDQSHEQVDPEALDRSFFVRVMAARSPNVRLQKVISRKKQSSMLKCPHSAPPKPPRARFARLSATTEAAEKAPAKPKPRVQRICALRASPIRIKAERVECPSERKKALTTPRSKAVRPSQELFHSVKHQKEPFTAAARKGKVVKALFMSTPKKAPAQTPAADRSKEAGSEACSKLRKLNLACREVPSRYMSQLKNPKTVKKGEETTVAKSEKRGQESKTNAKKKILGRSLKCTHAEPDGENRNGCSSTDADENSFAEIAASDQERKVVLQELRIEVDTSRADNSNDNKENLSSAPSEEALNNSHSENGNRQLENNENVPLNENVALKVAKLQSKVHQEQAGKLKKTTNPRPFRLRTDERGVLKEAKPEKRQPFTENNSTAVLKDANRGVTPMDKHTHGKGRDKPACGKKQKKRSTQIVTAQQLDESSSRPAVNSIQCRAVKPERADLTAFRFPFAQWPYGTFFPDWEEEEGGYGEAVEDPNTSCLSSGTGRSRRK

SEQ ID NO: 44677 - protein, 344 aa, Zea mays
  Coding DNA Sequence Number=SeqID_1302
  Gene Ontology: Mol. function=heat shock protein binding; Biological process=response to stress
  Homolog annotation: Hit_ID=A2Y7F9; Match level="QueryCoverage=21%, HitCoverage=31%, E-value=2e-13, Identity=44%"; Hit description =Putative uncharacterized protein
MAPIVFRFNPRNADDIFVEFFGGSSRAAWAGPDGHSLHTGGQVVKPTTIERNLSCNLEELYKGITKKLKISREIVDAIELIDLYLAIWVCNWASASPDVVGQRQRHPLAPIGDGTSFHLQQPMEADDGASGVWNDGRVDAPSPHGCAVHPGSLPGCSWRSLRVLVDKRSLEMAVEVDARWEPMGAQEYYDYWRAMYSARNNRSATSTSVSRAPPLPRSTRVSEPTELTSSRLQFHPTVIVLCCSTFHASHLLSSISSTVLKETAESISVSSTVLKEEENTSLVEGSSGDLEEDRLESAATNLQPGSDTCIAREELLDQKDLVKLQAVIRGHLEAAHASRPKQIR

SEQ ID NO: 44678 - protein, 182 aa, Zea mays
  Coding DNA Sequence Number=SeqID_1303
MTVAGAREQRSRRQPSSRPIRGQRESPLLQREDNAPVIRSSNGPRTRNGSPASYSPHRINSAAGQAALLAGKAGDASPSPKQPRQKRDQERGIPRKGSFPMKEPGSEPPYWSGVRRLAPRRVQQPPQIVWALHPLLVRGSKAGPPKGSTAASGYSGSVPITDQGFEGWPPKGSQSPQTPSKG

SEQ ID NO: 44679 - protein, 183 aa, Zea mays
  Coding DNA Sequence Number=SeqID_1304
MQHLACWLRDAWAWASMLACRESENPVAPLRWRSPETVTTSSWVGRSKPGCDLGPTLSFKDVHHPRWGGCRAEPALYLPRGSVGHPLPRHLRERALTGPAGGPDFDNAGLVDGRRRHLQRVGFVDLAPGGPFCRRAAAAPCTREDHPRCRALLERRSCSGVVLPWHWDGAFTWRPVPRSPGRI

SEQ ID NO: 44680 - protein, 170 aa, Zea mays
  Coding DNA Sequence Number=SeqID_1305
  Subcellular localization annotation: CTP_CleavageSite=53; ConfidenceScore=5.64e-01
MGAVRVRAQSTQGTQSRLAQAQPRAKASDPGGFTSRPRVPSRNGRIFGSPEAQASRRSNLGQIATPTDRIAGAFNEALPRPTPELGLNLDAGRRTLPRPTPGLGLSLDLGQRTPPRPTLGLGLNLDLGRRTPPRPTPGLGLSLDLGGASASPDLGLRPTTSQEGPSLPYS

SEQ ID NO: 44681 - protein, 317 aa, Zea mays
  Coding DNA Sequence Number=SeqID_1306
MVTSSSMAGESELGRGLCPSLSLKDFHHQGWGGDCRVPGSWTRVASEPFSAPASATSAGRVSSADETARAAHGPTSNSTAFCPSLPHEFGHGQGPPGSSIRSEVIAAAVRPPGAEVVVVAAAGAGDGAPFVGLLLLRRPPPIEWGCSYPRRWNRSSVCNGTSNASVFVHCGCRGLNIGTPRPLFDEPRPGVAVSARTEAELAQKEDLIGRSLAGSSVSGTDAGIDLPRPRAGPMSLGDSWPRPQGDRPSRLLGPDSRRRPWRRWPGLGDDVVLQSGDPWTASPSEARSDLAEGVVDAESAAAPFSRQDPSLQDRIIL

SEQ ID NO: 44682 - protein, 534 aa, Zea mays
  Coding DNA Sequence Number=SeqID_1307
  Gene Ontology: Cellular component=integral to membrane; Biological process=sugar mediated signaling
  Homolog annotation: Hit_ID=A2XA21; Match level="QueryCoverage=84%, HitCoverage=78%, E-value=1e-118, Identity=50%"; Hit description =Putative uncharacterized protein
  Subcellular localization annotation: CTP_CleavageSite=59; ConfidenceScore=5.46e-01
MDTGCLQPPCNPSSSEASGGDASDACGSASASRSSSARRSKGVRLRLRLRRRRQEPGPAATPGGEGQGGAGVQVQDDLALPLGMSFAAVLAQVVNTKNRSGERLQPALLSKFETEPRLWMQICTSAVKESLRNIYGNKLDSFMRNFEKSFSSTLTTLHLVNEMPVYGQGPVPQCSSKHEDSEASSKLSTGGTQNLTREIKQERLNSVESQLVLYAGGYQQMTRRAHSLSSPEADQRILNAFERSLKEQTRSNELKEFEISLSMRKLKLKQSQLELNSYSHMLDKIKLSLGFQKASFQVEKFKTQMQDTRHAQIMRTLIDFLVSAVIIMSVCFGYGTYTYSYQRITDITAACSATSKGSKSWWMPNSVSNFNTGLLFIRCHVIAATRMFFGIVMILAVVWLAFQRSAVSVSSMPVTFNIILLGVICGYAGRFCTNTLGGDGNMWLICWEVLCSVHLIGNCYPSVLYRVLHGPISVSHSKESVWFPYWIRRWMFYAVLGFFIPALNGLLPFASLSDWNNHFTKELKSIFIDERIEA

SEQ ID NO: 44683 - protein, 180 aa, Zea mays
  Coding DNA Sequence Number=SeqID_1308
  Gene Ontology: Mol. function=carboxyl- or carbamoyltransferase activity; Cellular component=ornithine carbamoyltransferase complex; Biological process=amino acid metabolic process
  Homolog annotation: Hit_ID=Q8SA97; Match level="QueryCoverage=57%, HitCoverage=19%, E-value=4e-11, Identity=39%"; Hit description =Ornithine carbamoyltransferase
  Subcellular localization annotation: CTP_CleavageSite=46; ConfidenceScore=5.14e-01
MAPPVDVAGPRPRLGDAKAPPRSRSSPSSVAEVESEPLGRARRRPLAEARAEFESWGRAKRSSSSSGAEPKFEPWVGRSGIRRLLGLSPSPSPGSGGTEFAVFRGLARVRALGRVERRLLLGEDRASGEPEICSPLEGASGEAEILRGRLPLFEARLGRGVIESLEWTDGGYQLRIRSLE

SEQ ID NO: 44684 - protein, 129 aa, Zea mays
  Coding DNA Sequence Number=SeqID_1309
  Subcellular localization annotation: CTP_CleavageSite=46; ConfidenceScore=5.45e-01
MAAAGGRKQQSSRLQAHVPSWDSERALSHGMKTTHPCSVPRTARARTMAAPPTTRPVALTLRQDRRHLWQAKQATEKKRLGAALTKPTPAKPLTASTYQPENLEPDYAPGLRPVRMREQPDRPKHHETR

SEQ ID NO: 44685 - protein, 440 aa, Zea mays
  Coding DNA Sequence Number=SeqID_1310
  Gene Ontology: Mol. function=nucleic acid binding; Cellular component= cytoplasm; Biological process=regulation of mRNA stability
  Homolog annotation: Hit_ID=A3AXL8; Match level="QueryCoverage=78%, HitCoverage=53%, E-value=1e-150, Identity=76%"; Hit description =Putative uncharacterized protein
  Pfam annotation: Domain name=MPPN; Domain location=275-359; Score= -26.8; E_value=0.059; Accession=PF05172.4; Description=MPPN (rrm -like) domain
  Pfam annotation: Domain name=RRM_1; Domain location=178-250; Score =59.5; E_value=1.2e-14; Accession=PF00076.13; Description=RNA recognition motif. (a.k.a. RRM, RBD,
  Pfam annotation: Domain name=RRM_1; Domain location=284-349; Score =72.7; E_value=1.2e-18; Accession=PF00076.13; Description=RNA recognition motif. (a.k.a. RRM, RBD,
  Pfam annotation: Domain name=RRM_1; Domain location=88-159; Score =49.0; E_value=1.7e-11; Accession=PF00076.13; Description=RNA recognition motif. (a.k.a. RRM, RBD,
  Pfam module annotation: Pfam domain module=MPPN::RRM_1::RRM_1::RRM_1; Domain location=275-359::178-250::284-349::88-159
MMQQPPQPQPGMALPPPPQTGGGQPPQWGAIPPPMTQQYGAPPPQQPPAMWGQPPSQAHYGQAPPPQPYYAAPPVPAAPAAADEVRTLWIGDLQYWMDDNYVFGCFSNTGEVQNVKLIRDKNSGQLQGYGFVEFTSRAAAERVLQTYNGQMMPNVDLTFRLNWASAGEKRDDTPDYTIFVGDLAADVTDYLLQETFRVHYPSVKGAKVVTDKLTMRTKGYGFVKFGDPTEQARAMTEMNGMPCSSRPMRIGPAASRKNAGGVVQERVPNSQGAQSENDPNNTTIFVGGLDPNVTEDVLKQAFSPYGEVIHVKIPVGKRCGFVQFVTRPSAEQALLMLQGALIGAQNVRLSWGRSLSNKQTQMKWLILRFKNSQPQQESMQWGAGAPAGVGDYYGGYGQGYEAYGSGYAQPQDPNMYGYGAYVGYPNYQQQPAAQQPQQQQ

SEQ ID NO: 44686 - protein, 454 aa, Zea mays
  Coding DNA Sequence Number=SeqID_1311
  Homolog annotation: Hit_ID=A3AXL8; Match level="QueryCoverage=63%, HitCoverage=33%, E-value=4e-38, Identity=39%"; Hit description =Putative uncharacterized protein
  Pfam annotation: Domain name=PAM2; Domain location=240-257; Score =24.5; E_value=0.00038; Accession=PF07145.6; Description=Ataxin-2 C -terminal region
MARPRKPPPPSPPKAAAPSIADALLLATVCMVGLPVEVRVRDGSAYAGVLHTACVDAGYGVVLKKAKKIANGKGDVNLSLGSFVDTLVVCPDDLVQVIAKGLSLPLKGVCKPLDSNVVAASGSLKPQISHANDPKMSNKTKNMSPLMQAEKCTSVGQEKNTSVKRNGQDNGITTSLSSSTRHVGACLSNNWDSRSGSMVPKVDVITSSASAVPVVASGVKPSQPVNNSVAKIVTSSKTAAKEFKLNPSAKVFSPSFASSRQVLAAAAPVDTYYISHSAPEVPMGVPVYEPKSVSGVSPLSNKVYCSNLSPANYAISPQYVPSIMGHNASRLDPSRIGTPYHPMQVGATYTTPSPQPVMAGKFSPVVYVQPGPQDAMHGTTVGFQGWPCPLLLNSYQASMQKFQGNPPVYLAPPVMATGNLPLVVPSPASLVQPFEAIHPIMVPAASSMVPGKYM

SEQ ID NO: 44687 - protein, 190 aa, Zea mays
  Coding DNA Sequence Number=SeqID_1312
  Subcellular localization annotation: CTP_CleavageSite=42; ConfidenceScore=5.65e-01
MRALTTALPSPAWSSSRRPSLRRRKEARPDEVARAIAMFPRSCSTTSRRSSAQCSPSSRYTKLSPSSGTAPRRQAPPSLPPIGRRCLMLFVVVLALPTARRHRSDPPPSDVCPQSDRRCLPTCRQPGTAARPAPPRYTLLDPCPDSWSWIGTPPRHHMAHAQAQAGPSSTIGTMGLRTRGPQAKKYGPLC

SEQ ID NO: 44688 - protein, 125 aa, Zea mays
  Coding DNA Sequence Number=SeqID_1313
MARPLGRPAPPLLGRSAAPCAPRLGPGGNEIDGSGYDYGIASPLQPNRILAEYVDVYSPLLYTPNPPPQVVSIATTAQAKMKLWKETSRSSKTTTSSRCGLAATPQSAACEGRAIYVSFSHFDLL

SEQ ID NO: 44689 - protein, 49 aa, Zea mays
  Coding DNA Sequence Number=SeqID_1314
MASMTISLGTMGACALSRKNLRTYACRYLRTQVGITADQNNTKVDTAPK

SEQ ID NO: 44690 - protein, 80 aa, Zea mays
  Coding DNA Sequence Number=SeqID_1315
MEDDRGEPSLGGLATKDDWRPRRTMAEDELGQPCGDDVLAAARSALDVGRGARASSECSGLWHGLVPITMVVRIKTFREQ

SEQ ID NO: 44691 - protein, 264 aa, Zea mays
  Coding DNA Sequence Number=SeqID_1316
MTKPFPFAMLSTLGSNLTSLFQSKEKGVEKGAEGEKKTDSVTGGNEGSEETKHDGYDEGYPQDPAPGLGIKNVAPANSEVDEATPEAKNSKGPLGTTMSEIDQIIADVVPEREMAEVTTDRPSPLKMKELEGVSLEDRQLDLLRLGGQELSKEDISELKRIRYCWRLQDWIRALWCLLLRKALKLQPKNEDRKNELVVSNLEERVKELENLLEEKDSKIKIAGADMVEAHLRIKDQATQISDQNKQLEEAHSMLGSVMSMRLKV

SEQ ID NO: 44692 - protein, 127 aa, Zea mays
  Coding DNA Sequence Number=SeqID_1317
MDVLMIRDKPSWRGHSCVTGDNQQSRGVVIARNRSLGALDHQRRDLHSIKLSYLTEDRAVSTINWYQSSILPVSAGPKNQMDKDKGLKLNDDECVSQLELKEMMRVMTEAFKKYQDSAATSYERLDR

SEQ ID NO: 44693 - protein, 234 aa, Zea mays
  Coding DNA Sequence Number=SeqID_1318
MEVCCCAMGERSCGRRAAKGRTPLEEEGERGEGRWLPARRPSQGDPAMEGKDHAPCALLHRMGSASRGGRMEHRELDSMAAGRAPSSGDCWRPQSRRGRWERESRGATPWTPASSLLELGPEEMPRPGWSRGGVGGRRRCCPARWSLGKAGRPWDSTLAAGGAELHGRRRLPACFVGKKKKVAGGCGKCRGGNAKNGQVQGRSTPIYRGGTRVRVSIGPNGLGRAGPKYSIGLR

SEQ ID NO: 44694 - protein, 83 aa, Zea mays
  Coding DNA Sequence Number=SeqID_1319
  Subcellular localization annotation: CTP_CleavageSite=68; ConfidenceScore=5.09e-01
MALTGAKSQATDGLSTAIYCDVVTPPNTWHPCGKRQTPAMVISTGRGASGNIGQLTISSVVKIFSLVRAKSSWIKRYKGINLA

SEQ ID NO: 44695 - protein, 199 aa, Zea mays
  Coding DNA Sequence Number=SeqID_1320
MVVALRRLWRVTGRSPVLWASSGEFGARYFGATLSIGPSGFEFGIKLLLWRLIVPWSGSWKTSGCRLLLLRWPDHPSACLLLKSPALIVRNNHEPLGLSGWCCHWCLSLLLCPVSYNTILLGDGQVGQLIEAISTDSVEMFPQLGVETPTEAVSLVLIRICMITCILAQVVEGLCVLQYRAGSLIECQKLIQLPIKNSS

SEQ ID NO: 44696 - protein, 215 aa, Zea mays
  Coding DNA Sequence Number=SeqID_1321
MAMMGSTSEKMYPCQVPNFGVLNDMPRTRKTARKSIGPIGVPRHHLAPRHEERSSGSNDPIGDLEAQVEQLRTELRHQNRVWAKDSQRIAELSTEVGRLRFELSERDSTVDWAINSRSIAWHHEAKARVRVDELSTALDNLQVYCNTLHEDLHALYGRLHPDVPADPVGMGVGPSGTAGERPDGELDLFEPPPSKNLADERSPASDSEATKDNED

SEQ ID NO: 44697 - protein, 329 aa, Zea mays
  Coding DNA Sequence Number=SeqID_1322
  Gene Ontology: Mol. function=oxidoreductase activity; Cellular component=mitochondrial outer membrane; Biological process=electron transport
  Homolog annotation: Hit_ID=A7QHU0; Match level="QueryCoverage=77%, HitCoverage=69%, E-value=4e-84, Identity=59%"; Hit description =Chromosome undetermined scaffold_100, whole genome shotgun sequence
  Pfam annotation: Domain name=Pyr_redox; Domain location=121-215; Score=53.3; E_value=8.6e-13; Accession=PF00070.18; Description =Pyridine nucleotide-disulphide oxidor
  Pfam annotation: Domain name=Pyr_redox_2; Domain location=121-263; Score=-26.2; E_value=0.0021; Accession=PF07992.5; Description =Pyridine nucleotide-disulphide oxidore
  Pfam module annotation: Pfam domain module=Pyr_redox::Pyr_redox_2; Domain location=121-215::121-263
MGRITRGPQSWTRPRCGMTSPQAFVWKDYLEIPWAELRSMVEPSFAERSLIYHKDYLSDATIVTSSAVNITEHVVLTVDGHSLPYDYLIIATGHALASPASRAERINEFQRDNGKIESSESVLIIGGGPTGVELAGEIVVDYPGKRVTLIHRGPRLLEFIGDKASKKCLDWLTSKKVDVLLQQSVDLGSLSDTEKVYKTSDGETVTADCHFVCIGKPLSSSWLHDTILKESLDSKGRVMVEKDLRVKGFNNIFAIGDITDIPTPASAAEAKQESVLETEETKQAVAAAAAAAGGVQAMAVTVVRDVETGLDTSTNDRDGDKPSWFTPKR

SEQ ID NO: 44698 - protein, 225 aa, Zea mays
  Coding DNA Sequence Number=SeqID_1323
  Gene Ontology: Mol. function=nucleic acid binding; Cellular component= intracellular; Biological process=regulation of transcription, DNA -dependent
  Homolog annotation: Hit_ID=Q94F81; Match level="QueryCoverage=89%, HitCoverage=100%, E-value=8e-30, Identity=88%"; Hit description=HD2 type histone deacetylase HDA106
  Pfam annotation: Domain name=Nucleoplasmin; Domain location=1-137; Score=-76.3; E_value=0.019; Accession=PF03066.6; Description =Nucleoplasmin
  Pfam annotation: Domain name=zf-C2H2; Domain location=199-223; Score =22.6; E_value=0.0015; Accession=PF00096.17; Description=Zinc finger, C2H2 type
  Pfam module annotation: Pfam domain module=Nucleoplasmin::zf-C2H2; Domain location=1-137::199-223
MEFWGEEVKPGATVSCKVGDGLVIHLSQAALGEPKKASENAIVSVKIDDKKLVLGTLSVEKHPQISCDLVPVKVGIQNADEDETSSGDDDDFTDSDSEMSEEDESSDEDEVSSDTDTSDDSGSEEQTPTPKKTEVVVGKKRAIEAETPSGKKAKSEQSAQKTGDKVSTSHPAKQSSKTPADKSTKTPTADKKSPKSGSHACKSCSKSFGSASALESHQKAKKHEA

SEQ ID NO: 44699 - protein, 499 aa, Zea mays
  Coding DNA Sequence Number=SeqID_1324
  Subcellular localization annotation: CTP_CleavageSite=13; ConfidenceScore=5.00e-01
MSSSSSSAATTPPAAASSEETLSSLMVEELRAGDSVDFGVSRMTSARVQDMQRLGYFGGGVARAPGTEEVPEPEGSDEGQLAIVAPGAAIATAAIVPKARGEALGAGGEVSALAVVRDEAGAATRRLKGVTEALSQATEALSQVADFASRTASGALTAAVSAEVERLRTQHADAVREKSASDSKCRKLTDKVAALEREKADLRRQLAAERREANEAIAKEQAAQAEAKLARAEGNLAMELAKHLQERLTALESRAKGAEAAMRAEAERTRAQLMDTYRELGARTGDFEVPDREPGLRCLQWVQEELQELPIVVGGFMSYASLVTCEGAMNALSRERCRHFEVFDQADEDFERDVYKVEDPVVKESAGALYDRMWGPHGREVVRERAETARAQAARGERVDDFGALNSALPDPEPTPAEAVFGVALEPTPETATIATAAPTSVAVGEDLPPTVAEGAPDAPAAAVPSVEDPAAEAAETTAEAAAEATAEAPAASGPSQVA

SEQ ID NO: 44700 - protein, 30 aa, Zea mays
  Coding DNA Sequence Number=SeqID_1325
MGSRARGGRLLPARLVRRNNYKRSRGKYGS

SEQ ID NO: 44701 - protein, 115 aa, Zea mays
  Coding DNA Sequence Number=SeqID_1326
MAGMYCDARDCLNKRMQPPARTAARILLSPVDKAKGSARKKDRERGIPRKGSFSAKEPGSEPPITDQGFEGWPPEGSTVASDRVGPTPTTGQGFEGQPPEGLHGRLRLLGLRAHY

SEQ ID NO: 44702 - protein, 511 aa, Zea mays
  Coding DNA Sequence Number=SeqID_1327
  Gene Ontology: Mol. function=hydroperoxide dehydratase activity; Cellular component=chloroplast; Biological process=fatty acid biosynthetic process
  Homolog annotation: Hit_ID=Q7Y0C8; Match level="QueryCoverage=93%, HitCoverage=93%, E-value=0.0, Identity=83%"; Hit description =Cytochrome P450 74A1, chloroplast precursor
  Pfam annotation: Domain name=p450; Domain location=49-511; Score= -150.4; E_value=3.4e-05; Accession=PF00067.13; Description=Cytochrome P450
  Subcellular localization annotation: CTP_CleavageSite=25; ConfidenceScore=5.25e-01
MATAIYLSSPAAPSSCARQRRQTTRATASATDRPREVVSPKRRLPLRKVPGDYGPPVLGAIRDRFEYFYGPGGRDGFFTSRVRAHGSTVVRLNMPPGPFVARDPRVVALLDAASFPVLFDTSLVDKTDLFTGTFMPSTELTGGYRVLSYLDPAEPNHGPLKTLLFYLLSHRRQHVIPKFREVYGDLFGLMENELARVGKADFGHYNDAAAFSFLCQALLGRDPAESALQGDGPKLITKWVLFQLSPLLSLGLPKHVEDSLLHSFRLPPALVKKDYDRLADFFRDAARRVVDEGERLGVAREEAVHNILFAMCFNSFGGMKILFPSLVKWLGRAGGRAHGRLATEVRDAVRAHGGEVTMKALAEMPLVKSAVYEALRIEPPVAMQYGRAKQDMVVESHDYGFEVREGEMLFGYQPMATKDPRVFARAEEYVPDRFLGEDGAQLLRHVVWSNGPETASPTLQDKQCAGKDFVVLIARLLVAELFLRYDSFDVQVGASALGSSVTITSLKKATF

SEQ ID NO: 44703 - protein, 404 aa, Zea mays
  Coding DNA Sequence Number=SeqID_1328
  Homolog annotation: Hit_ID=Q6QP51; Match level="QueryCoverage=55%, HitCoverage=80%, E-value=4e-12, Identity=33%"; Hit description =Putative growth-regulating factor 1
MQAACNRTKGAHPFDFDASSMEAQAHTSCNRCAGYYVQETAPPLAPVPRLLDYGTGGRKQQSSRQQAHAPSWDSERTLSHDVKTMRPCSVPRTACARTTAASRTTRLIALTLRRDRRHLWQAKQATLHLRHNDRVKKKVRHVIRFRILFHFLFLSLATGTGKGDTPKGILLCEGSGPRAPLLIRGSKAGPSEGFNSRLRALGLRAHYWSEFRRLAPWKGSTAASGHSGSAPTTDQGFVGWPPKGSIAASEHAERGMTLASGAIGSSASLDPRARAQPRRWTTDSASPDPRARTQPRPRKTVSASPDPGLELNLDAGRRTPPRPTPGLGHSLGLERRSPPRPTQGSDSTSTSEGRLRLARPQGSDTASTSKDGLDLDLGGASASPDLGLGPTTSQGGGHHYPTPS

SEQ ID NO: 44704 - protein, 41 aa, Zea mays
  Coding DNA Sequence Number=SeqID_1329
  Gene Ontology: Mol. function=nucleotide binding; Cellular component =plasma membrane; Biological process=small GTPase mediated signal transduction
  Homolog annotation: Hit_ID=A2Y6J2; Match level="QueryCoverage=92%, HitCoverage=17%, E-value=2e-12, Identity=97%"; Hit description =Putative uncharacterized protein
MDDSNLLSRFTKNEFSLESKSTIGIEFATRSLQVDGKVIKA

SEQ ID NO: 44705 - protein, 62 aa, Zea mays
  Coding DNA Sequence Number=SeqID_1330
  Subcellular localization annotation: CTP_CleavageSite=52; ConfidenceScore=5.60e-01
MASVASARCYGLLLPPSFAGARCCSRPSSSLRLRPRWGLRRPRTPLACVAPPDSAEPQTNSN

SEQ ID NO: 44706 - protein, 251 aa, Zea mays
  Coding DNA Sequence Number=SeqID_1331
  Homolog annotation: Hit_ID=Q6QP51; Match level="QueryCoverage=54%, HitCoverage=78%, E-value=6e-09, Identity=34%"; Hit description =Putative growth-regulating factor 1
  Subcellular localization annotation: CTP_CleavageSite=7; ConfidenceScore=5.31e-01
MGAIKVKAQSTQGTRSRLARAQPWAKPTDPEGFTSRPRAPLSNGHTFGSPEAQSSKRSNLGQIATPTDPKSSLGRHRKLRLARPQGSGSTSTLDDGLRLARPRARTQPRRWTTDSASLDPRARTQPQPRKTVSASPDPGLRLNLNLGRRTPPRPTPGVGLSLDLGRRTRPRPRRSLRLARPRAWTDHVTGGAIITLPLVSSGYGEQDRRPIWLAPDNTKAAGFPLLFSPLCVPSRADLSGLGHAATIYSSV

SEQ ID NO: 44707 - protein, 238 aa, Zea mays
  Coding DNA Sequence Number=SeqID_1332
MGGSRAATWPEKTTSAKVSAVGLDPHGKVSDPRIYGPDLRTGSRISAGTDRTPGTGPRPLYVGSGQLSAGSRDSGTKNTQALIKVRRGSEADTCPDHTEYAPAPRSGGDPMLPRGRQPVTQYARAAAYTVLIMTRALPRRQPRDINTIWTTDIMALEDLLGDTGIGYFYISNLVSQPHKFIQALKLNTAHSGVGYYASAARTTLNPWRVRSATRLENSLSDRYPKGSTFDLIGYSDAD

SEQ ID NO: 44708 - protein, 264 aa, Zea mays
  Coding DNA Sequence Number=SeqID_1333
  Homolog annotation: Hit_ID=Q2R2U8; Match level="QueryCoverage=21%, HitCoverage=5%, E-value=5e-07, Identity=50%"; Hit description =Retrotransposon protein, putative, unclassified
  Pfam annotation: Domain name=Transposase_28; Domain location=78-249; Score=-42.7; E_value=0.0017; Accession=PF04195.3; Description =Putative gypsy type transposon
  Subcellular localization annotation: CTP_CleavageSite=79; ConfidenceScore=5.22e-01
MKRHTTAGGGSLFGRARRFAFSTPKNRDPRSMTCGPGPPCQRLGRCFLGGDEGAHYRGRRFAFSALGGSHTFSAPHCICAAIVVVALLVLPGRFQSEVACNLLRWGAPAFAGRIRAGASLLDGLATGEFVLFISCLSCGLVLPISPFFLRQLEKLGFQHQCLTAHSILQAAIFAHLCEMFVGVALLPSAPRRKGAAQRPSGGGKRAELRLHLSLLPAILGRKGVAQRPSGGGKRAELRLHLLLLPELSCASRSSPISSLNFTSN

SEQ ID NO: 44709 - protein, 637 aa, Zea mays
  Coding DNA Sequence Number=SeqID_1334
  Gene Ontology: Mol. function=protein disulfide oxidoreductase activity; Biological process=cell redox homeostasis
  Homolog annotation: Hit_ID=A7R4G3; Match level="QueryCoverage=90%, HitCoverage=93%, E-value=1e-133, Identity=45%"; Hit description =Chromosome undetermined scaffold_682, whole genome shotgun sequence
  Pfam annotation: Domain name=DUF547; Domain location=402-550; Score =210.6; E_value=3.6e-60; Accession=PF04784.5; Description=Protein of unknown function, DUF547
MEVEALEKGYTAFAKAVKSFTSSERYKRSERWNYVQNVIKEAVKAKVKGDISKEAQPGRGAQSTLRKEILELEKHFREQQVVSGALENALGPNAGSVNFSPENPMPKAANELIREIATLELEVKNMEQYLLTLYRKAFEQQAPALSPPDCREASKPSVSSRFGQLRETPVAAKSCKSGGGDAALRTSYPPPAHKKLNDPLADCCTSARSHRAVDSDVLRCQSALSYRGVCSSRVLPSEEDDDSLARALRSCHSQPFSFAEEGEGAGASGGAISLAEYLGTNVADHIPETPNNLSEEMVRCMAGIYCRLADPPLVHHGSSSSPTLSFSSTTSAVSPQYVGDDMWSPSYRRREATTLDSRLINPFHVEGLKEFSGPYNTMVEVPTISRDGRRMKEAEDLLQTYRLVLYRLEAVDLRTMTNEEKIAFWVNVHNALLMHAYLENGVPQNKTSLLAKQAACKIAGRSINAAVIQSVVLGCTTHCPGQWLRRTLLYPRTKSKVSKAGHEWRAFAVAQPEPLLRFALCSGSHSDPAVRVYTPKRLFHQLEAAKEEFIRATAGVWKEQKLLLPKLVEAYAKDVRLSPQGLVDMVQRHLPETMRVAVQRCQQGGRASSGKVVVDWVPHNPAFRYLLARDLAFPHLS

SEQ ID NO: 44710 - protein, 66 aa, Zea mays
  Coding DNA Sequence Number=SeqID_1335
  Subcellular localization annotation: CTP_CleavageSite=26; ConfidenceScore=5.14e-01
MGILVSGAVIQGVQAHGLAPQAKPCRSRSESRLPSGGWDTNSFLGMLPLVRQRQSGQGHPSQDSAL

SEQ ID NO: 44711 - protein, 129 aa, Zea mays
  Coding DNA Sequence Number=SeqID_1336
MAREGAIALWCRSPAMDMEKATPWGEGFNPCCWRCKKGRRPLKGAMDGQPPWLELAMGKSQEQRLCVRGMERSGGRECRRPRVSIYRRGSSKSADTRQPLQTQALCIGGRGWLPDFYSVLMALFEILRD

SEQ ID NO: 44712 - protein, 110 aa, Zea mays
  Coding DNA Sequence Number=SeqID_1337
  Subcellular localization annotation: CTP_CleavageSite=52; ConfidenceScore=5.37e-01
MAHRSSFGPPEAFSPSFSPLYSWIHGPFSAIEFVMAPSSSLPNSGDLTTAERSSAARSRSPLPDNEQSEVPECVVGDLPEQQPGEDDVVLYPHSYDDRGPTHCIPMHTLK

SEQ ID NO: 44713 - protein, 50 aa, Zea mays
  Coding DNA Sequence Number=SeqID_1338
MGWDEEKRSAKNVAGSNVGVGGERKEVRVDVGGTEVEDWRWTVEGQAKKF

SEQ ID NO: 44714 - protein, 199 aa, Zea mays
  Coding DNA Sequence Number=SeqID_1339
MTFRATMRLGNNPEIKKRSREGSPSFLPTGGVHDAGKSAGQSSVATLAMAAKRGRSCKTYPTQEKTLKGMLVLKGFKSIHLSYTSFILAALVSLVIYDEGRRSSLHIREVRRSESINTQLGISNHMTYVALTLAYVNSHPGFSRPERVHATREHNTPPSSHLPGGHTLLTPSLHSQCVRAVLVLVRPRQSLPMMRHVAN

SEQ ID NO: 44715 - protein, 139 aa, Zea mays
  Coding DNA Sequence Number=SeqID_1340
MGRGKRGKGWPRRADGKRKRPPSPPSEDFGDSEEVSSEYDRSPAPASPVALSEDSDDSMGLSVAVRAYWRSIEHAGLDSSDCKEWSGGEGDGGEGDGSSGDDNRKDSYDDDDEGNGNNKGDGGDSNGGDGKAGGIMLLA

SEQ ID NO: 44716 - protein, 517 aa, Zea mays
  Coding DNA Sequence Number=SeqID_1341
  Gene Ontology: Mol. function=phosphatidylinositol binding; Cellular component=Golgi apparatus; Biological process=clathrin cage assembly
  Homolog annotation: Hit_ID=A2YW21; Match level="QueryCoverage=71%, HitCoverage=93%, E-value=1e-127, Identity=66%"; Hit description =Putative uncharacterized protein
  Pfam annotation: Domain name=ANTH; Domain location=173-451; Score =164.9; E_value=2.1e-46; Accession=PF07651.7; Description=ANTH domain
MVVRLTDGEEGPVKGRAVGLIGGVRSGLLMAVLFNPMAHEASRAAKDATSARNQRKAHCGARSTCAGGRVKSGDVDLVSPLSSSAKSSSGHERFRRGSELATVVDLIFPGRLELAGAREGGDASVHGQEMTTARQWWRRATAAVKDRRSLYLRRVAALRPRPASGVAAAVLWSPELEAAVIRATSHDERSVDYGNAARVFALARASPVSVQPLMWALARRAGRTRCWAVALKALMLAHGLLLRPDLAPRSVRLGRIPFDLADFRDRSSPPSKSSGFSAFVRAYFRFLDTRSLFIAQDLDAVADTGETDGEDARLDHVTKQQHLLHLLLQIRPYGDGMELGLIFEAMDCVVIEIFEVYSEICTGIARFLVAVLGSAPMTPRPRPGETLAAARRRRAVQGMRVLKNAAEQSAQLSSYFELCQSLGVLNAAEFPAVERVADDDIRDLEKIIMNHVVEESREDKQMKALVAVEETPPASKTVVTTEWVVFDDDDNAAAGARPRNFEGYLNPFVTAPWDATP

SEQ ID NO: 44717 - protein, 294 aa, Zea mays
  Coding DNA Sequence Number=SeqID_1342
MTSHESLEGGNAHSHTDGLAREGFPRILWEVLQGAGYTTPPQYAVQLFEEHRVPHCRVRMTLEPHPLQPGWRSLDSESFGFRAEDTIESIALHGLTTFCGFHPLELSTHPIGLFPAEKEDNPMWKDRVEHAKDVWALYPGQTAHLTVRCMNALYRLQVVRGEAMSQLMGLVESTKITLDNREDLVVDLSTELVEKDLQVEQMATQIQELEEQVGARENTIEVLEDQLLTTQQQLEEANLHLDMHHHEIQGMEAEGADEDVDIEGGEEPEPASSLDTTGLGRPPSPESSVASFAH

SEQ ID NO: 44718 - protein, 68 aa, Zea mays
  Coding DNA Sequence Number=SeqID_1343
MQLHILRGMKAEVILAIADICTHEFDIILLAEMCHLTLALLNADAESYEVLNLWVMFRQVLVADHSVG

SEQ ID NO: 44719 - protein, 92 aa, Zea mays
  Coding DNA Sequence Number=SeqID_1344
MVEGSPEKTTSTGPRTNSSIDNEPSVGSTNQKHQDKALDETNTAVPSDSTDDTRIKSKCSPELSPELSLELEPFRSSASNSGSFGSKLGKWF

SEQ ID NO: 44720 - protein, 86 aa, Zea mays
  Coding DNA Sequence Number=SeqID_1345
MAETAYQMLPVRVHIYTPSTLQLGGPRLSLIIAILAKGRNLRTRDEAIHNMEIRVGTKVEPAPKLHVRELRLSSRKRNRLKEEKAI

SEQ ID NO: 44721 - protein, 52 aa, Zea mays
  Coding DNA Sequence Number=SeqID_1346
  Homolog annotation: Hit_ID=A3B4J0; Match level="QueryCoverage=94%, HitCoverage=12%, E-value=1e-10, Identity=51%"; Hit description =Putative uncharacterized protein
MTAFVPESPYGYPIFQGGVHSFDIETLNRSSHRPKFAPSLATTFVGGVLVRV

SEQ ID NO: 44722 - protein, 349 aa, Zea mays
  Coding DNA Sequence Number=SeqID_1347
  Subcellular localization annotation: CTP_CleavageSite=24; ConfidenceScore=5.55e-01
MGAIQVKAPSIQGTQSRLARAQPRAKAADPGGFTSRPRVPSSNGRTFDSPEAQLEQASRRSNLGQIATPTDQTLNYNSPDCLVHHRTVSGAPEESDSELASFGFPLRYNSPDCPVNQRSNDYFAPTVVCNTLNARQRAQRSRARAGGTPDSLQDLSGAPPDSQVGPHVRDPTVGTQRPGDVAGALDSVRWRTGLSASGATGSSASPDPRARAQPRRRTTDFASPDPRARTQPPRRTTDFASSTLGLGLNLDAGRRTPPRPTPGLGLSLDLGRRTPPRPTPGLGLSLDLRRRTPPRPTLGLGLSLDLRRRSPPRPTPGLGLSLDLGGASASPDLGLRPTTSQGGPSLPYP

SEQ ID NO: 44723 - protein, 64 aa, Zea mays
  Coding DNA Sequence Number=SeqID_1348
MDVLMIRNIGEDQQGLGKGLGVEEEQQGRHNRKEIKQGLAFVARSITQRTVDNQRRSGAAIAGF

SEQ ID NO: 44724 - protein, 130 aa, Zea mays
  Coding DNA Sequence Number=SeqID_1349
  Subcellular localization annotation: CTP_CleavageSite=38; ConfidenceScore=5.23e-01
MAWKVFGEGLRSTVARSRGTRQGFLTSCGATATGTTAPGSTVWQLALERGSRGREREGQVGRREKEEWVRIPGLGAAAAASSREAAATRGAATRCYKCATRQSGAARTDSPQATHIFILGIFLDLLNVFF

SEQ ID NO: 44725 - protein, 22 aa, Zea mays
  Coding DNA Sequence Number=SeqID_1350
MGKRGSEGDAGDFDGEFIDEEF

SEQ ID NO: 44726 - protein, 267 aa, Zea mays
  Coding DNA Sequence Number=SeqID_1351
MAQELRGERVDDLGALNSVLPDPEPTPAEAVSRVALEPTPETAAIATAAPTSAAAGEDLPPKVAEGAPDAPAAAVPSADDPAAEAAETTAEAAAEPAAEAPAASGPSQVQDFGPAHATATAKFLAASTAEGGNECGGSGSEFSEFFDVADSGSSVEWTEESSEEDLDYFAALDVAAAETSPHAADAQDVPGPSTGRRRRRAVAKRRVSTEERSRLRVSRAGRQELLSLPAAASTGEGELWSLFAGEELRIMLFNYREMGIIPKVEPM

SEQ ID NO: 44727 - protein, 247 aa, Zea mays
  Coding DNA Sequence Number=SeqID_1352
MEPVSTTEKCWIMHFDGSLTKEGADETDGHDSGQGFVCSRDAISPRPSPASGGNSSPRRILASPEGLFKQRTHPQLARTPAWAGFVEKQPWPNRLTNRPYRRRIQCEDRLTPYPDARASVGKVESEADNSQVQPQAQQEAPPCPTLGLGLNLGLGRRTLPRPTPRLGLSLGLGGWSPPRPTPGLGLNLDLGRNRVIARPWPRPQEESPPRPTLGSDRPRHGGYIITLPLASLGYGGTRPTSHPGSPQ

SEQ ID NO: 44728 - protein, 144 aa, Zea mays
  Coding DNA Sequence Number=SeqID_1353
MEEDRGEPSLGGLAAEDDWRPQRTMVEDELGRPCDDEVLAAARSALDVGDGDKAGYPQSLRCNKHNDMSMHMMPCSNFSSGNTRGVTIRNLGDDHQGLGKGQDIKEEKIERSEQEKAKSDSTSSPSRSPGPVYTKTDAQDASEL

SEQ ID NO: 44729 - protein, 89 aa, Zea mays
  Coding DNA Sequence Number=SeqID_1354
  Subcellular localization annotation: CTP_CleavageSite=23; ConfidenceScore=5.14e-01
MDSVYRLGIGDGVVSRDSFGRRSVSSVGSRSRTSTSRELELDEQLRQQQQQVQQLSQQVQMMQGMLMQMYSAQMGSPMGPQFTRPSQSG

SEQ ID NO: 44730 - protein, 158 aa, Zea mays
  Coding DNA Sequence Number=SeqID_1355
  Subcellular localization annotation: CTP_CleavageSite=27; ConfidenceScore=5.17e-01
MMVLASVATTSFAILLLLSLPSCLHLRATPFSVEDVGACASSPYSSDTSPDTNSRSGYCTSSAHHHFRLVGRPVRLPGLRPVLPPQPAALAHGRSRELINARRRGYGASRSCSWPFSVRAVEHSVAAVDICYEVGGGVLSLRRVQGWEDTRILSPFLD

SEQ ID NO: 44731 - protein, 191 aa, Zea mays
  Coding DNA Sequence Number=SeqID_1356
MTQIRSRGRADATDKRGQGVSEPGRADQPGLGAETRGRGEVAHLEGKRWRHGATTEAQGRDGATVAELQLHKNHSGERGPDRPDRGREHRRVSRVADSKAKLTVALDGARAQRRPRNRRWTSAGGGGGSRFAWAERERRQESWAEGTNGGGEVDEQGAGFKRGTGARSWPENARTWGRPRWGDRGWEVEDG

SEQ ID NO: 44732 - protein, 314 aa, Zea mays
  Coding DNA Sequence Number=SeqID_1357
  Gene Ontology: Mol. function=protein serine/threonine phosphatase activity; Cellular component=protein serine/threonine phosphatase complex; Biological process=protein amino acid dephosphorylation
  Homolog annotation: Hit_ID=A2X330; Match level="QueryCoverage=47%, HitCoverage=74%, E-value=2e-69, Identity=83%"; Hit description =Putative uncharacterized protein
  Pfam annotation: Domain name=PP2C; Domain location=5-171; Score=58.9; E_value=1.7e-14; Accession=PF00481.12; Description=Protein phosphatase 2C
MEDFYDVKLTEIDGQAVSLFGVFDEASAFRDDGSTASTALLVGDHLYVANVGDSRAVISKAGKAMALSEDHKPNRIDERKRIENAGGIVIWAGTWRVGGVLAMSRAFGNRLLKPYVVAEPEIQEEQVSGGLECLVLASDGLWDVVENETPRPTPAEALTVVRLRPPVVPCPSRPAPSGQAGKPPTPTQSIDPTFQYPTTHNRPELRFESGGAVSRGGLDLVGWSTWICSSQQSRSTAADIEVHLLEPRCRPPPVLVPPLHPWDKDNDHGASGADLAVAARPSSLSSTPMPTSTSATTAMPTPSNNASSDSGIAV

SEQ ID NO: 44733 - protein, 127 aa, Zea mays
  Coding DNA Sequence Number=SeqID_1358
MWYLRTQVGITADQNNTKVDTTPKVNSIPGLFTLIEHSFLRHACTFISFKLKVNSIPVLFTLIEHSFLRHACTFISFKLKVNSIPVLFTLIEHSFLRHACTFISFKLKHLRTSPQQPSSVNTMPTIS

SEQ ID NO: 44734 - protein, 88 aa, Zea mays
  Coding DNA Sequence Number=SeqID_1359
MTYFWPLFGLLSFGYAVRRQWSTMKVKFMRVRANGPRAANDECYVLTKGLDKLSDLSWWLAPWNTDGHEDVEEWFMLSMWSWIGRTHV

SEQ ID NO: 44735 - protein, 262 aa, Zea mays
  Coding DNA Sequence Number=SeqID_1360
MTSHRSSDEGNAQSHTNGLAREGFPRILWEGEDALEPHPLQPGWRSLDSESFGYRAEDTIEAIALHGLTTFYGFHALELSTHPIGLFPAEKEDDPMWKDRVEHAKDIWAIYPGQTVHLTVRCMNALYRLQVMRGEAMSHLMALLEATKITLDNREELVVDLSTEMVEKDLQVEQLSNEIQELEELAGTRENTIEVLEDQLINTQQQLVEANQHLDMHHQEIQDMEANEDVNIEGGEEPASSLNTSGSGRPPSPESSFASFAH

SEQ ID NO: 44736 - protein, 118 aa, Zea mays
  Coding DNA Sequence Number=SeqID_1361
  Pfam annotation: Domain name=zf-CCHC; Domain location=59-76; Score =18.5; E_value=0.0024; Accession=PF00098.14; Description=Zinc knuckle
  Subcellular localization annotation: CTP_CleavageSite=26; ConfidenceScore=5.22e-01
NAVTLAHRAVSPSLMGRRWAVSAPARALAPEAPNRTQFPVQRNNQPQQQQQQYRQANDNMCFTCGNTRHYAKNCPRNQQRQGQNANQNQGKRQKVQVRQGRLNFTTMADIPEGAPVMT

SEQ ID NO: 44737 - protein, 150 aa, Zea mays
  Coding DNA Sequence Number=SeqID_1362
  Gene Ontology: Mol. function=transferase activity, transferring glycosyl groups; Biological process=metabolic process
  Homolog annotation: Hit_ID=A2Z101; Match level="QueryCoverage=76%, HitCoverage=29%, E-value=3e-30, Identity=52%"; Hit description =Putative uncharacterized protein
MDVGPNNRIVRGWVPQRSILAHKAVGGFMSHCGWNFVMESLAAGKAGADVVGIAEVEEKVRELMDVECKAAKWMLERAAWAQQVAKSAVSHSGTSATTLLKLVEELQETYDDGVILTAPSVLKPGHRKNHDLWALELSSSMREDYLSSSI

SEQ ID NO: 44738 - protein, 101 aa, Zea mays
  Coding DNA Sequence Number=SeqID_1363
  Gene Ontology: Mol. function=transferase activity, transferring glycosyl groups; Biological process=metabolic process
  Homolog annotation: Hit_ID=A2YEK4; Match level="QueryCoverage=97%, HitCoverage=24%, E-value=5e-25, Identity=44%"; Hit description =Putative uncharacterized protein
MPEHVVVRAKEVPDGVTKRADPDNPFTRFFMDEIGDSDSFYEAATRAWLMGPLFMATGDMPNNEKKEQDPKGYLSWLDERAAHPGSMVYVSSGTQAHIMNA

SEQ ID NO: 44739 - protein, 677 aa, Zea mays
  Coding DNA Sequence Number=SeqID_1364
  Gene Ontology: Mol. function=transferase activity, transferring glycosyl groups; Cellular component=integral to membrane; Biological process=metabolic process
  Homolog annotation: Hit_ID=A2Z101; Match level="QueryCoverage=69%, HitCoverage=95%, E-value=1e-178, Identity=66%"; Hit description =Putative uncharacterized protein
  Pfam annotation: Domain name=Glyco_tran_28_C; Domain location=400 -565; Score=-36.3; E_value=0.046; Accession=PF04101.7; Description =Glycosyltransferase family 28 C-terminal domain
  Pfam annotation: Domain name=Ribosomal_S21; Domain location=612-662; Score=32.1; E_value=2e-06; Accession=PF01165.11; Description =Ribosomal protein S21
  Pfam annotation: Domain name=UDPGT; Domain location=126-583; Score= -42.8; E_value=1.9e-08; Accession=PF00201.9; Description=UDP -glucoronosyl and UDP-glucosyl transferase
  Pfam module annotation: Pfam domain module=Glyco_tran_28_C::Ribosomal_ S21::UDPGT; Domain location=400-565::612-662::126-583
  Subcellular localization annotation: CTP_CleavageSite=79; ConfidenceScore=5.58e-01
MPVGPQLCFSAHQRITPAAAQLPLSRSLALTGRTRASVAPSRAAFSFPVTNWWAPLAEGVHSHRCVGPRRQPAFSARAVAMAPGSGTTSQLSLVRKPFPTVCRILPYVQFVRIGDLNVPVSRSGRDHVVIFPFMAKGHMLPLLHFATALSAQHGRLRVTLVTTPGNVAFARSRLPASVGLVALPFPSFPPLPEGVESTDALPCPSLHLTFMQATGLLRGPFAEFLASLPSPPLALVSDFFLGFTRRVAADAGVRRIVFNGMSCFASAICKALAASPPTSFEPGTMIQVPGMPEHVAVRAEEVPDGVTKRADPDNPFTRFFMDEIGDSDVRSWGVLSNSLDALDAAYVSALESFYETGARAWLVGPLFMAAGDMPDGEKKEQDPEGCLSWLDERAAHPGSVVYISFGTQAHITDVQLDELVHGLVQSGHPFLWAVRSDTWSPPVDVGPNNRIVRGWVPQRSILAHKAVGGFVSHCGWNSVMESLAAGKPMLAWPMIAEQHLNARHVANILGAGVRIALKVGADVVGSAEVEEKVRELMDAESKAAKRMRERAVWAQQAAKSAVSHGGTSAMALLKLVEELQETYDDGVIPLGRLPLRNTGSAVRGGDDFLMPILVDENEGESIFRRFRREVMRADVLQEIKRRRRYESKTDEKKREAREARRRNCRRYEHGCVSLDAA

SEQ ID NO: 44740 - protein, 311 aa, Zea mays
  Coding DNA Sequence Number=SeqID_1365
MSFASLVTYEGVVNALSREGCGHFEVFDQSDEGFEREIFQVEDPVLKRSAGALFDRMWGPHGRETVRERSDRAIDQMAHDEEVEDLGDLDSTLPDSMLPEALGVELALPSDASKGPLATPAPTGVGEDPAPAPALTGEGASKAMGEPAAEDPAAVAGPSQVPMFGPTQATAADNTDFVAASTVVPVDDSLFGSVSECFESDGESGSSFPWTEESLDEGLDYFVALDVAAAETSPCVEGAGDLPSASTGYRRRRVVGKHSVGEFSRSGRHRHMGMERGRLRVDRVGKQELLSSPIGASIGEGDLRKLLRVRN

SEQ ID NO: 44741 - protein, 151 aa, Zea mays
  Coding DNA Sequence Number=SeqID_1366
MEKDRQDAARKRRAITRVGDPFREAKKARGGAKSAAPGSSKPPPAAKPTAPGPSKSSSGARAAASGAGKLPSVEPAKERRPPSPARTDVAATRVADFDTDIYVGDYLVDKRPPSPTMCASDALTSEFATEIERLRAQHTDVVRLRKTKAAG

SEQ ID NO: 44742 - protein, 294 aa, Zea mays
  Coding DNA Sequence Number=SeqID_1367
MSSSSSSAANRPPADSSSEDTLSDLAAAELQLGHMVEFSVLRISLVRVQDMQQLGYFGNDVGTRKTSVEVVELVPCARNNWGNWWDYWFYVSGSKVEDLPRLPAAVMCSHCYVAFLQFEVAEDDEDEGALRCAARMSSGRDLVEEFIGYGVWPLAHGWVLGEVCPRQMPTLGQQLVRSPAFSLDLRGRDPTVFVREVEDGAVRIVGQYAPRTEGLRSWDIRGSNVRLNRVFELNRLPYDCYPGDDAAAAADRRGKKPVAVAEEGPSREAAPATKKRKIGTAVGVLGSLIILLWS

SEQ ID NO: 44743 - protein, 129 aa, Zea mays
  Coding DNA Sequence Number=SeqID_1368
  Gene Ontology: Mol. function=transferase activity, transferring glycosyl groups; Biological process=metabolic process
  Homolog annotation: Hit_ID=A2Z101; Match level="QueryCoverage=65%, HitCoverage=17%, E-value=3e-24, Identity=63%"; Hit description =Putative uncharacterized protein
  Subcellular localization annotation: CTP_CleavageSite=30; ConfidenceScore=5.32e-01
MGSPTRPRRTTGVTLLNPDAAVPVASNTVRANGASATAYGSPASHHGANGPSNGVPVSRSGRDHVVSFPFMAKGHMLPLLHFATTLSAQHGRLRVTLVTTPGNVAFARNRLPASVGLVALPFPSFPPLS

SEQ ID NO: 44744 - protein, 681 aa, Zea mays
  Coding DNA Sequence Number=SeqID_1369
  Gene Ontology: Mol. function=hydrolase activity; Cellular component =membrane; Biological process=lipid catabolic process
  Homolog annotation: Hit_ID=A2ZY29; Match level="QueryCoverage=37%, HitCoverage=20%, E-value=6e-87, Identity=66%"; Hit description =Putative uncharacterized protein
  Pfam annotation: Domain name=DnaJ_CXXCXGXG; Domain location=428-507; Score=71.3; E_value=3.3e-18; Accession=PF00684.10; Description=DnaJ central domain (4 repeats)
MIQNPSYAELQKAANQGRRCTWEKLSAIRANCAIELALDECVALLNHLRRLKRSAERASASQGYGPVIRFCPSRRIPSWNLIARENSTGSLDEEMLESPHTNHQGPGGVAGTSTRNRYFQRNAHESSDSESESIDLHSWTRNGGPLMRTASANKFISFVQNLEIDTEFRTIPSRENLTDLVTPNAGSLAAHAVNREATDRSLDISALDIHDTATPRSTFGRSTSIVVSEGDLLQPEKIENGILFNVVRRDTLLRRSFVDDDMTRSAWDIVQSFAPREQGSEPGERVDTRCNSDTEEESEAEDGVAAVESELKELRIGETFEGLTGTSSLSTTNDDDASSTTTEAMFIISLNGKFKRKIKSWMRGALLGSGSFGMVYEGISDQPTDKPFRTEHMRRLEFAFWFKVSTPPRRSGGRRSRIGRSETHKRWLRRELGITNDVTSLLQSGASSRCAGCQGSGFKVQIRQLGHGMIQQMQHPCNECKGSGETISDKDRCPQCKGVKVVPEKKVLEVVVQKGMQNGQKITFPGEADEAFVLTHLDNRQLLIKSNPGKVVNPGEVVKPDSFKAINDEGMPMYQRPFMKGKLYIHFSVEFPDSLSPEQCKALEAIPPPKPVSQYTDMELDECEETMPYDVNIEEEMQRRQQQHQEAYDEDDDVPGGWAEGAVRPAVGSLRQICCFALGDY

SEQ ID NO: 44745 - protein, 37 aa, Zea mays
  Coding DNA Sequence Number=SeqID_1370
MASTWGALRRSISLASKRREWGWYDLYLLVVLICVVG

SEQ ID NO: 44746 - protein, 96 aa, Zea mays
  Coding DNA Sequence Number=SeqID_1371
MTNSTSLSGGIRGCWQSSVDKHWHIAQPDRTCSMWCLHSVLRISLGCQWEQPDEYVESMESSMVQIEMGTNLLQYEPMYPRVEHSEDERYCSPAPR

SEQ ID NO: 44747 - protein, 125 aa, Zea mays
  Coding DNA Sequence Number=SeqID_1372
  Gene Ontology: Mol. function=3'-5'-exoribonuclease activity; Cellular component=nuclear exosome (RNase complex); Biological process=RNA processing
  Homolog annotation: Hit_ID=Q2QT85; Match level="QueryCoverage=95%, HitCoverage=41%, E-value=4e-50, Identity=82%"; Hit description=3' exoribonuclease family, domain 1 containing protein, expressed
  Pfam annotation: Domain name=RNase_PH; Domain location=29-120; Score =4.3; E_value=0.00036; Accession=PF01138.12; Description=3' exoribonuclease family, domain 1
MVGLSEGEKHFIRGGIAQDVRTDGRRRLQFRSLSVQTGVIPQANGSARVRLGATEIIASVKAELGKPSILHPDKGKVAIFVDCSPTAEPLFEGRGSEELSAELSVSLQRCLLGGKSGAGFWGDFI

SEQ ID NO: 44748 - protein, 64 aa, Zea mays
  Coding DNA Sequence Number=SeqID_1373
MEMSERNSAAQKSEAQKSEGTRLSGKDGLAFVEAFLAQKIYFREIGLRPFFRGYGFRALGPRFF

SEQ ID NO: 44749 - protein, 145 aa, Zea mays
  Coding DNA Sequence Number=SeqID_1374
MECGWRGRDLGTDRRGSGQWVGSRQAADLGSWDWDWEDWPPGRLGLPDWPAHGCCRLPPGVRTPPDAGKIGRLGLWEYAAGRLGRLEARGSGRLGARVASCDIRPSGISTGRGPWAVPLLDWRFVQKRRITASGDQERTRTETHL

SEQ ID NO: 44750 - protein, 68 aa, Zea mays
  Coding DNA Sequence Number=SeqID_1375
IVDLHRDVQTCGYHDVEVMWGMLGLDAGPPSAPERRNRSPPFWTWTPSFWHFGSSRRTPTPTPTPAAR

SEQ ID NO: 44751 - protein, 452 aa, Zea mays
  Coding DNA Sequence Number=SeqID_1376
  Gene Ontology: Mol. function=sequence-specific DNA binding; Cellular component=nucleus; Biological process=regulation of transcription, DNA-dependent
  Homolog annotation: Hit_ID=Q2QYJ7; Match level="QueryCoverage=25%, HitCoverage=40%, E-value=5e-28, Identity=54%"; Hit description=WRKY DNA binding domain containing protein, expressed
  Pfam annotation: Domain name=DUF679; Domain location=219-315; Score= -104.4; E_value=0.068; Accession=PF05078.3; Description=Protein of unknown function (DUF679)
  Pfam annotation: Domain name=WRKY; Domain location=294-347; Score =10.6; E_value=3.7e-05; Accession=PF03106.6; Description=WRKY DNA -binding domain
  Pfam module annotation: Pfam domain module=DUF679::WRKY; Domain location=219-315::294-347
MTALDADEDDELMHQEYRSMIGYLLGCGRVVIDEIEHQRALMVDLHDLILPILDPCSRQAKHVQQLFQDISSSSSKVISFVLELADDNSKKQQASKVVKDRRKAGGKNVVESHMLLEEAKEIGKNRRSVAVSSTSHHGSKMSNAVASLLALAVVRATCRGRPPSSLLLDFPPLAPCAYHSPPAVSGRRSVVVSSMCYHGSKMSKAPSSQTKADPRAPALALSSTTNLANLLPTGVLLAFNLLALKSPFDGCVYYVVTSCTGLRLLNYLPDASPLPEGVTRRSPPQGTGTRHRIPIVANTVAKNYYRCANSKDQGCPATKTVQQKETDGSGAVKLFDVDYYGQHTCNKDGVIHPYVVDTAHDSVPTVDHNQSCSTPTSSAHNNGVHGILQDDESFENLFMVPSIPEHLTDESFENLVMVSSIPEYYLADFTDVEMAEGALEVASMMISEDIWA

SEQ ID NO: 44752 - protein, 127 aa, Zea mays
  Coding DNA Sequence Number=SeqID_1377
  Homolog annotation: Hit_ID=Q2QYN0; Match level="QueryCoverage=63%, HitCoverage=10%, E-value=8e-29, Identity=72%"; Hit description =Expressed protein
MPLRAAERLLQEACLVVSCDTGSRMPLYDDAEYVVFEDPEQFEDPCHDPDEIALLGPVSESLDNFPPDLDCGFILSDVVKESHGRPSPIESPLSRSRMVEENPMKPLHLFSIESPLSRSCVEHAIGS

SEQ ID NO: 44753 - protein, 400 aa, Zea mays
  Coding DNA Sequence Number=SeqID_1378
  Gene Ontology: Mol. function=chalcone isomerase activity; Biological process=flavonoid biosynthetic process
  Homolog annotation: Hit_ID=Q2QYK6; Match level="QueryCoverage=53%, HitCoverage=94%, E-value=6e-53, Identity=55%"; Hit description =Chalcone-flavanone isomerase family protein, expressed
  Pfam annotation: Domain name=Chalcone; Domain location=89-310; Score =77.0; E_value=6e-20; Accession=PF02431.6; Description=Chalcone -flavanone isomerase
MKVADLQNQAYMTDSKDLNSVSPKNDTRLTNLSVAEHKKLEDDMKKLVEESQRQHDQGTQGGREVFCMHGLFHRMDDCDEEQRRCAVGSETETVNVEGIPFPAEITVGNPLSLLGTGITDIEIHFLQIKYNAIGVYLHNAGGGDSTTPTLLGHLGAWKGKTAEELLADAAFWAALVAAPVEKLFRVVVIKEIKGSQYGVQLESSVRDRLAAADLYEDDEEEALEKVADFFQSKYFKPGSVVTFHFPAPASASPGPAAEITFATEGKGDARIAVENGNVAGMIQTWYLGGDSAVSPSTVRSLANRFAALLAVAAPPETPSPQTFAIAMSATNIVAAKRPPTRLPPLRLPATAHAPRIPHARLRETLAYHTNVARHEAPARSTPAAANPATTRRLRFNMRGR

SEQ ID NO: 44754 - protein, 92 aa, Zea mays
  Coding DNA Sequence Number=SeqID_1379
MALGKEGNLGTGKDIFAECCCQGTRQRYWQRGPLEGSLSSASPPDTRQRSLLCRVPIRALGTGTGGGVHWTSLCRGPLEQTLGKIGLFAELH

SEQ ID NO: 44755 - protein, 267 aa, Zea mays
  Coding DNA Sequence Number=SeqID_1380
  Gene Ontology: Mol. function=sugar:hydrogen symporter activity; Cellular component=integral to membrane; Biological process =embryonic development ending in birth or egg hatching
  Homolog annotation: Hit_ID=A2YA49; Match level="QueryCoverage=66%, HitCoverage=54%, E-value=4e-70, Identity=79%"; Hit description =Putative uncharacterized protein
  Pfam annotation: Domain name=TPT; Domain location=82-226; Score=2.2; E_value=0.00043; Accession=PF03151.7; Description=Triose-phosphate Transporter family
MDDQYDVTQEWLDRVKIARKGLRGTKRRNLRALYCRFYTAPDSYASALGIAKGIDNVILSVICTATGVLIAALGDFSFDLYGYCMALTSVFFQTMYLILVEKSGAEDGLSSVDLMFYNSILSLPFLFFLIIATGEFPHSLTVLSAKAASLMFGVILVISLVMGIVLNFTMFWCTIVNSALTTTIVGVLKGVGSTTLGFDLLGGVEVLALNVTGLVINTFGGLWYSIWMPQLLAAMPLYGCPNYLLLCPYMDASLIVGHHGHGTTTPP

SEQ ID NO: 44756 - protein, 57 aa, Zea mays
  Coding DNA Sequence Number=SeqID_1381
RARGYERPRELQRLVILDQRYFGTGGYEIDGSGYDYGAGEDEAVEGDFQEFQDYDEF

SEQ ID NO: 44757 - protein, 253 aa, Zea mays
  Coding DNA Sequence Number=SeqID_1382
HYGTGDYEIDGSGYDYGAEIESVRSCSPVLPLEAPPAPSLGAPASGVAAGGDPDDGGGDDSSSHDTDFSADHEPEGWVARPIARDAARGCHFHDALDTLLRRALNRQACSEHYSISERDSAEAAMQDAARRALSHYCSVLGGVADGLDLKYYPRRPSGSTGGVIVSPVGEDNPRLSSTVNLAAVLNTELDHALDELSRARAEIALLRAERVERRHLDDGSPAPVGTQHPYRSPRRGHQSYGNPDCKTKINLGP

SEQ ID NO: 44758 - protein, 319 aa, Zea mays
  Coding DNA Sequence Number=SeqID_1383
MNGGNHPRGGEPSFSQLLQSLQKGLEILLSIARSPVAPVLAGGGHHSLRKRREPPVVISEIKPPALPPFVRRREDGRDVLQRPRLPQLEDAAASPHRHANSSFPRRRGKKLRGEEMGPQVPVGGNPQISFANRREDGCLRDGVGTEVVQLHPIDVQNRPHKTARRHSEPPLVKGDEAHHKPRWRGRGGSARRGHPLRLRVTGERAKQTISNKGLQGPGKGILRKGSFSVKEAGLEPPYSSEVRRLAPRKGSTAASEHSGSAPTTGQRGRHRDEDITMSTTTPVAPPHQAPLPSLAGPITRARARDLNFVMLLKNEGPEE

SEQ ID NO: 44759 - protein, 124 aa, Zea mays
  Coding DNA Sequence Number=SeqID_1384
MALSSGSARELSPLEGDVDPGDTKSQWKCFRLWDNYCVKNKRCVDECLGVEGKGYTHGHCELWTCICCKKNDNQRMRPFYHAPIDMLVCPPCIWDNTVDREHTSQTKYHMQANHELTTNMPHVR

SEQ ID NO: 44760 - protein, 119 aa, Zea mays
  Coding DNA Sequence Number=SeqID_1385
  Homolog annotation: Hit_ID=Q7XBD3; Match level="QueryCoverage=29%, HitCoverage=6%, E-value=4e-08, Identity=80%"; Hit description=Zeon1 gag protein
MEDDRGEPSLGGLATKDDWRPRRTMAEDELGQPCGGEVLAAARSALDVGRGARQKYGSNSVFLSSAENNHIMAEAEGYASHQLPGLPNEASDAQALFQCTQDHEEYLQAYVRRFLRLRA

SEQ ID NO: 44761 - protein, 70 aa, Zea mays
  Coding DNA Sequence Number=SeqID_1386
AASDWNVQAQHGKLIKSTFIWIQNYSHICSEAADECPSGQGVTLHKIVTAIGGGISVAKAQRLWKAVVGP

SEQ ID NO: 44762 - protein, 76 aa, Zea mays
  Coding DNA Sequence Number=SeqID_1387
MSSGRWIPTIGASVFWATGQALFSVRCAIWLFSDSGAHCSAFNAVADDRWREVAVAPLAQWTVRINVPKNMIKLGS

SEQ ID NO: 44763 - protein, 357 aa, Zea mays
  Coding DNA Sequence Number=SeqID_1388
  Gene Ontology: Mol. function=DNA binding; Cellular component=nucleus; Biological process=regulation of transcription, DNA-dependent
  Homolog annotation: Hit_ID=Q8S985; Match level="QueryCoverage=12%, HitCoverage=6%, E-value=4e-14, Identity=93%"; Hit description=Auxin response factor 15
MATAAKLPSLYAELAAKSSRVAELEVRISALETENAGLRGGAGGKEEDPISRQLAEHLRGIEHGAVEKPGWGVTRRDAFEVSDNEEGAAAVGANKGESPDKGVGAVPALRKRVVAGESVGEAEADVAHVLQDAHGPPTPARTVASPCRAAPPRTASRPLVRLRWLGKLPSFRVRVLLLRAAPQTTGCSAFVNKKKLVSRDAVLFLRGDNGELRLGVRRAAQLKNGSAFQLFITSAQIGSGRLLAYISACPGQCGRADGYILEANLQGHFLLLTSYILEVPEVNVVVAGEERALHVCCQDLPQEPRHPNGETASQDMEKHKGSYNQGPREDLEIDLAKLLSTKRKSWSSTDSRTSYLK

SEQ ID NO: 44764 - protein, 97 aa, Zea mays
  Coding DNA Sequence Number=SeqID_1389
MASPFPVLLRSIQALRQLPDCNLADGEYVLVPVQGAAQEVAPDPAQSLHPRTCLPLLWKASPGSLEDMVAGVTWPSILPPGWTVEWDPASAEEEHEE

SEQ ID NO: 44765 - protein, 47 aa, Zea mays
  Coding DNA Sequence Number=SeqID_1390
MNRRDYWKPEHEVRTGRSLNQTKDGLITKLHEGWCTAEAVRREASSR

SEQ ID NO: 44766 - protein, 69 aa, Zea mays
  Coding DNA Sequence Number=SeqID_1391
MAEASFHVFDASWQPGARSEHAHCNLADGEYVLVPEQGAAQEVAPDPAPEPAPEDLPATALEGKPRFYA

SEQ ID NO: 44767 - protein, 133 aa, Zea mays
  Coding DNA Sequence Number=SeqID_1392
  Subcellular localization annotation: CTP_CleavageSite=37; ConfidenceScore=5.28e-01
MSGAPEDSNSNSSPSGNSKGNSAIIHRTVRCTPDSVRCSKEERPQELASLGNSLRLLRYNSPDMSGVHRTVRCNSGATTTSRQWSPATAINARQSAQKSGTRVVAHRTLYSVCLVRHRTSRRAQKSELQRSEP

SEQ ID NO: 44768 - protein, 175 aa, Zea mays
  Coding DNA Sequence Number=SeqID_1393
MWPTMRDVSPWAEPDVRPLGRAVSAFIVEKTRRLTTPLTSDVPFQHLKCPVHSAGRRRLGHPAGGVPVHPIAKQYAHAARCTVPVHHHSYIARESSPARQCYTDRGYQGARKIALGMGTSHSKYYIRYVPRPTCRGSTPMYVPPLDYKREGTQRYRLIQTQAILDTTQAHEQYNT

SEQ ID NO: 44769 - protein, 153 aa, Zea mays
  Coding DNA Sequence Number=SeqID_1394
MGKNNKHKREPTPPSEDFGDSEYSEEEFSSESEGSPAPVSPLASSDDSDDSQEIAAEVWTYIRAVERSGLKGSDESAFSSDEEDSDGGEDEDDDDDDGDDDDDGDGDGSNGGGGSGGRGGTRGGSSTGSTRGGSSKGSTRGGGGKGSNSKASG

SEQ ID NO: 44770 - protein, 53 aa, Zea mays
  Coding DNA Sequence Number=SeqID_1395
MRSLHGGSRGQWSIECQGGTMQDVVDGVTWPTTLPPGWTVEWDVAPAGEEHEE

SEQ ID NO: 44771 - protein, 497 aa, Zea mays
  Coding DNA Sequence Number=SeqID_1396
  Gene Ontology: Mol. function=nucleic acid binding
  Homolog annotation: Hit_ID=Q338V7; Match level="QueryCoverage=75%, HitCoverage=53%, E-value=2e-15, Identity=22%"; Hit description=Zinc knuckle family protein, expressed
  Pfam annotation: Domain name=zf-CCHC; Domain location=382-399; Score =22.8; E_value=0.00054; Accession=PF00098.14; Description=Zinc knuckle
  Pfam annotation: Domain name=zf-CCHC; Domain location=407-424; Score =9.8; E_value=0.05; Accession=PF00098.14; Description=Zinc knuckle
  Pfam annotation: Domain name=zf-CCHC; Domain location=453-470; Score =8.1; E_value=0.09; Accession=PF00098.14; Description=Zinc knuckle
  Pfam module annotation: Pfam domain module=zf-CCHC::zf-CCHC::zf-CCHC; Domain location=382-399::407-424::453-470
MTMSSQEVTVELLLGDGSNYKSWSVSIYNAFMSVDPDLRQVFSRSIFPFNVSKNPSNDELRCLSLNHHACNILVDSLSRDAYFAIMSSDNDLFIDAHDLWNRIKVKYFVANCTAPTPYIACGANLSKGEEQERWAPNDESTSSTGLFSTSNKCFIAKNDGGDESHDEEEYEDDSEDESSSPQGAFSCIASTNIDDREMRPTMWKKRRFAGSTSISTKEDKALLVKLLRRNKEQGETLLRLEESLIKTNNSLEKMTKEHEKLKCSHDDLVQRSQVEKINLEKLALGEKYDMLSYSHNKLVDDHIMLNVAHEVGHKRNYVGTRSKDSKGEDALLDFLKISTGAWVKKLEKGKTAASVKLHKKNVPKDEEINMSLEKNKKRKGKRRCFKCNKSGHLIASCPYTNKGEGIRRCFRCNDKSHTITSCPLIMNQACAVSKMTLTKKNDKQQASCQGERRFCYKCGEQGHLSKSQGGKEKISKKWSNQDWGTSVSQGIGILSHE

SEQ ID NO: 44772 - protein, 188 aa, Zea mays
  Coding DNA Sequence Number=SeqID_1397
MRTVHSTAAGICILLLMVMSCTLMTTPTWAAEDCYQQYPTCQDAVCEAKCSEEFHSKLSGFRCTSRHSATQLSEEYWPAAAAAAAASSSQHHAGADNDELPSPPSAGGGSSSSTSAVVPAVGWRADAEAGRLGGVPGAVTSGARRQGLRGQVGWGLGVEKGVGRRRRERKGEGEGVAAAWEREQGSGS

SEQ ID NO: 44773 - protein, 453 aa, Zea mays
  Coding DNA Sequence Number=SeqID_1398
  Gene Ontology: Mol. function=catalytic activity; Cellular component =cytoplasm; Biological process=cellular carbohydrate metabolic process
  Homolog annotation: Hit_ID=Q2QNG7; Match level="QueryCoverage=100%, HitCoverage=100%, E-value=0.0, Identity=85%"; Hit description=ATP -citrate synthase, putative, expressed
  Pfam annotation: Domain name=ATP-grasp_2; Domain location=5-234; Score=-79.2; E_value=1.2e-05; Accession=PF08442.1; Description=ATP -grasp domain
MARKKIREYDSKRLLREHLKRLAGIDLTILSAQITQSTDFAELVSQQPWLSTMKLVVKPDMLFGKRGKSGLVALNLDFNQVKEFVKERLGVEVEMGGCKAPITTFIVEPFVPHDQEYYLSIVSERLGSTISFSECGGIEIEENWDKVKTIFLPTEKPMTSDSCAPLIATLPLEVLVAFLLSSNLNTSMLSHFSHWRYSLFADQARGKIGDFIKGVFAVFLDLDFSFLEMNPFTMVNGEPYPLDMRGELDDTAAFKNFKKWGGIEFPLPFGRVLSPTESFIHELDEKTSASLKFTVLNPKGRIWTMVAGGGASVIYADTVGDLGYASELGNYAEYSGAPNEEEVLNYSRVVLDCATADPDGRKRALLIGGGIANFTDVATTFNGIIRALREKESKLKASRMHIYVRRGGPNYQSGLAKMRKLGAELGVPIEVYGPEATMTGICKQAIECIMAAA

SEQ ID NO: 44774 - protein, 981 aa, Zea mays
  Coding DNA Sequence Number=SeqID_1399
  Gene Ontology: Mol. function=binding; Cellular component=nuclear pore; Biological process=protein import into nucleus, docking
  Homolog annotation: Hit_ID=Q2QZ88; Match level="QueryCoverage=95%, HitCoverage=95%, E-value=0.0, Identity=65%"; Hit description =Expressed protein
MDIETHAAALARDELRRLLAATLSPDKASVDAAAAGLDALSSDPRFPLAILAVAAVISEKPLKVGPEVLSDLHYEKFRQVVEKDFVKDNLWPELIPQLKLVIQSSNLISPGQHPECNTINALTVLQSVVRPFQYFLNPKVVKEPVPQQLEQIAAEILVPLQVTFHHFSDKVLLSPDGTNLEYEQLLLITCKCMYFTVRSYMPSRVKQILPSFCKDMFRILDSLNFNSLIEDGSTMKLKIAKRCLIIFCALVTRHRKHTDNQMPHIVNCAIKISKQSIHLSKLDSLPNRIVSLAFDVISRVLETGPGWRLVSPHFSSLLDSAIFPALALNEKDIEEWEEDTDEYMQKNLPSELDDISGWTEDLFTARKSAINLLGVIALSKGPPVASAASKRKKGDKNKGKSEMSSIGELLVTPFLSKFPIPSHGEDASSVAVRNYFGVLMAYGGLQDDMSSSIYESLMKALTMEYVEDITCYPVCASASGAIAELIENSYVPPDWLILLQVVLKRISTGDENESALLFKLLGTIVEGGQEKVLSHIPEIVSNIASTVMELLPPVPDPWPQGFAALVAMVQAWESSAPDENKTPEKRFWQSGQSAIAQTISLLLQKAWLLQADNMEGSALPPPSCVNDASVLLEFVMSSVTCMEETANLKVFELVATWADAIANWDSWEEMEDQGVFNTIKEAVNFHQRFDLDGLFLKTLPSQSENGSQSSVIGRVSNFVTRAIAAYPSATWRACSCVHTLLHAPKFSLGAQDTRKTISESFAQAAFSRFKSVSDSPAGLWKPLLLAISSCYICYPDAIEQVLNNVDGNGFAIWASALAQVSSSLFNPGLSSESEIKLADCYASLMESCIQLKEVQDDGDNDDDDDGAEDVDDNDEEEDTEDDDEDSDDDDDAREETEEEFLERYALAAAAGESVEEGDIDEETQDIELGSLDDVDIQQVVIPLMQKLPALQPAGAFPDSLVERIAETFPEYEQFLQALRRA

SEQ ID NO: 44775 - protein, 202 aa, Zea mays
  Coding DNA Sequence Number=SeqID_1400
  Homolog annotation: Hit_ID=A2Z4I9; Match level="QueryCoverage=62%, HitCoverage=29%, E-value=9e-13, Identity=33%"; Hit description =Putative uncharacterized protein
MRAINQAPYIMIVANSLMQENCRVNEERLHSHGWPLMNLEKQQNFTDSTSYYSFSFCSLYAATSTSRSGWNDNGRDTELQIIVRENKLPIEVMAENNGLLWAEEPEHGLTAAGPKRAEEEEVEHYMDLGFEAEGDDPTGADEEWRYFKNADFDHPTDARAADLDHPIEARLDAVPNDEAAMIGDAIAAQTTYDRENPKIVVG

SEQ ID NO: 44776 - protein, 114 aa, Zea mays
  Coding DNA Sequence Number=SeqID_1401
MIQILPQTEVRKNSKVGLAQMNKGRNLQNRVGIQDSNPTTNPPRAKLLRRKNSDIDKVGKIQLGNNRHMITCERQLAIEIDRRNDCSSRILVLPLGRHRNLIGGLSGSKIKGKL

SEQ ID NO: 44777 - protein, 132 aa, Zea mays
  Coding DNA Sequence Number=SeqID_1402
MGKRKKGGSSSHHSGDKRKREPSPPSEDFGDSEYSEEEFSSESERSPGIAAEVWTYIRAVERFGLEGSDESEVSLDEENSSDSSEEESGGDGDDEGDGDDGGDGDGDGDKGDGGDDKSGSGSSKASGKAPLA

SEQ ID NO: 44778 - protein, 213 aa, Zea mays
  Coding DNA Sequence Number=SeqID_1403
MQVACNCTTEMHPFDFDASSMEAQAHTSCNRRAGYYVRKTAPPLTPMSRLLDCGTGATTRGNPTHGPTVPTKRIGHGSASRERRRDGRYGQKWAGSNGGSRRAEAAFKSSAGSRPLLEQQGSPLPWHEDDAPVFRPSNGSRNGCPANHPSRRINFAAGQATPLAGTEKGDTLKGILPREGSGPRALLLIRGSKASPSEGFDSRPRALGLQAHY

SEQ ID NO: 44779 - protein, 131 aa, Zea mays
  Coding DNA Sequence Number=SeqID_1404
MGSARVAFVLLLLEERNFVEVGTFSHCSASRIFIRQPGCILSPMVTQDGFHQFDGGEKQAGLWPLPRPQLQGSSSSLLGRGRAEPELYLPYGPAGHLFLQHSGERALTGEREMYPWAISKYFGDLVSNTSA

SEQ ID NO: 44780 - protein, 129 aa, Zea mays
  Coding DNA Sequence Number=SeqID_1405
  Subcellular localization annotation: CTP_CleavageSite=27; ConfidenceScore=5.28e-01
MHSLFRGSGVAGKGSAGRSTVAGNRVAAGTLSAGQTPVISGSGEVERARRSTVDVYGGFIDAGATTAPARLWHDAGHTGARTSVLWRAQSASNTWLFASVRVLPSAERPKRANLALRPVRDFFPAPRAT

SEQ ID NO: 44781 - protein, 112 aa, Zea mays
  Coding DNA Sequence Number=SeqID_1406
MAAVVAVARQRKEYHVVATVEGHELETPETEQRPGLERLLETTHLELDGKLFVNTQQAPTWRANYRRFDPGGSLDRREAENRHRHRSTRGAIITCLPGKARWDARLVPRNLS

SEQ ID NO: 44782 - protein, 343 aa, Zea mays
  Coding DNA Sequence Number=SeqID_1407
MGSGHITCSAEMARIRCIARKSVIPFLPSRLVERPLRRTVPGQFSHLERLHRRLHEEQEQQDSSSLPQQEVESDRPPSPAPQPEMPPAPPQDIPAAGGDPDGDGDDADAGGSSSHDTELSEKLEPDGWIARPITRDAARGCHFHDALDTLLRRAFDRDTWSIEYRCVVYQHRHGLYPDQWEATCLVRCPDDDLQAAEAFSKHYSITERDTAEAAMQDVARRTFSQYCSLFSGVADGLDLKYYPRLSTESAGGVIVSPVGEGNPRLNNMVNLVAMLNTELDHALDELGKVRAEVAELRAECTTRHYLDGGSPAPIGIQHPYRSPPRGRFDYGTLHCRTRIDLDP

SEQ ID NO: 44783 - protein, 130 aa, Zea mays
  Coding DNA Sequence Number=SeqID_1408
  Gene Ontology: Cellular component=integral to membrane
  Homolog annotation: Hit_ID=A2X770; Match level="QueryCoverage=33%, HitCoverage=17%, E-value=5e-14, Identity=93%"; Hit description =Putative uncharacterized protein
MALGSKAEWKAVLDAGAWMFNVVTSVGIIMVNKALMATHGFSFGIVAHSPTFIGGPDFTKYKGEILIFIFWKKVATKRTSWMYNLSRLDLSYISEVHRFIDVATNHACRTKTKHIYCPCMDCKNDVVFDG

SEQ ID NO: 44784 - protein, 172 aa, Zea mays
  Coding DNA Sequence Number=SeqID_1409
MYLAASGSSDHRDAQAPVRLVENCTVLLEEASLTTVGGGQGSVHSRDTISPRPSPALGKDSRPRRIRVSPEGLLKQRAHLRLARGPARAGFAEKQPWPDRHANRPYRRSIQCKDRLTPYPDVRSSVDRAEVTCHFAAPLTDLTGKQRRLPCSDCCATRQGEADSRQVRPQAP

SEQ ID NO: 44785 - protein, 149 aa, Zea mays
  Coding DNA Sequence Number=SeqID_1410
  Subcellular localization annotation: CTP_CleavageSite=9; ConfidenceScore=5.09e-01
MVAPPPPPSAGKVTGQTRMLFFRHVGKTSLIPPPAGGLTAAIIVVARRRKEYHVVAAVEGLELKTPETEHRPRVERLLETTHLELDGKLFVNTQQAPTWRANCRRFDPGGFLDRRVNCRCVSQPRWVGARRNTRGKTVRGNHGLVLSCA

SEQ ID NO: 44786 - protein, 82 aa, Zea mays
  Coding DNA Sequence Number=SeqID_1411
  Subcellular localization annotation: CTP_CleavageSite=40; ConfidenceScore=5.53e-01
MGAIQVKAPSTQGTRSRLARAQPRAKIADPGGFASRPRVSSSNGRTFDSPEAHLGQASRRSNLGQIATPTDRIAGAFNGRIV

SEQ ID NO: 44787 - protein, 263 aa, Zea mays
  Coding DNA Sequence Number=SeqID_1412
  Gene Ontology: Mol. function=nicotinate phosphoribosyltransferase activity; Cellular component=cytosol; Biological process=pyridine nucleotide biosynthetic process
  Homolog annotation: Hit_ID=Q10AX9; Match level="QueryCoverage=63%, HitCoverage=31%, E-value=4e-70, Identity=75%"; Hit description =Nicotinate phosphoribosyltransferase, putative, expressed
MSHVKQELHTLSCQWTMHSFGIIVLFLEEPNLFFLVLIVSLGYFSQFAYDMTHEYYYDVIQKEQGSFYGGKAIIVSFKEYSRKENVMQVALWKVNGRPWFDLYFRKNPFGGEFTVFAGLEECIKFMANFKFTEHDISFLQSVMPTCAGAFFDYLGEVDCSDVEVYSIPEGSVVFPKVPLMRVEGPVAVVQLLETPFVNLINYASLVTTNAARHRHVAGKSKVLLEFGLRRAQGPDGAISASKYCFMGGFDATRWIIFAFIVYN

SEQ ID NO: 44788 - protein, 120 aa, Zea mays
  Coding DNA Sequence Number=SeqID_1413
MADKGKGKGIVIGDPRMSTAQKASDEKAKKSEGAGGRSPYIVGGDFNIIKFSQEKNKGGGLHKHSELFNEIIQDNELVEIEMIRGGFTFFDKEDFINFKNITSSGYKSLKLLPASASEST

SEQ ID NO: 44789 - protein, 172 aa, Zea mays
  Coding DNA Sequence Number=SeqID_1414
  Gene Ontology: Mol. function=nicotinate phosphoribosyltransferase activity; Biological process=pyridine nucleotide biosynthetic process
  Homolog annotation: Hit_ID=Q6XQM5; Match level="QueryCoverage=58%, HitCoverage=18%, E-value=3e-22, Identity=55%"; Hit description =Nicotinate phosphoribosyltransferase-like protein
MDVGMEVHDVLGVYAGDGVWGDDQDASSSSCNTTLGDDAQPSRPVLGFLELDIDPNFLLMTLNDESLDEIPNKALRNKDGSRVCEDFVSLVQEWLQKFQAADSLGGVFGDTNKSELAAFASYALAFPSNFLALVDTYDTYMDFCVLRVDCSVIAYVEHRFELADGPRMSRAV

SEQ ID NO: 44790 - protein, 139 aa, Zea mays
  Coding DNA Sequence Number=SeqID_1415
  Subcellular localization annotation: CTP_CleavageSite=42; ConfidenceScore=5.79e-01
MASSSVLAVPSIPLPLPGAYKRTRPSPVPSTPAPAISSAFPRANRASAAALPRRSDEPRSSLPTEEGSDPPEFIAPEEGQEPDPSEIILLCQESFDEGKSILPLMHYLPISLYHCLSLEYGMGIELHGEHERARINNHL

SEQ ID NO: 44791 - protein, 173 aa, Zea mays
  Coding DNA Sequence Number=SeqID_1416
MGKNNKRKREPTPPSEDFGDSEYSEEEFSSESEGSPAPIPLSESSDDSDDSEGLAAEVWTYTRAVERSRLEGSDDRSTPRMRRTHPRRTTAATARMTTTTTTTKAVATVMVTVAAAAAARATAAAAVGAAAAGAAAGPVARCHWSLDVAAERLVDDVRVLEVTAERLKTTSAF

SEQ ID NO: 44792 - protein, 54 aa, Zea mays
  Coding DNA Sequence Number=SeqID_1417
MGSRLVGGYEIDGFDYDYGAGTLQDMVDGLTWPSTLPPGWMVEWDAASTGEDQE

SEQ ID NO: 44793 - protein, 290 aa, Zea mays
  Coding DNA Sequence Number=SeqID_1418
MVTSSLMVGESEPGCGLSPSLSLKDFHHQGWGGDCSVPGFRTRVASEPLVAPASATAAGRGSSTGVIAEAGHGPTSNSTAFCPSLPYEFWHGQGPPGSSIRPEVSAAAVRPPGAEVVVVTAAGAGDGAPFVGLPLLRRPTPIEWGCSSSLVKETPWPLFDEPRPGRGLGSGWRPWKMVGRGPWGNRPSRLLGPDSRRSPWTASPSEAGSDLAEGIVDAEGATAPFQREDPSLQDQIVLDVCASESCFSWKVMSEKVMSEVSVSRRRRSPSARSALAAYVYSVVFRIRFSK

SEQ ID NO: 44794 - protein, 138 aa, Zea mays
  Coding DNA Sequence Number=SeqID_1419
MDKRGKRVSKCAKHGSSSLGRICPGVSQSSDSPRYQEEVCGGLLQRFARMRPLATFEHWKKQTATCSTPSAAPEHAPARARAAPKPSQRPAIPSPVQLSERTVRVSVKLPERGIGLCFTGEAGPRSPDFNRPPATVDR

SEQ ID NO: 44795 - protein, 102 aa, Zea mays
  Coding DNA Sequence Number=SeqID_1420
  Gene Ontology: Mol. function=carboxyl- or carbamoyltransferase activity; Cellular component=ornithine carbamoyltransferase complex; Biological process=amino acid metabolic process
  Homolog annotation: Hit_ID=Q8SA97; Match level="QueryCoverage=79%, HitCoverage=19%, E-value=5e-12, Identity=44%"; Hit description =Ornithine carbamoyltransferase
MALPVDVAGLRPRSGDVEAPPKPRSKARAESEPWGRAKRSSSSSGAEPESEPWVGRSGVRHLPGPSPSPSPGSGGAEFAVFRGLARVRALGRAERSSPSSGA

SEQ ID NO: 44796 - protein, 146 aa, Zea mays
  Coding DNA Sequence Number=SeqID_1421
  Subcellular localization annotation: CTP_CleavageSite=54; ConfidenceScore=5.45e-01
MTTVPIDSPFASRPHHLGIQCSTDPGCRRAVTALVPTITSMGDPVSGRMRDKVRARLQSGTRFTGYHFSRHVLSTFKSLTQVLQNLQLLTMYDLSELDKVNFTYVRPWGGILGKLGPTLAKGRRGALNYNYYLTVGNSLKLIFAGF

SEQ ID NO: 44797 - protein, 151 aa, Zea mays
  Coding DNA Sequence Number=SeqID_1422
  Subcellular localization annotation: CTP_CleavageSite=11; ConfidenceScore=5.43e-01
MPLSSRVGNVASTAVRSPGSSQSAGMSWGSIKDLGINDSPVIPFTRSSSSSQDRSIPSPRWILPISFGPVNQHHRRGLLCSGMTRRFRKSPTTCMEVRPPVTKVLILSSTGRSSGDSDGLVIQCLRSRDGPLLGRTRRSLASTLAITQSAC

SEQ ID NO: 44798 - protein, 460 aa, Zea mays
  Coding DNA Sequence Number=SeqID_1423
  Subcellular localization annotation: CTP_CleavageSite=3; ConfidenceScore=5.04e-01
MAPSSMDRGKGPASNSSAPGGTEGSEEERRRRLRRADGSLVSNPPRSVRGLLVGPRRPAPRPRARRGTSVLHHLHHWARHHHHHHHHWSLRHHHLGVISLRGTSSSNNHSSSNNNNNRSSNNSSGRPSSRVAGKYRAPSTRPTDGSGSQQQGSAGSGAGGPPPAAAQTAPTASQAPARGPAVVALASGDVTTTEEVPTAPTPAIEDDVGGAPSSILSPTPEETEVVFGRRLRSGAKPELAPVPLLQVLSRAHQALHETEATILREWEVLEAEHHKSSRARPVTDLARREMYLSRRETDLARREMYLSRRETDLTFREEMLTRQGEMLAEHELEVEKKEKELEERIQQFQAPQAAPGISPIPVSELPTSISDALPVLDSAADCLRRVDQILGALLETVGGRLCRAVIEYILTCFQSHDPAISLEPVIAGPVADTEDAAREGVQDTVELVAERFQRDPADNE

SEQ ID NO: 44799 - protein, 57 aa, Zea mays
  Coding DNA Sequence Number=SeqID_1424
MESHDLRAEWESRLVGGYEIDGFDYDYGAGCQHCNHCSGEDEAVEGDFQEFQDYDEF

SEQ ID NO: 44800 - protein, 69 aa, Zea mays
  Coding DNA Sequence Number=SeqID_1425
MAEYQQRIDNTDGVEWKRCLCRILHFPFNLRLNTQDTHGVMLMTDYALMKACWNHFKQLPERGVWIPSF

SEQ ID NO: 44801 - protein, 293 aa, Zea mays
  Coding DNA Sequence Number=SeqID_1426
MERPPGKTVLPQGLTLHELPPLVSSCHIIPHDLLSYEHAPGFVPLKPGVTVDDFGALNSALPEPETTPAEAATGVAPGPTPETAEDAPGAPASAAAGEDLPPKVAKGAPDAPAAAVPSAEDPAEAAAEAPAAAGPSQVQDFGPAHATATTEFLAASTAEDGNECGGSVSEFFDVTDSGSSVEWTEESSEEDLDYFAALDVAAAEAAPHAADAPGVPGPSTGHRRRRAVAKRRISAEEGARLRVSRAGRQELLSLPAASGVGEGELRSLFAGEELRIMLFNYREMGIIPKVEPM

SEQ ID NO: 44802 - protein, 297 aa, Zea mays
  Coding DNA Sequence Number=SeqID_1427
  Gene Ontology: Mol. function=carboxyl- or carbamoyltransferase activity; Cellular component=ornithine carbamoyltransferase complex; Biological process=amino acid metabolic process
  Homolog annotation: Hit_ID=Q8SA97; Match level="QueryCoverage=37%, HitCoverage=21%, E-value=3e-13, Identity=48%"; Hit description =Ornithine carbamoyltransferase
MALPVDVAGLCPRQGDMGAPPKPRLSLSFVAEAEPEPWGRARRKSFGRGQGGVRALGSGEAEFRRLPARVRALGSGGAEFAVFWVLARVRALGSGGAEFAVFRVLARVRALGSGGAEFAVFWVLARVRALGSGGAEFAVFRVLARVRALGSGGAEFAVFRVLARVRALGSGGAEFAVALLARPDCLSDSLCRVAPQSEWRRRRCLSVRLLYADGGYQLRIRRLEADAYARGRKNGKGERGWGGLTSAARARHSGDGDEARLRRRIGEAKQRWARTAQGIAGVRGEKTGQRVEEIVRN

SEQ ID NO: 44803 - protein, 405 aa, Zea mays
  Coding DNA Sequence Number=SeqID_1428
MQAACNRTKGAHPFDFDASSMEAQAHTSCNRRADYYVRETAPPLAPVPRLLDCGTGAATRGNPAHGPTVPTEHIDHGSVSHRRRRDGRYGQKWAGSNGGGRRAEAAVKSLAPRKGSTAASEHSGSAPTTDQRLAPEGFDNRLRARRARDDSGYVRYMAEARATLPRKATQGRMKKAKSVLDRPFALCGGSGAALANPAPAKPLTTSTYQPENSEPDYAPGLRPENSAACPAPTAVPPVRVRLTAAKTALRRHRKLRLARPLSSDSTSTSEGGLRLARPPGLELNLDLGRRSSPRPTPGPGLSLDLGRRTLPRPILGLGLSLDLGRRSLPRPTPGARTQPRPRTTVSASPDPRAQTQPRPRRSLRLARPRARTDHVIGGAIITLPLASSGYGEQDRRPIRLAPVNK

SEQ ID NO: 44804 - protein, 282 aa, Zea mays
  Coding DNA Sequence Number=SeqID_1429
  Homolog annotation: Hit_ID=Q6QP51; Match level="QueryCoverage=16%, HitCoverage=30%, E-value=5e-12, Identity=59%"; Hit description =Putative growth-regulating factor 1
MGVGTHMSYELIRSMKKANRRTRGMDRERGRCGKDPSRWRKRAPSPPTDQGFEGWPLGKVSTAAPEHSDFKPITDQGFKGWPLGRAGPSEGFDSRPRACRVRDNSRIPPEGGIEPSDPVEGVWVWRITRRRVHASPEGLLRQQAPPRLSRGPARAGFVVKQPWPDRLTNRLLRRRIKCRGCLTLYPDTRASDGQAEVTAVTSPLFFTVRYDRKTAPLAPLRLPCQPPRQRLMTSHDQPLSSASGATGSPASPDLMLQPREEVSASPDLRLRPQEEVSALPDP

SEQ ID NO: 44805 - protein, 152 aa, Zea mays
  Coding DNA Sequence Number=SeqID_1430
  Gene Ontology: Mol. function=3'-5' exonuclease activity; Cellular component=intracellular; Biological process=nucleobase, nucleoside, nucleotide and nucleic acid metabolic process
  Homolog annotation: Hit_ID=Q5JND5; Match level="QueryCoverage=72%, HitCoverage=33%, E-value=7e-30, Identity=55%"; Hit description =Putative uncharacterized protein OSJNBb0021A09.19
MVVSLSVPASRSIGDGVPLTHRATVTVDLPCGFSRAYSKKAILQLCVGRRCLIFQLLHADYVPNTLDEFLSDPDYTFVGVGMAADVEQLENDYDLEVANAEDLAELTAKEMGRPDLRNAGLQGIARAVMDAHVEKPQRVRTGPWDASSLSDE

SEQ ID NO: 44806 - protein, 131 aa, Zea mays
  Coding DNA Sequence Number=SeqID_1431
MGKNKKGGNSSHHSGDKRKREPSPPWRTSVTPNDSQGIATKVWTYIRAIERSGLEGSDESEISSDEENSSDSSEEESGGDDDDEGDGGDGGDDGGDGDGDDKGDGDGDKGNGGSSKGDSGSNKASGKAPLA

SEQ ID NO: 44807 - protein, 53 aa, Zea mays
  Coding DNA Sequence Number=SeqID_1432
MEGTSAVTARRQPGLVEHCTLQVIVDGVTWPTTLPPGWTVEWDVAPSGEEHED

SEQ ID NO: 44808 - protein, 246 aa, Zea mays
  Coding DNA Sequence Number=SeqID_1433
MERSKDLALGMNLGYCCARPLIHRTGDVANRPSSSTGSPELGQAPFAVEDCGIYAASHKETARKSTRPIGVPRHQLAPRHEDSSSGSNDPIGDLEAQVEQLRMELRHRNSVWVEDGQRINELRTDIRHLQDELAERDLALDWAVNSRSIAWDREAKARVRMEELSTVVDNLQVYCNTLHEEVHELYSRLHPDVPADPVGMGVGPSRTASEAFGGELDLFKPPPSMNLADEWTPTSDNEAAKDNKYY

SEQ ID NO: 44809 - protein, 224 aa, Zea mays
  Coding DNA Sequence Number=SeqID_1434
  Subcellular localization annotation: CTP_CleavageSite=76; ConfidenceScore=5.28e-01
MVRASSIIPFAQLVTFGLNQVFTCERIFAKIRTFAISASVRTRAETNAHVFDAFLRARARLGAQPRAHRAAPSQTRASARARAYKASQGFNRMPPLALDLVGAQDHRRLPCTRCASGRPSTHHHRPANRAIPSPVRPSRETLRASVKLPEQGIELCLAGDTDSGITGLHQIADERRPGSTVSLSSIPSTGSLEDMVAGVTWPSILPPGWTVEWDPTSADEEHEE

SEQ ID NO: 44810 - protein, 322 aa, Zea mays
  Coding DNA Sequence Number=SeqID_1435
  Homolog annotation: Hit_ID=A2XWF1; Match level="QueryCoverage=10%, HitCoverage=5%, E-value=2e-07, Identity=82%"; Hit description =Putative uncharacterized protein
  Subcellular localization annotation: CTP_CleavageSite=38; ConfidenceScore=5.41e-01
MWVLFHRVVSLARNSRRGRSQWPERRARNSFPFSRNCKATTPTPWARWIKAERTRSFSPIPSFSPISHRHQNAAARRVRGFGPPSSTGRFLSDRTEVWGAGATPGAVGHGCNLALAHRAANFGEFLAVAEDSRSDRLTPWAELLRGERFTFWNLKTQPKGLPMRSDFRKFTDSRKSFWNHVPASACIRRRRLLPSPLDPPLGSPPVAAAPGSIPAAAPGPLPPPPLVLSRCRPRVSSRRRPCLHGGLGLRSEVWARRYLGQQFYLRVYTPSHLFRDELPIPDNAPPVAAANPCRYNKSCVSNQVPRVAIKRRLQGMSSYPAP

SEQ ID NO: 44811 - protein, 147 aa, Zea mays
  Coding DNA Sequence Number=SeqID_1436
MGQGASPEIKEDVSARNLRMAHRIARSTRGHGQPKSGEGNLGSPVRFCRVRELGKLNGPLAKLTEGQAQLGRGWSKLAIVAEAWAVMAGEGELAEAKEGCLASEGFVDWIKRYGGVKFGLSHCRAHGEDPGFDVSRACIPMPSSGMM

SEQ ID NO: 44812 - protein, 101 aa, Zea mays
  Coding DNA Sequence Number=SeqID_1437
MRSTGWRRGYVRKESKNGAEAYPVYVHRRSGEVRRPWTGLSGETKSDSLLGAALVQKGFELGLGQFSPLYVHNKPSPPPLKESRPEILGRVLWRSAMKVCW

SEQ ID NO: 44813 - protein, 227 aa, Zea mays
  Coding DNA Sequence Number=SeqID_1438
  Homolog annotation: Hit_ID=Q6J9V9; Match level="QueryCoverage=36%, HitCoverage=29%, E-value=2e-36, Identity=87%"; Hit description =Putative uncharacterized protein
MMNILEAEGRAEAAARLASPTTRLVIIPTDDHCSRPRALRPPSPPTDKGFEGCALRGPAIAPEHSGSTPITDQGFEGWPLGRARQPPQTTQAPHPLLIRGSKASPSEGFDSRPRARRVRDDPGYVRYMAEARATLLRYPRTFPRPAGTICNGIPSEGGTEPSDPIEMGPGPANPLQRLRGCPRTRLRPKLLTVSTNQLENLEPDHAPGLRPGRMREQPGRPRHHSKN

SEQ ID NO: 44814 - protein, 391 aa, Zea mays
  Coding DNA Sequence Number=SeqID_1439
  Homolog annotation: Hit_ID=Q6J9V9; Match level="QueryCoverage=21%, HitCoverage=29%, E-value=1e-33, Identity=82%"; Hit description =Putative uncharacterized protein
MCSRVPTPRHGGWVPHVIRTDPRREGGKPPHAKHVTALRLQAFPHPRQNQRTKGQVATQGACNRTVVTHPFGFVASGGPSTKAWSHISCNRRHGHYVQGNRTATCANDAPSRLWNQYRDSRRPRAASNTFGRRSRRRFTSVIMAASKKGFEGWPLGRVQQPPQSTRAPCPLLIRGSKAGPLKGFDSRPRTHRVRDDPGYVRYMAEARATLLRYPRTFPRPARMICNGIPSEGGTEPSDPIEMGPSPANPLQEAPPRLTPGLGLGLGFGRRSPPRPTPGLGLGLGLRKSHALARPRASTPASASEEPPPRPTSGLDRPRHKGYIITLLLASSGYEGTRPVSHPAYPAPTAVLLQGLRHFSNDHDTTSTGLEMPPDGHVIICTGLRALPCQPR

SEQ ID NO: 44815 - protein, 141 aa, Zea mays
  Coding DNA Sequence Number=SeqID_1440
MEHTCAAFFLLLFEERELMGVGALQSSLGFKDFRHAAWLHSLTNGHPVLLSVLHPSGGRATRGWPLSPALEWGLPLVRLPTAAVASADETVGASCAPDLRLFGFNVWFLSPVRGRERGPLSSSVCPEVGKAAEGAADAYIA

SEQ ID NO: 44816 - protein, 234 aa, Zea mays
  Coding DNA Sequence Number=SeqID_1441
MEDRLDLGFGGASTSPDLRHRPATSTGSAIITLPRADSGHREQDRSLTEAGGRQQGLNRSDSCPSARLHCSSDSHDITPAGCQDLSGCHIGMAFLEKVGRAGTRTGQALSWGRSLPSPAWTLVTPYCKRTRPGRGTNTKAAGFPPLSRPSPATSLPPFALVHALDPSGLGHAAHSLVGLRDPPPGIYGGSVWDRMRDPLEWFHSDTPPSPRQVPPCPTPSSVPRDSTGSEFFKG

SEQ ID NO: 44817 - protein, 773 aa, Zea mays
  Coding DNA Sequence Number=SeqID_1442
  Gene Ontology: Mol. function=transferase activity, transferring glycosyl groups; Cellular component=chloroplast; Biological process =biosynthetic process
  Homolog annotation: Hit_ID=Q6ER83; Match level="QueryCoverage=100%, HitCoverage=100%, E-value=0.0, Identity=75%"; Hit description =Putative digalactosyldiacylglycerol synthase
  Pfam annotation: Domain name=Glycos_transf_1; Domain location=514 -677; Score=-1.5; E_value=0.00072; Accession=PF00534.11; Description =Glycosyl transferases group 1
MEARASPRPSVSIGGGGGFGAGRGDDSAFSFLSKGWREVRDSATADLRLMRARADSLRTLADRELEHILASASTALTSAPPPPLAAGAPIAELEFVRTRIQPKISELRRRYVSQERELGRRVLEGWAPRGAGKPARARVDLSGITAIRNAIVSEVDGGERWRRVVWNGEAEEGKEWEVLRMIRDGIKEFERRSQTKEIFEGLRSTGELVEKFKSSLKSFNMESQGSKEIQPLDLPEILANLVRQSEPFLDQLGVRRENTSLPVNDKSSDELDLRIASVLQSSGYHADDGFWSEPTKSEVSDDKRHVAIVTTASLPWMTGTAVNPLFRAAYLAKGTRQDVTLVVPWLCKSDQELVYPNSMTFSSPEEQETYIRSWLEERLGFESNFKISFYPGKFSKERRSIIPAGDTSQFIPSREADIAILEEPEHLNWYHHGKRWTDKFNHVVGVVHTNYLEYIKREKNGALQAFLVKHINNWVTRAYCDKVLRLSAATQDLPKSIVCNVHGVNPKFLKIGEEITANRGSGEPPFSKGAYFLGKMVWAKGYRELIDLMAKHKSDLEGFKLDVYGSGEDSQEVQSTARRLDLSLNFFKGRDHADNSLHGYKVFINPSISDVLCTATAEALAMGKFVICAEHPSNEFFMSFPNCLTYKTSEEFVARVKEAMDREPQPLTPEQRYNLSWEAATERFMEYSDLDKVLNNEAAQPGQGRKRKNKRTSQPNLSDIMDGGLALAHRCLTGNEVLRLATGAIPGTRDYDKQHCVDMGLLPPQVQHPVYGW

SEQ ID NO: 44818 - protein, 148 aa, Zea mays
  Coding DNA Sequence Number=SeqID_1443
  Subcellular localization annotation: CTP_CleavageSite=17; ConfidenceScore=5.12e-01
MDGSGTTTWPKKMIYPKVSTVSPDPMGKRRTRVYKDRTPGRSPDAATWHSARDVSQRAEPDVRPLGRAAAAFNADKTHRLSIPLAGVIHFRFLLVFLLDTMVQIVEHHAETSEDFLVEEEAASSMPRVSNRPAPRAAAVHAAWQHTPA

SEQ ID NO: 44819 - protein, 46 aa, Zea mays
  Coding DNA Sequence Number=SeqID_1444
MEIGIKIKVWYRSLEDMVAGVTWPSILPLGWTVEWDPASAEEEHEE

SEQ ID NO: 44820 - protein, 159 aa, Zea mays
  Coding DNA Sequence Number=SeqID_1445
  Gene Ontology: Mol. function=aspartic-type endopeptidase activity; Cellular component=chromatin; Biological process=chromatin assembly or disassembly
  Homolog annotation: Hit_ID=Q75HA0; Match level="QueryCoverage=76%, HitCoverage=38%, E-value=7e-09, Identity=28%"; Hit description =Putative uncharacterized protein OSJNBa0056E06.12
GRKSASCQNGRVPPPPPPPPTLQELMAQQNEILRQLAQPATYQEFLSTQPPLFTRAEDPLDADVWLRVVESKFPLLHGVCSEYAGYHADTDEKKRDRFRRELSTKLRDRLNTVRANNYNELVNMAISQEDCITARQEEKKRKTPCGRTLSSATALPDRI

SEQ ID NO: 44821 - protein, 78 aa, Zea mays
  Coding DNA Sequence Number=SeqID_1446
  Homolog annotation: Hit_ID=Q2QTF5; Match level="QueryCoverage=82%, HitCoverage=97%, E-value=7e-09, Identity=45%"; Hit description =Retrotransposon, putative, centromere-specific
METRALLFCLGTREKTEREKDLNMLDSDCRRTPTCDGHHDLDECPSGQGVTLHKIVTAIGGGVSVAKAQRLWKAVVGL

SEQ ID NO: 44822 - protein, 79 aa, Zea mays
  Coding DNA Sequence Number=SeqID_1447
  Subcellular localization annotation: CTP_CleavageSite=14; ConfidenceScore=5.10e-01
MDQFRTCDTLVSPRAFLSANSRTIISCRNPHRRRAPPPVLVDRPTPTIPEGDPHIAVTLRTSPTPSTTSPEQSHRRVWS

SEQ ID NO: 44823 - protein, 83 aa, Zea mays
  Coding DNA Sequence Number=SeqID_1448
  Subcellular localization annotation: CTP_CleavageSite=29; ConfidenceScore=5.46e-01
MPLLSSGELFLRPPPLPKPRPPRPARSIRVQVASAPRLASPVAREAFQALGPGRTSPETQDHPHRTSVARLRAKIEQSEFGID

SEQ ID NO: 44824 - protein, 242 aa, Zea mays
  Coding DNA Sequence Number=SeqID_1449
DFTHPINGGDTLFSFDYLSHEGFPAILWEVLCSAGYPTPPLYMVQLYEEHRVPRCQVWLTLEAHPLQPGWRSLDSDTVGFRADDTTEAAALKTLTTFCGYHPLEMVMHPLGLFPAEKRDDPMWCNRVSHVKDVWAMHPNQVGRITVQSRMRPRVLKSWPTGQLLVSSPIADSVALSASGESLCAWSNSSSVFAGTGISPLAAGSSPATVSSPELRPWAVATPGGAVVVGREEGRKTFRPLIF

SEQ ID NO: 44825 - protein, 151 aa, Zea mays
  Coding DNA Sequence Number=SeqID_1450
MGYKTCGYRVQPLQNVKLSDIVAHLTNLAQTTKITVESREDFVVDLSSELVEKDLQMAARQRRGQNEQIPPPPPPAPTVQELMAQQNEILQQLYYSANPTLSSMVEASRGNLSRVLEHAAALVHQGRRSAGRRCVAKGYGVKVPTPHGRLP

SEQ ID NO: 44826 - protein, 77 aa, Zea mays
  Coding DNA Sequence Number=SeqID_1451
  Homolog annotation: Hit_ID=Q7XBD3; Match level="QueryCoverage=49%, HitCoverage=7%, E-value=5e-09, Identity=78%"; Hit description=Zeon1 gag protein
MIEGASLKDHNTAPNLQGNNKALSGHQPQGAQAAGASEEEDKGHTTRTCQVTIQKQKEIAEAEAQQNQMKKVLHTAS

SEQ ID NO: 44827 - protein, 87 aa, Zea mays
  Coding DNA Sequence Number=SeqID_1452
MVSTLPLVILKKLNMHYLPLTMQLRRRYMSTRATLIGHFAREESATHSVPYKGVWQERSNSYSLSTAGSCTIGEYHAGRKVGWLPTS

SEQ ID NO: 44828 - protein, 1834 aa, Zea mays
  Coding DNA Sequence Number=SeqID_1453
  Homolog annotation: Hit_ID=Q5VPC8; Match level="QueryCoverage=60%, HitCoverage=81%, E-value=0.0, Identity=69%"; Hit description=WD-40 repeat family protein-like
  Pfam annotation: Domain name=IQ; Domain location=117-137; Score=27.0; E_value=7.2e-05; Accession=PF00612.18; Description=IQ calmodulin -binding motif
  Pfam annotation: Domain name=IQ; Domain location=344-364; Score=25.0; E_value=0.00028; Accession=PF00612.18; Description=IQ calmodulin -binding motif
  Pfam annotation: Domain name=IQ; Domain location=386-406; Score=27.0; E_value=7.2e-05; Accession=PF00612.18; Description=IQ calmodulin -binding motif
  Pfam annotation: Domain name=IQ; Domain location=75-95; Score=25.0; E_ value=0.00028; Accession=PF00612.18; Description=IQ calmodulin -binding motif
  Pfam annotation: Domain name=VQ; Domain location=1765-1795; Score =22.7; E_value=0.00069; Accession=PF05678.5; Description=VQ motif
  Pfam module annotation: Pfam domain module=IQ::IQ::IQ::IQ::VQ; Domain location=117-137::344-364::386-406::75-95::1765-1795
  Subcellular localization annotation: CTP_CleavageSite=52; ConfidenceScore=5.39e-01
MDRRSMTPGISSRLSSPPPAAHPSPPPAVATPSHSPSPTPDAFTRLEESFGRLEEKWDQFVVMFHRYKEKTEKELQAAVRLQAAARGFLARRQVQSLRGEKHLAVASRATPWPSSHEQAVVRLQAAVRGFLVRRAVRKLHLLISSSLHQLAACAPNHQVSSILFEPPAEVEIWVCSPPARPERVVSFIRATALVLDRPNIRTAWFLLHLSSNVKSAVQLFPWDPGGQEDIAGVQIYILVPQLFCIFVLNNKEPSLRQRGITSPEKTAIPMDRRSMTPGISSRLSSPPPAAHPSPPPAVATPSHSPSPTPDAFTRLEESFGRLEEKWDQFVVMFHRYKEKTEKELQAAVRLQAAARGFLARRQVQSLRGEKHLAVASRATPWPSSHEQAVVRLQAAVRGFLVRRAVRKLHLLISSSLHQLAACAPNHQVSSILFEPPAEVEIWVCSPPARPERVVSFIRATALVLDRPNIRTGWFLLHLSSNVKSTVQLFPWDPGGQEDIAGVQIYILVPQLFCIFVLNNKELSLRQRGITSPEKTAIPMDRSMEFLSRTSSSDAPLVAFGSSDGVIRVLSMLTWKLVRRYTGGHKGAIACLMTYMSAAGEAHDGGVVAVELSRVMGSAPQLITIGADKTLAIWDTVTFKEIRRIKPVPKLACHSVASWCHPRAPNLDILTCVKDSHIWAIEHPTYSALTRPLCELSSLVPPQVLALHKKLRVYCMVAHPLQPHLVATGTNIGIILSEFDPRALPAIAPLPTPTGNKEHSAVYIVERELKLLNFQLSNTANPSLGNAGVASDAGRSMNNSIEQLIVKQTKKHISTPAPHDSYSVLSVSSSGNLILNTSAIHNMVLELEIRAAQFFSRLLAVCPPAARREAITRLPVGQHACTMEAAASRIKEPVLLAYYDEQLASYEAQFSAYRTWLDDDARVGSILTVSMDDHFAAEMYGARPPLLQKGVIDIISPGQGFDAASPQCEGTGKLFAWDTCRDRYALVESALAPRMPLVVKGGSSKKAKEAAAAAAQAAAAAASAASAATVQVIGLHGGALLGVTYRTSRRISPLTATAISTVQSMPLSGFGGSGSSFASDDPFSSKEGPPQNFQLYSWETYQPVSGLLAQPEWTVWDQTVEYCAFAYQQCVFVDAGVAAIDIETKRIKQEMKAREAQSRAAEEHGDLALITVEAPQVTVSEKVSLRPPMLQKELDDRRYAEVAVAGGGVSVAVTRFPPEQKRPIGPLVVVGVRDGVLWLVDSHPGIRCRCLAAYGDPVSAVKWATRLGREHHDDLAQFMLGMGYATEALHLPGISKRLEFDLAMQSNDLKRALACLLTMSNSRDVGQETAAADATDVTQILSLAVAKQAKQESLTDAVQGIVKFVKEFFDLIDAADATGQSDIAREVLKRLAAAASVKGALHGQMLRGLALRLGNHGELTRLSGLVSNLITAGHGREAAFAAAVLGDNALMEKAWQDTGMLAEAVLHAQAHGRPSLRNLVITWNKMLQKELDHTPTVKTDAAAAFLASLEDPKLTSLGETEKKPPIEILPPGMPPLSAPPIVIKKAGAKPGLPNAAKASNGPIGAPMAQGAPMAHGTPGPQGVPMNQVTPSQGSHDEARPSDATVADAAAAVAEGTAAPPAAEGTSAPPAAEGTATPSSEEAKAAPGNEEGTSNPINEEATAAAVSVAAGSPDSAAAPAADTSSDAPAVNPTEDTVSAPSTEAPPELTDKPSSAEASLPPPPSVSGIAARALRLGFDFDVKRDRLFRGFASMSTRGGEAARQATVKIIETVHVEADRYSFKSIVQRLTGRDAVVGGGGDYSEGAPDRGSYEEAAAQRAAGFTSKQASRPFADRHA

SEQ ID NO: 44829 - protein, 63 aa, Zea mays
  Coding DNA Sequence Number=SeqID_1454
MSRVTKSSKVITELPTPLSRLGDADHQEPAAQPLHSAVHRHHYYFECLPAWWYVAGVLWGPGG

SEQ ID NO: 44830 - protein, 273 aa, Zea mays
  Coding DNA Sequence Number=SeqID_1455
MAMMGTTSGKDVPLSGSTLSKAFTQNRVFDLEIPYLDSLITSIPLRVFSLVGLCNHFRISISPMFCNVCKTGETFLEREMPPRTRKTARKSTGPIGVPRHQLAPRDENSSSGSNDPIGDLEARVNQLQTELQRRTSIWVADGDRINELRGYIRRLQDQLADRDLALDWAVQSRSVAWAKEAKARARVEELSAAIDNLQAYCNTLHEEVHVLYSQLHPNAPTDPVGSEAGPSHVAGEALGGELDLFKPPPSMRLVDEWSPTPDDKAARSNQKQE

SEQ ID NO: 44831 - protein, 104 aa, Zea mays
  Coding DNA Sequence Number=SeqID_1456
  Subcellular localization annotation: CTP_CleavageSite=80; ConfidenceScore=5.41e-01
MAPLGLGPMPLPSLASFSGCPAGLLGPTGLARSVGQGCGIARRSNESAAVPLCYVTGCLGAILPVRRGTSHGTAVVVRRRARVRSGPLDLDPTMGGAYRFDASL

SEQ ID NO: 44832 - protein, 217 aa, Zea mays
  Coding DNA Sequence Number=SeqID_1457
  Subcellular localization annotation: CTP_CleavageSite=55; ConfidenceScore=5.29e-01
MATRWAATRPVGPSSPAGQPEKLASEGKGIGPRPSGAMRPSGGAQPCARLPRRATCSSLRYLLLNGLRFRGLLDSLKWVRHPLAETGRSRWFSALSPLSVHYSDPIPSPTGGGSSCVRAPVWCRASSLVSVHRGLVLGLPAARCSSSRAGAVDVSLGSGSGSSISVNLPPCRLIIFVLKPCFGSTYTRLRPVISGGVLQQPRTGSDSMKALTHWARA

SEQ ID NO: 44833 - protein, 18 aa, Zea mays
  Coding DNA Sequence Number=SeqID_1458
MVCGSASGSRSDLVRSWP

SEQ ID NO: 44834 - protein, 109 aa, Zea mays
  Coding DNA Sequence Number=SeqID_1459
  Subcellular localization annotation: CTP_CleavageSite=52; ConfidenceScore=5.13e-01
MIDAPKWISTSGKLQGLPQRSPDRGLAQLGWRRRTFLSPILCWWRGWVNTLRSMARWGRKRNCPGHLYTEERRSVAPGLRIWPRITAAQAGSVRLPSAGSLPECEDAGG

SEQ ID NO: 44835 - protein, 296 aa, Zea mays
  Coding DNA Sequence Number=SeqID_1460
MAGAPLHRAQLPLLGFKLLRTSPAPARHGAPALNAEHLPAEVLFLRAQSLSSPKRPRFLPWLLRALGCRPPVELPPTAPSFCALALPISVHASTLCFDQTSRLSVCDRHGYSVTLVVMETPLAPCSSAPLPNSWSRSRLAAAAAPTAAHDLLPCARSASLPSSSLRAEVARSSPSSLVFPARPVCAPCSLVVAFCFLVVRVVFRCSCACFGEGPCSILLYRVVVRAKLLAVDIVSVTRALDTQFDRRFYSETVDILASFKSDLMDGTLINRVMRKTSQVDPKRGLLRMVMLMDEPV

SEQ ID NO: 44836 - protein, 135 aa, Zea mays
  Coding DNA Sequence Number=SeqID_1461
MDLGTHMVCAQFCPLEPDGSYPSNHRVNSSYAPPPRQIPVYPAVVEEVPVDLPRIRVEHGVILEDSLEELLPTPTPLAESLAFVATSLTSAPPASAVQARAPGGDDPDNSRDDDDEDDDDNKDEEEQVNEEANYT

SEQ ID NO: 44837 - protein, 150 aa, Zea mays
  Coding DNA Sequence Number=SeqID_1462
MGLHPTQSSIQPFHGTPRALRTGWTMSWDGATAVATQEGQAHHGEAAGGHGKRWSSERRLKVRVPWQACCRGGRRAAARRDGHGRWGELPGREERALTSHPERRRPWGKSRATSCRRWGGLVAGGLERMRLRERAACVLPAREDVGKYPR

SEQ ID NO: 44838 - protein, 41 aa, Zea mays
  Coding DNA Sequence Number=SeqID_1463
MARVACTLHGKRLDGGVSVLSHTLESLFFSRVTSHFDCGWC

SEQ ID NO: 44839 - protein, 170 aa, Zea mays
  Coding DNA Sequence Number=SeqID_1464
  Gene Ontology: Mol. function=carboxyl- or carbamoyltransferase activity; Cellular component=ornithine carbamoyltransferase complex; Biological process=amino acid metabolic process
  Homolog annotation: Hit_ID=Q8SA97; Match level="QueryCoverage=100%, HitCoverage=24%, E-value=1e-29, Identity=51%"; Hit description =Ornithine carbamoyltransferase
MAPPVDVASLRPRLGDVEAPPKPRSSLSSVAEPESEPWVGRSGVRRLLGLSPSPSPGSGGAEFAVFRGLARVRALGRAERSSPSSGAEPKSEPWVGRSGVRRLPGLSPSPSPGSGGAELPMTGQWSGEVKAVTSALSARGARVRIKLYADGGYQLRIRSLEGTPNYGPRQ

SEQ ID NO: 44840 - protein, 659 aa, Zea mays
  Coding DNA Sequence Number=SeqID_1465
MEGEQQHPQRQPHLRRSPTEPRTAIRAKDLRSERRHQHHARAITARVSSRDPTRADGSAWPPRSLSQLSPEDTSPARGLGNSTPASVPPVDGPTRLRLAKSSFRANSASVHADTAASGSGSPQSDRGYEQSPHIGGPAGRRNPRRLIAARSGSSDNDFRSGRPNSSSDDLRADAAATRPSLASPPKERGHAEGRRVGGQSAGGAGYLVGGETSFDCLGGRWHRKQRRSRSGRRARHAAAASATNGERPSPRSLREGAGRCPRGDRPQLGTLPSPALMMNILEAEGGAEAAARLASPHPQTGGHRLGTEGAKTAARGARNCPAVTSIPPLSSGPAGERADRHDRRHLWQAKQATLHLRHNDHVKKGTGKGDTPKGILLREGSGPRAPLLIRGLKAGPSEGFNSCLRALGLRAHYCSEVRRLAPRKGSTAASGHSGSAPITDQGFVGWPPKGSDSRLRARRARDDPGYVRYITKARATLPRSRLSPLKEHDLASPEPSLGQRQPTPEDSRLARGPPQATLGHHRKLRLAQPQGSGSTSMLDDGLCFARPQGSDSASALEDDGLRFARPQGSDLASAPEDDEFRLARPQGSDSASAPEDDELRLARPQGSDSASAPEDDELRLARPQGSDSASVPEDDELRLTRAQGSASTSTSEEPLPRPT

SEQ ID NO: 44841 - protein, 243 aa, Zea mays
  Coding DNA Sequence Number=SeqID_1466
MEYTKHTLQDNPILQARTLTLEGSSSTLGIDNTFGEVRPSLGRRRGPKISTLKDGVIATPGPSPSGSSPRVRLGQVARLVTPRPRPAVPCGHQLDPRPRQASTATMNKNTGIQSAITNGTPVPPPQRATSWAVLPCTRRGNRLPAGGGTGSQADEPDALRLTTPAVDRPRVVEVRPARRASEHPLPQTPKERPTREPTREVELRLSPASTPARMMNILEAEGGTKIAARLASPHPGAGGHRLG

SEQ ID NO: 44842 - protein, 176 aa, Zea mays
  Coding DNA Sequence Number=SeqID_1467
MENRPGLERLLETTHLELDGKLFVNTQQAPTWRVNCRCFDPGGSLDRRVGRGGGSSEVEAEPWARARWSSSSSGTEVESEPWGRARQSSSSSGAEAESEPWGRARRSSSSSGAEAESEPWGRARRSSSSSGAEAESEPWGRARRNSSSSGAEAESEPWGRAKRSPSSSGTESESEP

SEQ ID NO: 44843 - protein, 82 aa, Zea mays
  Coding DNA Sequence Number=SeqID_1468
MPEQAEGATRTETDVTPFALASQMKAPLDVDGLSTSTPPGKAHSDLQSASLTGRLTVSLPQAVEPVLGAVQPVLHSQNQPNG

SEQ ID NO: 44844 - protein, 144 aa, Zea mays
  Coding DNA Sequence Number=SeqID_1469
MAGNGQIDIPAVRLPLHGLRIISLPRRPARRHRAIPQRRQSGNRYAGIDDDGSSSVLRRAPRPALRCSDLKGVCATRFLDEDEAGSGFLTENEEADRAVHTSSAIHGDEVGSEESGRPRGSFQTCRYLGGFYQTLRLSERHATT

SEQ ID NO: 44845 - protein, 23 aa, Zea mays
  Coding DNA Sequence Number=SeqID_1470
MGKPVPSLLMLLLSRVQWIKQSH

SEQ ID NO: 44846 - protein, 271 aa, Zea mays
  Coding DNA Sequence Number=SeqID_1471
  Subcellular localization annotation: CTP_CleavageSite=21; ConfidenceScore=5.16e-01
MPRLEATQRTTQRRQPGATVNAAESGPAVMTVAGGRKQRSRRQPGSRPIQGQQESLLSRREDDAPVIRSSNGSRTRNGRPANHSPRRINSAAGQAALLAREAGDASPSPDRERGDTPKRILPCEGTGLRALPTDQRARTRARPRKTANSAPPDPGLGLGLGPGRRRTPLRLTQGSDSGSAPEDDELRFALPQGSDSALASTEQPPPRPTQGLGLGLGHGRQTRPRLRRSLHVARPRAQARHVNRKRHHHPTPSRLGPQRTRPVSRLASSAR

SEQ ID NO: 44847 - protein, 185 aa, Zea mays
  Coding DNA Sequence Number=SeqID_1472
MTSHGSSDEGNAQSHTDELARESFPRILWEAEDTIEAIALHGLTTFCGFHPLELSTHPIGLFPAKKEDDPMWKDRVEHAKDIWALYPGQTAHLTVRRGEAMSHLMALLEATKITLDNREELVVDLSTEMVEKDLQVEQMSNEIQELEELVGTRENTIEVLEDQLINTQQQLADANQHLDMHHQEI

SEQ ID NO: 44848 - protein, 73 aa, Zea mays
  Coding DNA Sequence Number=SeqID_1473
MADIPEGAPIMTVLSVPNLVPSANYLFTTPMGVLPFQHQEAGLPPIKSTGMCLLSHPDFGAPRPGREHNHQVC

SEQ ID NO: 44849 - protein, 142 aa, Zea mays
  Coding DNA Sequence Number=SeqID_1474
MAKPGHATPPGPLLRKQEPTRPSILVAGMEAKSHHQPNQGGTCKNYATSKAEYTNTQLDLPVATLVPTISRMGDPVLGRVRDKVRTRLHSGTRFTGYHISRHVFSTLKRLTQPNPKTNKQSTQDSYNKVGQSITFNMFGTTT

SEQ ID NO: 44850 - protein, 120 aa, Zea mays
  Coding DNA Sequence Number=SeqID_1475
MAENEEEIEVTEEKTPPPSESQAGNCFYFDICGFEPDSPINEGKPRKTKGFVLQKMIGKVGGLFSKIKCDGGSIMVVMGSTLEQMYLCQVRKQQTFVAFALKWFQMKKNKSEAAGGHGPP

SEQ ID NO: 44851 - protein, 669 aa, Zea mays
  Coding DNA Sequence Number=SeqID_1476
  Subcellular localization annotation: CTP_CleavageSite=60; ConfidenceScore=5.15e-01
MAMGGPQVGLGCSDLDFSDDAPCDCAQSLWGFSFNLSLVARRTYSGSRPFLIGSFVSRFLARMLVSRFIGFVLTPALCSKRICTYGTLAVQIGSLNGSVIQRKNRSLGNWFLIAVLHRSRSLISFAPSAVAYRWASFAALFNNFAEFTQAVLSSRNSSPSMELALFTKPHSAPLPWKNPSTLSSPLSVVLPPPSRFASLRAAEEMAFHRVDPVSFLPHGFVAQQVDHREIMVRTVTRPQPSAHEDWGIVLVQPLPEHEVNFHIFKDIIREYLVGVRRVQVRSIQRSHLGQALEVPQFIVFSVAKGFQGISWTVQCDIVQQFMLGAQPQDEDPVPPYPHDGHQLSVEIFGMGQPVANFQFDLNIPPMEGNNVEEDVANNDDEGWDPWPVQQAQLPEPVANANNANVANNAEEQFSYQLSGLEDLPSDESVGYFNDIIIPQGVQFHQEEAPVPAEAVLALPAFPPEDMILEGNNDQGEDNMQIEDNINVGLMPDSFDWAKKFLLSGATSTFVEPSMDTILIKIPSKCLLPSSQDTHVEPQSPSPTKAALRKRQPIMVDTAVRRSARLRAKAKGFKTCTRIGKRDCSCCAQCAPPSIQHDIIKKLGAEFCKVDPSKLNPDDLSRSRATGIAIQRPDAPPSSKDDEPRISEDQAVDSLFDDDDDDAGSSASTG

SEQ ID NO: 44852 - protein, 271 aa, Zea mays
  Coding DNA Sequence Number=SeqID_1477
  Homolog annotation: Hit_ID=Q6QP51; Match level="QueryCoverage=56%, HitCoverage=66%, E-value=7e-25, Identity=44%"; Hit description =Putative growth-regulating factor 1
MTRLLDYGTGAATRGSPAHDPTVPIEHNDHGASDTFGRRSGHRFTSAMMTASKKAGPSEGFDSRPRARRVRDDSGYVRYMVEAWATLPSHFTLSLTDLTGKQRRSPRSDCCATHQGEADDSHVQPRAQQEALPRPTLGLGRRSPPRLTPGLGLNLDLGRWSPPRPTPGLGLNLGLGRNRVLARPRPWPQEKSPPRPTLGSDRPRHGGYIITLPLASSGYVGTRPASHLARPGLKHFSNGHVIAYAGLKRFSDSYVGMYTGLRHFPARHVSA

SEQ ID NO: 44853 - protein, 171 aa, Zea mays
  Coding DNA Sequence Number=SeqID_1478
MSGAPEDSNSNSSPSGISRGNSAIIHRTVRAPYDSQPHQTAPSEEFGDSEYSEEEFSSESEGSPAPIPLRESSDDSDDSQGLAAEVWTYIRAVERSGLEGSDESEYSSDEEDSDGGGEDEDDDDDGDGGGRGSGGGSKDGDGGGSRGSNRGGSSRGSTRGGSGGGSNRASG

SEQ ID NO: 44854 - protein, 206 aa, Zea mays
  Coding DNA Sequence Number=SeqID_1479
MDMWLPAKGNWLLGSIGGITTADELAVFLLGAISILPASRAGGEWRRGFGSGKARTRTQKAKAAKSAALMGYSRARYRFKKCPVITQRLFPKPQHATWKPGSYLQNTGAPPHHSPIVLKVARAACYHSASPPKRRFRVQSLGITSKMPTSPSSRSALPPKHRFRVQSLGITSKMPTSPSSRSALPPRRRFRVQSLGITSKNAGVAF

SEQ ID NO: 44855 - protein, 350 aa, Zea mays
  Coding DNA Sequence Number=SeqID_1480
  Homolog annotation: Hit_ID=A2YZL8; Match level="QueryCoverage=32%, HitCoverage=63%, E-value=1e-14, Identity=39%"; Hit description =Putative uncharacterized protein
MALPVDVAPESEPWGRAERSFVVFRVLARVRALGSGGAEFAVFRVLARVRALGSGGAEFAVFRVLARVRALGSGGAEFAVFRVLARVRALGSGGAEFVVFRVLARVRALGSGGAEFAVAALSFCQTGQWSGGVTAVTSALPGARVRMKLYADGGYQLRIRRLEEKIEQNLCTQNSGVVVKGDENSGNIDWYEIDLDSLDVGLEGMSVSGSDDVLVQWRRSDMEGVIGDACVIEKALAEFVEESHDIGLADEEEEDDTYIDDGYVAPVDSSRDSNDDDFLFKRKVVDEALIALLLLVLERVEANGGREGGSGPDHLACSHLGHFPAPPLRIYSTYAWSAGVRLVGSGSMWG

SEQ ID NO: 44856 - protein, 318 aa, Zea mays
  Coding DNA Sequence Number=SeqID_1481
MPGKANCCCPARMQHSILCPCFRGENGSEDLPVRFGAARACWCGVGGQADAAVGADVVAAGESFSVVEAVGAAYGPTSGSLALMSGSRPLSGDANESLPVAVSVLGPWLLLQRSLASHLELVTPQALRCGGCSYPRGRNRSSVCNGTLSAGVCSLWLSGPEHLAEASGWPLSRLLGPDSWRRPWRRWPGRGADVVLRSRDPPSMLPSEARSDFAEGVVDAEGAAAPPPSRPEPAGSVYLVVCDSAIDIVEKARKIVLAEEFSSVKTCSVRGIAYPSVSYLSQKVMSEVSVSRRRRSPSARSALAAYVYSVVFRIPLSK

SEQ ID NO: 44857 - protein, 161 aa, Zea mays
  Coding DNA Sequence Number=SeqID_1482
  Pfam annotation: Domain name=Transposase_28; Domain location=1-158; Score=-58.9; E_value=0.03; Accession=PF04195.3; Description=Putative gypsy type transposon
MGLLDPPECFQSEVALNLVRNLLGWDAPTFTGRIRVGASPFGDFPAEEFMLFVSNLPCGLALPISSFFVLLLEELGLQPQHFTPHFILRAAIFAYFCELQLHEVGSELSCGSISLALMASTSPPTATAGPVADTKDAVREVVQDAVETAAARFQRDPTDVE

SEQ ID NO: 44858 - protein, 111 aa, Zea mays
  Coding DNA Sequence Number=SeqID_1483
MNNDCNLADGEYVLVLEQRAAQEVAPDPAPEPAPEDLPATALEGKPRRLPSSRDLRRGLPFRLWWVQVRSLHNGSRGSLEEMVAGVTWPSILPPGWTVEWDPTSAEEEHEE

SEQ ID NO: 44859 - protein, 103 aa, Zea mays
  Coding DNA Sequence Number=SeqID_1484
MASLPFDLSERWRLEVAYPFVRMDLDRWVRIDTCQADADWAGFWAHTALACMRALGPARHGYEPVVPCLGLKASTSGDPARSNHVNRPIVLGPVESRLEGGGE

SEQ ID NO: 44860 - protein, 167 aa, Zea mays
  Coding DNA Sequence Number=SeqID_1485
MGVAPDLQMDFLRIIHSKVFLLLVKIGMKLFALCFGGIYCVPCTDVTVLKNILIIPGRPPQWVWARDGLVWTYIRAVERSGLEGSDESEFSSDEEDSDGGEDEDDDDDDGDDDDGGDGDGDGNNSGGGSGGKGSTRGGSSTGSTRGGSSKGSTRGGGDKGSSSKASG

SEQ ID NO: 44861 - protein, 332 aa, Zea mays
  Coding DNA Sequence Number=SeqID_1486
  Gene Ontology: Mol. function=helicase activity; Biological process =viral genome replication
  Homolog annotation: Hit_ID=Q8W2T2; Match level="QueryCoverage=93%, HitCoverage=33%, E-value=1e-92, Identity=55%"; Hit description =Putative uncharacterized protein OSJNBb0089F16.19
MGAPDFCACRARIKCAADNKLTSPDAYDKVICAEIPEKDKYHVLHNLVIKHMLHGPCGVLNKKCPCMVNEECRFRYPRQFCAATQQGKDSYPLYRRRDDGRRVKVRGCVLDNRWVVPYNPGLLMRYNCHINVEACSSIKAIKYMCKYVYKGHDRASFSVDPAHKEDGVINEIRQYRDARYISPPEAVHRILGFPLFGVNPSVLQLQCHLPGMQSVIIDETAKLQDIVNEPTSSMTTLTEYFTKNHTDSFARTLLYKDFPEYYRWIPGSKRWQRRKQRGQIGRIVYAHPAEGERYFLRVLLNHVRGAYSFEDLRTLGDITCSTFREACEKKDS

SEQ ID NO: 44862 - protein, 142 aa, Zea mays
  Coding DNA Sequence Number=SeqID_1487
MDMNPPLPGKDVVYYTEIDAVSHPLPALDAPSQRIAPFFPLLYLPSLPQPNPGSRYPTLAAASMDPTAPVAASMDPTAPVVAVAAAVDAARAAAVAAAEARCAALVAEKEARAAVESASNAADKVQLAVQAVKHRSFVPKVY

SEQ ID NO: 44863 - protein, 217 aa, Zea mays
  Coding DNA Sequence Number=SeqID_1488
MPSWQPERFRHPVHVMSWPSEERWSLAEGQMSGLSRSGEAEAPPRSRSSLSSKVEDESEPRVGRGGDRCPRRRLSPSPRVGRGGVCRLPGAEPESEPWGRARRSSSSSGAEAESEPWGRARRSPSSEAETGAEPWGRVRRSFLWRPRPDLAAVNLTLSSGTTVGAAQAILALNAPAIRSVGVAIWPRLLLGEDRASGEPKLCADGGYQLRLGVLGYP

SEQ ID NO: 44864 - protein, 388 aa, Zea mays
  Coding DNA Sequence Number=SeqID_1489
MGSTRVAFVLLSLEERNFAEVDSPTASPRRWSPKTVTTSSRVGRNKPGCGLCPALSFKDLHHPCWGGERGEPGLYLPHGSAGHPFSQLLVVETILQLCGGGALQPCRGRRTVAAQLGCNIPARMQHSVLCPRFRGEDGSEDLPVRFGAACACWCGVGGQADVAVGDDVVAAGESFSAVEAISAAYGPTSGSLALMSGSRPLSGDANESLSVAASVLGPWLLLQRSLASRLELVAPQALQRGGLKLRPLFDEPGPEAAVSVWTEAELARKEDFVGRSLARPSTGGTSAGVGRPWRRWPGRGADVVLRSGDPPTVLPSEARSDFTEGGVDAEGAAALPPSSGIAYPSVSYLSQKVMSEDPTFEVAKKHERRSGGKTFSEDSFDTEGVPPF

SEQ ID NO: 44865 - protein, 136 aa, Zea mays
  Coding DNA Sequence Number=SeqID_1490
  Homolog annotation: Hit_ID=Q6UUN3; Match level="QueryCoverage=33%, HitCoverage=4%, E-value=4e-07, Identity=46%"; Hit description =Putative gag-pol polyprotein
MKLPRISRSSDVACRNNADQDSRTGRSRNFWGKGCYPKSTSGSSHVGEAIAALVNATADNTRFLREMAGQQQFQQQAGRGYQQGPRETTYLDFSETRPPLFVKAEDPLEADEWIRVIEQKFGLLRCSETQKPLFAA

SEQ ID NO: 44866 - protein, 304 aa, Zea mays
  Coding DNA Sequence Number=SeqID_1491
  Gene Ontology: Mol. function=helicase activity
  Homolog annotation: Hit_ID=A2XJQ8; Match level="QueryCoverage=76%, HitCoverage=32%, E-value=4e-74, Identity=81%"; Hit description =Putative uncharacterized protein
MKFEFEPHGMCCRKGKIKVHIPDVPTELKRLFTSQGDDDAKYFRKNIRYFNSHFSFTSLGVTLDRRVSTAANTGIYIFRVQGALYHRLDHLVPGSQGPRHLQLYFYDTEDATLAHRARRSPDLDINIIKNILTILEGNPYVQTFNRLGSIPNLDDYVIELNTNVTPDQRRYLIIIWMKTTNKMTMTFQMEEWFNLQGRLFQQWVVDMYIKIESMRLDWYSNPVNQKIIRAELYQPQPPNMTVGGGCLSYGAPDNPVHTGHVRCTSHVTNVVGFRPLELLSSGPAWMSGAHRTRTVQCPVTVGAK

SEQ ID NO: 44867 - protein, 94 aa, Zea mays
  Coding DNA Sequence Number=SeqID_1492
  Subcellular localization annotation: CTP_CleavageSite=36; ConfidenceScore=5.43e-01
MWCWPDLVSVHRGLVLGLPAARCSSSRLVLGLPAARCSSSRAGAVDVSLGSGSGSSIFVNLPPCRYLQTQVKTIHDVKSMPETKADVALKVCPS

SEQ ID NO: 44868 - protein, 219 aa, Zea mays
  Coding DNA Sequence Number=SeqID_1493
  Subcellular localization annotation: CTP_CleavageSite=46; ConfidenceScore=5.24e-01
MAGGLQATRDWSRQHAGRLRRPGQLRRNMITPGSRGCASRGPRRMLAAMQPPWIRPWVARLGEREEQKQGRARSREGLQATMEAERDRDEDDCSRASRCQRSRRPRWARSFWWPTSMPDRARKGRARRGRAGPARRGVGLAARWAALATLRGSRPRAMVSWSCCRAARSVTPGFKGQSRVHLIHAPKKTTYIITECIEINVIIIRVLITQRKTYYKIKE

SEQ ID NO: 44869 - protein, 156 aa, Zea mays
  Coding DNA Sequence Number=SeqID_1494
MGAQNAEQRLEQGPSSTQGVSRRGGHVWDQGRDDGNWGKKWSSSRTSGRRPSRAPRRKSRAWRFWLPRQLLPSVPTGRNDEWWRAGTAGLEGAQRADKKEPWAARFYPLATGDLFSMSGGRMKMMTRRKYPREINDAARRLKIRDVRMKKSTSRAF

SEQ ID NO: 44870 - protein, 197 aa, Zea mays
  Coding DNA Sequence Number=SeqID_1495
MKRHSWSKSGTRTRRRQRARTILARGKTPRAGIRAERSRGRWARRTPSRDWSKDRARHREFHGAVAMSGTRGATMGTGGKKWSSSRTSGRRPSRAPRRKSRAWRFWLPRQLLPSVPTGRNAEWWRAGTAGLEGAQRADKKEPWAARFYPLATGDLFSMSGGRMKMMTRRKYPREINDAARRLKIRDVRMKKSMSGAF

SEQ ID NO: 44871 - protein, 128 aa, Zea mays
  Coding DNA Sequence Number=SeqID_1496
  Homolog annotation: Hit_ID=A2WV08; Match level="QueryCoverage=50%, HitCoverage=11%, E-value=3e-13, Identity=62%"; Hit description =Putative uncharacterized protein
  Subcellular localization annotation: CTP_CleavageSite=95; ConfidenceScore=5.50e-01
MSDQRSMMLDAKTPPRSNRVRTLWIQRPRPVFLPQRGPTVAPPTQAVFGAFVEQFNRGVALRQKGSASGFQLHGLNMEPGTRLSTSSLPTTGSFCAQPKPKPKDMSSSDAKPGSTTRQSAIARRRKRH

SEQ ID NO: 44872 - protein, 60 aa, Zea mays
  Coding DNA Sequence Number=SeqID_1497
  Subcellular localization annotation: CTP_CleavageSite=15; ConfidenceScore=5.12e-01
MDEAASASAAAARLRASTPRSKKLSHPVLEGKPNANHARARISNSLVAMLTTWGWGGFGV

SEQ ID NO: 44873 - protein, 141 aa, Zea mays
  Coding DNA Sequence Number=SeqID_1498
MGKGRRGQGSPRRAGDKRKRDPSPPSEDSGDSEYSEEVSSDSEGSLALASPPASSDDSDDSPGMSQRLSISKHARRLSTIYKDQFEEPNDDWLTCVEATSDELLGALYLSLAKAGKEKDNYYFAHFCYAEGQKDQGLNAPA

SEQ ID NO: 44874 - protein, 122 aa, Zea mays
  Coding DNA Sequence Number=SeqID_1499
MGLGVYGSLCQAWVAMRLMVLGFDSCNASPLQPNRILAEYVDVYSPLLYTPNPPHPQVVSIATTAQEKMKPWKETSRSSKTTTSSRRGLAATPSRLSVKAAFIYVSFPHFDYCKDYVDVSDI

SEQ ID NO: 44875 - protein, 163 aa, Zea mays
  Coding DNA Sequence Number=SeqID_1500
MEFALHFSSVYPEPKAGSSEVAALGNSPTTYDYNSPDCPVCTGLSGEPTVGRAICAGHVAEPTARRGHRTVRCAPDMSGAPMALRLPTVDCANFGKKSGTGQCPVRQSTEGKISLPRLLSTAPSCLGAIKGTLRRMEENTKHSYNIPKHQDLEFAHLFLCDSI

SEQ ID NO: 44876 - protein, 141 aa, Zea mays
  Coding DNA Sequence Number=SeqID_1501
MMTEEASFRGHNKAHSLQGNNSALPGHQHPCSRDTIPALSSPTPLDPLRGRSLLYALPCSHALHGRQASTPLSSALMLYMEGGAGDQIERKHCSRTGLLPRFMLSPALALYMEGEASAPLSPALALYMEGGVGAQIERNHC

SEQ ID NO: 44877 - protein, 109 aa, Zea mays
  Coding DNA Sequence Number=SeqID_1502
MAIRRGGVREWAWRLTGGAHRSAVQGGPHARRERRRTLTGPSRCRLDDRGPFNWPHASSWVSFASVGPIPERLPRNGSGEMTRVACTLCGKRLNGGVPVISVGVNPFWS

SEQ ID NO: 44878 - protein, 138 aa, Zea mays
  Coding DNA Sequence Number=SeqID_1503
  Subcellular localization annotation: CTP_CleavageSite=63; ConfidenceScore=5.72e-01
MPTQCNIPFTSLVKFWVPRRKNLLSTSPTLLTRQSAAAINRRHPSPFLRRRWSPAVPSATSPRSATVDSGYRRAFAATEESPEFALRAVSPPHPAFLPFGPRLSAVRPRAARPAPPVSRPPPRCPPGPAARSCARPRI

SEQ ID NO: 44879 - protein, 297 aa, Zea mays
  Coding DNA Sequence Number=SeqID_1504
MNKTPALKVPLQTELWFHLRRYEQPHTIGGPAEQQKADGWLAAARSNDDDDDFCSEGPNSSSDDLRADAAAIGPSPTSSLERQGRAEGRIVGGQSVGGTGYLVGGETSSGCRGGRRRRKRLRSRSGQRAGHAAAASATNGGRPSPRSLREGAGRCPRRDRPQLGALPSPALMMNILEAEGGAEAAARVASPHPGAGGHRLGCSPSGGSEGGKTRCIREREDMVAFQGGHPPFKGNSPHLRPQPSRAESSPTRSKILPLRHRGWVPRVTQAGSRQKKPNLRARCMQLPSGYKCSSTFT

SEQ ID NO: 44880 - protein, 112 aa, Zea mays
  Coding DNA Sequence Number=SeqID_1505
  Gene Ontology: Mol. function=4 iron, 4 sulfur cluster binding; Biological process=amino acid biosynthetic process
  Homolog annotation: Hit_ID=Q6Z702; Match level="QueryCoverage=51%, HitCoverage=11%, E-value=8e-21, Identity=86%"; Hit description =Putative 3-isopropylmalate dehydratase large subunit
MTHDVISRSSRRSSAGREDARVPPTIRFILDGEMPPYLLAKDLILQIIGEISVSGATYKSMEFVGSTVESLTLFLTSFFENLAVRRIWLWRESEYRGDYVRRKMKWSKGFRI

SEQ ID NO: 44881 - protein, 152 aa, Zea mays
  Coding DNA Sequence Number=SeqID_1506
MAGRGGLWLLPPHDAATGAPQIGRDLFRTQVAGRFGIPRASWAWPADNRIALPWKQEKCKKHFFLTICYFPDYYDSLACPSLLTFFQAAIEYIHSLSRAQPARSLNGAGLCPASRSLSTQAATTSSTPQLKAHPTSSSQAATTLSKTEDEKN

SEQ ID NO: 44882 - protein, 148 aa, Zea mays
  Coding DNA Sequence Number=SeqID_1507
MGKNNKRKREPTPPSEDFGDSEYSEEFSSESEGSPAPIPLRESSDDSDDSQGLAAEVWTYIRAVERSGLEGSDESEYSSDEEDSSEGGGGDGGDDDDDGGGGGNDSDGGDDSDGGDRGGSGGSKDGDGSSSRGSNRGGSGRGSNRASG

SEQ ID NO: 44883 - protein, 142 aa, Zea mays
  Coding DNA Sequence Number=SeqID_1508
MAQLRSSRQVPAPRRSGDPREQGKEGVGGQGKQHQRYLPPDTLRLIMSSTGAKGSQQTNKKTKKGFKLKEQKQPKCALVWRTGLSGVPPDSVRCTKEPNSKLATFGNSRGNGYTAPTVVCNEQLMRYSTRRSQSRSRRRTRQ

SEQ ID NO: 44884 - protein, 361 aa, Zea mays
  Coding DNA Sequence Number=SeqID_1509
  Gene Ontology: Mol. function=carboxyl- or carbamoyltransferase activity; Cellular component=ornithine carbamoyltransferase complex; Biological process=amino acid metabolic process
  Homolog annotation: Hit_ID=Q8SA97; Match level="QueryCoverage=31%, HitCoverage=12%, E-value=1e-09, Identity=58%"; Hit description =Ornithine carbamoyltransferase
MAGERTGRARMLFSHHAGKTSSIPPPAGGLSAAIVVVARRWKEYHVVAAVEGHELKTPETEHCPGLERLLETAHLELDGKLLVNTQQAPTWRANCRRLETGGSLSRRVGRRGGSSEAEVESVFHGRGRARAPGSGEAEVVRRRPGRSPNPGVGRSGVRRLLGLSLSPSPGSGEAEFAVFEGLARVRALGRAERSSPSSGAWPESEPWVGRSGVRRLPGLSPSPSPGSGGAEFAVFEGLARVRALGRAERSSPSSGAWPESEPWVGRSGVRRLPGLSPSPSPGPGGAEFAVFRGLARVRALGRAERSFLWRLWQGLTACQSHSVKWHCSRSGAGGAVLLSDRSVERQSDGGHFGSAGGRASG

SEQ ID NO: 44885 - protein, 766 aa, Zea mays
  Coding DNA Sequence Number=SeqID_1510
  Gene Ontology: Mol. function=nucleotide binding; Cellular component =intracellular; Biological process=small GTPase mediated signal transduction
  Homolog annotation: Hit_ID=A3BN87; Match level="QueryCoverage=98%, HitCoverage=97%, E-value=1e-157, Identity=69%"; Hit description =Putative uncharacterized protein
  Pfam annotation: Domain name=ATP_bind_1; Domain location=471-636; Score=-55.4; E_value=0.004; Accession=PF03029.8; Description =Conserved hypothetical ATP binding pr
  Pfam annotation: Domain name=DUF1967; Domain location=671-740; Score =108.6; E_value=1.9e-29; Accession=PF09269.2; Description=Domain of unknown function (DUF1967)
  Pfam annotation: Domain name=GTP1_OBG; Domain location=294-444; Score= 232.2; E_value=1.2e-66; Accession=PF01018.13; Description=GTP1OBG family
  Pfam annotation: Domain name=GTP_EFTU; Domain location=464-636; Score= -76.1; E_value=0.017; Accession=PF00009.18; Description=Elongation factor Tu GTP binding domain
  Pfam annotation: Domain name=MMR_HSR1; Domain location=467-590; Score= 137.1; E_value=5.1e-38; Accession=PF01926.14; Description=GTPase of unknown function
  Pfam annotation: Domain name=Miro; Domain location=469-590; Score= -9.1; E_value=0.071; Accession=PF08477.4; Description=Miro-like protein
  Pfam module annotation: Pfam domain module=ATP_bind_1::DUF1967::GTP1 _OBG::GTP_EFTU::MMR_HSR1::Miro; Domain location=471-636::671-740::294- 444::464-636::467-590::469-590
  Subcellular localization annotation: CTP_CleavageSite=67; ConfidenceScore=5.85e-01
MAPPAVAASAFPFRLFSAEARRNNKSGRGKRSAARPLKSSPPPRPPSSSSVIGGGVAATTFTRLPLRDAPESTEVTLDRFPTAPANPGAPALTLGSVQRLENEEFDVGWRPNSVARIPLRDSSDGVELTIGQFEARAAGRKSTGGRGFTRQTVERLGDDGEGEELVVTSLDVFEVKNGRRDRGLVPEVLDDGDDVVVFDPDYGVDSDDEEEEFEMFPFDKSHHEEADAVPRAEIGEVEYGDENDDNDGDEVVVFYADYDEEEDSEEDGYEVENAEEGEGDVKEKGVPAVMRCFDTAKIFAKAGDGGNGVVAFRREKYVPYGGPSGGDGGRGGDVYVQVDGEMNSLLPFRKSVHFRAGRGAHGMGQQQAGAKGEDVVVKVPPGTVVRTSDGGVELLELMKPGQRALLLPGGRGGRGNAAFKSGTNKVPRIAEKGEKGPEMLKFKLPSGIDNDHQCTIWWLELELKLVADVGIVGAPNAGKSTLLSVISAAKPAIANYPFTTLLPNLGVVSLDFDATMVVADLPGLLEGAHRGYGLGHEFLRHSERCSVLVHVVDGSAQQPEYEFEAVRLELELFSPSLVDKPYVVVYNKMDLPEASERWNTFKERLQSEGIEPFCISAINRQGTQDVIHAAYKLLQKERQRMKETEGWSGTENLNHVSEAIKKERRAPMNEFEVFHDKGTNTWNVVGAGIQRFVQMTNWQYSDSLKRFQHALEACGVNRALMKQGVKEGDTVIIGEMEMVWNNETDRARPSKTMNTQDDAVRWPEFG

SEQ ID NO: 44886 - protein, 128 aa, Zea mays
  Coding DNA Sequence Number=SeqID_1511
MPGIPRDVAKHSLDIRAGARSVRQPLRLDHQGRIGLALAEPDPPSGATKRVPLCVKIFLNQKKGPPAFSQLRSPGYVRSRVSRSERGYMKTARPIEPRNSRTSGLGIPHSSPAAKNGPTREATPLLTS

SEQ ID NO: 44887 - protein, 116 aa, Zea mays
  Coding DNA Sequence Number=SeqID_1512
MAARGGREGGFSLLRLKFPGLRKPKGKRRERSEEPSPDPLSRTGKGGYPERDPSPRRNRAPSPPLLIRGSKAGPPKGSTVASDRVGPTPTTGQGFEGQPPEGFHGRLRLLGLRAHY

SEQ ID NO: 44888 - protein, 286 aa, Zea mays
  Coding DNA Sequence Number=SeqID_1513
MGGVAECYVSSGGRASALGTCQCGSRRDLGTLLGDVGVPPKPRSSPSSVAVAEPEPWGRARRKPFGRGQGGVRALGSGEAEFRVFRVLARVRALGSGGAEFAVFRVLARVRALGSGGAEFAVFRVLARVRALGSGGAEFAVFRVLARVRALGSGGAEFAVFRVLARVRALGSGGAEFAVFRVLARVRALGSGGAEFAVFRVLARVRALGSGGAEFAVFRVLARVRALGSGGAEFVVAPLLRPDCRSDSLCRVALQSECGRRRCPSVRLLYADGGYQLRIRRLEGTP

SEQ ID NO: 44889 - protein, 68 aa, Zea mays
  Coding DNA Sequence Number=SeqID_1514
MAGGIKLAGAKGRWLAGEEIWSQEIWSVSLPKPEANPRKILGDTGVSQPSPLKGISSRDSGQSPPGVK

SEQ ID NO: 44890 - protein, 83 aa, Zea mays
  Coding DNA Sequence Number=SeqID_1515
MWAQLVRSVFPTEFAGLPPWISRGRLDHRLLIRELAVSLPQLAQQPPTRPQAGLLCAVSEAELARPVTELRAELTQAANGIRG

SEQ ID NO: 44891 - protein, 73 aa, Zea mays
  Coding DNA Sequence Number=SeqID_1516
AGAHAADEPAACAHGSTDSGHYRRRAIPRRDRKDFPELTPPFAGPPSPPEPAPEPAIEDLPAPALEGKPRFYA

SEQ ID NO: 44892 - protein, 99 aa, Zea mays
  Coding DNA Sequence Number=SeqID_1517
MIVQKCLIRSTIGGKRGILGELDNVQLKPSKNLMKPKNEIKDYKFIQDPKNEDCNLAGGEYILVLEQGVAQEVVQEPAPEPTIEDLPAPALEGKPRFYA

SEQ ID NO: 44893 - protein, 105 aa, Zea mays
  Coding DNA Sequence Number=SeqID_1518
MSIILQYLILTCGVCETARVSSHTFIAQQVVGNNVHELAKDGSSREVGCTSLPTSHVTHLPRDRDFPYTSTEEARQGIPCRTAIAAKSSRGPPYTDHSPTALAPF

SEQ ID NO: 44894 - protein, 224 aa, Zea mays
  Coding DNA Sequence Number=SeqID_1519
MTSHGSSEGGNAHSHTDGLAQEGFPRILWEVLQGAGYTTPPQYIVQLFEKHQVPRCRVRMTLEPHPLQPGWRSLDSESFGYLAEDTIEAIALHGLTTFCGFHPLELSTHPIGLFLAEKEDNPMWKDRVEHANDATKITLDNREELVVDLSTEMVEKDLQVEQMANQIQELEELVGARENTIEDMEANEDVDIEGGVEPEPASSLDTAGSGRPPSPESSVASFVH

SEQ ID NO: 44895 - protein, 51 aa, Zea mays
  Coding DNA Sequence Number=SeqID_1520
MAVGVSEALYAKANVTGSLEDMVAGVTWSSILPPGWTDEWDPTSAEEEHEE

SEQ ID NO: 44896 - protein, 117 aa, Zea mays
  Coding DNA Sequence Number=SeqID_1521
  Homolog annotation: Hit_ID=Q6UUN3; Match level="QueryCoverage=49%, HitCoverage=5%, E-value=8e-08, Identity=51%"; Hit description =Putative gag-pol polyprotein
MAQQNEFLRQLAQRQPPPQHYGGGDHHQRPPAAATYQEFLSTQPPLFTQAEDPLDADVWLRVVESKFPLLNGVCLDVAKYAGYHADTDEKKRDSSGGALVLSSATVSTKSGQTTTMS

SEQ ID NO: 44897 - protein, 25 aa, Zea mays
  Coding DNA Sequence Number=SeqID_1522
METIFLIPRTRRTNQRTAGVSAQVA

SEQ ID NO: 44898 - protein, 81 aa, Zea mays
  Coding DNA Sequence Number=SeqID_1523
MNNDGNLADGEYVLVPEQGAAQEVAPDPAPEPALEDLPATALEGKPGSLEEMVAGVTWPSILPPGWTVEWDPASAEEEHEE

SEQ ID NO: 44899 - protein, 244 aa, Zea mays
  Coding DNA Sequence Number=SeqID_1524
MRATNLEKVQRLTRSTCAGGFLNSGEHDCAIPVTRVHGSSLSKLHGLTRELSEGLDRTEEDGKGAGHGGCSRAALASRGEVAGANGWLGVRLTAAKSGLGRHRKLRLTRPRARTRARSRKTTNSASPDPGLGLGLGPRRRRTLPRPTQGSDSGSAPEDDELCFARPQGSDSALASADGLRLARPRGSDSTSASEDRLDLNLGGASTSPNPGLGPTTSQEAPSLPYPKLTQATGNKTGVPSGSPR

SEQ ID NO: 44900 - protein, 65 aa, Zea mays
  Coding DNA Sequence Number=SeqID_1525
MVSHSGYGGYKCGHCTTAVGVSEALYAKALGSLEDMVAGMTWPSILPPGWTVEWDPTSAEEEHEE

SEQ ID NO: 44901 - protein, 86 aa, Zea mays
  Coding DNA Sequence Number=SeqID_1526
MEDLVVDLSTELVEKDLQVEHMATQIQELEEQVGARENTIEVLEDQLLTTQQQLEEANQHLDMHHQEIQDMEAEGADEDVDIEGGE

SEQ ID NO: 44902 - protein, 145 aa, Zea mays
  Coding DNA Sequence Number=SeqID_1527
MGKPVPSLLMLLLCRVTALVPTITGMGDHVSGHIRGKVCGQVHSDTRCAKLTKVKKKTYWIFSCDFLKFNAKKVGPRAQAGGLGGGVCSDLLTVVKFNARAQGASRGAKETTRARNRRKTHRGARSTHGGGRVKSGNVDPGSPAR

SEQ ID NO: 44903 - protein, 147 aa, Zea mays
  Coding DNA Sequence Number=SeqID_1528
MNKTPALKLPLQTELRFHLRRYEQPHTIGGPAEQQKADGWLAAARSNNDDDDFCSEGPNSSSDDLRADAAAIGPSPTSSLERQGRAEGRRVGGQSVGGTGYLVDGETSSGCRGGRRHRKRLRSRSGRRAGHAAAASATNGERPSPYH

SEQ ID NO: 44904 - protein, 196 aa, Zea mays
  Coding DNA Sequence Number=SeqID_1529
  Subcellular localization annotation: CTP_CleavageSite=28; ConfidenceScore=5.07e-01
MQSACNHDKWAHAFDSNTPSMETQAHTSCNRRAGCYVQATAPPLAPLPRLLDCRTSTATRGNPAYDPTVPARRIGHGTGGTFGRRSGRHFAFAIMTASKKGPGKGDTPKGILLREGNGPRAPLLIRGSKAGPSEGFNSRLRALGLRAHYWSEVRRPAPRKGSTAASGHSGSAPTTDQGFVGWPSKGSQPPQTQSEG

SEQ ID NO: 44905 - protein, 81 aa, Zea mays
  Coding DNA Sequence Number=SeqID_1530
MNNDCNLADGEYVLVPEQGAAQEVAPDPAPEPAPEDLPATALEGKPGSLEEMVAGVTWPSILSPGWTVEWDPASAEEEHEE

SEQ ID NO: 44906 - protein, 143 aa, Zea mays
  Coding DNA Sequence Number=SeqID_1531
MELCHGSRERARDNRRIAELLAEVDRLQREIVERDRAIDWAINSRSIAWDCNANARVVELSVALENLQSYNNTLHEEVHVLYDQLHPNVPPEVATMGAETSGEARGGPYGELDLFGAPPSMNLADVRSLEAGSGAGAAKDADN

SEQ ID NO: 44907 - protein, 403 aa, Zea mays
  Coding DNA Sequence Number=SeqID_1532
  Subcellular localization annotation: CTP_CleavageSite=51; ConfidenceScore=5.10e-01
MSSRSLMHRVFPPSEPQDGGCPQSFHLVVGGTQLRGSWYLSAIVRLQGFSSCSPAAPLRRRSPKTVTSSPWMGRGKPGCDLGPALSFKDVHHPCWGGERGEPGLYLPRGPAGHLFFQLLVVATILQLCGGGVLQPCRGRRTVAAQLGCNIPPSSSLSWRGRERGPAGALRSGPLFGFDGRFASLEREREREPSGGRVRPVTMAAAAEVAGESPGARRPAGSPESLGSVGLAVRGFSCLVKGTPRPLFDEPRPRVAVSARTEAELARKEDLVGRSLAGSSVSGTDTGVDLPRPRVGLMSLGDSWPRPRGNQPSRLLEPDSRRRPWRRWPGRGDDAVLQSGDPQTASPSEARSDLAEGVVDAEGVAAPFNVKIRACRIGLSCSESLGSVGLAAYAHSYPFIGFCH

SEQ ID NO: 44908 - protein, 363 aa, Zea mays
  Coding DNA Sequence Number=SeqID_1533
  Pfam annotation: Domain name=zf-CCHC; Domain location=40-57; Score =24.5; E_value=0.0003; Accession=PF00098.14; Description=Zinc knuckle
MDTQTEESSQTQLCEIQTPNHPSSPVGQAKLTRKELKARDACFYCKNEEHIIRECPKKRLDQLKKNTVKRDPNNNREDQPVITEDDAPGAPDATKPQPPPGGKSPSSLPRPASNRLGALQLRAEDRPGCARSSCAPSPVPRDPAAERAQDPDRNVAPDRLHEPETGSRFSLSLPLMAIIIVQQIAFKAREAIRFLLPSLAYLSTTVIVASSLAADVVPAPVGLLRSRAHNRLLAVTARMLCLPLLLATKFLVSVVALQSLAARWNSPLRRRRSLCCASGVCSCHRRASLAGCESPAHAQFPVVALAEAIALGCYAQSSFVDVSRSCRSHLVIHSPSTLFVLARRSLAHCPRGSSTTKLRPSCH

SEQ ID NO: 44909 - protein, 221 aa, Zea mays
  Coding DNA Sequence Number=SeqID_1534
MAERYQLPRSCVPPTTRWKDCGHPPSWGSEGGKTRCIREREDMVAFQGGHPPLKATLPTCVPSRRGLSLLQHAPRSSPYGAGAGSHTSCKSSQSRRSQTAARGACNRPAVTSGPPLLPRPAGERAGTGKGDTPKRILLREGTRLRASLLIRGSKAGPSEGFNSRLRARGLHTHYWSEVQRPAPRKGSTTASGYSGSAPTTDQGFEGWPSKGSQPPQTKSEG

SEQ ID NO: 44910 - protein, 181 aa, Zea mays
  Coding DNA Sequence Number=SeqID_1535
  Gene Ontology: Mol. function=transcription factor activity; Cellular component=nucleus; Biological process=regulation of transcription, DNA-dependent
  Homolog annotation: Hit_ID=Q10R18; Match level="QueryCoverage=48%, HitCoverage=28%, E-value=3e-32, Identity=79%"; Hit description=AP2 domain containing protein
  Pfam annotation: Domain name=AP2; Domain location=11-62; Score=28.2; E_value=3.1e-05; Accession=PF00847.11; Description=AP2 domain
MRLSPNTLNTKQPAKVSKDDGGGPLGEIREPNKRTRLWLGSFATAEEAALAYDEVARRLYGPDAFLNLPHLCASAVSSVAAHQRLRWLAASARGTAAVPAYDLLNLNAQHNDKQLKSHPPKNVESKILCEHIKKEREVAKARKRPYYLKKSELHERKLMNKYNELKLYDSAIEFGILSIDL

SEQ ID NO: 44911 - protein, 111 aa, Zea mays
  Coding DNA Sequence Number=SeqID_1536
  Gene Ontology: Mol. function=catalytic activity
  Homolog annotation: Hit_ID=Q9M9W9; Match level="QueryCoverage=63%, HitCoverage=19%, E-value=5e-17, Identity=61%"; Hit description =Putative uncharacterized protein F18C1.9
MMYVVEKRIRWCNGQGYYLADEPGVHFVWQPNQESSVLVMSRAFDDYYIEDCGIILAPEVTQRRIDNSDQFVILATIRRVMLETLMEILTTRNSKSNDAPVIFLWEIAPVI

SEQ ID NO: 44912 - protein, 502 aa, Zea mays
  Coding DNA Sequence Number=SeqID_1537
  Homolog annotation: Hit_ID=Q5Z9N6; Match level="QueryCoverage=6%, HitCoverage=7%, E-value=5e-07, Identity=81%"; Hit description =Putative ERD7 protein
MERLRWGNEVLMRRMQPGDANAEVSSEMLRQIKSNTWSDGYVAARVRSLRHRRRATTSSSGCARPVTAPPPTSRPPPPCSGPLQWRWPGKVEASVDGRVPVPVAVPLPLRRTSSIVLTTSAMAPAPAAPQAQPAAGVLRSCWARRAASGRASRHAAGPPACSCSCHLLARRRPRPSRRPSPALRSPGSDGAEDGSMAKETYSHGERLINVCNGFYVYISVSSSSASLNCRSPLLHLYFHEAPAAARGEIPFFPAATRQQPAERLAAPSRGPPRLRALKPRAQPRSAIIVQQIAFKAREAIRFLLPSLAYLSTTIIVASSLAADVVPAPVGLLRSRAHNRLLAVTARMLCLPLLLATKFLISVVALQSLAARWNLPSRCRRSLCCAPGVCSCHRRASLAGCESPAHAQFPVVALAEAIALGCYAQSSFVDVSRSCRSHLVIHSPSTLFVLAHRSLPSWELHDEASPLLPLTSHVRDLPPEASLHCVSTGACSVAVTKVEDDIL

SEQ ID NO: 44913 - protein, 218 aa, Zea mays
  Coding DNA Sequence Number=SeqID_1538
MRKKHGFMPKIHTCSSPDNHNEQTPALKVPLQTELRFRPHGYEQPPHRRACGATSSGRLASDLYSSSDGPRTDAAAGRLSFASPLKGREPDIKAKVPKVGPRVALMGLSAEKLSLAATTSAPTAASTNTAPASAGGPKAHRQVLTPVLATKARTEDRMLHPSWAATVRLPRHGWGGASSAELEDGFHPQKLEEAGRQPTRRQAPARLALRPNKDDEDP

SEQ ID NO: 44914 - protein, 100 aa, Zea mays
  Coding DNA Sequence Number=SeqID_1539
MGETFLVRNDLWVTDAAIRYLQDQLAKRDLALDWLVHSRLFAWAKEAKARNRMEELILSMDNLLVCYNILHEPNSCVVFTTAPERPCKSSLKGTRNFSWL

SEQ ID NO: 44915 - protein, 937 aa, Zea mays
  Coding DNA Sequence Number=SeqID_1540
MVEDGVAQFGSCTFTPKTGKTTMPVVELVPCARNKWGNWNEFWFYVAEATVEGHEGLPVSLMCSHYYSAYPPYEVAEEDADEGALRCAAGQSSGRDLVEEFVAYGVWPLAHGWALGEVCPRQMPFHGGRVVRSPAFALNLRNRDPAAFVRDAEGLAVRLVGRYVPRTEGQRSFDIRGSNERLNRVFELNQLPYDGYPGQDEADRRGKKPAVETGGDPALVAAASSKKRKLGTAMGRLGVSDSFARDLMRTCAAPGERMSSPELRESSARMLRVTGGCWPKNIPIPCAAEDDCFTSRMVHRWKVFPYGRNIGHVVWAVMDKDRQGAARKRQATVRVHEARPKRQRGTAKAEASGGGKPPLPTKVGAFAPGKAPETTVGAGGPKLSKVVPSVSGVAEATKAARSLPPPGKRVADFGTEIDVEDYLGGSDEGPLALVVPGAAIATAAPAPKAGGETLGAGGEVSALALVRDEAGVATRRLKGATEALSRATEALSQVADFTSGTASGALTAALSAEVERLRTQHADAVREKSASDSKCRKLAEKVAALEKEKADLRRQLAGERREANEAIAKEQAAQAEARLARAEGNIAKELAGELQRRLTAQESRAEGAEAAMNALSREGCRHFEALDQVDEDFGRDIFEVEDPVVKESAGALYDRMWGSYGREVVRARAEAARAQVTLSLARRLLDAVCRARERVDDFGALNSALPEPETTPAEAATGVAPGPTPETAEDAPGAPASAAAGEDLPPKVAEGAPDAPAAAVPSAEDPAEAAAEAPAAAGPSQVQDFGPAHATATTEFLAASTAEDGNECDGSVSEFFDVTDSGSSVEWTEESSEEDLDYFAALDVAAAEAAPHAADAPGVPGPSTGHRRRRAVAKRRISAEEGARLRVSRAGRQELLSLPAASGVGEGELQSLFAGEELRIMLFNYREMGIIPKVEPM

SEQ ID NO: 44916 - protein, 410 aa, Zea mays
  Coding DNA Sequence Number=SeqID_1541
MGGSPRGGIGPPPERGVEAHWIKPGHVSVLDLRLPLTKARGSNAFLRRSGPTDGILEYTTSSVHMGLAPKEGDSWARTPMSEPGLLVLAETKRCIYRGRWRAPHAADWSSAFGGGEETHYRGRWHAPFVAVRLLRTRRSMPKEYDSWARALVPETGHLGARRVRPSAALWGPEVALKLASNPLGWGVLAFTGRIRVGVSPHDDLAAGEFVFFVSKLPNGFVLPIPSFFVLLLEGLGLQPLHVTPCFILQATIIAYLHLFGFDGFGAASNAAFCRQAGRGCPSTTLAMEDGGEGLLAMARTLRWSPPLRAAGEEVVAAAGKPLGASFQRDPIGVELDVSRLDASIPERVGNAPRRQLRLGPGPEHNFGYGALTVRDQAERLHGFRPPQETRVHSLEPDPKLSDPQDYSSKY

SEQ ID NO: 44917 - protein, 265 aa, Zea mays
  Coding DNA Sequence Number=SeqID_1542
MGIAPTLHYTELDDYIDWALCLPRGSVKIVGGAWISLPEVTPSGRTDPRPTGVIRNNHRVPFFFLSVSVSSFLLHRAVLPTAAGRRRRLAAVPPLPRSPAAPLARRTAAPHRRPARPPPRSHRRPARTAAPLAHRRAAVTPLAQPPHRAHGRRPRPRLPVPSRAAPRPRPQPRAHGHRSRPRPGARRPPPNAVARPTPSLAAVHGSRGFPTPTSYTTVVRAPPSSAQSIQAAIWVIDVIGCMKVSRRVGVTQVNAALSQICEDHQ

SEQ ID NO: 44918 - protein, 205 aa, Zea mays
  Coding DNA Sequence Number=SeqID_1543
MTRPSLGRLLWVHNIARPHHKGGSGAATCPEKVIYPKASTVSPEPHGRVPDPWIYSPDHQGGVHSPRYAGRAVIYHYSYVSAINAAWTAVIKTPGDCSGVTSINYSHNVFLPLCSWARMSGLSILDYGGCIPPSGWRIFSPTFGAPGRGFGIRFLLVFLLDTMVQIVEHRDFIPEDFPMEEEDASSMPRGSNRPAPAAAAVRAAQ

SEQ ID NO: 44919 - protein, 420 aa, Zea mays
  Coding DNA Sequence Number=SeqID_1544
MTPFGPRSTARRYDYTPWSHQVTTPGQCAKRSAYQDAPWSHPLGVNSTPPIALAWPKKGWPGGVTDPRPHARPFRLLVDPRDIHPPQKTKVRLTPCTKTSAAAGGLLHTGQISDEQEQGGQTSSERFEKAVRVFAERGKIKFKTRRPPSPFIHRARRFGKPAIQQYGVNQRSCQKPPRNHFERGQRLRHLATSLAPDDLVELVPRRANVGTKAKTPPFARCLRRPRCTNGDKTTGRLTLRPIRHRTKTCDEVVSSCVLVQHEGPRVIRPIVTGPAWPLRIMGLICKGLPVITVCNPALWEYSGDNLELLPSRAKTLFALLHSPVGSTCTIEQVPTFGVFTQRIQALNKYQAQIKAWRDHAVIPREFSEGDLVLVQTAQTESRGKLEPKVGGPFHRQDEGIPQRIQARNAKRRRLGAFLEH

SEQ ID NO: 44920 - protein, 694 aa, Zea mays
  Coding DNA Sequence Number=SeqID_1545
  Pfam annotation: Domain name=MAP7; Domain location=194-357; Score= -74.8; E_value=0.029; Accession=PF05672.2; Description=MAP7 (E-MAP -115) family
MKGGLGVFDSVAMELMGTCTAPGGRMSSPELQESSARMLKVTGGWWPKNVPIPRAAGEDFFTSRMVRDMRVFPYGRNIAAVVSAVMDKDRQEAAQKRRAVIRLPEARPKRARGTAKSTAPGGGQSTLAAKSAAPGSSKMPKAEKAAGTGGTKSASAGAAMTQELPAPGKRVANFATDISVDDYLVGSGEGQLVVPPAVAPAVSAAVPGAKGSALNAGSEISALAAVKDEAGAVSRRLKEASQRLSQGALTAGVSAEVERLRAQHAEAVREKSAADSKCRKLAEKAEANVARVEGSLARQRAEEWEERLNALQARMESAEASTRSEVERTCKQLMDSYHELGTRTADFEVPDQESSLRCLEWLQEELLVLPTIVEGFMSYASLVTCEGAMNALSREGCRHYVVFDRSVEDFEREIYKVEDPVVKESARALFDRMWGPHGREVVRERSDTARGQAARDEKVEDFGALNSARPEAESNPVAAGTEVAPAPPPKSVQGSLDAPAATEAGGGSSPTAVPRAEGPPKTATELAAEDPTAAGSSQVQDFGPTHATATANFLAASTVDAGNESDESASKFSDFGDSGSSVEWTEESSNEDLDYFAALDVAAAEASPRAADAEVVPGPSAGRRRRRAVAKRRVSETDGGRLRVGRAGKQELLSSPAVASVVEGELRSLFEGEELRIMLFNYREMGIIPKVEPM

SEQ ID NO: 44921 - protein, 98 aa, Zea mays
  Coding DNA Sequence Number=SeqID_1546
MGKPIPSLLMLLLSRGRYNGSSSLISCEKQTIQIEFSSLQVTALVPTITGMGDHVSGRMRRAICCQVESDIATPHGSKSIDPYHSIIKVDTINFPDLA

SEQ ID NO: 44922 - protein, 103 aa, Zea mays
  Coding DNA Sequence Number=SeqID_1547
MCPEKVIYSKASIVSPDPHGRVPDPWIYSPDLQDGMHSPRYAGRAVIYHYSYILAINATWTVVIKTLGDCSGVTSINYSHNVFLLLCSWARMSGLSILVCAFP

SEQ ID NO: 44923 - protein, 64 aa, Zea mays
  Coding DNA Sequence Number=SeqID_1548
MQGPLTGQTLACLKLTLLTFRPKPEALVTDLLPRSRRRAAENWMELKLEIYLVRIFGYEAYPQQ

SEQ ID NO: 44924 - protein, 190 aa, Zea mays
  Coding DNA Sequence Number=SeqID_1549
  Subcellular localization annotation: CTP_CleavageSite=41; ConfidenceScore=5.56e-01
MKPWKETSRSSKISTSSRRGLVAAPSRLPVKAAFISKKWTLSSAPSSLAPRLCVGANFFGMHMSDVVMPWNRHGTYLGAVDLGAELGSINLAPTSVPRFTTPRMSRRGKAAKQRKGPLTGTAFDPLPLPTGVPVPMCFCGDPCKVDKSEDHENRKREEKEKKLERARRVKEAMEENPDGFRKGKWPRCTQ

SEQ ID NO: 44925 - protein, 273 aa, Zea mays
  Coding DNA Sequence Number=SeqID_1550
MTTNPLVGRSKPGYDLGPALIFKDLHHPGWGGGRAEPELCLLGSSAGHLLPQHSRERALTGLAGGSDFDNAGLVDSERRQLQRVGLAGSAGSSSAPGASSCRKSGRRAACTGGPPKTSSAARAAFVFWGCPAFAPIRRFRAEVGAPLVREDPSGDLPVGRWLPSSALRWWRLKKSSSPTGSPPPSALRASGSLALIACPRPSSRDVGEGIVAAASALRPSPLQFGHLERRLLSLLLERAAAGHLEPYRPAGAPMWGVVRTRGGGTGVPFVMAP

SEQ ID NO: 44926 - protein, 493 aa, Zea mays
  Coding DNA Sequence Number=SeqID_1551
MHKESAKTWLPFKGVTLLLKAILPTCVLSHHGLSLLQHAPRSSPYDTGAGSHASCKLARGRRSQTAARAVHATAQRLRAILHFRPDQRVKGRTAMQAACNHTKGAHLFDFDASSMEAQAHTSYNRHADCYVQETAPPLAPLPRLLDCGTSTATRGNPAHDPTVPTKHIGHGPASESSGQVVSQAHVPSWDSGRALSHGVKTALPCPVPRTTHARATAAPRTTRLITLTLRWDRRHLWQEKRATLRLRHNDRVKKAGPSEGFNSRLGALGLHAHYWLALKGFIAASDAERGMTLAPEDDELRIARPQGSDSGSALEDDELRLARSQGSDSGSAPEDDELRLARPQGSDSALASADGLRLARPRGSDSTSASEDRLDLDLRGASTSPNPGLGPTTSQEAPSLPYPKLTQATGNKTGVPSGSHRLLCSSDGHDTTRTGCQNLSGCHDGMALLQRVGRAGKDGMTLADPPRGRNADTSALQLGGPCLSLTVAILAKG

SEQ ID NO: 44927 - protein, 96 aa, Zea mays
  Coding DNA Sequence Number=SeqID_1552
MTPAACARGQGSSDHLRRRPAHRRDRRDLPDVTDHPAGALLPPHQSLQQRICLPQLWKASPGSLEDMVAGVTWPSILPPGWTFEWDPASAEEEHEE

SEQ ID NO: 44928 - protein, 473 aa, Zea mays
  Coding DNA Sequence Number=SeqID_1553
  Gene Ontology: Mol. function=cysteine-type peptidase activity; Biological process=proteolysis
  Homolog annotation: Hit_ID=A2X4U2; Match level="QueryCoverage=77%, HitCoverage=41%, E-value=3e-27, Identity=26%"; Hit description =Putative uncharacterized protein
MESLFVGLSHNKPKKSVATAIVREVLSHDWLLLDYICTQGNLALIDFIKEIPCEPRVEVILIDDAFVERKWMECLFQPSAYLGDEIKGLQRQIDMISQRKELKDHRWPDLQVASWPLREIDMRYAKQTDSSSCGLFLLNYIEYWTGDELSDSFTQDDMSHFRKKMAAILLSSDLNKRRGCLLYKNEKEVDSGSPSDVEILENPTDSNKRKLLHVLDDSEVVFEDEEGPITQADLQRWFVDDWDKRAPVKVSNDGCTNDFLMVGLSTKDMPVTKADSIDVLCDYIMAIEDDTTLERTWVRTFNPFKIEISVKDLQNILTTTQDMILRCFDMVVRLLANKESRRPKEEIINNRKHYMDMRFWVLMPWKFNGCHALFVIDHVKKHVTFIDLHRLKIGVNTCHTRVAQILFYRFNTSYLVLQAMAMWGNDRRLKFVGDAKTLRRNFVIDLLSYEDNSCRYAIPANIQQRLVDIAKKD

SEQ ID NO: 44929 - protein, 187 aa, Zea mays
  Coding DNA Sequence Number=SeqID_1554
  Homolog annotation: Hit_ID=Q6QP51; Match level="QueryCoverage=32%, HitCoverage=27%, E-value=1e-21, Identity=81%"; Hit description =Putative growth-regulating factor 1
MKARARMSCNRRNGYCVQGNRTATRANAISSRLRNQCRTGKGDISKRILLSEGNGPPSPPTDQGLAPRKGSTAAPEHLGSEPITDQGFEGWPLERVRQPPQSTRAPRPLLIRGSKAGPSEGFNSYPRARRVRDDSRSDFVTESHRREASSPRTLSNGSGSGKSPAEAWGLLSQPAYGQTVDSVNKPA

SEQ ID NO: 44930 - protein, 544 aa, Zea mays
  Coding DNA Sequence Number=SeqID_1555
MDKDRQGAAQKRQAVVRLVEARPKRQRGSAKAAAPGGGKPPLAAKSGSGEGQLAIVAPAAATTTAAVAPKAKGGALSSGGEVAALAVVRDEAGAASRRLKEVVESLSQVADFANRTASGALTAVVSAEVERLRTQHADAVREKSAADSKCRKLADKVAALEGEKADLRRQLAGERRETNEALAKAQAAQAETNLARAEGNLARERAEQLQERLIALESRVERAEAAARAEAERTRTQLMDTYRELGARTGDFEVPDREPGLRCLEWVQEELQALPHCCGGVYVVFDQADEDFERDIYKVEDPVVKESAGAIYDRMWGPHGRQVVRERAETARSQAARGERVDDFGALNIALPDPEPTPGEAVSRVALEPTPETEEDAPDAPASAAAGEDLLPKVAEGAPDAPAAAVPSAEDPAVVAAETTTEATAEPTAEAPATSGPSQVQDFGPAHATATTKFLAASTAEGGNECGGSASEFFDFADSGSSVEWTEESSEEDLDYFAALDVAAAEASPHAVDAQDVPGPSTGRRRRRAIAKRRVSGEEGARLR

SEQ ID NO: 44931 - protein, 69 aa, Zea mays
  Coding DNA Sequence Number=SeqID_1556
MGLLMKKTSADFSTSKNGKFLSADLEINLFNEANLPVSHWAPFLDFGGSIRCIPSVGDLRHPKVLKNMI

SEQ ID NO: 44932 - protein, 57 aa, Zea mays
  Coding DNA Sequence Number=SeqID_1557
  Gene Ontology: Mol. function=metal ion binding
  Homolog annotation: Hit_ID=A2XKL4; Match level="QueryCoverage=96%, HitCoverage=23%, E-value=2e-22, Identity=85%"; Hit description =Putative uncharacterized protein
MQNVNPWFMGTGVPLANVRWGNYAFSAAFGGLFAVLSFQVHGFPDAVACAQPVGFHY

SEQ ID NO: 44933 - protein, 151 aa, Zea mays
  Coding DNA Sequence Number=SeqID_1558
  Gene Ontology: Mol. function=kinase activity; Cellular component =ornithine carbamoyltransferase complex; Biological process=amino acid metabolic process
  Homolog annotation: Hit_ID=Q6QP54; Match level="QueryCoverage=64%, HitCoverage=36%, E-value=4e-09, Identity=39%"; Hit description =Putative kinase
MAPPVDEVGPRPRLGDVEAPPRSRSSLSSVAEVESEPLGLARRRPSAEARAESEPWGRAKRRAEPESEPWVGRSGVRHLPGLILSPSPGSGGAEFAVFRGLARVRALGRAERSSPSSGAEPESEPWVGRSGVSYGWLVERRSDCGHFGSVD

SEQ ID NO: 44934 - protein, 53 aa, Zea mays
  Coding DNA Sequence Number=SeqID_1559
MARQRSPDGEEDEDDDDDRAGDQQEPRAGTRTKEKNAKGTSFLQVVVGSISIS

SEQ ID NO: 44935 - protein, 93 aa, Zea mays
  Coding DNA Sequence Number=SeqID_1560
MARPPGSPPLLAAQRGVPPPGTAPQPRPQSQQNDLVEEPEELAGEAPEQHSVAMRLMVLGIDSGNGCQHCNPCSGEDEVVEGDHQEFQDYDEF

SEQ ID NO: 44936 - protein, 686 aa, Zea mays
  Coding DNA Sequence Number=SeqID_1561
  Homolog annotation: Hit_ID=Q6JAD6; Match level="QueryCoverage=64%, HitCoverage=63%, E-value=0.0, Identity=77%"; Hit description =Putative uncharacterized protein
MRLRFVLWFRILVCLIFSVLLQHGAQMSAQIALRVHRLLDLPAFLLAAGAESEAHLTYLPGLLTLLTISGRYVEEWVHVFYASVWIDPDHHWMRFRFEREDVTITASQIRQLFGFPESTTRLHSLCYGTSDPPSRPHGGVAPGTAHVAALFCPPFTDGSRRSPADFTTAAKYLYELVRRTLLPRMGYREATTHIQLWLLGALVSHSQFDVVDFLICEIEDTVLDGIRARRQLPYAHYLCHIFAQLIQPPRFQSTLEASRLVFGSYRPAPEIPVPAYASVFDSQAEDAALRQFDTQGPAADDDDDDDFGVPPPPPPPMPPRSHDHEAGSSSAAPATPQAMDPALASILQTLSQQQAHLAAEHARLSERMLSMFQNMQDRQDALQQQLIQDRAENRAFMALMLQHSGISAPPVQSAPPPPLHAPVVPSILSGPPVDTSPLRPVTLAFTSPVLSSICPQPPVPPASAVPTTAVAVSVTASVLRQMPEVGRGGDSSEVEAEFEPWGRARRRPSSGVEAESEPWGRARRRPSSEVEAESELRGRVRQSPSFEVEVEFEPWGRARRRPSSEVEVESEPWGRARRRPSSEAETGAEPWGRARRRPSSEVEVESEPWGRARRRPSSEAETGAEPWGRARRRPSSEVEVESEPWGRARWSFPWRLRPVLAAVSLTLMGGTTVGAAQAALFSYQVS

SEQ ID NO: 44937 - protein, 117 aa, Zea mays
  Coding DNA Sequence Number=SeqID_1562
MAGGNTLAGAKERWLADEGECGAKRGSNGSWCGFLRETLGDTGVSHRAPGSGEAEVVRQRPGRSPSPGVGRSGVRRLLGLSPSSSPGSGGAEFAVFRDLARVRALGRAERSSPSSGT

SEQ ID NO: 44938 - protein, 200 aa, Zea mays
  Coding DNA Sequence Number=SeqID_1563
MEDRLDLGFGGTSTSPDLGHRPATSTGSAIITLPRADSGRREQDRSLTEAGGRQQGLDRSDSCPSARLHCSSDSHDITLAGCQDLSGCHIGMAFLEKVGHAGTRTGQALSWGRSLPSPAWTLVTPYCKRTRPGRGTNTKVAGFPPLSRPSPATSLPPFTLAHALDPSGLGHAAHSLVGLGTPRSRDADNIYLLSCKTSAM

SEQ ID NO: 44939 - protein, 120 aa, Zea mays
  Coding DNA Sequence Number=SeqID_1564
MVAVALSSLSHYTGRLGGSQLDFVAVLVSWGRNREVEVDYMEVWHRNKDDLFLLISFIVEVNLLHESDSGTISRGVRCHYPSWDINCEYMDVIVDITPQLITLNQRSKSNKYHKNKHSSV

SEQ ID NO: 44940 - protein, 234 aa, Zea mays
  Coding DNA Sequence Number=SeqID_1565
  Subcellular localization annotation: CTP_CleavageSite=83; ConfidenceScore=5.21e-01
MSSCSLMRRVFPPSKPPDGGPAAPLHRWSPKMVTSSLMVGESEPGCGLSPSLSLKDFHHQGWGGDCSVPGFRTRVASEPLAAPASATAAGRGSSAGVIAKAGHRPTSNSTAFCPSLPYEFWHGRGPPSSSTRPEVSAAAVRPPGAEVVVVAAAGAGDGAPFVGLPLLRRPSPMEWGYSPVDYLNRFTKHESPRVKVTSEHEQRRSWLENENLVGRSLVGLSVSGTDAGVDQPRP

SEQ ID NO: 44941 - protein, 240 aa, Zea mays
  Coding DNA Sequence Number=SeqID_1566
MARLRHTAQKSVIPFLPSHLAERPLRRPVAGQSSHLERLHHCLHEEQECQRQEQQGSSFSLQKEIESHSRGVYPDQWEATCLVRRPENSLRGVEVCSEHYSISERDSAEAAMQDAARRALSHYCSVLGGVADGLNLKYYPRHPSGSTGCVIVSPVGEDNPRLSSTVNLAAMLNTELDHALDELSRARAEIALLWAKRAERRHLDDGSPAPFGTQHPYRSSRRGHQSYGNPDCKTKINLEP

SEQ ID NO: 44942 - protein, 480 aa, Zea mays
  Coding DNA Sequence Number=SeqID_1567
  Gene Ontology: Mol. function=protein binding; Cellular component =cytoskeleton; Biological process=red or far red light signaling pathway
  Homolog annotation: Hit_ID=A3A4A4; Match level="QueryCoverage=85%, HitCoverage=97%, E-value=1e-145, Identity=64%"; Hit description =Putative uncharacterized protein
  Pfam annotation: Domain name=F-box; Domain location=127-174; Score =29.6; E_value=1.1e-05; Accession=PF00646.24; Description=F-box domain
  Pfam annotation: Domain name=Kelch_1; Domain location=218-266; Score =24.2; E_value=0.0005; Accession=PF01344.16; Description=Kelch motif
  Pfam annotation: Domain name=Kelch_1; Domain location=268-313; Score =50.5; E_value=6e-12; Accession=PF01344.16; Description=Kelch motif
  Pfam annotation: Domain name=Kelch_2; Domain location=218-266; Score =8.6; E_value=4.1; Accession=PF07646.6; Description=Kelch motif
  Pfam annotation: Domain name=Kelch_2; Domain location=268-313; Score =22.9; E_value=0.0012; Accession=PF07646.6; Description=Kelch motif
  Pfam module annotation: Pfam domain module=F-box::Kelch_1::Kelch _1::Kelch_2::Kelch_2; Domain location=127-174::218-266::268-313::218 -266::268-313
MVLARTKCSLRDDPLPLRRGGSLETAYKLESGHQQDLHGTLRGRNADNSGAASHFPEGGKFSFEFPGAPDSPVDSSACFCRVDRSSAAAAARRIPVSKACVQPSLRASIHPLKPRPGAERSRGGACPLLPGLPDDLAIACLIRVPRADHWKLRLVCRKWCRLLAGNYFYGLRRRLGLAEQWLYAVKRDGRDGRVSWDVLDPSRGEWRALPPVPGEYAEADGFGCAVLGGCHLYLLGGRDPRRGSAMRRVVFYSARSNRWHRAPDMLRRRQFFDVCVMGNRLYVAGGEGGGGGLRSAEVFDPAKNRWSFVAEMAAPMAPFVSAVHGGRWFVKGIGAQQQVLSQAYSPESDSWSIVLDGMVTGWRSASACLNGRLYAAECMDGCRLRAYDEAVDAWSTCADSKQHRGSSQAAAIVALHGRLFVVRNDMSVSAVQVAAEAGKQRWQTLAGKAHTKSFVTGLLSNLAGRSRAKNNILHCQVLEV

SEQ ID NO: 44943 - protein, 186 aa, Zea mays
  Coding DNA Sequence Number=SeqID_1568
  Gene Ontology: Cellular component=intracellular; Biological process =intracellular protein transport
  Homolog annotation: Hit_ID=A2YQH8; Match level="QueryCoverage=53%, HitCoverage=24%, E-value=4e-33, Identity=70%"; Hit description =Putative uncharacterized protein
  Pfam annotation: Domain name=VHS; Domain location=60-183; Score= -22.0; E_value=0.0018; Accession=PF00790.10; Description=VHS domain
MPSPPSPRLHLPLLPLVLSARAECLFFLLLLTRRLRAYAQRRDLYARSGFDLGDGGFLLVLFLALRLWNTGAGLDLLESERREKAKDVIKSVKKCIGSRSKTTQLFAVMLLEMLLNNCGEPVHRHVIDNGLLPILVKIVKKKTDLPVREKIFLLLDATQTSLGGAKERFPQYYEAYYELVDSTCKN

SEQ ID NO: 44944 - protein, 76 aa, Zea mays
  Coding DNA Sequence Number=SeqID_1569
MNSLLSGITEGAAAKIHRTVRSCVCFFPSLTLVVFLEINIVRVRDSNLWIFLTKGTSTIRKKTVIFKWIIGLLERS

SEQ ID NO: 44945 - protein, 109 aa, Zea mays
  Coding DNA Sequence Number=SeqID_1570
  Subcellular localization annotation: CTP_CleavageSite=48; ConfidenceScore=5.12e-01
MPFTFANNSIVIHRGLNSLFSFKSVSFSAITPKLSYEQLRLCAILRILCASSHCGFDLSLKIFFSFGFKSTLSTFPKMSQDKKAIAETKLSLSEEKNLGFIESIAKTNT

SEQ ID NO: 44946 - protein, 49 aa, Zea mays
  Coding DNA Sequence Number=SeqID_1571
MRLHILRGIKAEVILAFADICTHEFDIILLAEMCHLTLALLNAGGFSID

SEQ ID NO: 44947 - protein, 141 aa, Zea mays
  Coding DNA Sequence Number=SeqID_1572
  Gene Ontology: Mol. function=alkaline phosphatase activity; Cellular component=periplasmic space; Biological process=metabolic process
  Homolog annotation: Hit_ID=A4W758; Match level="QueryCoverage=60%, HitCoverage=18%, E-value=1e-36, Identity=89%"; Hit description =Alkaline phosphatase precursor
MRKAFSCKLKVRQSINRIMLRILSGQIGETVDLDEAVQRALEFAKKEGNTLVIVTADHAHASQIVAPDTKAPGLTQALNTKDGAVMVMSYGNSEEDSQEHAGSHPRPPAYQGIQVFSHCIQYKSSRLHSKTQIKRSNPLQV

SEQ ID NO: 44948 - protein, 124 aa, Zea mays
  Coding DNA Sequence Number=SeqID_1573
MARKKEEKGSLRNNPETQRIGNEDGGLNNFTTPTEMRDPAAALELRRAIHWTPNASAAKHMPGHNPLALAILPDPTMGTEWRRRCQTMIAALPRSPGGGGESIDTEHSEDWFKGGYWGPVCGDL

SEQ ID NO: 44949 - protein, 146 aa, Zea mays
  Coding DNA Sequence Number=SeqID_1574
  Subcellular localization annotation: CTP_CleavageSite=41; ConfidenceScore=5.07e-01
MTKRKRQKMEDKKRKIGGSQAESSSQTHKPTSVDQARSPASASASAPAVVPEIVPLVAAAVPLEQPGTSPSCPSDQPEQPSSSSARRRSWMFPLRGTRPLGESLPKESISAAVSSQCPYKTECTSTRRQQPWAPSCPVWKGEPPGG

SEQ ID NO: 44950 - protein, 380 aa, Zea mays
  Coding DNA Sequence Number=SeqID_1575
  Subcellular localization annotation: CTP_CleavageSite=70; ConfidenceScore=5.42e-01
MPSHSPHASRPSTFRAPRWGASALLLSCCLGGTQLRGSWYLSAIARLQGFSSGSPAASPCRWSPKTVTTSLMVGRSKPGYDLCPALSFKDLHHPCWAEAGLSRGLPSRGPASRFFLQLLGVETILQPCRGRRTVAAQSRVQHSVFCPGDGGQSHRGVSQHVVRHEGGTRVLGRSHSRFCGEDGSEDLPVCFGATGARWCGVGGQVDVTVGAEVVAAGESFSVDETVSATRGPTSDSLALISGSHPPRGDANESLPAVAPVLGPSLLLQRSPASHPEFIVPQVLRCGGCSYPREWNRSSVCNGTLSVGVCSLWLSGPEHPEPEAAVSAQTEAELARKEDFVGPGAVDFLGRGGVAAAAGTWPGRPLVGPTMESRCRGHRPG

SEQ ID NO: 44951 - protein, 57 aa, Zea mays
  Coding DNA Sequence Number=SeqID_1576
MESHDLRAEWESRLVGGYEIDGSGYDYGAGCQHCNHCSGEDEAVEGDFQEFQDYDEF

SEQ ID NO: 44952 - protein, 763 aa, Zea mays
  Coding DNA Sequence Number=SeqID_1577
  Pfam annotation: Domain name=DUF1470; Domain location=259-423; Score=- 61.4; E_value=0.097; Accession=PF07336.2; Description=Protein of unknown function (DUF1470)
MELQPGHTVEFSTLRISSVRVQEMQQLGYFGDGVGRVSGAEEIPEPEGELVVFEAFFIAGLRLPAHRFVVEPSVEVFAKNYCLHWQKRKIGNKIAQFGSCTFTPRTGKTLAEVVEIVPCARNKWGNWWDYWFYVSGGEVEDFPGLPVAVMCSHYYVAFPPFEVAEEDEDEGALRYAARMSSGRDLVEEFIGYGVWPLAHDWVLGEVCPRQMPTLGGQLVQSPTFALDLRGRNPAMTETLRSWDIRGSNVRLNRVFELNHLSYGGYLGDDAATTVGRRGKKAVASVEEGPSWEAAPAVVTKKRKLGTTAEGLGVFDCFAVDLMGTCAAPGGKMSSLELRESSARMLEVTEGRWPRNVPIPRASGEDIFTSRSAREMKIFPYRRNVVVVSAVMNKDRQDARKCRVFTRVEDPSRKVKKAWGISRSTAIGSSKPPPAVKPVVPGPSKPSSGAKVVALGSSKLPSVEPTQERGPSSPMCTAEAVAGGAELSMDICVDDYNVGGVMMFDARMGRGLAAAAAKDVAGSVAQQLRHAAAFVDHVVSGVLTSELMEKLSVAKAEREDLSRLLAAKKKDADRACAEAEAARVEAKLARAEANLARQHAEEAEASRSSLRGCLDKAEASTRVEVDRTHAQLVDAYRQLGARTAPFNASGKDVGLRSLGWLQEELEVLPTIVTGLMSFASLITCEGVVNALSHCNLADGEYILVPEQGVAQEVAPDPAPEPAPEDLPALALEGKPRFSGGHGCWNDLDIHLATGLDSRVGPYLF

SEQ ID NO: 44953 - protein, 92 aa, Zea mays
  Coding DNA Sequence Number=SeqID_1578
MKLPEQGIGLFLAGEASPRSPDFTRPPVNEDRAPRMHISYSLHSIDCNLADGEYILVPEQGVAQEVAPDPAPEPAPEDLPALALEGKPRFYA

SEQ ID NO: 44954 - protein, 732 aa, Zea mays
  Coding DNA Sequence Number=SeqID_1579
MNKTLALKVPLQTELRFHLRRYEQPPTIGGPAEQQKADGRLAAAHFSSSDDDFCSERPNSSSDDLRADAAAIRPLPTSPLEGRGRAEGRRVGGQSVGGTDYLVGGETSSGYRGGRWHWKRRRSRSGRRAGHAAAASATNGERPSPRSLREGAGRCPRRDRPQLGALPSPSLMMNILEAEGGAEAAARLASPHPGAGGHRLGRWKDTMHEGSAKTWLPIKGVTLLLKATLPTCVLSHRGLSLLQHAPRSSPYDTGAGSHASCKLAQGRRSQTATRGARNCPAVTSIPPLSPRPAGERADRHAGGMQPHQVSAPFRLQRVQHGGPGHTSCNRCAGCYVRETAPPLTPLPCLLDCGTSTATRGNPAYDPTVPARHIVHGSVSRGRRRDGRYGQKWAGSNGGGRRAEAAVKSSAKLTSPPGTAREPSPTAGRHLWRAKQATLRLRHNDRVKKGTGKGDTPKGILLREGNGPRAPLLIRGSKAGPSEGFNSRLRALGPRAHYWLAPERVHSRLRRRARDDPGSLETPCSAPSKGNMALSPLLLAERRHRGGSDSGSAPEDDELRLARPRARTRAQLRKTTNSASPDPGLGLGLGPGRRRTPPRPTPGLGLDLGLSRRSPSRPTQGLGLDLDLGRQTRPRPRRSLCLALPRARTDHVTGGAIITLPLANSGYGEQDRRPIWLAPVKQTMMAPRILHDDGGSQPPYGSKETSARTQQPRQLSFRKAPALLRRPRHHMNR

SEQ ID NO: 44955 - protein, 94 aa, Zea mays
  Coding DNA Sequence Number=SeqID_1580
MHSPTLTDLPERVFLVSCGRAQDTIEAIALHGLTTFCGFHPLELSTHPIGLFPAEKEDDPMWKDRVEHAKDIWAIYPDQTAHLTVRCMNALYRL

SEQ ID NO: 44956 - protein, 508 aa, Zea mays
  Coding DNA Sequence Number=SeqID_1581
MSTQGYKRKSKVFRVVAARVPGEKRSLALSQAAAHRETGLRLLLLPPLRPSGGPSFRAGGLPSYAPADSSIFTNGKLGGGSLRHGVQAYRRHQQQPMANAADDPMADEAGVEDAFTQEINHSYVPRYHVLSWMETVEGMVAGVASLPPKPDPFGWIVAEKSALIAAAKSLPINLHHCKNNQNAFQCLKMEKALLRYCASFLTPDDKRLILRIKDQAKQMIQSEGDQSLIVTICLEEAELMYNYLPCDFDTTEEVAVCNKVRRSALNLMLYKGSESAVAAGAMMLGKEFACETATVNSSSARPMGVSDVRDLNSEVSGSMEDSALLVQNVIYLQQSKQRRASSKQRRAAALTAAASRGGRRSEQQQAEEGGSAQSSSKQRRAAALTAAASRGGRRSEQQQAEEGGSAQSSSKQRRAATLTAAASRGGRRSQQQQAEEGGGAQSSSKQGRAAALRAVSSKQMKRWRSTPARLKTVTALAQFQAFQPPWWAGPNRKEQPGAQNKAPSREQP

SEQ ID NO: 44957 - protein, 108 aa, Zea mays
  Coding DNA Sequence Number=SeqID_1582
MSTVAIDSPFASRPNRLGIQCSTDPGCRRAVTTLAGELVGGEESGLSRAQLINQMGQRASPGIKEGERPKSGEDDLGSPVKFCRVRELGKLYKLLAKLTERLARLGSD

SEQ ID NO: 44958 - protein, 586 aa, Zea mays
  Coding DNA Sequence Number=SeqID_1583
  Gene Ontology: Mol. function=phosphoribosylanthranilate isomerase activity; Cellular component=cytoplasm; Biological process=aromatic amino acid family biosynthetic process
  Homolog annotation: Hit_ID=Q0E272; Match level="QueryCoverage=27%, HitCoverage=51%, E-value=8e-77, Identity=87%"; Hit description=N-(5'- phosphoribosyl)anthranilate isomerase
  Pfam annotation: Domain name=PRAI; Domain location=2-185; Score=40.3; E_value=1e-11; Accession=PF00697.13; Description=N-(5'phosphoribosyl)a nthranilate (PRA) isomerase
MAVKAGAELIGMILWPNSKRSVSLLEAKEISRVAQSYGAESVGVFVDDNEERILRVSDSCDLNFVQLHGDESRALVHTLSKNNRIIYVLNADDDGKLINIPDIEYELDWYLVDSAKGGSGKGFNWQKFQMPSVKSKNGWLLAGGLHADNVCEAFSALKPDGVDRGGDAKNPNITDSDALTNEVQVDLHVLRALMLHGIGGEVDRANVVTVDKGGALKGVVKLLEKLAHPRGHTTPLATWYSASTLEQETIDCRLATQEMSSPETDPGLPELRPVVRHSSPCPISLIAPCVRPISPSPVLDRGDNEQSEIPECVVGDLPEQQPGEGNHLERLHRRLHEEQERRRQEQEQEHEQQDSSPLPQREVESERPLSPAPQPEMPPAPPQGIPAAGGDPDGDKDDDNAGGSSSHDTEVLEEPEPNGWIARPITHDAARGCHFHDALDTLLRWAFNRHTWSIEYRCVVYQHHRGLYPDQWEATCLVRRPDDDLRGAEAFLEHYSITERDTAEAAMQDAARWALSQYCSLFSGVADGLDLKYYPRRSTGSAGGVIVSLVGEGNPKLSSMHPYRSPPRGRFDYGTPDCRTRIDIDP

SEQ ID NO: 44959 - protein, 171 aa, Zea mays
  Coding DNA Sequence Number=SeqID_1584
MARMLRWSPSLGGLPSAEVVAAAEVAAVVGAEVVASAGEPLRASYHAVLLTSVPKKESVMALRRPQVVEPTGLIAPNTMYPSRSGGVCRLPDQQAGLMRADLTGLAYTDAPEVGKRYSFSHSKIVTPGSAYSRHLEGSFPARGELRSPSWFEAWTRGESRRVSRGRQASAP

SEQ ID NO: 44960 - protein, 176 aa, Zea mays
  Coding DNA Sequence Number=SeqID_1585
MARTRKTSVEIIEIVPCAKNKWGNWWDFWFYVAPGDVEGLPTLPPAILCSHCYVAFPHFKVKKGDRDEEALRYVTRLNSSRDLVEEFIAYGVWPLVHGWGLGEIRPRQLPTLRDKMVESEAIKIVGKYVPKTEMLKSWDIRGSNVRLNRVFELNSLPYGSYPEGDSVDDGDDRGNK

SEQ ID NO: 44961 - protein, 149 aa, Zea mays
  Coding DNA Sequence Number=SeqID_1586
MVVVDGSRRWMADARREHLEKEFEVEVEEESAPTSETSPTEVVSEGPPEGAPIGLGWTNTRKVGQQWEWRDGESIVYPPGKRLDGGVLSSRLAGTRSCLEKPGCELTYARVKRYICRVVGDPHLGTNHFGSPNFSDTKIGSSTLIVDKK

SEQ ID NO: 44962 - protein, 106 aa, Zea mays
  Coding DNA Sequence Number=SeqID_1587
MGGGGGLGPFRAQGRVGPGRLGWAGLGWLGRRYRLKTHDVRGPLNGIKSQIEIRNGTRRTLNIRQRNVLRHDATPMTLRFIHDTDTCRYTGLKLGRRSKTGKEKRE

SEQ ID NO: 44963 - protein, 57 aa, Zea mays
  Coding DNA Sequence Number=SeqID_1588
MESHDLRAEWESRLVGGYEIYGFGYDYGAGCQHCNHCSGEDEAVEGDFQEFQDYDEF

SEQ ID NO: 44964 - protein, 88 aa, Zea mays
  Coding DNA Sequence Number=SeqID_1589
  Pfam annotation: Domain name=zf-CCHC; Domain location=2-19; Score =13.3; E_value=0.015; Accession=PF00098.14; Description=Zinc knuckle
  Pfam annotation: Domain name=zf-CCHC; Domain location=48-65; Score =5.8; E_value=0.2; Accession=PF00098.14; Description=Zinc knuckle
  Pfam module annotation: Pfam domain module=zf-CCHC::zf-CCHC; Domain location=2-19::48-65
MRSCFGCNDKDHMITSCPLMKNQRRAFSMMTLTKNKNGQQASYQAERRFCYKCGEQGHLRKSQGGKGKMSKKWSNRDLGTSTSRVLGI

SEQ ID NO: 44965 - protein, 106 aa, Zea mays
  Coding DNA Sequence Number=SeqID_1590
MVGRSKPGCDLCPALSFKDLHHPCWGGGRAEPELYLPYGPAGHLLLQHSGERALAGLAEGADFDNAGPIGPSGATSHRWAECGYLPPYGRLLRHAHWGTAQDVARC

SEQ ID NO: 44966 - protein, 96 aa, Zea mays
  Coding DNA Sequence Number=SeqID_1591
MRHGAVPNTNTTAWVGTAQIERSTQCGGESGAAAADRHRCADRVDAGCGQAHKSYGLRPGEVGRRSCSRAQGRARSRVRSSKLGARRRSGVGHPWG

SEQ ID NO: 44967 - protein, 209 aa, Zea mays
  Coding DNA Sequence Number=SeqID_1592
MFGYLNFPATSTGELRLADPDVPVTMGAIPTRSTRSKAEKQYFKRCAASLKRRLNRRAVAIKKKGAQPSQSTKARVPAKNHLGKPTMPSKFSTTGVESRRKSSNHAKGGDYRPATWQESEMTTSSSSTSPSTSWRARGPGLSACQAAPSMTGWTIGRPLSRTSRAPTNTLGALGTSKDAPKRVRRVFRTTSEGFHRKRTNSLMPLTLTW

SEQ ID NO: 44968 - protein, 63 aa, Zea mays
  Coding DNA Sequence Number=SeqID_1593
MSDDLVVPVHFEVGQEFCFRLLDHPLLVLLKLELLVSRQGAAKVTDGGLDLAPGRDPVGEERS

SEQ ID NO: 44969 - protein, 53 aa, Zea mays
  Coding DNA Sequence Number=SeqID_1594
MSGAPATSPMPLDSDRWSSDFWARLDVAVGAEIAVAPGVAPDSPVYTGQSGEF

SEQ ID NO: 44970 - protein, 308 aa, Zea mays
  Coding DNA Sequence Number=SeqID_1595
MSKPDKTFPLLILSVLPSLLNPGVGPHEFGLSDCPHRLKWLYYKGVQKIYFWKFGLRPFFRGYGFRICGAGALTAHRRPTSEGETARVREGDGVAAGRLVSERGGGKRRCGQTAWANRPSEGEGPAAGGLDGGLPPVTRFSVQGRVVQHGQRLAILRVGSIRPEGVGRGLSTGRWRSSAAGIAAGGLWLRDWGWKGGSAKDLRDPLCQPTIGLCGAKAQLVDHGTSPWHLGVATLQQNRKEANNGYTFINLTTMKEAYRSWGPSWGSSYMAFEVAAIHHRQALPLTIAKAEQAAAYTSNLTRNSAKVV

SEQ ID NO: 44971 - protein, 249 aa, Zea mays
  Coding DNA Sequence Number=SeqID_1596
  Gene Ontology: Mol. function=translation initiation factor activity; Cellular component=transcription factor complex; Biological process =regulation of transcription, DNA-dependent
  Homolog annotation: Hit_ID=Q93WQ2; Match level="QueryCoverage=55%, HitCoverage=29%, E-value=2e-57, Identity=88%"; Hit description=TFIIB- related protein
  Subcellular localization annotation: CTP_CleavageSite=40; ConfidenceScore=5.00e-01
MVNGAQIYGSKIARHRSCAGSGSDGFKLPLLPRVGAGAVRDDAAAALARRLRVLRLRPNRPRAPPPHAPLLPPPPLTPSAPPCHPDLATAIDPAPSPSPGDEDDEDPFLPAGFVSAFSAFSLERHPVLARSASTFSGHLAELERALAVDSATAASNPDPAGPMVSVDSLRAYLQIVDVASILRLDRDIADHAFELFKDCSSATCLRNRSVEALATAALVQAIHARRANAVEPLRWRTAEQEIRTPVAGA

SEQ ID NO: 44972 - protein, 164 aa, Zea mays
  Coding DNA Sequence Number=SeqID_1597
  Subcellular localization annotation: CTP_CleavageSite=30; ConfidenceScore=5.17e-01
MGGLAVIASMGAQGQGANRQSDFGPTFRLVSSPEAGPGATVGTLNQGYPLLQRRQGHPVDGVPVQSIVKKCAHAALRTVLMIPYTRSFPCTPMLRRSWTSGRKKITPATNISSSKYDICYVLGPTCRGSVPLYMPPLAIKGEACNVKKQTLNSQASTAIQHTVE

SEQ ID NO: 44973 - protein, 153 aa, Zea mays
  Coding DNA Sequence Number=SeqID_1598
  Subcellular localization annotation: CTP_CleavageSite=32; ConfidenceScore=5.13e-01
MMVLVSIATTSFHILLLFSLPSCLHLRTTPFSAEDVGAGASSPYSSDTSPDTDSRSGYCMSTRMFHIMRAPSFSPSSNVSFVFPAFVLFFLPILLPPAYDRSRERTTLVDAGTWRVGHASGISLCVSSRRTWWRLPRLGYLGDEEFRFEILDN

SEQ ID NO: 44974 - protein, 148 aa, Zea mays
  Coding DNA Sequence Number=SeqID_1599
MAHRTVRCATGHCLVRLPHQPAVGFRPLELLSSGPPDSLVVHRTGKNGHPYILLQALSLSCICIIESSLGSTQVNKCDGPRTGLWIHNGHHKQDGHCKSDTRVRSSEATDQAKDGGKKSFEVPSAREKVKEAEEPKAKGEEEGLQSQG

SEQ ID NO: 44975 - protein, 122 aa, Zea mays
  Coding DNA Sequence Number=SeqID_1600
MEQSGLGYLCFNCVAHQSPKRGKIESSLGSTQVNKCDGPRTGLWIHNGHHKQDGHCKSDTRVRSSETTDQAKDGGKKSFEVPSAREKVKEAEEPKAKGEEEGLQSQGMLELRNVNLDQVKLT

SEQ ID NO: 44976 - protein, 52 aa, Zea mays
  Coding DNA Sequence Number=SeqID_1601
MRCMSKRSLELVITSALIKAKSLGGKEKMCKKWSNQDLGTSVSQEIGISSHE

SEQ ID NO: 44977 - protein, 221 aa, Zea mays
  Coding DNA Sequence Number=SeqID_1602
MNENGDLQDRIGVQMGQVKIVEIKEAAEKGRNGEAKAAEKERGIDNRLMGILSWNSKPMANPPRTEFPRRKNPDRYEVEKFRLGNDGHVVTCERQLAIGVDWRNHHSRRTRDQWHLATGPVAAAAAAAPGAAPAAAAPVDAPAAAAVTVLAAAATALAAAVTVTVATAAIVVVVVLVLVLAATVRVLLIRGVLRLIRALEPGALDGPDVRPDLRREPLGDV

SEQ ID NO: 44978 - protein, 166 aa, Zea mays
  Coding DNA Sequence Number=SeqID_1603
MGKNNKRKREPTPPSEEFGDSEYSEEEFSSESEGSPAPIPLRESSDDSDVSQGLTAEVWTYIRAIERSGLEGSDESEYSSDEEDSDGGGEDEDKDDDDDDGGGGDGDGDGSGKGGGGGSKDGDGGGSRGINRGRQQQGAAPRGRQQRRQQQGQWLDATGLLDISIV

SEQ ID NO: 44979 - protein, 55 aa, Zea mays
  Coding DNA Sequence Number=SeqID_1604
MQIIERRCEAQKGAGIRRKKTLDKLTDQPGNMIPLDRAGVPDLSEKHDEWSLIQK

SEQ ID NO: 44980 - protein, 237 aa, Zea mays
  Coding DNA Sequence Number=SeqID_1605
MISVILFLPPYLTFVPMIVQIIDIALRVSLTVDDIVHVRTRMSGWKKMVCCLGEDLLVALRVQEPHRLRSVCSRLGEVEQRVPGKGRVLASVPSIMLRSFLFTFLGVATIAASGIATLVEHRVVRSLFYLRCLVSIYGLRGVPFSGLVVTLNVMTPVPVLACLALWGSSPNTVGSSSEMGASSIHPWIKRTSGKKELRGTSHASAISPVSRAANMAVSLVLAAMLVPGLSTPFNRVI

SEQ ID NO: 44981 - protein, 192 aa, Zea mays
  Coding DNA Sequence Number=SeqID_1606
AEQERRRQELEQQGSSFSLQQEVESVRSCSPMPPLEAPPALPLSAPVAGVAVGGDPNNRAEAAMQDAARRALSHYCSVFGGVADGLNLKYYPRHPSGSTGGVVVSPISEDNPRLISTINLAAVLNTELDHALDELSRACAEIAQLRAERAERRHLEDGSPAPIGTQHSYRSPRRGHQAYGNPDFRTRINLEP

SEQ ID NO: 44982 - protein, 249 aa, Zea mays
  Coding DNA Sequence Number=SeqID_1607
  Gene Ontology: Mol. function=cysteine-type peptidase activity; Biological process=proteolysis
  Homolog annotation: Hit_ID=Q8S456; Match level="QueryCoverage=55%, HitCoverage=38%, E-value=1e-29, Identity=59%"; Hit description =Putative uncharacterized protein 163K15.6
MARMADIDWCQLVYTELCDADSRWHKRNKTNITTTIYGCSLIVLIYYLDHLHHPASPDNKYDIPPTTSMPPTNAPVSTPPVRTPDNQQHDQEIHVPTDDIKVPEQEGQNTVKHDTPVSGAPQFDKTPLTEATTELVARDISSKSAVAEPPHVSREECARQLFKFICSGQLDPSMSIIDFGGYGGFVLDVVQSFGPNKCLQNLFMQGFIDCIRDDDLLLSGTIIRGTLKAPNSQLVTPISIKLQRPDGCD

SEQ ID NO: 44983 - protein, 107 aa, Zea mays
  Coding DNA Sequence Number=SeqID_1608
  Homolog annotation: Hit_ID=A3BD92; Match level="QueryCoverage=85%, HitCoverage=31%, E-value=3e-08, Identity=45%"; Hit description =Putative uncharacterized protein
MQGNKAEFVGMREGNTVKGTYNFTSTQPSGPDLTQIGTEDILINVEDHKDVGDPLADHRQNEVEDRVYEVEGVDVNADRQDERPKRTVDVPRNGEEKGSKRQKRVPT

SEQ ID NO: 44984 - protein, 101 aa, Zea mays
  Coding DNA Sequence Number=SeqID_1609
  Gene Ontology: Mol. function=kinase activity; Cellular component =ornithine carbamoyltransferase complex; Biological process=amino acid metabolic process
  Homolog annotation: Hit_ID=Q6QP54; Match level="QueryCoverage=82%, HitCoverage=31%, E-value=4e-14, Identity=51%"; Hit description =Putative kinase
MEPGGGTAVGAVESLLTSSCFPRGRVMMAPPVDVAGLRPRLGDVEAPPKPRSSLSSVAEVESEPLVRARRRPPAEAGAESEPWGRAKQSSSSSGAEPESEP

SEQ ID NO: 44985 - protein, 286 aa, Zea mays
  Coding DNA Sequence Number=SeqID_1610
  Homolog annotation: Hit_ID=Q5Z9G5; Match level="QueryCoverage=54%, HitCoverage=63%, E-value=1e-26, Identity=44%"; Hit description =Putative uncharacterized protein P0655A07.24
  Pfam annotation: Domain name=Hin1; Domain location=123-261; Score =66.4; E_value=9.5e-17; Accession=PF07320.4; Description=Harpin -induced protein 1 (Hin1)
  Subcellular localization annotation: CTP_CleavageSite=41; ConfidenceScore=5.17e-01
MDNDVISTAFAVNNTSFVKGQKWTHGIKPIAKLPNANTVLPAATVPSGVREGAREQESPGRRGALQPADWRTWRGREEEEPQRPRRYSFRRHRSGAAEWAAVVLFKVLAVVVLLGTVAVLVVVVLLQPRAPYVAVRAASLYALVYGQTGALDDVQVTVRVEARNGNVHSTAYFSRLECRLAFAGATLAVLRAYPFRVPARGVLPLAYVAHAQGAPLGDAGSAAMATALRDGVVPFRVEGEARTRWKVAGIVSVDQWTRLACQLRFFWPNGTVLPSRCSSKSKFLFF

SEQ ID NO: 44986 - protein, 415 aa, Zea mays
  Coding DNA Sequence Number=SeqID_1611
  Subcellular localization annotation: CTP_CleavageSite=40; ConfidenceScore=5.44e-01
MSSRSPYASRLSTFQAPGWGTLAILPPCRWRNATSRKLVPFSHRSASRIFIRQPGRSPSPVVTQDGDHQLLGGEKQAGLRPLPLPQLQGCSSSVLGRGVCRVGSVSARAAARSFPQRSGGRAFAVRGVGSCRVSGSPVRAALALLPVPPSAAAAGRGFSTDEIVSAARGLTSDSTAFYSSPPLEWGRGRGPYGSSIRPEVIAAVVRPLRAEVVAVAAGAGGGVPRLGRPCRPRLLLLSQRIPRSLFDEPKPEAAVSARTEAELARKEDFVGRSLAEPSTSGTDAGVELPRPRAGLMSSGDSWLRLRDGRPSYLLGPDSWRRPWRRWPGRGADVVRRSGDPPTALLSEARSDFAEGVVDAEGAAAPPPSRSNPAGSVYLVKVMSEVSVSRRRRSPSAWSALAAYVYSVVFGIPLSK

SEQ ID NO: 44987 - protein, 210 aa, Zea mays
  Coding DNA Sequence Number=SeqID_1612
  Homolog annotation: Hit_ID=Q8H6I2; Match level="QueryCoverage=100%, HitCoverage=100%, E-value=1e-100, Identity=79%"; Hit description =Putative MURBZC
  Pfam annotation: Domain name=Zea_mays_MuDR; Domain location=9-210; Score=-38.4; E_value=0.007; Accession=PF05928.2; Description=Zea mays MURB-like protein (MuDR)
MESAAEICAQKLSLAVVAARDTLNASAAASIVAGDYCATFSIGNDVVSTLDVLESAVAAEKSAMHSYKQASAAVDCAKETVAKYSEVNQKLAQALRYAMSQMSDTAKKLQDTASLRYTDEDVVDGFKLTQVARSMDELAEMLEGTAIDCQVSMMDPTTMLEAGYASEDSAVWEDVFRDREIMNQPLEAETLAEHCAKWGLNYNEIWDRSV

SEQ ID NO: 44988 - protein, 183 aa, Zea mays
  Coding DNA Sequence Number=SeqID_1613
MTAVEVSEALYAKAVSPDLLTGNRWGQLMAEDTMEAIALHELTTFCGFHPLELSTHPTGLFPVEKEDDPMWKDRVEHAKDIWAIYPEAMSHLMALLEATKITLDNREELVVDLSTEMVEKDLQVEQLSNEIQELEELVGTRENTIEANEDVDIEGGEEPASSLDTAGSGRPPSPESSVALFAH

SEQ ID NO: 44989 - protein, 236 aa, Zea mays
  Coding DNA Sequence Number=SeqID_1614
  Homolog annotation: Hit_ID=Q6J9V9; Match level="QueryCoverage=52%, HitCoverage=43%, E-value=1e-52, Identity=84%"; Hit description =Putative uncharacterized protein
MPRLLDCRTRAATQGSPARDPTMPIKCDDHGDREKGIFRKDPSSEGSGPRALLLIRGSKVAPCGVRQPPQSTQAPSPLLIRGSKAGPSEGFDSRSRACRVRDDHGYVRYMAKARATLPRYPRTFPIPTETICNGIPPEGGTEPSDPIKWVRVQQITCRVKLTTVNHDLPRVQPRAQQGAPPRPTSGLGLSLGLGRRSPPRPTSGLSLSLGLRRSLYLARPRPRTDYATGETSLPYP

SEQ ID NO: 44990 - protein, 96 aa, Zea mays
  Coding DNA Sequence Number=SeqID_1615
  Subcellular localization annotation: CTP_CleavageSite=53; ConfidenceScore=5.17e-01
MAHRSYSGPPETFSPPFSLLCPWIHGLFPAIKFAVVPSPSLPNSGDPGATLARASLNSGDLTAAERSGAARSRLFPPGGEVGNMDDFEEFQEYDEF

SEQ ID NO: 44991 - protein, 240 aa, Zea mays
  Coding DNA Sequence Number=SeqID_1616
MPPAPPQGILAAGGDPDGDGDDDDADGSSSHDTERSEEPEGWIARPITHDAARGCHFHDALDTLLRRAFDRHTWSIKYLCVVYQHRRGYTRTSGRLLAWCAVRTMISGVQRPSQSTILSLRGIPPRQPCKMQHDRHFLSIARCSASVGGVIVSPIGEGNPRLSSMVNLAAMLNTELDHALDELGKVRAEVVELRDECAAHHYLADGSPAPIGIQHPYHLPPRGHFEYGTPDCRTRIDLDP

SEQ ID NO: 44992 - protein, 111 aa, Zea mays
  Coding DNA Sequence Number=SeqID_1617
MAHRSYSGPPQTSLLCLWIHGLFPAFEFVVVPSPSLPNSGDLEATLDRASLNSDDLTAAERSDAARSRLFPPDNEQLVVPECVAEDPSEQQPGGEVGNMDDFEEFQEYDEF

SEQ ID NO: 44993 - protein, 160 aa, Zea mays
  Coding DNA Sequence Number=SeqID_1618
MDLIFRLLHLSEGLSKYNVRCTACVNQNIVDQKSFDNTRDNHSIIVRVVLELKILLGEAGSEHEPPVIGSTNFGAEATPALNEAISSESGSEITGGSCEQCRDIVHLFIGTGCNLHKITFMSFTIDYNNDTKHHGSLSQFIFKSVRPFILRFVFTPKLYR

SEQ ID NO: 44994 - protein, 121 aa, Zea mays
  Coding DNA Sequence Number=SeqID_1619
MGSTSEKKYLYQDRADVGLMIEDLLTGHIPRHGDMACTETTQRKATGPQGVPRHQLAPRHEGSSRGSNDPIGDLEVRVERLTMELCHGSRERARDSRRIAELSAEVDRLQRENVERDRAID

SEQ ID NO: 44995 - protein, 69 aa, Zea mays
  Coding DNA Sequence Number=SeqID_1620
MAVRRGIPALELPRNYNSFLKLLELCKGLIVLPCLASSVEVYGKSRSLGRRVKNRYHRMRRLEDAVTRS

SEQ ID NO: 44996 - protein, 40 aa, Zea mays
  Coding DNA Sequence Number=SeqID_1621
MADERVLRVSGHGSHGSPRAWRMGPGEGCSLVGRKWDPRP

SEQ ID NO: 44997 - protein, 143 aa, Zea mays
  Coding DNA Sequence Number=SeqID_1622
MHISYSLHPLDCNLADREYVLIPDQGPIHEEDEEQAPEPVIKDLPAAPTFEGKPRYGGYKCGHCTAEAGVSGALYAKALYEEHRVPRCRVWLTLEAHPLQPGWRSLDSETIGFKTDDTTEAAAMKTLTTFYGYHPLEMVMHPL

SEQ ID NO: 44998 - protein, 245 aa, Zea mays
  Coding DNA Sequence Number=SeqID_1623
MPPAPSQAIPAAGGDPDGDDDDASGSSNHGTERSEEPEPEGWIARPITRDAARRCHFHDALDTLLCRAFDRHTWSIEYRCVVYQHHCGLYPDQWKATCLRPSQSTILSLRGIMPRQPCNAARQALSQYCSLFSGVADGLDLKYYPRRSTGSAGGVIVSPVGEGNPRLSSMVNLVAMLNTELDHALDELGKVRAEVAELRAECAAHHYLDGGSPAPIGIQHPYRSPPRGRFDYGTPDCRTRIDIDP

SEQ ID NO: 44999 - protein, 83 aa, Zea mays
  Coding DNA Sequence Number=SeqID_1624
MAYTLAQKHKRAQTTAERANGGAGLLRRAIARAIESAGVAKQRQRRRGSTGRRWRTPAAQENSSMIADRTQQGGRGHTEGCPE

SEQ ID NO: 45000 - protein, 296 aa, Zea mays
  Coding DNA Sequence Number=SeqID_1625
MSLYLVARRGRCTTANGRDGVEVATAWRARRRACEGVEGATAANRTARGVSRGATAANRAGAAAANRTGTARGAGGRRSRRGEGDGEELGRASATARSSGGRGRRRGARAGEGDGEELGRARGAGGQPRRGEGVGGRPRHGEVEGGGRGGGETGGEGAVAATMWHSAKATLPSVNRETLGKDSVITLCRVSRDDTRQRMLCRVSTMWHSAKKPLCRVPAVGSRQRLTAVSSRTAADGPLPRAPFAECLTLDKLVFAECRPVPSVQHSVKGLFAESLTLSSAALGKEYNTRQSLGFR

SEQ ID NO: 45001 - protein, 100 aa, Zea mays
  Coding DNA Sequence Number=SeqID_1626
MNPKGKGIVINDKEKEILNVDEPKGDKITDLGADRPDQGRGPSAVGRKGAMARKWLGAINTTPTTSIHFTQALQSFTFNTRACNPFKDTIKDSNLSKFHN

SEQ ID NO: 45002 - protein, 208 aa, Zea mays
  Coding DNA Sequence Number=SeqID_1627
  Gene Ontology: Mol. function=binding
  Homolog annotation: Hit_ID=Q6KAI5; Match level="QueryCoverage=86%, HitCoverage=46%, E-value=5e-34, Identity=67%"; Hit description=CLIP -associating protein 1-like
MEAALEAARAKDTKERLARVERLHEALNAAACRGLTTTEGGLQALSAAAIVSGNHFKIHLNALVPAAVERLGDGKQPVHDAARQLLITLMEVELVQVGDLRLVFLVKVHSKKELLREFEKIAATLVPEKDWSLRIAALQRIEALVYGGAIDYSSFLMLLKQLVPPLSTQLSDRRSSIVKQYHIGSSKDKSINLNRWTIGASIEKLRKG

SEQ ID NO: 45003 - protein, 224 aa, Zea mays
  Coding DNA Sequence Number=SeqID_1628
MRSSSSSGAEAESEPWGRAKRSSSSSGAEPESEPWGRAMQSSSSSGAEPESEPWGRAMRSLSSSRAEPESEPWGRAKRSSSSSGAEPESEPWGRVMRSFPWRLRPDLATVSLTLSSGTAVGAAQAALSSCQACQWSGEATFALNAPAIRSVGVATWPRLLLGEDWASGEPKLCADGGYQLRLGVLRGAEHGVFSELLTVLGAEPERSEAAVEPLRGIGLRTSDQ

SEQ ID NO: 45004 - protein, 129 aa, Zea mays
  Coding DNA Sequence Number=SeqID_1629
MEQRITRSTFTGGRVKSGDPWTGFSGEAKSDSLLGELHRGVHSRFRWSGMAGKGSVGRSTVAEARMSAGTPCTGQRRWFRAPFQGKIIPRSEDMRSPNLAGLPAHFATKVMPRHVKRQGLGLNFFQGVP

SEQ ID NO: 45005 - protein, 230 aa, Zea mays
  Coding DNA Sequence Number=SeqID_1630
MPPAPPQGIPATGGHPDEDRDDDTGAVRATTRSSRRSKSQSDASLDPSLAPPLAVYQHRRGLYPDQWEATSLVRRLDDDLRGAEAFSEHYYITERVTTEATMQDAARHALSQYCSLFSGVADGLDLKYYTRRSIDSAGGVIVSPVGEGNPKQNNMVNLVVVLNTELDHALDELGKVRAEVAELRAERATCHYLNGGSPTPVGIQHPYRSPSCGHFDYGTPDCRTQIDLDP

SEQ ID NO: 45006 - protein, 226 aa, Zea mays
  Coding DNA Sequence Number=SeqID_1631
MDVGENFSRNCLYISSSDRGEYAFSRHHQNPRRRPPHYQPSHNQGQPPEMSPRIQGATPRLAYADAEPSAGAGTRKHGAQPQPPKVVVGRLSARWRTGQSGAHRTVRCPLPRHHCRWILTVGASDLWARLGVRCTPDRYCWLSGVPAWAILTSARAARAFIARQRAVGAEIAVAPESHRTVRCTPDSPVNYSGRAVGFSRSWRVPEADLPWRTGHCPVYTGQSGEL

SEQ ID NO: 45007 - protein, 95 aa, Zea mays
  Coding DNA Sequence Number=SeqID_1632
MTPSDFAHCDGLPSSDSVCGLKDLRWLLNVGRVCHLFHIVLKVKENRKDCSLADGEYVLVPEQGVAQEVAPDPAPEPAPEDLPATALEGKPRFYA

SEQ ID NO: 45008 - protein, 165 aa, Zea mays
  Coding DNA Sequence Number=SeqID_1633
MEFAQRSLRSGSPPSSFADPQGPGGTIFLLCSQMTERWNGESSRQLSGGTIYQQALWTESSTSFWHSLRETEHCYSMLRPSMTCASMPDIMQTRTRRRGTCLGGGSALSSVTVSTPSDEDITMSTTTPAAPPHQAQLPSLAGPITRARARDLNFVMLLKNEGPDE

SEQ ID NO: 45009 - protein, 419 aa, Zea mays
  Coding DNA Sequence Number=SeqID_1634
  Subcellular localization annotation: CTP_CleavageSite=53; ConfidenceScore=5.03e-01
MARRHPLAAASSCQRAPATRLAPWPKCLPRHPHGRPGAQRPTRTAHAPWGRAPAGQRPSPTRPGPSHHPPAIKLQAGAASRPRLHCATASQGQQLQTRARCQLQPVGQHPASSPTPAAMAPPPRQPVSPTATGTAGAVSPAPSRPLGHRVSLPPRPPFSSSIAAAIDCQLGSSISMDGNRNLNRIDDNTSQSFVDPLTFSSTNHPNHTEQNFADGPCCDHTEEHRPGLETPSGNASTPVHIEEQTQHGDFSDQADCNSNGQQGFTRDLCSVPSGIHRAGLEAPFRDASAPVHIEEHFHQSIPSQSSAPSGRRLIEAPNLLVYHRKRKHNKPLVEIAEEAVDNISALQVDGEDPLAAKKEEFFKQIVKEVSGILPAPADPPPKPKNTDSSTAVSLRRSRHIAGMGAEIGKQDLCSRATKL

SEQ ID NO: 45010 - protein, 66 aa, Zea mays
  Coding DNA Sequence Number=SeqID_1635
MPSMGLGVCGSLCQVWVRPLGEECGGNEIDGFGYDYGAGCQHCNHCSGEDEAAEGDFQEFQDYDEF

SEQ ID NO: 45011 - protein, 338 aa, Zea mays
  Coding DNA Sequence Number=SeqID_1636
  Homolog annotation: Hit_ID=Q6Z7I5; Match level="QueryCoverage=97%, HitCoverage=46%, E-value=1e-105, Identity=63%"; Hit description =Putative uncharacterized protein OJ1521_G01.18
MAIEKMLHRLNPSKAKANDGEGPELLRSASSGEASTHSDSLTATLAEHRQHLVSIQGLINQLKEAIPAMQQSIDELSEEVNSVSINSMDQLNSRLPLPVQIAGFGTSEESSSEVSEINSKLSSTHLDKPGGSPALKLPPLFSLTPSSSGKGIQTQKRSALARQRSQDITSEQKTLTIPSTKDQMNGSMHENDDYSAHDIRRSVREAALSKPLKNTERPQDKNSDDGSEHFFIPLSISAAKKEMDSVANRCNQRLGLSPQMKFPKSTSYNADTPINKSPILLSELNGHDSISAMSFLDPAGGLAHQSFITDDALDQVFSPLLMESSLFHDADEDLLGKS

SEQ ID NO: 45012 - protein, 132 aa, Zea mays
  Coding DNA Sequence Number=SeqID_1637
MEHNFPLPRLFSANNYLLESSLRLLSCSRLFLARQEQQQQEPETVYLSLKAPHHLGCGSRAANVVLQQVFHLHHLSSKDRAPFYPLGLSSGSRLFLARQEQQQQEPETVYLSLKAPHHLGCGSRAANVVLQQ

SEQ ID NO: 45013 - protein, 181 aa, Zea mays
  Coding DNA Sequence Number=SeqID_1638
MEGTHRAIELGGHLGEEVCEGGKSVGLALQRKIPEKWDKSSRMTRYYRKPKRLGTGDVQRHGKARWCSREGKEWSRRPRVERGHRGRVGQDGGAKWRQGRRVGQHGRRKVEWGSEYGIGAEVVVASNHSTSGKISYGEPPRIELHRAVVVNGEAMSNKDVVEVQRTRRDRVTYRVDSDRQG

SEQ ID NO: 45014 - protein, 77 aa, Zea mays
  Coding DNA Sequence Number=SeqID_1639
MAANCEMLHGVGGEVHRSDVVTVDEGGVLEGTVELLKKLAELRGIGHSVGHSVVLGLSAGAGDDEIALRGPRDEVGA

SEQ ID NO: 45015 - protein, 365 aa, Zea mays
  Coding DNA Sequence Number=SeqID_1640
MELWLSPLPTSTRLDTTGRARGPGPSNSCTKKDGIDEIDPLESLLGALEMKSQGHGKLWRHKAGTLKAKGRRDLEGERAPRVGEKQDMAATRRTSHVIQAGPKREEGELSHKERATALLLYALPSSPQPAVKEANRRTRSVQPPRGFVPPRLRPVIQPLAWGPRPTCHTPGAPVSGCRKVAPPLAPIPRLLEKINFQNQCSDSRHPAHGPTKTLSAEVTGQSAAGTGMAVGVTMGGPTVIAPTGAQEQRANRQSNLGLTRRLASSPEAGSEAIVGTLNQGYPLLQFEDAVPDVSVKPDLHEGAPDTYTHNPDPRLWPSTPKRRPDAAMWLVARDISQRAEPDAMCPLNIYCVMSTPLAGGARAIL

SEQ ID NO: 45016 - protein, 131 aa, Zea mays
  Coding DNA Sequence Number=SeqID_1641
MVAGVHNPAGVRGPDRRDLAGTPAADENTRLRAWTERFRPSPPASHCNLADGEYVLVPEQGAAQEVAPDPAPEPAPEDLPATALEGKPRNPFEMNTSSLEDMVAGVTWPSILPPGWTIEWDPASAEEEHEE

SEQ ID NO: 45017 - protein, 264 aa, Zea mays
  Coding DNA Sequence Number=SeqID_1642
MTSYGSSDDGNALSHTDGLAREGFPRILWEVLQGPGYTTPPQYAVQQFEKHRVPRCRVRMTLEPHPLQPGWRSLDSESFGYRAEDTIEAIALHGLTTFCGFHPLELATHPIGLFPAEREDDPMWKDRVEHAKDIWAIYPGQTPHLTVQCMNALYRLQVMRGEAMSHLMALLEATKITLDNREELVVDLSTEMVEKDLQVEQLSTDIQELEELVGTRENTIEEIQDMEANEDVDIEGGDEPASSVDTAGSGRPPSPESSVASFAH

SEQ ID NO: 45018 - protein, 70 aa, Zea mays
  Coding DNA Sequence Number=SeqID_1643
MAAPAPAWWLAVASPAMAPARQNDPVEEPEELTGEAPEQQSVGGGKCPLTYLCPIHSFIHLPHYTFIPKD

SEQ ID NO: 45019 - protein, 150 aa, Zea mays
  Coding DNA Sequence Number=SeqID_1644
MESHDLRAERESRLVGKVHNLCRVFETDISAVLVMSRLRHTARKSVIPFLPSRLAERPLRRPVAGQSSHLERLHHRLHEEQERRWQEQQGSSFSPQQEIESVRSCSLVLPLEAPPAPPLGAQASGVAAGGDPDDGGGDDSSSHDTDFSAD

SEQ ID NO: 45020 - protein, 110 aa, Zea mays
  Coding DNA Sequence Number=SeqID_1645
  Gene Ontology: Mol. function=drug transporter activity; Cellular component=membrane; Biological process=multidrug transport
  Homolog annotation: Hit_ID=A3AFI1; Match level="QueryCoverage=60%, HitCoverage=11%, E-value=8e-15, Identity=60%"; Hit description =Putative uncharacterized protein
MVLFALHLSIVLGMGLTVVLGLAMRFGAGIFTSDVPVIQFVADTQTINSLAFVFDGINFGASDYRYSAYSMIRLQKQSKQLEEWTTAAFSSELTATKHKEIDSQQVFGCI

SEQ ID NO: 45021 - protein, 100 aa, Zea mays
  Coding DNA Sequence Number=SeqID_1646
MEEYTKQPLSILDHPHSVFAHPFVIPSDSSSVLVRTVPKSKINAEWLERDMVSVGVTKVVRDLLYFMRREVLHQQGLFYNTNGNLQKFPELSLYTISHSV

SEQ ID NO: 45022 - protein, 141 aa, Zea mays
  Coding DNA Sequence Number=SeqID_1647
MMSYGSRARENFDEKFPPTHGITSFDSTSIIIPSRWRRYLTGIPTPNAIPHWIRPRRLIPLRTWRYCYGKGGEQTRFYIPRGARWSGESARIRCEVHSVGAEPDKWAHTVASSVRKSARRKPTQEWPHMVVRAGPKRHAGD

SEQ ID NO: 45023 - protein, 27 aa, Zea mays
  Coding DNA Sequence Number=SeqID_1648
MAFVRDQQTWTEYRTCSDHRWLPVNEV

SEQ ID NO: 45024 - protein, 166 aa, Zea mays
  Coding DNA Sequence Number=SeqID_1649
MESAGSFDGAHPEIQRDSVHNAPAKVGMVVEDGPDIMAPRRRDAGKEDGAGGSGIAGRKTARAGAGAGARFHPAYYVHRAHDPTHVLAVIQSHAATLKTPPRRQGLGFSGGGVSLGCASADDPRGQQRCRPEAGDRRWRSTRNERQRRSRGERASSDGVLEADGRR

SEQ ID NO: 45025 - protein, 383 aa, Zea mays
  Coding DNA Sequence Number=SeqID_1650
MYLGQNPPLNSLTLLDPASSCARDHWRSHGRRLWLAADLAGRYNRLRLGALRTRDYKARSLEPPTPTLLLVGASLLPRPRSPQKIAVGLGESSELGESLARILKPPCSEGSFPIAAIPGAHYWSELRRLAPRRGSIAASSHSGSAPTTDQGFVGWPPKGSTAASEHAERGMTLGTFDTQPRLGLRSRGSGAALANPAPAKPLTASTNQPKNLELDYAPGLRPENIAACPAPTTVPLDRVRLTAAKSSLGRHRKLRLARPQGSDSASASEDGLRLARPRARTQPRPRKTVSASPDPRARTQPRPRKTDSTSPDPGLGLSLGVGRRSPPRPTPGLGLSLDIGRRTPPRPTQGSDSTSTSEEPSPRPTSGSDPPHHREGHHYPTPS

SEQ ID NO: 45026 - protein, 77 aa, Zea mays
  Coding DNA Sequence Number=SeqID_1651
MRVEWDALSWLIRGTRGVVGFVVGPSMGSEHSTCSAEAGCREWESRLVGKVCDLCRVLEIGISIVLTVKSGLGILFD

SEQ ID NO: 45027 - protein, 296 aa, Zea mays
  Coding DNA Sequence Number=SeqID_1652
  Homolog annotation: Hit_ID=Q6QP51; Match level="QueryCoverage=68%, HitCoverage=76%, E-value=4e-18, Identity=37%"; Hit description =Putative growth-regulating factor 1
MTASNKVRHVVRFHIPFSLPLSLSCYRDQERGYSERDPSPRRKRAPSPPTDQRFEGWPLGRVRQPPQSTQALRLLLIRGSKAGPSEGFDSRLRALGLRAHYWSEVRRLAPRRGSTAASSHSGSAPTTDQGFIGWPPKGSTAASEHAERGMTLGTFDTQPRLGLCSRGSGAALANPAPAKPLTASTYQPENLELDYAPGLRPLSPASGAIGSSASPDPRARTQPRPRKMNSASPDPRARTQPRPRKTDSASPDLGLGLSLGLGRRSPPCPTPGLGLSLGLGRRSLPRPTQGSDSASA

SEQ ID NO: 45028 - protein, 123 aa, Zea mays
  Coding DNA Sequence Number=SeqID_1653
MTEAQGFDGATTVGLRLHEDCSGHGAQMGRGCADVAGERVDVGASKVGDRGREVEDELTGGVGETEREAGAQLRSQQHLLLGYVFTSKHGLQLPLDFHAQLWDLGLMVSSCIDMLVKYCFEGV

SEQ ID NO: 45029 - protein, 106 aa, Zea mays
  Coding DNA Sequence Number=SeqID_1654
  Homolog annotation: Hit_ID=Q10QQ8; Match level="QueryCoverage=62%, HitCoverage=8%, E-value=9e-20, Identity=71%"; Hit description =Expressed protein
MPNLVVKQPIWIQSLLAKGSSLPVEVMMVDGLYGRKEQEGLLKCLQGMELSHPFDCAVATSGIDNTIKLWTSDANATSMVAGPELDVLSAIENNQRTLCRKRQIVL

SEQ ID NO: 45030 - protein, 338 aa, Zea mays
  Coding DNA Sequence Number=SeqID_1655
  Homolog annotation: Hit_ID=Q6QP51; Match level="QueryCoverage=31%, HitCoverage=47%, E-value=4e-07, Identity=38%"; Hit description =Putative growth-regulating factor 1
MKGVAAERTRGRERGYFERDPSLRRKRAPSPPTDQGLAPRKGSTAASEHSGYAPTTDQGFEGWPLEGFDSRPRARRARDDSGSDFVTEYHQREASSPRTLSNGTGSGKSPAEADGRNSGQGFVYSRDAISPRPGLASGGNSSPRRIHASPEGLLKQRALPRLARGPARAGFVVKQPWPNRLTNRPYRKRIQCKDRLAPYPDTRASVGKVEENSAARPSPTAVPPAGAKLTAAESSLRRHRKLRLARPRASASGEVFASPDPRAQPQSRPWEESRPRPTPASASGGVSASPDLGLGPTTPQEPLMEARRRQQGPDSPDSYASTGLKRSSDDHDTMYTGP

SEQ ID NO: 45031 - protein, 922 aa, Zea mays
  Coding DNA Sequence Number=SeqID_1656
  Homolog annotation: Hit_ID=Q7XBD4; Match level="QueryCoverage=27%, HitCoverage=25%, E-value=8e-07, Identity=25%"; Hit description =Cinful1 polyprotein
MTSYGGQPSVEVFAKYYCLHWQKRMIGDEVAQFGSCTFTPKTGKTTMEVVELVPCARNKWGNWHEFWFYVAEGTVEDHPGLPVSEMCSHFYSAYPPFEVAEEDADEGALRCAVGLRSGRDLVEEFVVYGVWPLAHGWALGEVCPRQMPSHGGKLVRSPAFALDLHSRDPAAFVREAEDGAVWIVGRYVPKTEGQRSWDIRGSNDRLNMVFELNRLSYGGYLGQDDVDRRGKKPVVETGDDPASATAPSSKKRKLGTAMGGLGVSDGFARELMRTCAALGGRMSSPELRESSARMLMVTGGWCPKNVPIPRAAGEDFFTSRMVHDWKVFPYGRNIVAVVSAVMDKDRQGATQKRQAVIRLHEARPKRQRGAAKATAPGGGQSPLAAKSAVPASSRAPGAAKAAAVGGSKSAKAAPASSRVPEAAKEARGLPPPGKRVADFATDISVDDYLVGSDEGQLVVVPPAVATATAAVVPRAKGSALSAGGEIPALTAVRDEAGAVSRRLKEMKEALSQAADFADRAASGALTAVVSAEVERLRTQHADAVREKSAADSKCRKLTDKVAALEGEKTDLRRQLAEERKEANEALAKAQAAQAEANLARAEGSLARQHAEQLEERLSALQSRVERAEASTSSEAERTRKQLMDSYHELGARTADFEVPDREPGLRCLEWIQEELQALPTIVEGFMSYASLVTCKGAMNALSREGCRHFEVFDQADEDFERDIYKVEDPIVKESTGALYDRMWGPHGREVVRERAETARGQAARGERVDDFGALNSVLPDPEPNPTEAVPEAALQPPPETAEGVPDAPTATTAGGGPSPTAAPRAEDPVKVAAEPTAEEPATAGSSQVQDFGPAHATATTNFLAASTVDVGNKSNGSASKFSDFGDSGSSVEWTEESSDEDLDYFVALDVAAAEASPHAAGC

SEQ ID NO: 45032 - protein, 83 aa, Zea mays
  Coding DNA Sequence Number=SeqID_1657
MGRTLPIRHWYLLPWPRLSLPWSAPPPTTRAFYVKWRATNFNNTVEEFPLWDPEILPIWNSLKLDHRSSSRQRNPWKLTNGCE

SEQ ID NO: 45033 - protein, 132 aa, Zea mays
  Coding DNA Sequence Number=SeqID_1658
MAEIAHRSFSGPSETFSPPSCPICPWIHGLFPAIEFVVAPSSPLPNSGDPRATLARARLNSGDFTTAERSGAARSRLFPWSNPLRLIQIERPGPWDTDNEQSEFPECVVGDLPEQQPGEGKCPLTHYVLHTL

SEQ ID NO: 45034 - protein, 147 aa, Zea mays
  Coding DNA Sequence Number=SeqID_1659
MLVDYTTVLDRPCVSVEGPTQQGIESVMEVTPASGVTSDGSGDPSIRLWLLRELCVVARTTTGVVVISVSVKGASLAEVQGKAASQTQPPAEARGKSPTAPGPTPAHGVGAPAPRAGDDAVSPAGRTDLAPCDAEDAPPGEKAKRGS

SEQ ID NO: 45035 - protein, 152 aa, Zea mays
  Coding DNA Sequence Number=SeqID_1660
MPPAPPQGIPAAGGDPDRDGDDDDVGGSSSHGTELSEEPDGVADGLDLKYYPRRSTNSAGGVIVSLVGEGNPRLSSMVNLVAVLKIELDHALDELGKVRAEVAELRVECAARHYLDGGSPAPVGIQHPYRSPPRGRFDYGTPGCKTRIDLDP

SEQ ID NO: 45036 - protein, 100 aa, Zea mays
  Coding DNA Sequence Number=SeqID_1661
  Subcellular localization annotation: CTP_CleavageSite=39; ConfidenceScore=5.27e-01
MDRPEEKGGPSEPSRGPSGLRRGPSGRVGPSGPGSRTVRAQQNGPTARKWLVAINTTPTTSIHNIQAFQPSTFNTRASNPFQDTFKASISPSFTIEERDH

SEQ ID NO: 45037 - protein, 142 aa, Zea mays
  Coding DNA Sequence Number=SeqID_1662
MAPKKANSKADEAAKAALLAAKKGKALALTHSTHQEATEDDALRTCGPEGQSQPPPGFAPPEGADLTEDGEVLGVSAEEQLQLRALRLKNRNLQRQKEILEAKRQRVSALAKVRQMIRDEEQKAQDLEREIAPMQREGHLGL

SEQ ID NO: 45038 - protein, 149 aa, Zea mays
  Coding DNA Sequence Number=SeqID_1663
MGKSKKGGGSSHHSGDKRKREPTPPSEDFGDSEYLEEEFSSESEGSPAPASPPASSDDSDDSQGIAAEVWTYIRAVKRVGLEGSDELEYSSGEENSSDPSEEASGGDGGDGDDDGGDGDGGGDSGKGGDGNGKGGSGNGSSKGSNKVNG

SEQ ID NO: 45039 - protein, 829 aa, Zea mays
  Coding DNA Sequence Number=SeqID_1664
  Gene Ontology: Mol. function=1,3-beta-glucan synthase activity; Cellular component=1,3-beta-glucan synthase complex; Biological process=1,3-beta-glucan biosynthetic process
  Homolog annotation: Hit_ID=UPI000034F02F; Match level="QueryCoverage =96%, HitCoverage=41%, E-value=0.0, Identity=62%"; Hit description =ATGSL11 (GLUCAN SYNTHASE-LIKE 11); 1,3-beta-glucan synthase/ transferase, transferring glycosyl groups
  Pfam annotation: Domain name=Glucan_synthase; Domain location=367 -829; Score=178.1; E_value=2.2e-50; Accession=PF02364.6; Description =1,3-beta-glucan synthase component
MQGLKKSLHEGWKCIGIIELGGPRPITVEIAPLVEPTRIIMSLERPPYEWHEFFPNLRHNLGVVVTVWAPIVMVYFMDTQIWYAIFSTICGGVYGAFSRLGEIRTLGMLRSRFEAIPRAFGKKLVPDHGSHLKGDEEDKNPPFDKFADIWNAFINSLREEDLLNNREKDLLVVPSSGGQTSVFQWPPFLLASKIPIALDMAKSVKKKDDELMKRIKQDPYTEYAVIECYDTLLDILYSIIVVQSDKKVVDRIRESIKDSIHRKSLVKEFRLDELPQLSAKFDKLLNLLKEYDENDPVNRNTHIANLLQDIMEIITQDIMKNGKGILKDEGQKQQLFAKLNLDSLKHVAWREKCIRLQLLLTTKESAIYVPTNLEARRRITFFANSLFMRMPRAPPVRSMMSFSVLTPYFKEEVLFSPEDLHRKNEDGISILFYLRKIYPDEFRNFLQRIDFEVKDEEELKDKMDEICNWASYRGQTLTRTVRGMMYYRKALEIQCLQDMTDPAKVDRDRSIGSYQELQYDIEMAQAIADIKFTYVVSCQVYGMQKKSKDLNEKRRYQNILNLMIMNPSLRVAFIEEIEGLTRNGATEKTYCSVLVKGGEKYDEEIYRIKLPGNPTDIGEGKPENQNHAIIFTRGEALQAIDMNQDNYIEEAFKMRNVLEEFESRKYGKSKPTILGLREHIFTGSVSSLAWFMSNQETSFVTIGQRVLANPLKVRFHYGHPDIFDRLFHITRGGISKASKTINLSEDIFSGFNSTMRGGNVTHHEYMQVGKGRDVGMNQISSFEAKVANGNGEQTLSRDIYRLGRRFDFYRMLSFYFTTVGFYFSSMRLV

SEQ ID NO: 45040 - protein, 214 aa, Zea mays
  Coding DNA Sequence Number=SeqID_1665
  Subcellular localization annotation: CTP_CleavageSite=35; ConfidenceScore=5.03e-01
MAPRGTGAGAVGATGATRKAGATHGCVRKPGGEASAARGAGPACGSVGEAVGAARGAGTTGIVVARGAEDGVTDSAPVGEDGAPPTRGSARNPGGTGDAGSGCTSAWGRTATVVAPGGPAGDTVGSPMGRGAGLGNSSRKVKSAAVGGSSTVLRGRVGTRHAKLNAMCEEEGVRARVVELPAVVTLDSLDACAELGRHIGEKVRQGGKHVRFKP

SEQ ID NO: 45041 - protein, 81 aa, Zea mays
  Coding DNA Sequence Number=SeqID_1666
MPYRAKWGLRWLTAFDGRRLRRKAEYRGGLEITINQSWVVEMMMPSGGGGGGDRDGRWGRAGGRRPEHVEGPDAVTSGEGS

SEQ ID NO: 45042 - protein, 174 aa, Zea mays
  Coding DNA Sequence Number=SeqID_1667
MAACAVDLVPESGGVEVEGGAVGSTDVEGDVLGAKDLVHGCLRGGHELGGEPELAVGAEHCEGGDVAVAARPGRGRGGGAARSRWRGGGAAARGGAAAARAAAETLLCALQLKHTYKGGFLVVSGVSFASVGPIPERPPRNGSGEMARVACTLRGKRLDSGVSMLSVGVNPFWS

SEQ ID NO: 45043 - protein, 130 aa, Zea mays
  Coding DNA Sequence Number=SeqID_1668
METLHRDSLLVQVTRLVSALSFQPKVWYLTESKTKHKKNLFITQVIKESVINGQYEAFPVIYPGPVKLVGPMSFKDISEHGNKGTEGGNGPITRWPQWESFTAAENRFGESEQFGGSSKLLEASAGALDG

SEQ ID NO: 45044 - protein, 122 aa, Zea mays
  Coding DNA Sequence Number=SeqID_1669
  Subcellular localization annotation: CTP_CleavageSite=33; ConfidenceScore=5.44e-01
MTPLHPSLAVDPVSFGRRQRPLVDPNPRSTTVAAATRDGTPNRRKPQILRRHDCFPILRCRSTFLRQKPGPTRRQRVPLQLQSDGSPPPTIYGGFIIDIPQPNSSRFFRTLASRITWDRRRP

SEQ ID NO: 45045 - protein, 124 aa, Zea mays
  Coding DNA Sequence Number=SeqID_1670
  Subcellular localization annotation: CTP_CleavageSite=46; ConfidenceScore=5.06e-01
MNSASPDLGLGLGLDPGRRRTPPRPTQGSDSGSAPEDDKLRLARPRARTRARPRKTTNSASPDPGLGLGLDPRRRRTLPRPTQGSDSTSTSEDRPDLDLGGASASPYLGLGPTTSQEGPSLPYP

SEQ ID NO: 45046 - protein, 80 aa, Zea mays
  Coding DNA Sequence Number=SeqID_1671
MAMVVRPDHYQTEEALNSVAIFVHFCEMFVGVAACTSLFRQFFVLVRSGKGKDHLGAYYQSRTDPTVTYIASLGGARWEN

SEQ ID NO: 45047 - protein, 342 aa, Zea mays
  Coding DNA Sequence Number=SeqID_1672
MPLQGRPRLCCWFTGVSDIGRIQRGPGTDLTWEQLEILGISPLCDNPGLRSAVLARLPTLDESGVAVHQIGGRDPHRGIHFPGAPVGGSQSADVTPKASPAVPNSSDKGKGPASSSSTPDAARRSEEGLLFFGIRGRSFPAGHHARRWVWLPTAYICWERRWRSVSGYHSLIGVDARPTIGSGQRERAELEQEREDFKEDIRKVSDREEEVTRKERSLVKKKEHLDQKEEAVTALHDKLKAYNTVLEKQRVKQAAAEVKLQKLQQELADKASDIARIEESLKAREASLAKRETDLTWQEEDIAFREEMWARRNKLLDELELEAEEKGKRLEGKERALKEQVR

SEQ ID NO: 45048 - protein, 183 aa, Zea mays
  Coding DNA Sequence Number=SeqID_1673
  Homolog annotation: Hit_ID=Q4SEV7; Match level="QueryCoverage=85%, HitCoverage=12%, E-value=3e-08, Identity=30%"; Hit description =Chromosome undetermined SCAF14611, whole genome shotgun sequence
  Subcellular localization annotation: CTP_CleavageSite=47; ConfidenceScore=5.84e-01
MASSSALAVPSIPLPPPDAYKRTRPSPVFTTPALANSSAFPRAKQASAAVLPPSLRPIQPSETSEHAPAKLPERGIEACFAGEASPRSPELSTPPEYMDRGLPKPTLPFAGPISPPEVAPDPAPESASEDLPATALEGKPRNPVEMNTSSLEDMVAGVTWPSILPPSWTVEWDPASAEEEHEE

SEQ ID NO: 45049 - protein, 156 aa, Zea mays
  Coding DNA Sequence Number=SeqID_1674
MSPVRLSGTIGRGKECPVTQHGSSSLISCEKQTIRIEFLSLQVTALVPTITGMGDLVSGRVRGYVCGQVHSGTRLTDLPYFTWHADPLMQTLELDPGLPPEQLLAPARGRTLRQQGYSLSNAMNIKIETILNYKCTFGLEGDENTSVTQKANAKSA

SEQ ID NO: 45050 - protein, 75 aa, Zea mays
  Coding DNA Sequence Number=SeqID_1675
MAPSVDVANLCPRLGDVEAPPKSEAESVFHGSRPSLCPLGRARRRSSAEARAESEPWGRAERSSSSSVAEPESEP

SEQ ID NO: 45051 - protein, 193 aa, Zea mays
  Coding DNA Sequence Number=SeqID_1676
MGSTFSKHFCKTESLIIEKPYLDSLNQHTLESLFFSRVRKRQIFVAFTPRWFPRKKNKSEAAGGLGPPYRTFVKELIGRSFCLPCLCNRFRISISPMFCNVCKMGETFLERRTARKHTGPIGVPSHQLAPRHDNSSSGSNDPIGDLEAEVSRLQVELRRRTAIWVVDGDRKNELRRDVRHLRDQLADRDLALN

SEQ ID NO: 45052 - protein, 41 aa, Zea mays
  Coding DNA Sequence Number=SeqID_1677
MARGINVHTKQGKIRKGKANMTHMVGWLGHLHSIPFDQLIK

SEQ ID NO: 45053 - protein, 42 aa, Zea mays
  Coding DNA Sequence Number=SeqID_1678
MAHAPAKPRTAVPGTQPTVDRHYALKNENLKGKERIEDVFRA

SEQ ID NO: 45054 - protein, 76 aa, Zea mays
  Coding DNA Sequence Number=SeqID_1679
MADISSQLIFAVTIYDPDSRPAAEFHLEPTHFSFEIPYRIIASATTIIMPWGQLERFTHLADITEHRRYRNAEAIT

SEQ ID NO: 45055 - protein, 110 aa, Zea mays
  Coding DNA Sequence Number=SeqID_1680
MRVVWDALGQVIREVLCWVLVFGHWETETSVMAPIFSLRDLGTGIVPRRFPEGRGIGFVTSDGLYAMVISNIRIVRTLGKSHVVRPCQFTLGVINGESRSSGRKGITAHG

SEQ ID NO: 45056 - protein, 205 aa, Zea mays
  Coding DNA Sequence Number=SeqID_1681
MVTTEWSFHMLIQGERQQQWGGTVELAWQRDSIMVPKWLANRVMAFLIIYRCGHIASDIHVLVLLIADELIQEQNQTNRNGDLSRLIALNCPADSDNAMVLLMYHGYFTIVFHGCSSGITVDIRRLGTSGIQGQLSQFKVFTDRTNIISDCDSLQKHFLATAIEFVGRSTKSEFSLVRHAPSMSTGEEAEALKTRFPQAHAWGQA

SEQ ID NO: 45057 - protein, 86 aa, Zea mays
  Coding DNA Sequence Number=SeqID_1682
MKQAPNTLVLAYHRLICVLTGLVTTEDRKEEGVKELYVGPGHDSPQPRATTLGQQQRLTPPHGRVRGHHASKFGLAQDLHVCEPDP

SEQ ID NO: 45058 - protein, 100 aa, Zea mays
  Coding DNA Sequence Number=SeqID_1683
MAMNGGNKARQLSREKLPAHNGRGEKAGMTLHCRRRRGDAARCWTSGMMRSTTINGEIMGAAEQSSRAARLAPGAAGEKAVCVAAGQGCAWAARVLLEAL

SEQ ID NO: 45059 - protein, 57 aa, Zea mays
  Coding DNA Sequence Number=SeqID_1684
MESHDLRAERESLLVGGNENDGFGIDYGNGCPHCNHFSGEDEAVEGDFQEFQDYDEF

SEQ ID NO: 45060 - protein, 307 aa, Zea mays
  Coding DNA Sequence Number=SeqID_1685
MYCRVSGVPARVSDFCALWRAFNASAEPLFPGAPDTVRCTPDSSVNYSGAPLDFPEGDEFDLESPGAPDTVRWKTRCLLILPGDSVADVEDTASETTDAKTCWNMVPTEAISEFFQVMVSGLAWVVSRGCHKTGVHAEVSGMGAESRRERESHPPAARLTVLLNLGLSSPTDLRTLETVLRTAHQAGRLPAVRGVERIVEVTPASSIASDGLSNPSFWLLVDGKVGVVARAAVVAASVVWVSSSSYSRCWGAQWWCRGRLQRKHGGVAPHRLYLLLERERRALLLLLLSSTLLLLVQAGCSLSKWLD

SEQ ID NO: 45061 - protein, 125 aa, Zea mays
  Coding DNA Sequence Number=SeqID_1686
MRSPLFEDGQRGAAALDRVQAVAAPELAEHSDTCGHVVLLPEVELAVAKLVLVVDKRRQRKRLLPVVFVRGFQIELEFIPLTNLCSKWGIIPISSCGFRSKVYGLALCGVKVKQLLLVGQGEALA

SEQ ID NO: 45062 - protein, 198 aa, Zea mays
  Coding DNA Sequence Number=SeqID_1687
MAGKMQGGKGVGKWASTVERSARELDGAGKKASARAQENRGEERDELQRGVAGEGRHGCGGARLLQRWNSPLQEGAEGRREASRGRELGDQREKLLDIGSLERRLPSLSRASAIGDAGNSSRWLLEVEDDGQNCSQGEAPAGKMEARASSAAAQPWERGGAWETAGGRRPWRRSCAPRCSREEGDRKKKKVAARGVGE

SEQ ID NO: 45063 - protein, 221 aa, Zea mays
  Coding DNA Sequence Number=SeqID_1688
MAGKMQGGAPRPEGGTQGLVRAHMGEVEYGGKGVGKWASTVERSARELDGAGKKASARAQENRGEERDELQRGVAGEGRHGCGGARLLQRWNSPLQEGAEGRREASRGRELGDQREKLLDMGSLERRLPSLSRASAIGAAGNRSRWLLEVEDDGQNCSQGEAPAGKMEARASSAAAQPWERGGAWETAGGRRPWRRSCAPRCSREEGDRKKKKVAARGVGE

SEQ ID NO: 45064 - protein, 128 aa, Zea mays
  Coding DNA Sequence Number=SeqID_1689
MAHRGGAHNLAETAPSSGRRNPKSWPRAPSQVHSEAQDCNRIAYGYAGEALRVVQYDGNRMAKMRRLLIPFPSLADLCWYWWHAPSCRCPRNLRTWDEVVHDMKSVVREKHEPVPKPPVEKLRLSGGK

SEQ ID NO: 45065 - protein, 31 aa, Zea mays
  Coding DNA Sequence Number=SeqID_1690
MALTPQPFACSSHRDCRVHRQQQSRRAANCY

SEQ ID NO: 45066 - protein, 267 aa, Zea mays
  Coding DNA Sequence Number=SeqID_1691
MSEGSYTYIILGKDVSRVFEDLRKTKAPNNILVAFKGTRAVSRVPLRGDEDDGFGYDYGNGKWYSFRFERMARLRHNARKSVIPFLPSRLAERPLRRPVAEAPPAPPLGVPATGVAVGGDPDDGGDDSSSSHNTNLSEEQEPEGWVARPINRDAARGCHFHDALDTLLCQALDQRTWSIEYRCVVFQHSRGVYPDCWDASCLVRRPENSLRGAEVYSEHYSISKLDSAEAAMQDATRRALSHYYSALGGVAGGLNLKYYPRRPSGST

SEQ ID NO: 45067 - protein, 82 aa, Zea mays
  Coding DNA Sequence Number=SeqID_1692
MVDGGVTMVGGAGGRVCGRASSTAARRGAWRDDNGQLVESEGVLGEDPEQQLVGEGKCPLTHLCPTHSYNSLPAFTQFIPKD

SEQ ID NO: 45068 - protein, 57 aa, Zea mays
  Coding DNA Sequence Number=SeqID_1693
MESHDLRAERESRLVGGYEIDGFGYDYGAGCQHCNHCSGEDEAVEGDFQEFQDYDEF

SEQ ID NO: 45069 - protein, 78 aa, Zea mays
  Coding DNA Sequence Number=SeqID_1694
MDTNNTPLVDVQGMKERTSKDMVKDLEAWKASKDNRIKVEDQTDVRNLSRQGLALMARSIEQRMVDNQRRSGAAIAGF

SEQ ID NO: 45070 - protein, 29 aa, Zea mays
  Coding DNA Sequence Number=SeqID_1695
MAAAAAQRLLSHHASSSSLSMVQERTVTG

SEQ ID NO: 45071 - protein, 257 aa, Zea mays
  Coding DNA Sequence Number=SeqID_1696
  Pfam annotation: Domain name=zf-CCHC; Domain location=36-53; Score =28.4; E_value=2.7e-05; Accession=PF00098.14; Description=Zinc knuckle
  Subcellular localization annotation: CTP_CleavageSite=50; ConfidenceScore=5.28e-01
MALVSGGGSASNSSPAIRFTRFNSNRMSLRRGGSKDGCYNCGDPDHFVASCPKKGKSEPGPHDHHSSRHKGKYSSGKYKSKGGFDKEALKKKYLQKAKIKDDEETERRVEDKLNGLCFIADTAGGFYTMTLGEDAVGTGDDKYIGDDTTSKVLPFVDDLADGIEELNTALASQDKLLRKDARDRREFRSKYESTLRELESARASFMVSNETECDECALHMSNITTLQTKYSTLLDEHDELRSMSILFLPLSPADTTR

SEQ ID NO: 45072 - protein, 190 aa, Zea mays
  Coding DNA Sequence Number=SeqID_1697
  Homolog annotation: Hit_ID=A2Y911; Match level="QueryCoverage=40%, HitCoverage=67%, E-value=7e-20, Identity=70%"; Hit description =Putative uncharacterized protein
  Pfam annotation: Domain name=Auxin_inducible; Domain location=92-187; Score=89.2; E_value=1.3e-23; Accession=PF02519.5; Description=Auxin responsive protein
  Subcellular localization annotation: CTP_CleavageSite=12; ConfidenceScore=5.55e-01
MRPPPPPPARPPANPAGVTGCPLRITNPTPPTPNPKNLATSLPILTLGGGASGGGRPPSKFKSASVDLPTSVILVAAVDRGSDETAPPDPEDGSREEKRTKASKLQEQGEGEEEATGLPSDVSRGHFAVYVGERRCRFVVPIALLDRPEFRYLLWRAKEEFGFAGAGGTLVLPCEEVAFRSLTSALACTR

SEQ ID NO: 45073 - protein, 245 aa, Zea mays
  Coding DNA Sequence Number=SeqID_1698
MVKKYGEDYDWRGAPTIDAEVVHSLGGKVHGRYSMFTGVIDSTELCSRGGSSSQAGCGSSSRSRRSVSSMEEAMREQQEKFREELRQQQMAFLQQQSEYMAAYNAQAQQAMNSWFPQQAQQQPFVFPQFQPPMPQWGLHAPPPPPQGSGVMGHNTPPPVIPAPGGAYAGERAYAGEDPNPSHDFVNQFLASGAISVAEPPELFQLKCLSPTLKARPHLNRNKMSVPRIWSDKATNRIKYHVLTRR

SEQ ID NO: 45074 - protein, 104 aa, Zea mays
  Coding DNA Sequence Number=SeqID_1699
  Homolog annotation: Hit_ID=A2XFR6; Match level="QueryCoverage=97%, HitCoverage=29%, E-value=3e-15, Identity=43%"; Hit description =Putative uncharacterized protein
MKYRHLPLRIHGENQTSIIPGEANEDRLNTLAGVVVGLNTNLDSATLDLSRVHLELEDAHARIAALEAQLDGRNPLEVQVPAMVLSPPRKTIRYGEPGSITRLL

SEQ ID NO: 45075 - protein, 186 aa, Zea mays
  Coding DNA Sequence Number=SeqID_1700
MTVAGGWEQRSRHQPSSRPIRGQQENPLARREDSAPDRRRFWQEKRATLRLCRNNRAKKGWPPEGFNSRLRSRGPYTHYWSEAGPRRVHSRLRRRARDDQGYVRYITKARAALPSSPETPCSAPIEGNMALSPLLLAERRRRGKDSAACATLTAVPLDRVRLTGSQALPKAPQEAPLRPTQGSDSG

SEQ ID NO: 45076 - protein, 115 aa, Zea mays
  Coding DNA Sequence Number=SeqID_1701
  Gene Ontology: Mol. function=carboxyl- or carbamoyltransferase activity; Cellular component=ornithine carbamoyltransferase complex; Biological process=amino acid metabolic process
  Homolog annotation: Hit_ID=Q8SA97; Match level="QueryCoverage=90%, HitCoverage=21%, E-value=5e-15, Identity=46%"; Hit description =Ornithine carbamoyltransferase
MALPVDVAGLRPRLGDVEAPPKPRSSLSSMAEAESEPLEARAESEPWGQAERSSSSSGAEPESEPWVGRSGVRHLPGLSPSPSPGSGGAEFAVFRDLARVRALGRAERSSPSSGT

SEQ ID NO: 45077 - protein, 85 aa, Zea mays
  Coding DNA Sequence Number=SeqID_1702
MAHEIMKKSEKDIHDSREAVKKGEKAAELERRIAELPPPPEPFDPLADLEIKKAIEIINMAESIIDEVVNKLLNEAAEKVLKEEQ

SEQ ID NO: 45078 - protein, 52 aa, Zea mays
  Coding DNA Sequence Number=SeqID_1703
MSLRVSLSTSLWEFLQRKTCDGGSIRALMGSTSEKMYLCQVITLCAAVDGVK

SEQ ID NO: 45079 - protein, 165 aa, Zea mays
  Coding DNA Sequence Number=SeqID_1704
MSDDLVVPVHFEVGQEFCFCLLDHTLLVLLELELFVSRQEEGGWTLYTTGFRANSANLANKHSTKLGTLNCSAHARTVRPTGADCLDRGPSGLRAGPSAYSIWGSTDTTAMDARKSAGEQGAWVPAERSTRLEKGLGTGRTGGSHGEHSKEEGKGERNAAMDGAR

SEQ ID NO: 45080 - protein, 200 aa, Zea mays
  Coding DNA Sequence Number=SeqID_1705
MRCLGGVGTRIRLKEGVEISGWGESSKGKHIFAKDDMTRDDDAMGDRKEIVSDVRGYENIVEVERSREYRGTYRGDQKSRTISNDDRGRRRGWQAPNLQRNEDHGVMVDGPSHQVAVAGVEATREVQHQGTVRHWLTKIAEGVYQAFHLAAVLLHGEVPLGELVELSVEVKSLSVPIPEELFLESESRLVARVCLVGMMS

SEQ ID NO: 45081 - protein, 100 aa, Zea mays
  Coding DNA Sequence Number=SeqID_1706
MHRAVPIKQPKASAIPPRALSVLPEPKFTGLRLEHAAPPPTKPPEPRPPWLARSSHFQASPVARLASPEAREASQVLGPGKASPETPNHPSRTSVTRRRA

SEQ ID NO: 45082 - protein, 144 aa, Zea mays
  Coding DNA Sequence Number=SeqID_1707
MTKLQKVVPKGEQRKFSAQKSFLRECRAKKIDEDAKVVQKGKVFFAFGSKNTSFVHSKATCIWMKRVNTNVPKLYTGKLKEKLEQPLECASNYQSTAPPSCKQTNGISQPSEMLQLCREKLAGHRRHRARLSLHQAPRLRLQCD

SEQ ID NO: 45083 - protein, 56 aa, Zea mays
  Coding DNA Sequence Number=SeqID_1708
MMLDSSESASSAAAAAAEAGAGAVAGQAQPQRRAVGAVPQAHDGGYASGGWESAGD

SEQ ID NO: 45084 - protein, 86 aa, Zea mays
  Coding DNA Sequence Number=SeqID_1709
  Gene Ontology: Mol. function=sequence-specific DNA binding; Cellular component=nucleus; Biological process=regulation of transcription, DNA-dependent
  Homolog annotation: Hit_ID=P24345; Match level="QueryCoverage=84%, HitCoverage=20%, E-value=5e-15, Identity=58%"; Hit description =Homeotic protein knotted-1
  Pfam annotation: Domain name=KNOX2; Domain location=10-61; Score =73.9; E_value=5.3e-19; Accession=PF03791.4; Description=KNOX2 domain
MEARQRTTLGGLTAEAEPELDQSMEVYPEVLVKFREQLTRSLQEAMKFMQKMELQLSSLSISKRSLRNTLPSGHWQKKCHPTASSC

SEQ ID NO: 45085 - protein, 468 aa, Zea mays
  Coding DNA Sequence Number=SeqID_1710
  Homolog annotation: Hit_ID=O48967; Match level="QueryCoverage=82%, HitCoverage=92%, E-value=1e-100, Identity=51%"; Hit description =Putative uncharacterized protein
SGPATWPEEMIYSKVATVGPDPHGKVPDPWMHSPDFLAGFKTSTGGVPVRSGGRQYARVVAYIVLIITRTLPVKLPLHADTTMMVQIVEHRAETSVDFLMEEEAASSTPQVPNRPMPGIAAAHAAQPHTTTQISRTPSRAAPGALSAARELLHHPPSSTASLGAMKQWRDDVDRLLGMAHSDSTRSRPWSSRRQHEVTASVRSPSVRGAQTNDVRAELNRRRAGEDARVSLERARERRQNIEGRNLDQDFAAVAPQTPSGRSDQGRCPVSWRGLCHARGPSPRGDLATQVPAALAGEVRRYVQPVEILAGVRHRHYGNKWRHRRNGNIFSCCLVWAYPDLAHEPYPRINLLLGRALHEEPGETLWTFISRFTRGVRDEKMLEKLATHDVETVTTLFALADKCARATEGRAWHSAPQTRVAQTSGSGAVSQDGKKKKKKNRGSERPSSAAPVIAPATRGRNERNKRPRP

SEQ ID NO: 45086 - protein, 66 aa, Zea mays
  Coding DNA Sequence Number=SeqID_1711
MARVACTLHGKRLDGGVSVLSVDVNPVWVVQGSLQDMVDGVTWPATLPPGWTVEWDAALAGEDQEE

SEQ ID NO: 45087 - protein, 91 aa, Zea mays
  Coding DNA Sequence Number=SeqID_1712
MALLDPPERLQPEVALNLVRNLFGWGGHHRLPPQDVRGGDAPSRFFFKHLGGRMFTSLVKVDSGLSCGSIPRALNSLGWEASRATAPSLWL

SEQ ID NO: 45088 - protein, 81 aa, Zea mays
  Coding DNA Sequence Number=SeqID_1713
MGLGVCGSLCQGGYEIDGFGYDYGAATPEVGRSSLAPTEPQNTLAGENFTAVDNKLILSQDDETDDMIIEYLLKDPYGDLV

SEQ ID NO: 45089 - protein, 328 aa, Zea mays
  Coding DNA Sequence Number=SeqID_1714
  Subcellular localization annotation: CTP_CleavageSite=48; ConfidenceScore=5.18e-01
MQAACNCTKGTHPFDFDASSMGPRPTRHVTGVPVTTCEKLHRHLRQYRAFSTAEPVPRLEATLRMAQQCQPSTSVTGQSAAGEGATVDMAKSGPAVMAAAGGRKQQSNRLQAHVPSWDSERALSHGVKTTRPCSVPRTARACTTTAPPTTRPIALTLRQGRRHLWQAKRATLHLRYDDRSEKKGKNPTPPRLTSCARKASTKAKSKPIRIVRVHWYGRVCNKNTPTWRKRLQALSGGDPTEDDPTIVYMAGYLHTLDNHYDKLSSHCTHLNSLVESLEQQVKELKQEKASLQESLNIAEGEEGNTREAYRTLKMDCNTPGSTNTSECY

SEQ ID NO: 45090 - protein, 163 aa, Zea mays
  Coding DNA Sequence Number=SeqID_1715
MAHRTVRCTPDMSVTLARINDSATDEQVLILETRGKETQLYNTATVQTSIGGGAAAPSASTPPSAESDPASDGDTVGGSPPRRKTSAPRLGHRRQGLLQKPGPSRRLDQPPRSLSQLSPEDISPAHGLGNPTPALVPPVDDPTRFQPSLLHLLGLGSHLLLGR

SEQ ID NO: 45091 - protein, 161 aa, Zea mays
  Coding DNA Sequence Number=SeqID_1716
  Subcellular localization annotation: CTP_CleavageSite=67; ConfidenceScore=5.15e-01
MTNEQRYMKQIELGRGHSANLYGPSKKENNAARPSPTAVTPARVRTTTAKSSLRRNRKLRLARPWASASEGGLRLARPQGSASISTSEGGLRLARPQGSASISTSEGGLRLARPQGSASTSTSGGIASSPDPGLGLRRSLRLARPWAWTDHATGDTSLPYP

SEQ ID NO: 45092 - protein, 164 aa, Zea mays
  Coding DNA Sequence Number=SeqID_1717
MYKYPYTPHPYGAPLAFFPTNGVPPIYVCARISVDYTLNWGLRDGYVGVGSFAGTVGMGGRYLDKDDGIVVGNMYPWKLSRNFSRKTAHESIENEGNLVYHVRVGPMRAIMNDFVIAFLSPPEEITCSTGAKGSAQTNKKIKVRVQKKGAKETEENLGLAHRTV

SEQ ID NO: 45093 - protein, 18 aa, Zea mays
  Coding DNA Sequence Number=SeqID_1718
MAGQPHGDELVDKSLIQQ

SEQ ID NO: 45094 - protein, 119 aa, Zea mays
  Coding DNA Sequence Number=SeqID_1719
MPPRTRQTARKSTGPIGVPRHQLAPRHENSSSGSNDPIGDLQARVYCNTLHEEVHVLYSQLHPSAPAHPAEAEAGPSHVAGHALGGELDLFEPPPSMRLVDVWTPTPDDEAAKSNGKQD

SEQ ID NO: 45095 - protein, 256 aa, Zea mays
  Coding DNA Sequence Number=SeqID_1720
MVGTSAVTARRQPGSVEHCTIQEMVDGVTWPTTLPPGWTVEWDVAPMNLPTPASGGDTRFSSDFLSRDGFPSILWEVLNSAGYPTRPLYTVQLYVEHRVPRCRVWLTLEAHPLQPGWRSLDSETIGLRTDDTVEAAAMKTLTTLCGYHPLEMVMHPLGLFPAEKKDDPMWCNRVSHVKDVWAMYPDLVGRVTIQCMGALYRFQALQSDAMTHLANIAQTTKLTLDSREDFVVDLSSELVEKDLQVERLSQRMNESS

SEQ ID NO: 45096 - protein, 27 aa, Zea mays
  Coding DNA Sequence Number=SeqID_1721
MASGWAWVARGYPHSGGIAIRLVSTLR

SEQ ID NO: 45097 - protein, 264 aa, Zea mays
  Coding DNA Sequence Number=SeqID_1722
MAEATHKEDVRLNKMQESLDLLFAQIRSMDTSQQQMAAQIDLTAKAMNQSTQDQILLSQQLKATGDAVVRLTMWQMKMDAVSSPVSNRSDAEEENWFASAPTGRPCHPHHRLRPEGRHHHDDQVYQQQSSIPKMSFPRFDGLHPKIWIDKCEEYFRIYNYQVAMLKGKCAFGPVLSILVIKCQHKCLNVNLCPWMNKVQITSKALVAACVRVVALILSLVCVASSLLTPYFFVNLKCKGERLQVVEIPRKRDIEKKSITLWYSS

SEQ ID NO: 45098 - protein, 426 aa, Zea mays
  Coding DNA Sequence Number=SeqID_1723
  Subcellular localization annotation: CTP_CleavageSite=67; ConfidenceScore=5.32e-01
MVIQDGDHQFDGGEKQAGLRPLPCPQLQGSSSSSLGRRAGRVGAYLRVGRRPASSSGARGRGASSSSAEEASSSHAVEGDLLLPGHSATVRPPPGRQPCRAWAGCAQVLPASSAAQHVVRREGGTRVLGRSRSRSRGENESEDLPVRFGAAAARWCGVGGQVTAVVGAEVVAAREGFSADETVGATCGRTSGSSALTDCPRPSCGDVGEDLLTAAFTLRSSLLLFSRPRWRSLSLLVQWSPASHLEFVVPQALRCGGSSYPREWNRSSVCNGTLSMGVCSLWLSRPEHLAGAGGSGVGVDRGGVGSRRGFVGPGAGGFPGRGGAAVAAGAWPGHPRAGPTSESCCRGREPGRGPRGTAGCGYKATSRGVCWGRDPGGDPGYDGPSAVLASSFEVEILPPVSSSEAGPDSAEGGNDAEGAAAPSVDV

SEQ ID NO: 45099 - protein, 329 aa, Zea mays
  Coding DNA Sequence Number=SeqID_1724
  Homolog annotation: Hit_ID=Q6QP51; Match level="QueryCoverage=57%, HitCoverage=89%, E-value=7e-25, Identity=42%"; Hit description =Putative growth-regulating factor 1
MQVTCNRTTGAHPFDFVASSMEAQAHTSCNRRAAAPEHSGFKLITDQGFEGWPLGRLRQPPQSTRAPCPLLIRGSKAGPSEGFDSRPRARRARDDSGYVCYMAEARATLPRSHEGTTRPAKASQKALRPQRSQTTPPRPRGLHPAGVPPTLLYTAGNHHQHKLQRLMGTIKVKASSTQGKRSRLARTQPRAGAEVPDEVTSRPRAFLGSGHTLGTPEAQLGQASSRSNLGQIASPTDPLGATGSFASPDLGPQPQEEVSASPDPRAQPQPRPRKAVSASPDPRARPQPRPRKVVSASPDPRARPPPRASGGIASSPDPGLGLRRSLCLA

SEQ ID NO: 45100 - protein, 317 aa, Zea mays
  Coding DNA Sequence Number=SeqID_1725
  Gene Ontology: Mol. function=ubiquitin-protein ligase activity; Cellular component=ubiquitin ligase complex; Biological process =protein ubiquitination
  Homolog annotation: Hit_ID=A2XI79; Match level="QueryCoverage=48%, HitCoverage=14%, E-value=6e-76, Identity=90%"; Hit description =Putative uncharacterized protein
MVMVYTASRCAGCVVFSLQHGSGGEFLGFIYCEELSFLRGRVERLENSLREANQLKVSSAKDIASKTKTIMDLVAKLSLERERLHVEVVTLAKKNGRWLKSAKKMLASAHCCARMLPQAKVYLGPFNFLTSLIFDIILLSFWSIYGMSPVIETHGDNIYLLDESLNKILELKEIEAEMTNIVEWERRPAQEREERLRVFHQWENIVRFDMRLANEDVGMLAFTSEQIPAPFLLPEMVERVVSMLNYFLLQLSGPQRKSLTVKDPEKYEFKPKQLLKQIATIYVHISRGDKESVFPAAISKDGRAYNDQSSPTENRLL

SEQ ID NO: 45101 - protein, 186 aa, Zea mays
  Coding DNA Sequence Number=SeqID_1726
MGSPATAVSTPGEGPGSPTRHQGPPGRALGARRWGVLGCWAHWEQQPGDDAGRGETAIGAIARSAWRQGVGITGVQEDGWSSDVARPGSRGHRGWAGWEPHAQNHVDRAAQRRRRGGKGSVARGGRGRGVGQGSGAPHRGCVRALCCLRLGASSGGCASRWPHWLCSMASWPRCRAARREEHMGKG

SEQ ID NO: 45102 - protein, 168 aa, Zea mays
  Coding DNA Sequence Number=SeqID_1727
  Gene Ontology: Mol. function=2 iron, 2 sulfur cluster binding; Biological process=electron transport
  Homolog annotation: Hit_ID=Q10F16; Match level="QueryCoverage=27%, HitCoverage=37%, E-value=1e-15, Identity=65%"; Hit description =Ferredoxin family protein, expressed
MVEGKSGWVRIDVTLIPGCQAPRRPTSLDRGYAVRSRALDLHRCCTSCAVRIKSGQIRQPEALGISAELKDKVYWLQFGRYFARGPVVAPFPPFLVRLSLISLVPEVLRESFNVVYCSDAVMKKVSGMQSADSTEAIAVMHMPNHFRDLRSHEDGMLLMGCSVVQRGF

SEQ ID NO: 45103 - protein, 121 aa, Zea mays
  Coding DNA Sequence Number=SeqID_1728
  Subcellular localization annotation: CTP_CleavageSite=71; ConfidenceScore=5.21e-01
MGTGFLMGIDIFHGYGFGTVKPSGFVTVAISSPVHSRRAGRRPGGLLAFPATYASHPHLPQPPPHQLHGVRASLSGSARVPGAQAATEDPGDCICCHSSPDHGDSAVTMRSCQQLPAEDAQ

SEQ ID NO: 45104 - protein, 152 aa, Zea mays
  Coding DNA Sequence Number=SeqID_1729
  Gene Ontology: Mol. function=2 iron, 2 sulfur cluster binding; Biological process=electron transport
  Homolog annotation: Hit_ID=Q10F16; Match level="QueryCoverage=31%, HitCoverage=26%, E-value=1e-17, Identity=83%"; Hit description =Ferredoxin family protein, expressed
  Subcellular localization annotation: CTP_CleavageSite=49; ConfidenceScore=5.35e-01
MTCPAATATATTARIGARRGPCLWRSERRASFLVRSTSLLPDRPARDTRARAASELQQAPRPASATVPAHKVTVHDRQRGVIHEFVVPEDQYILHTAEAQDIRLPFACRHVTMKIYVKVSVKRLDAQRRWTAATQFVVALQTFTVRDSSPVA

SEQ ID NO: 45105 - protein, 81 aa, Zea mays
  Coding DNA Sequence Number=SeqID_1730
MGMGTGVNPYPPVYMGDPVGLFLCRGYGYGVVIPDGYLPIAISSSVSAAFVYCGPAAEWDRLDKVALIARPRPRPGLGPAQ

SEQ ID NO: 45106 - protein, 287 aa, Zea mays
  Coding DNA Sequence Number=SeqID_1731
  Subcellular localization annotation: CTP_CleavageSite=30; ConfidenceScore=5.33e-01
MSSLSLHASHPSTFRAPGWGALVSLSSYCRWRNATSRKLGGGRTEPKLYLPRGFVGHLLPQHSGERKLTGLAGGSDFDNAGLVGGERRQLQRVGLVGSAGSGSVPGAPSRRESGCRAARTGGPPKTSRAARAVFVFLGRPAFAPVRRLCVEVGAARSGGSEWGSVGGQMASVVGAEVVAAEEVLVADGITATIWAPGLRLFGFDSLSSPLEWGRGRGARCSSVRPEAIAAAVWPPGAEVVVAAARAGGGEPPRVSSPRRPSNVGVVRTCGGGTGVPKRELGLHLFPK

SEQ ID NO: 45107 - protein, 163 aa, Zea mays
  Coding DNA Sequence Number=SeqID_1732
  Homolog annotation: Hit_ID=A2XKS1; Match level="QueryCoverage=80%, HitCoverage=61%, E-value=6e-36, Identity=62%"; Hit description =Putative uncharacterized protein
  Subcellular localization annotation: CTP_CleavageSite=73; ConfidenceScore=5.47e-01
MASLQSQSLLGIGSSSIVLARARVQQCLAAASRSHAPLLQANGGRTGLPSSSILNAGNAISFSRRRRKDLRVVAEAAAAGPTKVTPASSGGVSISDVLWPSAGAFLAMAVLGKMDQVVAFKGVSLTIPPLGAVCCVLFSAPDSPAAKNYLDHDPLPPLSVTKN

SEQ ID NO: 45108 - protein, 115 aa, Zea mays
  Coding DNA Sequence Number=SeqID_1733
MALPVDVAGLRPRLGDVEAPPKPRSSLSSMAEAESEPPEARAESEPWGRAKRSSSSSGAEPESEPWVGRSGVRRLLGLSPSPSPGSGGAEFAVFRDLARVRALGRAEQSSSSSGT

SEQ ID NO: 45109 - protein, 198 aa, Zea mays
  Coding DNA Sequence Number=SeqID_1734
MARLPKAGNEANEKPKEDFLEGQNNSKCPCTLQKRQRKADGPSSPTGPETEQSANGGCEAETVRATMIPKVEEGSEFLTINASGIVNMETHSHRRNRKSKNPVSKLKHLKARREPAKGRLEEVTNRIRVQLEDASAKRNHQPERRPKTGASRTNRRSQIEPEGILEGQPWPKVQESEVHARRNEKTRGREREERRDLS

SEQ ID NO: 45110 - protein, 115 aa, Zea mays
  Coding DNA Sequence Number=SeqID_1735
MALPVDVAGLRPRLGDVEAPPKPRSSLSSMAEAESEPPEARAESEPWGRAKRSSSSSGAEPESEPWVGRSGVRRLLGLSPSPSPGSGGAEFAVFRDLARVRALGRAERSSPSSGT

SEQ ID NO: 45111 - protein, 294 aa, Zea mays
  Coding DNA Sequence Number=SeqID_1736
MGDTRRLFASSLEERNSVGVGTFQPSFGFKDFHHAARLHPSTGVTQDGDLQLDGGGKRARLRPLPLPQPQGFSSPGLGRGGRAVIVHGTGSCTVPGSRTRVASEPLAAPASATAAGRGSSAGEIAKAGHGPTSNSTAFCPSLPHEFGHGRGPPGSSIRPEVSAAAVRPPGAEVVVVAAARAGDGVPFVGLLLLCRPSPMEWGYSPVDYLNRFTKHESPRVKVTSESLAGLSVSGTDAGVDQPRPRVELAPLEDGLRTASPSEARSDLAEVVVDAEGAAAPFQRQDPSLQDQIVL

SEQ ID NO: 45112 - protein, 420 aa, Zea mays
  Coding DNA Sequence Number=SeqID_1737
  Subcellular localization annotation: CTP_CleavageSite=69; ConfidenceScore=5.61e-01
MQASCNRAKWTRFSDSQRAQPQGPGPRVMQPARRMLRASNCIATCATTAPLRLRNQYHDSRRPSTRPSSASLAQRSMRPKQENPLSRREDNAPVIRSSNGSRTRGDRPANHSPRRINSAAGQAALLGPGKGDTPKRILPREGTGLRASLLIRGSKAGPPRGSTAASDRVGPTPTTGQRLAPEGFTAASDAERGMIRGDRVRQITRRYFWACLWAPSRPLTNGARTSTRITRLQLTGDTMFGAIEGNMALSPLLLAERRRRGVCKKAESVPDRPLALCGGSGAALAKPGSGRTVDSVNIPARELGPRPYTRATASSHEGTTRPSEALRKALRPRRSETTPPRPRGLHPAGALARTHRNKMQPRKAGPLAKKCDESLQASANTPFEARGLLSGTIIRGTLKTPNSQLVTPISIKLQRPDGCD

SEQ ID NO: 45113 - protein, 31 aa, Zea mays
  Coding DNA Sequence Number=SeqID_1738
MARYINTKDQLADLLTKPLGRIKFFKFCSSV

SEQ ID NO: 45114 - protein, 159 aa, Zea mays
  Coding DNA Sequence Number=SeqID_1739
MAPDAAALLDAAVVAARARTTGLLHTTVAASPHAPDVATVEATTAASARGQPPPFPPPSRAPPTHGAPGYSGLGLPGYPTHTGNIAANLESDALPQPVYPYSRSAPVSRLSTSPPLARQSPTPRWSLPSPPSRPSWPPRRSVSVPHPSPWSKNVPWASR

SEQ ID NO: 45115 - protein, 255 aa, Zea mays
  Coding DNA Sequence Number=SeqID_1740
MRTLWHSNRPLNHGRSDLPRVRRKLASGGALRARPCGNPRAPAAARYHARATAIKPAPVLGCLPRYLLRTSPDSPEPAINSGDLPATRQCRPRATTVASPSPVLLHSIQALRELPGTRVTGIAQSCSPEFKNPPARVDREPPTTPAACARGQGSSDHLRHRPAHRRDRRDLPDVTDHPAGALLPPQIALLTRPETRSPIPVMVGTSAVIARRPVGVSEALYAKAEMVAGVTWPSTLPPGWAVEWDPASAEEEHEE

SEQ ID NO: 45116 - protein, 627 aa, Zea mays
  Coding DNA Sequence Number=SeqID_1741
  Homolog annotation: Hit_ID=Q6J9V9; Match level="QueryCoverage=23%, HitCoverage=42%, E-value=2e-09, Identity=37%"; Hit description =Putative uncharacterized protein
  Subcellular localization annotation: CTP_CleavageSite=60; ConfidenceScore=5.31e-01
MAAIQGGCPLFKGDSPHLRPQPSRTESSTNTLQGPPHMTRGLGPTRHASWPRTEGAKPPRAERVTAQRLQALLHFHPDQRVKGRTAMQAACNRTKGVHPFDFDASSMEAQAHMSWTGKGDTPKGILLREGSGPRALLLIRGSKAGPSEGIDSRLRALELCAHYWSEVRRLAPRKGSIAASGHSGSTPTTDQGFVGWPPKGSTAASEHAEQGMTLGTSDTWPRLGLRSRGTLGHFRDQQERFCNGIPSEGGIEPSDPIKWDRLVTAISIKLQRPDGRDSGQGSVHSRDTISPRPSPASGRNSRPRQIHASPEGLLKQRAHFRLARGPARAGFAEKQPWPDRHANRPYRRSIQCKDRLTPYPDARSSVDKAEEAPPRPTPGLNPRLGLGRRSSPRPTLGLGLNLDRGRWSLPRPTPGLGLNLDLGRWSPPRPTLGSRLNLDLGRRSPPRLTPGLRLNLDLGRRSPPRSTLGLGLNLDLERRSPPRPTPGLGLNLDLGRWSLPRPTLGLGLNLDLGRRSPPRPTPGLGLNLDLGRRTPPRPTPGLGLHLDLGRWSPPRPTPGLGLSLDLGRRTPPRLTLGLGLNLDSRRWSPPRSTPGLGLSLDLGGVTALPDLGLGPTTSQGGPSVPYP

SEQ ID NO: 45117 - protein, 264 aa, Zea mays
  Coding DNA Sequence Number=SeqID_1742
  Subcellular localization annotation: CTP_CleavageSite=50; ConfidenceScore=5.04e-01
MTLFNSLFSKNCMAWSPGSIFGVFSTTFHIITVAITSIFRQAFQNLPDIFENAEKVLSKPKLKNLKPKQCVENWRVPLVNDYCYSSKGKHLRTRPQQRQCRAFSTAEPVQRFEVAPRMNQQCQLSATITGQSAAGIGATVIWPISGAGSNCSNRRAEAVGPITYRARILSRSGRGSPLPRHKDDAPVFRSSNDSCTRNRRPPRIAHPIALTPWQGKRHLRQAKRAPFRLRHDDRVKKGTGKGDISKRILLREGNGPRALLLIRG

SEQ ID NO: 45118 - protein, 215 aa, Zea mays
  Coding DNA Sequence Number=SeqID_1743
  Homolog annotation: Hit_ID=Q5NKQ2; Match level="QueryCoverage=25%, HitCoverage=6%, E-value=7e-12, Identity=67%"; Hit description =Putative uncharacterized protein 9C20.3a
MVVKQYELADTFAEMIDDAHRAESVDTDNEAEAPQPAKPSDTSHHLSSDPDPGSGFDPIEEWFVDFDSAMSNHLLVSGIGDLAVREDILEEAVAMKMAATPLASADTEMNATVSVEVESEGGKEGQEALAAPADDEMMNTMVSVEVEAQGGKEDQESSDEESESESSEDDDELSSSEDEKEQGVNKDEESSEASSSKEEGRELRRHGGKADNPPT

SEQ ID NO: 45119 - protein, 310 aa, Zea mays
  Coding DNA Sequence Number=SeqID_1744
MESGSKKVAAGVLVLLLLQLMVAPTTATARLLQADTSPVFGLDFIAREFGHPDGAISCAPVSTVILRHLFLKSPYVSSKSTRFPVARVLETLNLLPHHPRVTCAPSLEPTAEPAAAQAARPRALGAAQSVSLHLPPSAHPRIYRHPRITASAAIRTTILLSNDVSHVLRISAPHPVCPPSSIPPPSLFLMWYPSSVVDVLPRSHRVIEANLFHLPSVNADDGGVGMQEEAPNPLPVEVSIGEERPRCVVSTNLSDDLLLENRAHVVAGWVSLAAANFTLGGDPLDQTSGDSAWLYNSKDVVDGTGRKAKQ

SEQ ID NO: 45120 - protein, 96 aa, Zea mays
  Coding DNA Sequence Number=SeqID_1745
MAKMFQYIQSLGAAQGFAPPPSLFPTVDPAEFHTPGIEKTNKKGYTGHFVECNTRQRGALPSVKAIALGKEGTPGHWESFFAECYGPGTRQRSKLC

SEQ ID NO: 45121 - protein, 196 aa, Zea mays
  Coding DNA Sequence Number=SeqID_1746
MGCTCVALFLLLLEGRNLVGVGALQSSLGFKDFYHAARLQSPPAVTQDDDCRPRGGEERAGPWPPPCPQLQGCSSSELGRRARRVGSRLCLGSGPLLPSMFGGEGRSPSVALSAVACLAPRPERLWCCFRCRLLPLGRSVAARLPHRCRLRRVRAGQIWRTGQSGAHRTVRCFLPTVGQTTCRAQIPRPTVGSADR

SEQ ID NO: 45122 - protein, 106 aa, Zea mays
  Coding DNA Sequence Number=SeqID_1747
  Homolog annotation: Hit_ID=Q8W0Y1; Match level="QueryCoverage=25%, HitCoverage=3%, E-value=3e-07, Identity=85%"; Hit description =Putative transposase
MEVDIEMVVDEEDDDVQNQNDLVIFEGNDINDELAPSDGVDYQMVDSDDESYGCWKKMVGRWPRTRRGRRSTRRTVLDAWMVVENAGGHGRNPNGILDLLCREHFH

SEQ ID NO: 45123 - protein, 24 aa, Zea mays
  Coding DNA Sequence Number=SeqID_1748
MKHLRTSPQQGPCKDVGAIQSRDV

SEQ ID NO: 45124 - protein, 185 aa, Zea mays
  Coding DNA Sequence Number=SeqID_1749
WKAPGLLGHPTAQKRKAFLTFYEVARFAWGFARSPNINKNTPTWRKRLQALSGGDPTEDDPTIVYMAGYLHTLDNHYDDLSSHCTHLNSRVESLEQQVKELKQEKASLQECLDIVEGEEANTREAYRTLKMDYDKKLKKLAPKKKIQKKTTNRGCQTEKKKKTPPAPPSPRIDDWSDAEDISTNL

SEQ ID NO: 45125 - protein, 307 aa, Zea mays
  Coding DNA Sequence Number=SeqID_1750
  Subcellular localization annotation: CTP_CleavageSite=91; ConfidenceScore=5.11e-01
MTLTSPSTRGNAPSPPPPAVGVVEVLQVLLVVGEVAEHTFASARSSSGVRGGWSGGVDFFTRPLLPTFVGLLVRVASQCRGCRLCSSDEVLSSFVGGDVEVGFLEQLLGGSRRLLQYGSDEGRVIRSPVEVLDHCRFCDLRDTISHGLKSLEVSQLLQCILPEDDRQVCGHHIFGCPSSSGGGGVDGQPASRILLRLVLVDVGDFEVRGPLNGPEVWSERRYSTRVLLSSMMMSVPGRGVVVVVPRLSPGRGTNRSCCRLGSGGLTPRRDSVVPVIFFSAPNLILVSSFARGVDGAPCVSPTVDGVS

SEQ ID NO: 45126 - protein, 155 aa, Zea mays
  Coding DNA Sequence Number=SeqID_1751
MGKNKKGGSSSHHSDDKRKHEPSPPSEDFGDSEYSEEEFSSESEGAPIYASPPGITAEVWTYIRAIERFRLEGSDESEVSSDEENSSDWSEEESDGDGDDKGNGGDGGDGGDDCDDDGKGDRGNSGKGVGNDGKGDGNGRGGGSSSKASGKASLV

SEQ ID NO: 45127 - protein, 121 aa, Zea mays
  Coding DNA Sequence Number=SeqID_1752
MARLAVLTGLETKVGSETTDQAKDGGKKSFEVLNAREKVKEARNPKPWVKKKTCKVKVDRVKKSYETTDQAKDGGKKSFEVLSAREKVKETRNPKPGVKKKTCKVKVDQVKKSYGASRITT

SEQ ID NO: 45128 - protein, 158 aa, Zea mays
  Coding DNA Sequence Number=SeqID_1753
  Homolog annotation: Hit_ID=Q8SA86; Match level="QueryCoverage=58%, HitCoverage=7%, E-value=7e-07, Identity=44%"; Hit description =Putative retrotransposon protein
MDALNFEYLDYERFDEGAGGVKSKRVVSILSRQAARSIKEDEKALKKVKTAPEPKATISMKRKLDQIPYTEPKVDEEAEKTPPSPSAAEVVEILKSMLLSKALKMQQDTKDIRNKVIIKGLEDKIKLEASLKEKDIMLQSAKGSLVEARSQNNKLSED

SEQ ID NO: 45129 - protein, 114 aa, Zea mays
  Coding DNA Sequence Number=SeqID_1754
MDGGAMAPGSLYWPDNATTGAQAANFGEAIWTGREASGYSGQHLVSSTVKIFSPRGVIRAPTGTNRISDANPSAGVAGGKGKILVELEIYSSKVDFKTLNFRTQPPSVHGLFCN

SEQ ID NO: 45130 - protein, 85 aa, Zea mays
  Coding DNA Sequence Number=SeqID_1755
MSCFRLELVLLDCSAGLLGQGDEVPADSASGTDLLLTDCSGDSTGGAKDTAFGIADAEGALVLPKLLRCWNVGKVMASGLAWVAR

SEQ ID NO: 45131 - protein, 34 aa, Zea mays
  Coding DNA Sequence Number=SeqID_1756
MAELRLRKNHSGERGLLNQGGNGHTEGCPEKLTA

SEQ ID NO: 45132 - protein, 159 aa, Zea mays
  Coding DNA Sequence Number=SeqID_1757
MDRSRGRKGEDCRAPWEEEVDELLLAVEQGRGAAAGRPWSRKVEVGQRWKKDAEHRGFGRPGCWPSREEHGKAPWEKLELAAMGESFCAPRKMERPAAGMPSAGSRGPARGERPAPWEEIDGMGAWSSAPCLLPCHEQRGGRRGGEECWWRLGKNEGWE

SEQ ID NO: 45133 - protein, 1034 aa, Zea mays
  Coding DNA Sequence Number=SeqID_1758
  Pfam annotation: Domain name=MAP7; Domain location=539-694; Score= -84.5; E_value=0.1; Accession=PF05672.2; Description=MAP7 (E-MAP-115) family
MPSSSSSATDTPPAGASSEETLSNVAEEELCTCDTVEFGVARMSLVHVQDMQQLGYFGGGVARVPGAEEVPEPEGELVVFEAFFAAGLRLPAHRFVGEVLRKFEVQKRKIGNKIAQFGSCTFTPKTGKTSMEVVELVPCARNKWGNWWEFWFYVADGTVEDHPGLPVAIMCSHYYSAYPQFEVAEEDGDEGAFRCATRMSSGRDLVEEFVGYGVWPLARGWALGEVCPHQMPSRGGKLVRSPAFTLDLHGRDPAAFVREAEDGAVRIVGRYVPRMEAQRSWDIRGSNDRMNRVFELNCLPYGGYPGQDVVDHRGKKPVVETEDDPAPKAAPSTKKRKLGTAMGELGVSDSFAMKLMGTCAAPGGRMSLPELRESSTLMLEVTGGRWPKNVPIPRAAGEDFFMSRMVRDLRVFPYGQNIAAVVSAVMNKDRQEAAQKCRAVIRLPEARPKRARGTAKATVLGGSQPMLPAKSAAPGSGKVPESVKAAGAGETKSTPDGAAKVQELPSPGKRVPDYGTNISVDDYLVGSGEGQLAVVSPVVATMAADFADRVASGALTADVSAEVERLRAQHADAVREKSAADSKCRKLAEKVAALEGERMDLRRQLAEERREANQAIAKAQAAQAEANLARVEGSLANQHAEEWEARYNALQARMERVEASTCSEVERTRKQLVDSYRELGARTADFEVPDQEAGLRFLEWLQEELLALPTIVEGLMSFASLVTCEGAMNALSREGCSHYEVFDRSDEDFGREIFKVEDPVVKDSAGALFDRMWGPHGREVVRERSDRARDQAARAEDVEDFGPLNSVRPEAEANPVVAEAEVDPAPPPETGEGSLAAPAATVSGGGSSPTAVPRVEDPPKAATEPVAEDPMAAAGSSQVQDFGPAHATTTANFVAASTVDAGNESDESASKFYDFGDSRSSIEWTEESSDEDLDYFAALDVDAAEASPRVADAEVVPGPSAGRRRRRAVAKRRVGEVDGGRLRVGRAGKQELLSSPAGASVGEGELRSLFEGEELRIMLFNYREMGIIPKVEPM

SEQ ID NO: 45134 - protein, 196 aa, Zea mays
  Coding DNA Sequence Number=SeqID_1759
  Homolog annotation: Hit_ID=Q8SA97; Match level="QueryCoverage=29%, HitCoverage=8%, E-value=4e-07, Identity=50%"; Hit description =Ornithine carbamoyltransferase
MAQGRARRRLLLRPRPGSGEDAIPPEVEVEAEPWGRARRRPPSEVEVEAEPWGQARRRPPSEAEAGAEPWGRARQRPPPEAEAQGRARRRPPTEVEVKAEPWGRARRRPPSEAEAGAEPWGRARPRPPPEAEAQGRARRSFLLRLRRDSAVVSLTLAGGTAVGEGRAALFSCQVDQWKGEETAVTSTLPTEARVSG

SEQ ID NO: 45135 - protein, 678 aa, Zea mays
  Coding DNA Sequence Number=SeqID_1760
  Homolog annotation: Hit_ID=A2WQE8; Match level="QueryCoverage=47%, HitCoverage=85%, E-value=2e-75, Identity=46%"; Hit description =Putative uncharacterized protein
  Pfam annotation: Domain name=Transposase_24; Domain location=371-506; Score=-24.4; E_value=0.078; Accession=PF03004.5; Description=Plant transposase (PttaEnSpm family)
MTTQGGLQPTSNEANMCTNDNGSQLGTRIVDEIMAGKNVFFDLPDKLTGEIWTLKFHCIGAQPGKEIVTVNIDKAYVAFYNVVYIKSKLGYSGRDFLFYKKRCGIDRSRLLALDYIHQEEAMLSDNMDERKISFVLTKDPPSDLEVSITPIKRPRQRTNVDEETIEVSIDAYKEWLAILQHDNPETVLYERQSNDDLILSDEEIHGSSKPTTNWPSHARRHRKRDPDVIGIYVDNDGVFKKEGRGTLKGIAAATKRIKNGDHKLKIEFSSKLGGPVGPNARTFVDEIVLFTKKKAPLIGVKKWKDIELNVRSSIASDVLRRWEFLTNEDAHEKIWSIAKERYKGWRSTLSSTYKAYNSYAERMKNKPEDVDIVEWHYMVLYFGSEKFQKISSRNSENRQKQRTKHIMGSRTFSQISFQQRDPETGIEPTDLSLWMITHCKNDEWSEEASRGIYENAAEKIAEKIYQTEKFYLTREEENAIFQTTFKETTGCKANRLHGHGYLSRYPTRSQVMESKFLEQARATVATNQKNIELESQVQLLNEKLACEVAERERILQEKMQALQEEEEKKRQVLREEMRQEMVAALAVVAQQSNRESTTPIDPSSVVPTKPPEFIPADSPAPAPSSANNVRTPDTNNKKDNMPANYISSYTLRNAVTRRVQARGNKRSECVWNANVLVL

SEQ ID NO: 45136 - protein, 155 aa, Zea mays
  Coding DNA Sequence Number=SeqID_1761
MQRLLLRPRPGSGEDTIPPEVEVEAEPWGRVRRRPPSEVEVEAEPWGRARRRPPSEAEAGAEPWGRARRRPPPEAEAQGRARRRPPSEVEVEAEPWGRARQRPPSEVEVEAEPWGRARRRPPSEAEAGAEPWGRARRSFLLRLRRDSAVEKLIRT

SEQ ID NO: 45137 - protein, 59 aa, Zea mays
  Coding DNA Sequence Number=SeqID_1762
  Subcellular localization annotation: CTP_CleavageSite=40; ConfidenceScore=5.29e-01
MAAFRHTSPLLSSPGKPLSLRVSRMAACVLVIVTRKPMPQVSYAADQIPTAPTKSVITC

SEQ ID NO: 45138 - protein, 258 aa, Zea mays
  Coding DNA Sequence Number=SeqID_1763
MKIPGPQGVITIYGDQQVAHNNERYFVPGQCNVHCLTTDNEDPISCDGTSQGIRPTYRCPCPKDLRQSCRNNRTQPFHHLQQHGFGNPEYGVYFRKSYPSKEKRLSRICWLLGIKVGRGGGSSEVGVESVFRGRGRVRTPGRARRRPSSGVEAESEPWGRARRSSSSSGAEAESEPWGRARRSSSSSGAEAESEPWGRVRRSFLWRPRPDLVAVSLTLSSGTTVGAMQAAVSSCQAGQWSDEVTAVTSALSTGGRASG

SEQ ID NO: 45139 - protein, 312 aa, Zea mays
  Coding DNA Sequence Number=SeqID_1764
  Subcellular localization annotation: CTP_CleavageSite=4; ConfidenceScore=5.62e-01
MQAACNRTKGRTLSTSTRPAWRPRPTRHVTGAPVTTCKKLHRHSRHYRASSTAEPVPRLEATLRMTQRCQPSTSATGQSAAGEGATADTARNGPAVMAVAGGQVDRRHLWRAKQATLHLRHNDRVKKGTGKGDTPKGILLREGSGPRAPLLIRGSKAGPSEGFNSRLRALGLRAHYWSEVRRPAPRKGSTAASGHSGSAPTTDQGFVGWPPKGSTAASDAERGMTLAQSCKGLMGAIKSRLGPLKGHDLASPEPSLGQGQPTPEDSRLARGPPQATDTPFGSPEAQSSPRSNLGQIATPTDRIAEAFNARMA

SEQ ID NO: 45140 - protein, 270 aa, Zea mays
  Coding DNA Sequence Number=SeqID_1765
  Gene Ontology: Mol. function=endonuclease activity; Cellular component=cytoplasm; Biological process=RNA-dependent DNA replication
  Homolog annotation: Hit_ID=Q2HUP4; Match level="QueryCoverage=64%, HitCoverage=59%, E-value=1e-49, Identity=51%"; Hit description =Endonuclease/exonuclease/phosphatase
  Pfam annotation: Domain name=Exo_endo_phos; Domain location=77-270; Score=27.9; E_value=3.1e-05; Accession=PF03372.14; Description =EndonucleaseExonucleasephosphatase family
MPSVKEKSCPNFETVSHRFPLHVQVQMLFSEVGQTLMVCTNNKCMALKKLLLAKKIGSLHLPRRVRRVRKLVEPTRVRVGSWNVGSLTGKLREIVDVAVRRRVNILCVQETKWKGQKAKEVEGTGFKLWYTGTATNKNGVGVLIDKSLKDGVVDVKRVGDRIILVKLVIGDLVLNVISAYAPQVGLNENSKREFWEGLEDMVSSVPVGEKLFIGGDLNGHVGTSSTSFEGVHGGFGFGTRNQEGEEILNFALAYDMFIANTFFKKRQSHL

SEQ ID NO: 45141 - protein, 281 aa, Zea mays
  Coding DNA Sequence Number=SeqID_1766
  Gene Ontology: Mol. function=protein serine/threonine kinase activity; Biological process=protein amino acid phosphorylation
  Homolog annotation: Hit_ID=A0MF95; Match level="QueryCoverage=77%, HitCoverage=66%, E-value=2e-31, Identity=37%"; Hit description =Putative uncharacterized protein
  Pfam annotation: Domain name=DUF579; Domain location=25-273; Score =170.9; E_value=3.4e-48; Accession=PF04669.4; Description=Protein of unknown function (DUF579)
  Subcellular localization annotation: CTP_CleavageSite=55; ConfidenceScore=5.59e-01
MLPPKQLLTIVIIIFSTLSFIKLLLLTSSSSSSAGFTSRSSPAWDADGGGNGTARSALASKELALLRSVIAARAPCRLLVFGLSPQLLALAKLNFGAGAGAATAFVTDSADDADAARRALLSDRGAGSTAAAAVHQTRYRDAAAEAWPLLRRARGSPACRRPTGTVRKSGCPLALTSLPREVLDARWDVVVVDGPSGAAPEEPGRMGTIYTAAALARAMAGGEAVDVAVHDVDRTVERWYAWEYLCEDNLVAAKGRLWHFRIAAGAGPTDAFCSIGPVHIL

SEQ ID NO: 45142 - protein, 200 aa, Zea mays
  Coding DNA Sequence Number=SeqID_1767
MTPTIVIGKITAFEISWKMGQEEGPTSSKPYALACDEHKRLKAKKKALSSSSSIEEEEEEDENDEEENDQASTSSSKDKKTVRRVEKKGHFRDNYPNMVEPTKRRSKGKTLTSVKTWDDSSSEDDPLRTHSHRSSSRSSRSSLRWLVARGNTSIPSSSDDSDNECDGEGKPSVDELVHVVKFFEDVCRKQEDLKMVIDVF

SEQ ID NO: 45143 - protein, 34 aa, Zea mays
  Coding DNA Sequence Number=SeqID_1768
MARVACTLYGKRLEGYNFVLLWMVLSAGGLGLLI

SEQ ID NO: 45144 - protein, 424 aa, Zea mays
  Coding DNA Sequence Number=SeqID_1769
  Gene Ontology: Mol. function=protein serine/threonine kinase activity; Cellular component=barrier septum; Biological process =protein amino acid phosphorylation
  Homolog annotation: Hit_ID=A2Z3U9; Match level="QueryCoverage=93%, HitCoverage=94%, E-value=0.0, Identity=86%"; Hit description =Putative uncharacterized protein
  Pfam annotation: Domain name=Pkinase; Domain location=47-423; Score =164.5; E_value=2.9e-46; Accession=PF00069.16; Description=Protein kinase domain
  Pfam annotation: Domain name=Pkinase_Tyr; Domain location=47-423; Score=-83.6; E_value=2.7e-07; Accession=PF07714.8; Description =Protein tyrosine kinase
  Pfam module annotation: Pfam domain module=Pkinase::Pkinase_Tyr; Domain location=47-423::47-423
MASLFGNGGYIYSSGSEGEDEDEGTEGYRKGGYHAARPGDRFAGGRFVAQRKIGWGNFSTVWLAYDTLHSRFVALKIQKSARDYAHAALHEIELLSAVAKGDPTNSKCVLRLLDHFKHAGPNGQHVCLVTEFLGDSLLRLIRYNRNKGIGLSRVKEICRSVMVGLDYLHSELGIIHTDLKPENVLLESTINPAKDPVRSGFTPILDRPVGNQYGGTVISFSEKMLKMRARRAVAKISQRRVSLGGVGAELEKERCLDGISLKCKIVDFGNACWADQQHAGEIQTRQYRAPEVIIGSGYSYSADIWSFACIAFELATGDLLFAPMNRQGCSEDEDHLALMMETLGKMPRKIASSGTRSKDYFDRYGDLKRVRRLKFWPLDRVLVERYSFSEPDAKGFADFLRPMLDFAPEDRPSAAQCLKHSWLN

SEQ ID NO: 45145 - protein, 320 aa, Zea mays
  Coding DNA Sequence Number=SeqID_1770
LQLSPISRSGERYTLPFLVALFSLTPHAGDDCSRPLASFARTEPTAEDNGNFPLHLASPRIVRGREILRGDAAADLPSGCGVGPGPAQLRRRRTRLRLHAVPFATEDKAGSNPLRTSPFVMASSQEDKMKALMKVLVDCTEDATKSLGGLVDHALDHMHDEEILARTLFAIKDKLELLQQDALEAKVQAFPKLAKYDWDDISVDPPSPSPPPTVTDPSVDEEEFYCPDFPSGTVTECAAGVPDAPRVVTASARWRYGKGPAVLQNLGVSSCQRSGWRRGRVIHRRRERDRRWRGGAELAAGFAWAGRNRTACRRVIRVRA

SEQ ID NO: 45146 - protein, 122 aa, Zea mays
  Coding DNA Sequence Number=SeqID_1771
  Homolog annotation: Hit_ID=A2XER1; Match level="QueryCoverage=92%, HitCoverage=15%, E-value=5e-20, Identity=45%"; Hit description =Putative uncharacterized protein
MAMINRLQEEMAAMQMKTLQYQQMEEQSEYNQEVKVHHYEDKERRRIASFKANGVSPSGSGTFVSSSGEDSDGHSDDYYELSDSPDGGNVRSSSDAALSSMRDQDDTKHLEALHTGRRLRVA

SEQ ID NO: 45147 - protein, 281 aa, Zea mays
  Coding DNA Sequence Number=SeqID_1772
  Homolog annotation: Hit_ID=O40947; Match level="QueryCoverage=59%, HitCoverage=18%, E-value=6e-10, Identity=23%"; Hit description=ORF 73
MAAAMSSSTPPATAEDAGGAPSSIPPPILEELEVILERQLQTSAGLEAAPTPLPRVLSRAHQALWETEAAILREWEALENEHQRLCDWRTQLEERTKAASCQFASERSKLDQEREDLKEDLGKVFDQEREVTRKEKGLVKKAEHLDQREAVITEFHEKLKAYNAMLEKQRDEQTATEAALQKLRQELDDRASNILLAEENLKAKDASLEERATDLVWQEKDLAWREEMRERREKLLAEHELEVEEKEKKLEEKERALEERVHRFQATQAAQAAPGSQEMED

SEQ ID NO: 45148 - protein, 187 aa, Zea mays
  Coding DNA Sequence Number=SeqID_1773
  Subcellular localization annotation: CTP_CleavageSite=44; ConfidenceScore=5.30e-01
MAPRILCDDGGSQPPYGSKRTSARTQPLRQLSLRQAPSLLRRPRHHTSWVPKSLRLPHRHGPLREGWPRGDEDETGALLGPLASLSRVDACNPLLQAHPTWARDEHEGRGIPTSLTLVSGLLASPPFTLALSLDPSGLGHTATLTRRPKGPPGSLEDMVAGVTWSSILPPGWTVEWDPTSAEEEHEE

SEQ ID NO: 45149 - protein, 123 aa, Zea mays
  Coding DNA Sequence Number=SeqID_1774
MQAACNCTTGMHPFDFDTSSVEAQAHTSCNRRAGYYVRKTVPPLTPMPRLLDCRTGAAIQGNPARGPTVPTKHIGHRAGDTFGRRSGRRFTSAIMTASKKGLGKGIPRKGSFSAKEAGPEPSY

SEQ ID NO: 45150 - protein, 178 aa, Zea mays
  Coding DNA Sequence Number=SeqID_1775
MGSGLPSALEARLERALLRWRWQKGRESVSRRRHMEQDDGVAAWGLRGRRCMGPEAAARREPGNEVMSRRQAGRNPVGPWGRQPSGRTLVDAGTQSGGWQAELGASRGITGWQAELDACYRLPARVAGCRRGWNLEAELGACCRLTPRPTACAAGCRRGWNWKRKASAGGRGRQRLSE

SEQ ID NO: 45151 - protein, 386 aa, Zea mays
  Coding DNA Sequence Number=SeqID_1776
  Gene Ontology: Mol. function=binding; Cellular component=endoplasmic reticulum; Biological process=intracellular protein transport
  Homolog annotation: Hit_ID=Q6YS11; Match level="QueryCoverage=63%, HitCoverage=93%, E-value=1e-119, Identity=81%"; Hit description =Putative alpha-soluble NSF attachment protein
  Pfam annotation: Domain name=NSF; Domain location=131-142; Score =10.1; E_value=8.7; Accession=PF02071.11; Description=Aromatic-di -Alanine (AdAR) repeat
  Pfam annotation: Domain name=NSF; Domain location=32-43; Score=12.3; E_value=1.8; Accession=PF02071.11; Description=Aromatic-di-Alanine (AdAR) repeat
  Pfam annotation: Domain name=NSF; Domain location=52-63; Score=7.7; E_ value=21; Accession=PF02071.11; Description=Aromatic-di-Alanine (AdAR) repeat
  Pfam annotation: Domain name=NSF; Domain location=72-83; Score=14.3; E_value=0.47; Accession=PF02071.11; Description=Aromatic-di-Alanine (AdAR) repeat
  Pfam annotation: Domain name=NSF; Domain location=91-102; Score=3.6; E_value=80; Accession=PF02071.11; Description=Aromatic-di-Alanine (AdAR) repeat
  Pfam annotation: Domain name=TPR_1; Domain location=112-145; Score =15.5; E_value=0.072; Accession=PF00515.19; Description =Tetratricopeptide repeat
  Pfam annotation: Domain name=TPR_1; Domain location=53-86; Score=3.7; E_value=1.9; Accession=PF00515.19; Description=Tetratricopeptide repeat
  Pfam annotation: Domain name=TPR_2; Domain location=112-145; Score =17.2; E_value=0.062; Accession=PF07719.8; Description=Tetratricopepti de repeat
  Pfam annotation: Domain name=TPR_2; Domain location=53-86; Score=9.9; E_value=1.8; Accession=PF07719.8; Description=Tetratricopeptide repeat
  Pfam module annotation: Pfam domain module=NSF::NSF::NSF::NSF::NSF::TP R_1::TPR_1::TPR_2::TPR_2; Domain location=131-142::32-43::52-63::72 -83::91-102::112-145::53-86::112-145::53-86
MGDHEARGDDFEKKAEKKLSGWGLFGSKYEDAADLFDKAANSFKLAKNWSRAASVYIKIANCHLKGDSKHEAASAYVEAANCYKKFSPQEAAQALNQSVNLFLEIGRLNMAARYSKDIGEIYQQEQDLEKATDYLERAADLFDSEGQSSQSNTIKQKVAEIAAQLEQGILLNAGICQLCRGDPIAITNSLERYQEIDPTFSGTREYKLLADLAASMDEGDVAKFTDAIKEFDSMTRLEGPQSTFLSIDTPSIPHRSSDHNIWYSEPIFSHRPFTAYVPALFARNTQPPPHLRRVSATSMSSLTTTPQPARVQPTRQRRRPTPRAQPGDPLSAPRQATSTPEVSSLWVHRRLHLHTSRLRHPPRCWDAFAPRRWDATSAPRCGVRVA

SEQ ID NO: 45152 - protein, 192 aa, Zea mays
  Coding DNA Sequence Number=SeqID_1777
MARARAYKTLPDLDCTLPRTLKPHRSRARRRLPVRSESAAAHSLCHHRPATRAIPNPVQPLEKTVHTSVRLPEQGIGEYFAGEASPRSPELSTPPEYVDRVNHSTILRFLAHTVATIPREAHLALGLNQFAVVWPVYSPPTRTPAYCNLADGEYILVSEQGAAQEVAPDPAPEPAPEDLPATALEGKPRFYA

SEQ ID NO: 45153 - protein, 85 aa, Zea mays
  Coding DNA Sequence Number=SeqID_1778
MAPLARSDCLSDSLCRVALRLEWRRRRCPSVRPLYADGGYQLRIRRLEGTPNYGPRQVPGYCSPIYRHRMQPAQNYIYVLYNRLQ

SEQ ID NO: 45154 - protein, 158 aa, Zea mays
  Coding DNA Sequence Number=SeqID_1779
MAIAAAESRRARVQRGAEGSETKGHSSWKECGSVTADRGVNPFSRKALPLVPQEIPSDAHLAPAATQSPTCGPGRRPGRPTGGVPIHSVGRQYAHAAEYTVLIITCTLLGKLPLHANTTQTADIRAQGDCTGISCSKYYIRYVPRPACRGSALLYVPP

SEQ ID NO: 45155 - protein, 257 aa, Zea mays
  Coding DNA Sequence Number=SeqID_1780
  Homolog annotation: Hit_ID=Q9DUM3; Match level="QueryCoverage=36%, HitCoverage=13%, E-value=3e-07, Identity=31%"; Hit description =Latent nuclear antigen
MLEEQRDQQATAVENLRKVQQGLDDRASSLALAEENLKEKDASLDKRAADLAWREKDLAFKEEMLERPDKLLADYELEAEEKKRTLEEKEQTLGERVCLFEAAQAAQAAQPASISDALLVLDSTADRLRRLDQILGARLEAEGSRLCRSVVEYVLTCFRSHDPAISLVPVIAASSLVLGPLGCGLDVSRLDASILKKELVTWPPGGLGCGTKLSGYTAPDHPGDEYPFSRTGPQAAGPGYSMRMSLYQQGRETVWVG

SEQ ID NO: 45156 - protein, 65 aa, Zea mays
  Coding DNA Sequence Number=SeqID_1781
MAGGIELAGAKERWLAGEGFELGIKVNILDLWLKMSREDRKHTAFVTVDGLYCYVVMPYGLKTPC

SEQ ID NO: 45157 - protein, 224 aa, Zea mays
  Coding DNA Sequence Number=SeqID_1782
MGPDPNGKVPDPCIYGPDLRAGSRTSADTDRTPRTGPRPLCVGSGSLLAGSRDSGTKNTQALIKAKWRPGADTCPAHTMYASTPRPGGDPVLPHGLLPVTRRPGRPAGGVPVHFVGRQYTRAAEYGVLIITSTLPGKLPLHANTTQTTDIRAQGDCTGINCSKYYICYVPGPACRGSALLYVPPLSYKRGGTRRYKTQAHLDSDTLRPSSGSQVHISSQAQYIT

SEQ ID NO: 45158 - protein, 184 aa, Zea mays
  Coding DNA Sequence Number=SeqID_1783
  Pfam annotation: Domain name=Transposase_28; Domain location=1-181; Score=-51.8; E_value=0.0085; Accession=PF04195.3; Description =Putative gypsy type transposon
MALLDPLERLQPEVALNLVRNLLGWGVPAFTGRIRVGAFPHGNLAAGEFVLFVSNLSCGLALPISSFFVLLLEELGLQPQHFTPCFILQASIIAYLCKDVRGGNTPCFFLQHSEERIFTSPVKAESELSCGSIFRASISLALMASVPPPMVTAGLATKDAAREVIQDVAEMAVVRFQRDPTDDE

SEQ ID NO: 45159 - protein, 690 aa, Zea mays
  Coding DNA Sequence Number=SeqID_1784
  Homolog annotation: Hit_ID=Q6JAD6; Match level="QueryCoverage=97%, HitCoverage=97%, E-value=0.0, Identity=70%"; Hit description =Putative uncharacterized protein
MPRTKNVSASGGGDDEDPRRPFRQVKGKTVYLEQQEGRKKRRSDREARAAAAAAAAAAQAALGDQPDVPSDQIAFRARRLASRSRSSTRTSASTPPPTLPAPVTPIAPSTSTAIPTTSTTPASTASPAPAPASAPPVPPPRFRERDETEVRPLASDPRLFDLQRATAARVRRFRYVPVESWLPAQRDPAAGVLFSTRIQESFFRAQMSTQIALRVHRLLDLPAFLLAAGAESEAHLTYLPGLLSFLTISGRYVEEWVRVFYASVWIDPDHHWMRFRFEREDVTITARTAHVAALFRPPFTDGSRRSPADFTTAAKYLYELVRRTLLPRMGYREATTHIQLWLLGALVSHSEFDVVDFLICEIEDTVLDGIRARRQLPYAHYLCHIFAQLIQPPRFQSTLEASRLVFGSYRPAPEIPVPASASVFDSQAEDAALRQFDSQGTAADDDDDDDFGVPLPPPPPMPPRSHDHEAGSSRAAPAPPPALDPALASILQTLTQQQQTLTQQQQTLTQQQALLAAEQARLSDRMLSMFQSMQDRQDALQQQLIQDRAESRAFMALMLQHSGISAPPVQSAPPSSLHAPVVPSILSAPPAVTSPLRPVTLAFTSPVLSSVCPHPLVPPASAVTTTAVAVSVTASVPVAPAALPASESVPAPASTTDPGSETDSDPPSAFALLPRPRPDAPPPPPPGSDV

SEQ ID NO: 45160 - protein, 116 aa, Zea mays
  Coding DNA Sequence Number=SeqID_1785
GLSPHIRTGLSSFTTCTHDKYNHSRLYGQSLNLNSYDSNPRVMKAGEHREDKEGECFVRFGHGGGLTPSDITVKKKEIEELGCPFGYSGRCFGISEKVSQTSIYGDPYFVCLEIVP

SEQ ID NO: 45161 - protein, 106 aa, Zea mays
  Coding DNA Sequence Number=SeqID_1786
MASLSPATSSPWTPPTPSSSHGALLHVAEDEQPHYNEQSEVLECVVGDLPEQQPEGRQWGSGRSARSAKVGVQRFFRFGFVSHPPWGGGDAGNMDDFEEFQEYDEF

SEQ ID NO: 45162 - protein, 53 aa, Zea mays
  Coding DNA Sequence Number=SeqID_1787
MHPTGAKTTDQAKEGCKKSFEVPSAREKVKEAKEPKAKGEDEDVMPKIGIRER

SEQ ID NO: 45163 - protein, 248 aa, Zea mays
  Coding DNA Sequence Number=SeqID_1788
MPRVLPPSEPPDGGARGSSVLSSLEERNFAEFASRIFIILAGAEGGLSRSSTSRMVGWPPLLPASGGGNHPPALRRRRPPAMPGKANCCCPVRVQHSILCPRFRGEDESEDLPVRFGAAGARWCGVGGQVDAAVGAEVVAAGESFSAVETVSATYGPTSGSLALIFGSRPLSGDANESQLAAASVLGPSLLLQRSLVSHQEFVVPQALRCGGCSYPREWNWSSVCNGTLSAGVCSLWLSGPEHLCILA

SEQ ID NO: 45164 - protein, 358 aa, Zea mays
  Coding DNA Sequence Number=SeqID_1789
MQAACNRTKGAHPFDSDAPNTGAQAHTSCNRRAGYYVREDAPPLAPVPHLLDCGTSAATRGDPTHGPTVPTEHIDHGSVSRGRRRDGQYGQKWAGSNGGDRRAEAAVKSSAGSRPLLGQRESPLPWSEDDAPVFRSTNGSCTHNGCPANHTSCRINSAAGQAAPLAGEAGTGKGDTPKGILLREGSGPRAPLLIGGSKAGPSEGFDSRLRALGPRALLLIRGSKAGPSEGFDSRLRALELRAHHWSEVRRLAPRMGSTAASGHSGSAPTTDQGFVGWPPKGSTAASEHAERGMTLGTFDTQPMLGLRSRGTLGHFRDQRERLCNGIPSEGGIEPLNPIKRDRVRQITYKYFWSAPLGH

SEQ ID NO: 45165 - protein, 556 aa, Zea mays
  Coding DNA Sequence Number=SeqID_1790
  Gene Ontology: Mol. function=protein binding; Biological process=cell adhesion
  Homolog annotation: Hit_ID=Q6K229; Match level="QueryCoverage=97%, HitCoverage=94%, E-value=0.0, Identity=76%"; Hit description =Putative BTB/POZ domain-containing protein
  Pfam annotation: Domain name=BACK; Domain location=253-361; Score =8.1; E_value=0.00013; Accession=PF07707.6; Description=BTB And C -terminal Kelch
  Pfam annotation: Domain name=BTB; Domain location=138-240; Score =31.0; E_value=4.3e-06; Accession=PF00651.22; Description=BTBPOZ domain
  Pfam module annotation: Pfam domain module=BACK::BTB; Domain location= 253-361::138-240
MDPDFSPGGGGPSFEFAFNEVNFSDRELRIEVVAGDDYAPGSSGAGAGGGGLADWARHRKRRREELLKEKVEKLRGNERGATQKPFAESTTHMSDQTNCNEVEAEECDAYEENQEEPVAMVEESPPDVGQDGDDGQGIDSSWTVVGTPVLRVKTIYISSAILAAKSPFFFKLFSNGMKESDQRHATLRITDSEETALMELLSFMYSGKLATTEPTLLLDILMAADKFEVVSCMRYCSQLLTSLPMTTESALLYLDLPCSISMAAAVQPLTDAAKDFLAVKYKDLTKFQDEVMNIPLAGIEAILSSNDLQVASEDTIYDFLLRWARAQYPKSEERREILSSRLLPLVRFSHMTCRKLRKVLTCTDIDHEQATKCVTEALLYKADAPHRQRALAADTTTCRKFAERAYKYRPLKVVEFDRPYPQCIAYLDLKREECSRLFPAGRIYSQAFHLAGQGFFLSAHCNMEQQSTFYCFGLFLGMQEKGSTSVTVDYEFAARTRPSGEFVSKYKGNYTFTGGKAVGYRNLFGIPWQAFMADDSLFFIDGMLHLRAELTIKQPT

SEQ ID NO: 45166 - protein, 192 aa, Zea mays
  Coding DNA Sequence Number=SeqID_1791
MEGLYHKVSSGVTEHDAAIGTIELFQLQLNFNFNWGVGKFNRGPGRFNRGPGRFNWGPERFNRDVDPRAIDLAMRITERMFLKMKEDEAKNKIEEENDRWRPNDESTSSQGSSFKSTSHMCFVANGSDSESESEDEEEHESGSKDEDDLQQFFAQLSKKNWMSLLKLDNHDNMVKKIEKGTTAACTKPLQKN

SEQ ID NO: 45167 - protein, 676 aa, Zea mays
  Coding DNA Sequence Number=SeqID_1792
MGGLGVSDSFAMELIGTCAAPGGRMSSPELRESSARMLKVTGGWWPKNVPIPRAAGEDSFTSRMARDLRVFPYGRNIATVVSAVMDKDRQGAAQKRQAVIRLPEARPKRSRGATKAAAAGGSQPTLAAKSAAPGSSKVPEAVKAADAGRTKTAPAESAKARELPPPGKRVADFATDISVDDYLVGSDEGQLVVVPPAVATAAAAVVPRAKGSALSAGAEIPALTAVRDEVGAVSCRLKEALSQAVDFADRVASGDLTAVVSAKVERLRTQHADTVREKSAAVSKCRKLSDKVAALEGERTDLRRQLADERREATEALAKAQSAQAEANLALAEDREPRLRCLEWLQEELLALPAIVEGFMSYASLVTYEGAMNALSREGCRHYEVFDQGDEDFEREIYKVEDPVVKESAGALFDRMWGPHGREVVRERSEMARGQAARNEKVEDFGALNSVRPEAESDPVVAGPEVASAPPPETVEGSLAAPAATADGGGTSPTARPRAEDPPKTVTKLAAEDPSAAGSSQVQDFGPTHATATTNFLAASTVDDGNEWDESASKFSDFGDSGSSVEWTEESSDEDLDYFAALDVAAAEASPRAVDAEVVPGPSAGRRRRRAVAKRRVSEADGGRLRVGGAGRQELLSLPAVASVGEGELRSLFEGEELRMMLFNYREMGIIPKAEP

SEQ ID NO: 45168 - protein, 105 aa, Zea mays
  Coding DNA Sequence Number=SeqID_1793
MTTYRLDALNRSTTTFQWQCPCIGMIQRLHPRGFKLIESVELAPLKELIDPLTGRPTPSGNGNIGSSYSVFYDLYGNSNGNGNSLPWSCPLSPPVRRCRGLPASP

SEQ ID NO: 45169 - protein, 147 aa, Zea mays
  Coding DNA Sequence Number=SeqID_1794
MGVGKGRLGKNNKRKREPTPPSEEFGDSEYLEEEFSSESEGSPAPIPLREDDSQGLAAEVYTYIRAVERSGLEGSDESEYSSDEEDSDGGGEDEDDDDDDVGGGDGDGSGKGGGGGSKDGDGGGSRGSNRGGSSRGSTRGGSMQRQQ

SEQ ID NO: 45170 - protein, 157 aa, Zea mays
  Coding DNA Sequence Number=SeqID_1795
MTLIIKSFRQILKQRRGKDYKSRSKKRGRSEPEVGRGGDSSEVEAESETWGRARRRPSSGIEVESEPWGRARRRSSSEVEVESEPWGWARRSSSSQVEVEFEPWGRARRSPSSEVEVESEPWGRARRSPSSEVKVQSEPWGRARRRPSSEVETRAEP

SEQ ID NO: 45171 - protein, 175 aa, Zea mays
  Coding DNA Sequence Number=SeqID_1796
MTASKKVCHVVQFRILFLFPFLSLVTGTGKGDTPKGILLREGSGPRALLLIRGLKAGPSEGFDNRLRALELRAHYWSEQLTGDTMFGALQGQHGTFPPPPCGKATKGRMIKAESVLDRPLALCGGSGAALANPAPAKPLTASTYQPENLEPDYAPGQRPVRMREQPDRPRHHERH

SEQ ID NO: 45172 - protein, 80 aa, Zea mays
  Coding DNA Sequence Number=SeqID_1797
MDKIYRFGPLRSPRKNDLTNYWALGPFVRPFTSLVDPGDIYPPQAPDLWVDLERSVFWIVRFWTSLGAPEVHPMGVAPDL

SEQ ID NO: 45173 - protein, 124 aa, Zea mays
  Coding DNA Sequence Number=SeqID_1798
  Homolog annotation: Hit_ID=Q5NKP3; Match level="QueryCoverage=33%, HitCoverage=17%, E-value=6e-10, Identity=76%"; Hit description =Putative uncharacterized protein 9C20.7
MSTTRFTDPALVYHRHEHTTPSPPTDPGLSTSVARFVDPTVIYHRSDLAMPAAPNVPAAHFEPLVYTRSSSTATSGTSTRFQESSVLTMSRAFDDYYIKDCGVISAPEVTLKRIDNNDHSPSSG

SEQ ID NO: 45174 - protein, 194 aa, Zea mays
  Coding DNA Sequence Number=SeqID_1799
  Gene Ontology: Mol. function=oxidoreductase activity, acting on paired donors, with incorporation or reduction of molecular oxygen, 2-oxoglutarate as one donor, and incorporation of one atom each of oxygen into both ...
  Gene Ontology: Mol. function=donors; Biological process=protein metabolic process
  Homolog annotation: Hit_ID=Q5GAV6; Match level="QueryCoverage=73%, HitCoverage=31%, E-value=2e-21, Identity=44%"; Hit description =Putative uncharacterized protein
  Subcellular localization annotation: CTP_CleavageSite=51; ConfidenceScore=5.00e-01
MGGAATPTAALAGATISIIGGSQTRSRRYHERRAGRAPVDGGRGAYPPGCLAAEKSAVEGRGRSGCLSHHGELLEEKIIPHDMEGGEGHDPLDDSLQVAVAGARSMQKVQHQSTVDDRLAEVTKGVRHALHMATVFPNTEIPLRELVELGVEVEGSSISVPEELFLEGEPCLSAHVRLIANDVLYLDGDGVMEP

SEQ ID NO: 45175 - protein, 224 aa, Zea mays
  Coding DNA Sequence Number=SeqID_1800
MGRRETEHKGETSVTFKRCTGERANERVASRTLRRAGDFGREPRCALRAATPGREPRHTGPPRAATHACYEQAVQGRREQPCCEQPRCALRAAPGQRAGMPRHARGGAALRASQQGRAGGRGPRRGCEETAHAGRAGHAESRAHEQPRAGCRADRAGQPRAGYARRPREGVREQPAAPCREREKDAHVGSRAPCRDGNARDRALKTLREGRRKEDGGLYLDGRW

SEQ ID NO: 45176 - protein, 241 aa, Zea mays
  Coding DNA Sequence Number=SeqID_1801
  Homolog annotation: Hit_ID=Q6YXT4; Match level="QueryCoverage=37%, HitCoverage=20%, E-value=4e-07, Identity=37%"; Hit description =Putative uncharacterized protein P0427G12.17
MRHIPEPPSPHTPVKPRESALIPLVTPRPIPGPAVLTPGSSLGSYIVPKDQHKSFVRTLSSLMRTRENFPVGHPSQIAPSQARLTWRFFRDRLPKKKMHLVALGQDIPSQGSGYHTARRALSHYCSVLGGVADSLNLKYYPRRPSGSTGGVIVSPVGEDNPRLSSTVNLATVLNTELDHALDELSRARAEIAQLRADRAERRHLDDGSPAPVGTQHPYRSPRHGHQSYGNPDCKTKIDLEP

SEQ ID NO: 45177 - protein, 633 aa, Zea mays
  Coding DNA Sequence Number=SeqID_1802
MSSSSSAAATTPADASSEGMLSNVAVEELRAGDTVDFSASRMSSVHVQDMQQLGYFGGGVARVPGGGRGPRARRRVGCLRGVLRRWSSSARTSIHGRSPAQIQRQGPPADAECRGGPVKICMGNDFVRRAAIVKVFVKYYCLHWQKRMIGNKIAQFGSCTFTLKTGKTSMEVVELVPCARNKWGNWYEFWFYVAEGTVEDHPGLPVAEMCSHYYSAYPQFEVAEEDADKGALRCAAGLSSGRDLVEEFVAYGVWPLARGWALGEVCPRQMPSRGGMLVRSPAFALDLHSRDPAAFVREAEDGAVWIVGRYVPKTEGQRSWDIRGSNDRLNRVFELNRLPYGGYPGQDDVDHRGKKPTVETRDDPAPAAAPSSKKRKLGTATGGLGVSDSFAMELMGTCAAPGGRMSSPELRESSARMLKVTGGWWPKNVPIPRAAGEDFFTSRMVRDLRVFPYGRNIAAVVSALMDKDRQEAAQKRRAVIRLPEARPKRARGTAKAAALGGSGEGQLVVVPPAVATTVSATVPGAKGGALSAGGEIKALAAVKDEAGAVSCRPKEASQRLSQAADFADCVASGALTAVVSAEVERLWAQHAEAIREKSAADSKCRKLADKVAALEGERTELRRQLAEERREAN

SEQ ID NO: 45178 - protein, 235 aa, Zea mays
  Coding DNA Sequence Number=SeqID_1803
  Homolog annotation: Hit_ID=A2YGC2; Match level="QueryCoverage=74%, HitCoverage=74%, E-value=2e-09, Identity=28%"; Hit description =Putative uncharacterized protein
MERSEEPEPKGWIARPITHDAALGCHFHNAFDTLLRQAFDRHTWSIEYRCVVYQRRRGLYPDQWEATCLVRCPIDDLRGAEAFSEHYSITERDTAKAVMQDVARRALSQYCLLFTGVADSLDLKYYPRHLTDSAGGVIVSLVGEGNPRLSSMVNLAAVLNTELDHALDELGKVRAEVAELRAECAARHYLDGGSPAPVRIQHHYRSSPHGRFDYGTPILQDPNRFRSIDRWSQSL

SEQ ID NO: 45179 - protein, 35 aa, Zea mays
  Coding DNA Sequence Number=SeqID_1804
MGRLEPRAEWESRLVGKSEAGNMEDFEEFQDYDEF

SEQ ID NO: 45180 - protein, 134 aa, Zea mays
  Coding DNA Sequence Number=SeqID_1805
MDYAAPTRVALEAGSGLPHQRRRPPLHRRIAGDSDHLCISSDNDLRSGRYASSSDHLRVSAVVKGPRPRPPTGGDNEAIKAKESGTQRQVALMVPAAEATTSAKGRLTSGSHHLSTDDHDHLRTRGPRSRPPTE

SEQ ID NO: 45181 - protein, 26 aa, Zea mays
  Coding DNA Sequence Number=SeqID_1806
MVPLGDPIDPGSSYIFSFDAMQEFHN

SEQ ID NO: 45182 - protein, 197 aa, Zea mays
  Coding DNA Sequence Number=SeqID_1807
MRWGLAPSSAWPGDVARVQRLYAVEEVAAGPPMVTPTAMPVFTVDHLVTLVSQPDTWGLAPVSYGRNLGMGCAGVFWRGPRQGHPSGDLAAGEPTPVAVPAVLPSSCCCLEERNLEEKDDYQPCGGEKQAGLRPPSCHQLQGCSSSSLERKARQARVLPPTWASGPLLPPAFGGGEGFTSHAKEANFGYARPARCRR

SEQ ID NO: 45183 - protein, 266 aa, Zea mays
  Coding DNA Sequence Number=SeqID_1808
MPSSSSSAANTPPGKSSSEETMSDLAAELDPGHMVEFGVSWISSVRVQDMQQLGYFGNRVGRVPGAEEIPESEVLEKDRQDAAQKRQAIVRIRDPFREAKKARAAAKSAASGSSKPLLAAKPAAPGPSKASTGAKAAASGAGNPPSGGLAKGRRLPSPARTDRETTRVADFDTDICVGDYFLGLNGGQLAVVPPPVAATSPTAVVGAKGATRDSWATFCARGEILSAAATRDVVGSMSQQLRQASQQLSQQLKQVSWVYVSGGRLR

SEQ ID NO: 45184 - protein, 182 aa, Zea mays
  Coding DNA Sequence Number=SeqID_1809
MTDGPEWSAAWGEGRLIGGTQGQGRALKPATRLTISECVRGRVSGGCGEDRADKQGPRRRGTGACGGKQFSADEPGPLCKQIAKHARESKRRRQVGPAWQREREGGVLVHLLAAMVYGISCFMGFLENQLPNQLDVGNTQPIFEPYYAFRVFPKVFAFFVQNQLSNLIDLLIIFLPILDISF

SEQ ID NO: 45185 - protein, 983 aa, Zea mays
  Coding DNA Sequence Number=SeqID_1810
  Gene Ontology: Mol. function=pyridoxal phosphate binding; Biological process=metabolic process
  Homolog annotation: Hit_ID=A2YXQ4; Match level="QueryCoverage=69%, HitCoverage=76%, E-value=0.0, Identity=63%"; Hit description =Putative uncharacterized protein
MVCEGGATHAGQGDTRLGPGAHWCLRCLRGEISVEIATLNILTALTRPFQRDSGVFSHSAVGAALDGVRDACADLRVLRRAGKLLVEGITQCAAWHGRTVRQQTQQARRLLDDLDTACQRVGRDTLNAERARRPSAQWQAARPLLNKCRGCTALRQARPDGLCRGPQAAGLRLRRSEGQGLDTGPVSFCEGPDPTIHTGMCCLSLPRAPFGLLMRWGLAPSSAWPGDVARVRRLYAIEEGTPDLGETESAAQMGDASSFLLLERPRPAGRLGQLDPARRCPTHISNSPNAGTRGSIHEATMLVLINRYFRSRNSPAGGGDEMAPADRDHLCLPGCVPVRAKRAASTAAATVTTTARASRHNFVKAAASGLLAGAHFTNHESLPPLPDAYAEFVAAFPQYAHGALARADAIRGEEYQHLDRHVCLDYTGINLFSHAQMNSSLPSTSSAPPPSSAWQPPFFDIAYKSTSLRTQVQCGDAAAGGIGAAVTRRIMASLKIPEEEYAMVCTANRTTAFRLLAESYSFQPGKQLLPVYDYESEAVGAMADSARRRGAEVTSASFAWPSMRIHGTDLRKRLARGCRRGAGRGLFVFPLASRMTGARYPYLWMSAAHEQGWHVALDACALGTKDLDTFGLSLIRPDFIVCNFFKVFGENPSGFAGLFIKKSSLAALERSVIARSIGIVSIVPARRWSLHDGYSTELEHSRSFPKLADPALDDGDVETTSSFSGPLSSTAVTRSRTLQSDAAENGDADAPEIREVDITPENGFYTGEPRAENGHETEQLAKEEEDRQGGESVMEVECRGLDHADALGLIAIGNRLRCITNWLLVALQKLRHPHADNGHQLVKLYGPRVKFDRGPSLAFNVFDWKGERVSPMLVQKLADRHNISLTCGFLCNIWFSDKYEAERGTVLEHRIAGNSVSVGARGKKRKDAGGDVGILVVNASLGFLSNFEDAYRLWAFVAKFLDADFVEKERWRYTALNQKTVEV

SEQ ID NO: 45186 - protein, 159 aa, Zea mays
  Coding DNA Sequence Number=SeqID_1811
MEPDTANEAPPLVLMNYFGPVESSHLLQAAQILELKQNIGMSKSTEIADKAIILMQDHAKHIYHICNEKLILGKGLTSFEVKELREALEFAAEGLDQDSLFCQEELDATVKEEQLEHDEKVALQRIESPLPSPDSDCFLSLEEHIEKFWGVDYQLRPDA

SEQ ID NO: 45187 - protein, 317 aa, Zea mays
  Coding DNA Sequence Number=SeqID_1812
MEFPKELTQQAVVWHKQAKAQQEAEKQTLSQHSAVVGGDQSCIDILRCFLGNARAMMSTVYATAQRRAAQRPYVRLRPLAHVTGSRPRGSIGSPPGQGAEAYMEPVPKEDGSWARAPVSETEPLVLAEVKRRTTAGGGPLLTRRFAFFVPGDRRPRNEEARRCAPRVAVRLLGTRRPTPKEYDSWTRAPVSEAGSLLSAEMKRRGEAGSLLSAEMKKRGGSLLAWRFAFFAHGGRCPRTAMALLDPSECFQSEVALNLVRNLLGWGAPAFAGRIRVRASPVGDLVAGEFVLFVSNFPCGLALSISSFFVLLLEELGL

SEQ ID NO: 45188 - protein, 289 aa, Zea mays
  Coding DNA Sequence Number=SeqID_1813
MGRLQPACYGWGGGRCGEHGQRLARAGGERVSRRGRENGGSTRSRGSAGAADEIDEGARGRGRSTVECGFRESGGSHRPAFMEIVGESGSKEYSLILVQTFRSPAPNEQNGIKRSRNAGIVPGGANGGGVGGTGEEAGGVEKRAQAAECDADQYCRGDAGPPRQRAWTCGGEGEGGAIDAAARLAGMGGRRRGRVRGVRQMTAWWRWELGDHREDLVGDPTQVCKRSRGIHRAGVAKDHLVVSTWFLRGPRGSDTLARVLQRGLVESADSSIPREKLEESSKPYFTFRT

SEQ ID NO: 45189 - protein, 358 aa, Zea mays
  Coding DNA Sequence Number=SeqID_1814
  Gene Ontology: Mol. function=kinase activity; Cellular component =mitochondrial matrix; Biological process=ATP-dependent proteolysis
  Homolog annotation: Hit_ID=A2WMY9; Match level="QueryCoverage=20%, HitCoverage=19%, E-value=1e-16, Identity=57%"; Hit description =Putative uncharacterized protein
  Pfam annotation: Domain name=Rep_fac-A_3; Domain location=176-293; Score=-3.2; E_value=0.0065; Accession=PF08661.2; Description =Replication factor A protein 3
MYYHTRPEDRFDAHAAIGDDEARALMIVTALRSCQGTISELVRHSKELINLAAVELEKTKSLREQMMEIIAIAGYITDAKMHIARDYLEKNTRQACGIKADQLDNLRWRPRKRSRRSGSRKQSDTSSGSSSGDMDLSSPGPSGFCQLNLVPDEETCKSSGEQPFMGVPVQSRSSVMTYIKLSSTDLQLKCQLQQYVKCPNRPVHLLFVSGSTLLRLRTVAQVQHNEGGVLVGQSTDGHQLCVKSAMDVPVSHFMEVYEIAENSETIRAEVCTDFGPNFGEIANAFGVCLGPLIAIVSIVESNHILNEVSTDILPSHNYVTPIITIAGGSVANTIRGLSAGFGISTGDYCLSTIRALVV

SEQ ID NO: 45190 - protein, 245 aa, Zea mays
  Coding DNA Sequence Number=SeqID_1815
  Homolog annotation: Hit_ID=Q6QP51; Match level="QueryCoverage=20%, HitCoverage=22%, E-value=4e-13, Identity=73%"; Hit description =Putative growth-regulating factor 1
  Subcellular localization annotation: CTP_CleavageSite=68; ConfidenceScore=5.27e-01
MHEGSAKTWLPFKGVTLLLKGNSPHLHPQPSRTESSPTRSKVLPLRHGGWVPRVMQAGPGQKKAKPPRAMRATAQRLRAFLHFRPDQRVKGWTAMQAACNCTKGAHPFDIDASSMEAQAHTSCNRRAGCYVQETAPPLAPVPRPLDCGTDTATRGDPAHDPTVPTEHIGHGDQERGYPERDPSPRRKRALSPPTDQRFEGWPLGRVQQPPQSTRAPCPLLVRGSKAGPLEGFNGRLRPLGLRAHY

SEQ ID NO: 45191 - protein, 261 aa, Zea mays
  Coding DNA Sequence Number=SeqID_1816
MAAREPWVGRGGGSSEVEVESVFQSRGRVRAPGRARRRPSSEDKLSLSPGGRARQSSSSFGAEAEFEPWGRARRSLLSSGTEAEFEPWGRARRSSSSSGAEAESEPWGRARRSSSSFGAEAESGGRALGSGEAELPMAPEAELGCCQPHSVEWHNSRSGAGGAVLLSGRSVERQSDCGHFGFVDWRARVRIRCQAILALNASAIRSVGVAIWPRLLLGEDWASGEPKVCPLLEGALGRDVNRPGSAALARGWARERRDRVP

SEQ ID NO: 45192 - protein, 90 aa, Zea mays
  Coding DNA Sequence Number=SeqID_1817
MARAQRLRVDDYGAHLPMTQHEHGTNWLCEAGAWAQRRSGSDSAPKAGRGCTLYPQVVIPLCLESIKPSNTTKVLTERYSGKWPEPPRVS

SEQ ID NO: 45193 - protein, 181 aa, Zea mays
  Coding DNA Sequence Number=SeqID_1818
MDQGSICKGYVVKPYRLTLVVFEGLIDPRHKGIMTCRASTASHGAKSVQSPGETASSPAQGAGALTPGAGPGAAGLFPSPQQEVESGRPPSPAPQPEMPPAPPQGIPAAGGDPDGDGDDDAGGSSSHDTELSEEPEPKGWISRPITRDAARGCHFHDALDTLRCRAFNRHTWSIEYLCVVY

SEQ ID NO: 45194 - protein, 65 aa, Zea mays
  Coding DNA Sequence Number=SeqID_1819
MSRAFDDYYIEDCGVILALEVTQRRIDNSDQFVTLATVRLFHHYIATITNMKGSWVSIYHISRSC

SEQ ID NO: 45195 - protein, 65 aa, Zea mays
  Coding DNA Sequence Number=SeqID_1820
  Subcellular localization annotation: CTP_CleavageSite=24; ConfidenceScore=5.02e-01
MSFCQTGQWSGGVTAVTSALPGARVRMKVSGHLCVKCPRNLLYADGGYQLRIRRLESTPNYGPRQ

SEQ ID NO: 45196 - protein, 201 aa, Zea mays
  Coding DNA Sequence Number=SeqID_1821
MARRHARCWDSAPASSNFRSDASTDGIVAITGESMELPRRACDVASPSSAVTSTRRADGSNRRAMSKCGCERAVASPVCAVASTRRADGSAQGSFRRAMAECGCGRALASPGCAVAASCCAGYYGRDLASPVCAVASTRRADGCAQGSFRRAMAECGCGRALASPGCAVAASCCAGSYGRDLASPGRAMVSVVRAGDPLPG

SEQ ID NO: 45197 - protein, 40 aa, Zea mays
  Coding DNA Sequence Number=SeqID_1822
MFWITGGDEDDVYDYGNGKEREEGVKVDLQEFQDVDAFED

SEQ ID NO: 45198 - protein, 102 aa, Zea mays
  Coding DNA Sequence Number=SeqID_1823
MSSVGALGPTAHPGLPLKVWTYIRAVERSGLEGSDESEYSSGEEDSSDSFEEGGGGDGGDDDDDDDEGDGDDDGGDGGSKGGNGGSRGGNGGSSKGSNRAIG

SEQ ID NO: 45199 - protein, 158 aa, Zea mays
  Coding DNA Sequence Number=SeqID_1824
  Homolog annotation: Hit_ID=Q6QP51; Match level="QueryCoverage=22%, HitCoverage=16%, E-value=1e-10, Identity=91%"; Hit description =Putative growth-regulating factor 1
MTPGLVPLADDVAKLQPPPLHLVGLGSHCSQADEAPFRANSASIHADTAASGSSSSQSGQRKTAPLTRSDCRASHPGKADNSKFSLGRDRKLRLARPWASASGGGIRLARPQDSASASASGGITSSPDPGLDLRRSLRLSRPWARTDCATGDTSLPYP

SEQ ID NO: 45200 - protein, 25 aa, Zea mays
  Coding DNA Sequence Number=SeqID_1825
GASHGRSDALYNAPYASASFSLPQI

SEQ ID NO: 45201 - protein, 331 aa, Zea mays
  Coding DNA Sequence Number=SeqID_1826
MARLRHTARKSVIPFLPSRLAERPLHRTVSGQSSHLERLHHRLREEQERQRQHGEQQGSSSSPQQEVETVRPRSSVAQLEAPLVPPRDVPAVGGDPDDDDSDHSTESSEPQEAEGWVARPITRDAARGCHFHDALDTLLRQAFDRHTWSIEYRCVVYQHSRGRYPDRWEATCLVRRPEDDLRGAEAVSEHYSISERDTAEAAMQDAARRALSQYCSLFGGVADGLNLRYYPRRPTGSTESVVVSPVGEANPRLSSTVNLVAVLNTELDHSLDELSRARTEIAELRAELAERHHQEGGSPAPVGTQHPYRSPPRGRHTYGSPVCKTRIDLDP

SEQ ID NO: 45202 - protein, 205 aa, Zea mays
  Coding DNA Sequence Number=SeqID_1827
  Gene Ontology: Mol. function=identical protein binding; Biological process=negative regulation of catalytic activity
  Homolog annotation: Hit_ID=A3A474; Match level="QueryCoverage=44%, HitCoverage=55%, E-value=1e-29, Identity=69%"; Hit description =Putative uncharacterized protein
  Pfam annotation: Domain name=Subtilisin_N; Domain location=25-119; Score=69.5; E_value=1.1e-17; Accession=PF05922.7; Description =Subtilisin N-terminal Region
MALVVVLAALLCSISVAAAASGGLSSYVVYLGQHAHGAALGTHGAEELQALERDAAEAHCDLLAGVLGGDKQKAREAIFYSYTKHINGFAANLDAATAAEIAGKPGVISVFPNQGRKLHTTRSWQFVGLAGPGGVPHGGAWRKAKFGADTIIGNFDTGELSYPAPPLAVPSSPRRQQSFSRQQLGDKMLCPARYGLVRSYVILID

SEQ ID NO: 45203 - protein, 140 aa, Zea mays
  Coding DNA Sequence Number=SeqID_1828
MGLGVCGSLCQGGDEEDDYDYAYGNASPLQPNGTFAEYVDVYSPLLSQKHQVAFGAIYAQKPTSSALSRGPATIASGGRGSRPRGALDEVDLSLPLEERTRALRQEVNYMVAHLLHHHSESLMNALERVAVRIVQRDHEA

SEQ ID NO: 45204 - protein, 125 aa, Zea mays
  Coding DNA Sequence Number=SeqID_1829
MGTSWGLMFLSKGEYTSTGCTLYPRVVIPSQPGFARPYLHYQGAKGSTQTSKKNKLGFKRKEQKGNRSVPWSGAPDSVRCTRVNQLKLLSFGFPRRSSAIIHRTVRCTGGAMAICAQRLTLMEEQ

SEQ ID NO: 45205 - protein, 127 aa, Zea mays
  Coding DNA Sequence Number=SeqID_1830
MKGASLCEGEVILLSKSLKLNLVTRISYLCSKGGGSLSLFEILKGAKGSTQTSKKNKLGFKRKEQKGNRSVPWSGAPDSVRCTRVNQLKLLSFGFPRRSSAIIHWTVRCTSGAMAICAQRLTLMDEQ

SEQ ID NO: 45206 - protein, 90 aa, Zea mays
  Coding DNA Sequence Number=SeqID_1831
  Homolog annotation: Hit_ID=A2WXG3; Match level="QueryCoverage=52%, HitCoverage=6%, E-value=3e-14, Identity=76%"; Hit description =Putative uncharacterized protein
  Pfam annotation: Domain name=PBD; Domain location=27-65; Score=19.7; E_value=0.00077; Accession=PF00786.19; Description=P21-Rho-binding domain
MACKVKGIFKGLKAFSQIFSVKEHEMEIGCPTDVKHVVHIGWDSAAGDERHHGVLRLVVPGQLRSAHWYLLGFSRYSDHFLMLSGSKVLL

SEQ ID NO: 45207 - protein, 370 aa, Zea mays
  Coding DNA Sequence Number=SeqID_1832
  Subcellular localization annotation: CTP_CleavageSite=29; ConfidenceScore=5.18e-01
MALACPCSAPSPAVPALPPARLRGPGAARAAPGTRSAFPHAQPHARDDGQLVESEGVAGGDEDDGFDYDYGNGTWFAFGMPSKTGCDIGGIKVVLTEVESVRSCSPVPPLEAPPALTLGVPAVGVAVGGDLDGGGDDSSSSHSTDLSEEQEPEGWVARPITRDVARGCHFHDALDTLLRQALDQRTWSIEYHYVVFQHSRGVYPDHWEATCLVRPLENSLRGAEVCSEHYSISEWDSAEAAMQDASRCALSHYCSMLGGVADGLNLRYYPRHPSGSTGGVVVSPVDEDNLRLSSTINLAAMLNTELDHALDELSRARAEIAQLWTEHAERRHLEDGSPTPVGTQHPYHSPQRGHHAYSNPDCRTRINLEP

SEQ ID NO: 45208 - protein, 233 aa, Zea mays
  Coding DNA Sequence Number=SeqID_1833
MSGAPEDSNSELLTFGNFQRRLRYNSPDCPVYTGHVRCSKEEPPPELASLGFSLQPLHYNSPDCPVYCPVQQRGNGYFGANGYLRCIKCARCARRGQARPCWRTGQSTVHVPVRHRTSRRAKKTELQRSTPTAFGDVAVAPDMSGVHRTVRRLSSCPMRKVTSEVSVSRRRRSPSARSALPLKASLAQLKKTLGRSAMSRSRRQRCQHGQRRSWLEKGASSAQEQVTSQAEEV

SEQ ID NO: 45209 - protein, 446 aa, Zea mays
  Coding DNA Sequence Number=SeqID_1834
  Subcellular localization annotation: CTP_CleavageSite=58; ConfidenceScore=5.38e-01
MGALRRVCVPRPWTSPTVFAFRIGFLTSLTARSTSSRFIGYVPIPAPYSRPICTFGILAALIGSLSGSVIQWKNLNPGNWFLIAVLPRLRSLIWLISFPLRTVSDHGAVVRPHFQNYSNRRIGRKDSIPSLNGSSVPAASGHQHFRDLSLSGNNSQLFGLSGQKVDPAPFLPHGFVAQQVDHREIMEVPQFIAFSVAEGFQGVSWTVQCDIVQQFMLGAQPQDEDPVPPYPHDGVNAEEDVAINADEGWDPWPVKQAQPPEPVVIANNANVAINEEEQFSYQLSVLALPAFPPENMNLEGNNVEGQDDMQIEENINVGLMLHLDQTNPDPAFEDFMARKCSSSWADLFPGNDGSVFVPKVGAAFFMGLLMRPDSFDWARKFLLSGAISAFVTPSMDTISIRIPSNCLPPPSQDTPAEPQSPPQSKATFRKKAAYLSRHDSQKECQA

SEQ ID NO: 45210 - protein, 144 aa, Zea mays
  Coding DNA Sequence Number=SeqID_1835
  Subcellular localization annotation: CTP_CleavageSite=39; ConfidenceScore=5.21e-01
MGGAAAPSASSPPSAESDPASDSDTGEGSPPQRKMSALRLSHRRQDLLQEPGPSRRLVRPLRSLSQLSPEDISLAHGLGSPTLGLVPPVDDPARHQPPLLHLLGLGSHLLLGRRSPLFEPTPPLSMLTPLPPAPAHRRATEGFL

SEQ ID NO: 45211 - protein, 389 aa, Zea mays
  Coding DNA Sequence Number=SeqID_1836
  Homolog annotation: Hit_ID=Q8S474; Match level="QueryCoverage=19%, HitCoverage=8%, E-value=2e-07, Identity=46%"; Hit description =Putative pol protein
MGSARVAFVLLMLEERNFAEVGTFQPLLGFKDFHQAARLHPLTNASRIFIILAGEEGEASRGLPSRGLVSRFFLRHLGVQTILQLCRGGVLQPCRGRRTAAAQPGCSIPSSVRATVASRIKGSHNTSYAAREVDATVGAEVVAAGESFSADETVSATRGPTSGSLALISGSRPPRGDTNESLPAVASAPRPSLLLQRSPASHPELVVPQALRCGGCSYPWEWNRSSICNGTLSAGAKGSHLANKKTKYWVQTKEQGTTEGTSGLAHRTVRGDSAIIHRTVRCTPDMSGAPRKSRLRNSPASGFHSSRSTIIHRTVRCTPDYPVQQRGNGYFGANGYLRCIKCARCARRGQARPCWRTEQSAVHVRNFVFQVIEKRKLTRSEGPFERGKG

SEQ ID NO: 45212 - protein, 128 aa, Zea mays
  Coding DNA Sequence Number=SeqID_1837
MAPEDGLGCCQPHPGGWHSSRSRAGGAVFLSGQSVEGRSDCGHFGPVNYGTRVRIRCQAILALNAPAIWSVGEAIWPRLLLREACPSWASGESKVCPLLEEALGRGVNPPGSTVPARGWARARRDRVP

SEQ ID NO: 45213 - protein, 150 aa, Zea mays
  Coding DNA Sequence Number=SeqID_1838
MTVASPGQLAHRSVRCLLPTVGAGHTSPADCVADHCAGGRWLTGQSGAPPDSPMNYSRTPPNFPESVLFTGVQPGAPDSLTNGKVVGPPKAYHLTMEERKSALLYMFTNMPEVEKYFVVPLKSKKSVKGLFKDLGLFRTVLRAAADVESC

SEQ ID NO: 45214 - protein, 309 aa, Zea mays
  Coding DNA Sequence Number=SeqID_1839
MGSAHVAFVLLLLEERNLAVEGDHRFDGGEKQAGLRPLPRPQLQGSSSSLLGRGASRGLPSRGLASRFFLRHLGVETILQLCGGGVLQPCGGKANCCCPARVQHSVLCPGDCGRPHRRVSQHVVHREGGTHVLGRSRSRFRGEDGGEDLPVRFGAAGARWCGVGGQVDAAIGAEVVAVGEGFSADEIVGAICAPGLRLFAFNIWFSSSARGREREPSSGSVRPGTITAAAEVGDPPPVSPSEAGPDSAEGGVDAEGAGAPPVDDLFVGSRIAHPSESYLSRKVMSEESLGSIGLAAYMYTVIFRIPLSK

SEQ ID NO: 45215 - protein, 662 aa, Zea mays
  Coding DNA Sequence Number=SeqID_1840
  Homolog annotation: Hit_ID=A3ACU8; Match level="QueryCoverage=94%, HitCoverage=48%, E-value=0.0, Identity=72%"; Hit description =Putative uncharacterized protein
MKFSSSWCQRVLPAAKEIYLKGLPAFYPTRMHEVQLQKALRSFGSMVKGPAVRVFSKKLEDECRAIWESGRQQCDAVSLTGRPCKHRRHGDFFSSDAMEQHSSGYVFLHACSCGRSRRLRDDPFDFQTANVSFNCFQNCDDLLPTLALPRGSNDGSFSVSSWCLVRLGGARYYKPTKGLLQSGFSSKERYLLRWIVSVHKGQVRNDIRSNTITSSARSGMNPQTPPIVTGEVKSAITQVTAQIKYAKLENSGKQAEVEPVSNLGINFGKGLPNFTMKKPFSEVVAGTTSKDTEFPALQQTRPPKPGGRKDEQRQMNIVDQTNGRGHVAVSQGSVAETESAKASRNKSSENADGKPFLQIGSNIVPVIAGNETRETSQPVQQFVVYIGFEHECPYGHRFLLSEKHMKEIESSCLQYQRPHLNKEAEVKHAQKLLQNASGLIASAVDINSARKNSKPLESSGRNSQQQSLQLRIDAETSQPSPRLSDPQNAKRWEHYFRSVTIDDGGEAFSLMNRNLPIYMRCPHCKVSERKEHQDVKFAGVVSQLQRIFIGSCLPSNVSDHDREGSFSIGCRVILPPESFLTMRLPFVYGVETKEGSKFPLKYFERQPELTAWLVAGTALQIVSAITPFLSLYMKGARRLSLAGYVKYRYFPAVFGEEDGFVK

SEQ ID NO: 45216 - protein, 231 aa, Zea mays
  Coding DNA Sequence Number=SeqID_1841
  Gene Ontology: Mol. function=subtilase activity; Biological process =proteolysis
  Homolog annotation: Hit_ID=B0JCV8; Match level="QueryCoverage=64%, HitCoverage=21%, E-value=6e-47, Identity=58%"; Hit description =Misfit TNP1-like protein
MASTVCGSSMSSPTKDQGLGPDHMDKSVAQEESSSEGYETPSDPFPTTRIDRAAARELQRDPTYDPQDHEEVLFQFRAMLEKAATRYQDAPKPTQDAPEPTQGAPEPTQGAPESTETTTERSRKRKQSDRNKGDRGLNKFPDKTYKIADVSPNGQPLTPEEALPKFRNALGFLVRDNLDITIRQWRDVSDDVKNQMWNKLITRSGMNTKFAKKDLDPTKNIKSQQVSGQHF

SEQ ID NO: 45217 - protein, 160 aa, Zea mays
  Coding DNA Sequence Number=SeqID_1842
  Subcellular localization annotation: CTP_CleavageSite=53; ConfidenceScore=5.55e-01
MALALAFKQLLNRSQSNCLPFGSALGRLRRALPNAAVMVRIRLTVELTLHVSRCRKSWRREAFFIIILSICRMSRRDKSAKQRKGPLTGTAFDPLPLPTGVPVPMCFCGDPCKVDKSEDHDTYRQREEKEKKLERARRAKDAMEGNSDAFRNGKWPRCTQ

SEQ ID NO: 45218 - protein, 95 aa, Zea mays
  Coding DNA Sequence Number=SeqID_1843
  Subcellular localization annotation: CTP_CleavageSite=30; ConfidenceScore=5.03e-01
MAQQARPGFWPGFTGPGPGRAGRPVWPSLSISNLASNAIHNDLYQVIKAKTRDSLPFFCLCMHEHEPASLSPLDSIQRDGQTGPERQEDDRVAGA

SEQ ID NO: 45219 - protein, 153 aa, Zea mays
  Coding DNA Sequence Number=SeqID_1844
  Homolog annotation: Hit_ID=Q7XBD4; Match level="QueryCoverage=80%, HitCoverage=15%, E-value=5e-14, Identity=30%"; Hit description =Cinful1 polyprotein
MGYPKLELGLSLMLKDHLTDNLAYNSLKGKVQAFDEVLSGRGAFCACVGAQGAVSFHEKAGYDHAKAVIQPDFSVSVTDIKEPLAEANALSGKFYSEVWMNAELSPHLEPYNSNDDSALKGTLDEIRIANAAIDEAINRLLNEATKRVLKEDD

SEQ ID NO: 45220 - protein, 216 aa, Zea mays
  Coding DNA Sequence Number=SeqID_1845
MDLRNGKQENLSYPKSDGEKDTRKAGSGEEIGAIEILGPYGISYTFRRLAERRSSHVTGWMTIGKLLVGSNQQSFVTTFSVRRTDLWFIGNLRKNQYVQQQREIKVLDWKEGPGPPFYRCKERVQMYNGGYSYALTCLVEKCLSPVYMPTWLSEKCLSPVYAIMWPSEKCLSPVEAQLASYPGGWHNSRSGASGAVFLSGRSVKGRSDCGHFDLVD

SEQ ID NO: 45221 - protein, 211 aa, Zea mays
  Coding DNA Sequence Number=SeqID_1846
  Homolog annotation: Hit_ID=Q6QP51; Match level="QueryCoverage=57%, HitCoverage=55%, E-value=4e-35, Identity=65%"; Hit description =Putative growth-regulating factor 1
  Subcellular localization annotation: CTP_CleavageSite=56; ConfidenceScore=5.29e-01
MEAQAHMSCNRRNGYCVRGNRTATCANVAPSRLRNQYRDSRASDTFGRRSGHRFTSAMMTASKRLAPRKGSTAAPEHSGSKPITDQGFEGWPLERVRQSPQSTRAPRPLLIRGSKAGPSEGFDSRPRACRVRDDPRYVRYMAEARATLLRYPRTFPRLAGTIFVTESHRREASSPRTLSNGSGSGKSPAEARGLLSQPGYGQTVDSVNKPA

SEQ ID NO: 45222 - protein, 144 aa, Zea mays
  Coding DNA Sequence Number=SeqID_1847
MKKISAPSLEVKEEAASTPPAPPPSKELQEPVPLEEEFNPVLPSQSPSEEVINISSLLTHPGDVSDRSCVPALSEEKLPGLKKVFSKNIDHKLDLILTLCFHSHLNPSQEKSALPKKIPESLPLKPAISYRRNLSSRSVKKDRP

SEQ ID NO: 45223 - protein, 397 aa, Zea mays
  Coding DNA Sequence Number=SeqID_1848
  Homolog annotation: Hit_ID=Q6QP51; Match level="QueryCoverage=44%, HitCoverage=87%, E-value=5e-25, Identity=40%"; Hit description =Putative growth-regulating factor 1
  Subcellular localization annotation: CTP_CleavageSite=51; ConfidenceScore=5.38e-01
MAATGGRKQWSSRLQAHVPSWDSERALTHGVKTTRLAGDTFGRRSRRRFSSAMMTASKRDRERGYSERDPSLRMKRAPSPPTDQRFKGWPLGRVRQPPQSTQAPRLLLIRGSKAAPSEGFDSRLRALWLRAHYWLAPEEFDSRLIARRARDDSGYVRYTTKARATLPRKQRCLPRSDCVPLDRVRLTAAKSSFGRHGKLRLARPRARTQPRPRKTNSASPDPRARTQLGLGRRFPPHPTQGSDSASTPEDGLCLARPQGSDSASASEDGLRLARPRAWKADMGPIAAVEKSHRRRPIRATIGAGVEMFGRRASSPEDLFPPDRTAAVEGTNSGCHAVIPPSGRVRSPTPLSSVRPRHHGFDGLPAMVERGKLWGNAVFGAIADRQLGLAIVITVTAI

SEQ ID NO: 45224 - protein, 57 aa, Zea mays
  Coding DNA Sequence Number=SeqID_1849
MESHDLRAEWESRLVGGYEIDGFGHDYDAGCQHCNPCSGEDEAVEGDFQEFQDYDEF

SEQ ID NO: 45225 - protein, 203 aa, Zea mays
  Coding DNA Sequence Number=SeqID_1850
  Homolog annotation: Hit_ID=O48967; Match level="QueryCoverage=99%, HitCoverage=38%, E-value=2e-34, Identity=46%"; Hit description =Putative uncharacterized protein
MVHIVEHHDFMPEDFMVEEATASSTPRATNLPASGAAAAVHSARQHTPAQTSRASRAAPGALSAARELLRHPPSSTASPGAMKQWRDDVDRLLGMAHSGSARPMPRSSRRQHEASASVRSPSVRAASTKDLRAELNRRRAGEDAPVSLERSNDLRAELNRRRAGEDVRVSLERAREHRQNVEGRNLDYGFTVVAPQTPTGARI

SEQ ID NO: 45226 - protein, 195 aa, Zea mays
  Coding DNA Sequence Number=SeqID_1851
MMVYQFDYCVVYVASGSDELAIRKTTSHSNERPPRVRYPRYSSTSRREETSASSYPALETASPGAEPSIRRASPPASRQVGEKRACSGGSGGVELAPLRTEDARPTATEDPSEFPPARRWRVAIGKWLHRPPTSSKAAGERKRSSSPLSSSSSIRSTEADPRRPRSGAFKIMRFNFIHECLIAVSGFFNLDRIWG

SEQ ID NO: 45227 - protein, 189 aa, Zea mays
  Coding DNA Sequence Number=SeqID_1852
  Subcellular localization annotation: CTP_CleavageSite=75; ConfidenceScore=5.03e-01
MAQLTVDSLRAVGAPDMSGAHRTVWCPLLAVGSATCPAQIARPTVGSPDSPVHTGQSAMESENEKLRKALATLLRVVQKRSCDIVDVVKSAFQPFNSPLVDELNRALVEIDDLAKDLEDVAVQTQWEVENMANCEVNEHPRQEEAVEEVLIEDGSEDELLIDEESPINYEDLVGYDDGRDCSTDDTYPY

SEQ ID NO: 45228 - protein, 76 aa, Zea mays
  Coding DNA Sequence Number=SeqID_1853
  Subcellular localization annotation: CTP_CleavageSite=9; ConfidenceScore=5.33e-01
MSARLAACSAARLAARLAARSAARLAAPPAARPAARLAAPPAARLALGRAPWPLGRLSRPGSAAPARPAPGRFNRP

SEQ ID NO: 45229 - protein, 43 aa, Zea mays
  Coding DNA Sequence Number=SeqID_1854
MAPKRKTANSSAAVIPAIDPNSQLPFAVVPLPGVDATLDVSKP

SEQ ID NO: 45230 - protein, 157 aa, Zea mays
  Coding DNA Sequence Number=SeqID_1855
MGKDNKRKREPTPPSEEFGDSEYSEEEFSSEPEGSPAPVSPPASSDDSDDSQGIAAEVWTYIRAVERAGLEGSDESEYSSDEEDSDGGDEGEDDDDDDDDDDDGGSSGRGGGDGRGSTKGSSRCSTKGSSGGSGDNTRGSSRGSTKGGGGGRGRASG

SEQ ID NO: 45231 - protein, 190 aa, Zea mays
  Coding DNA Sequence Number=SeqID_1856
  Homolog annotation: Hit_ID=A2X959; Match level="QueryCoverage=100%, HitCoverage=61%, E-value=3e-51, Identity=60%"; Hit description =Putative uncharacterized protein
  Pfam annotation: Domain name=BSD; Domain location=18-83; Score=55.6; E_value=1.7e-13; Accession=PF03909.8; Description=BSD domain
MTISTFRDFPLQDEPEMSDVPTVSNVRQDLSEWQARHATLVLSAVKEISKFRYELCPRYMKERKFWRVYFLLVNSYIAPFEKKSLEELKVKAEEEKRDSQKQASQASTTFEPKDTKAPIKTSSTNPEHDLDVFLLGDLGSDDEGPVDDDDDLDEDFDKIDVTTQCRSLLQGLESDDDDKKIATGKAEDAK

SEQ ID NO: 45232 - protein, 84 aa, Zea mays
  Coding DNA Sequence Number=SeqID_1857
  Homolog annotation: Hit_ID=A2YLV0; Match level="QueryCoverage=53%, HitCoverage=8%, E-value=1e-07, Identity=66%"; Hit description =Putative uncharacterized protein
MSGAHRTVRCPLLAIDSATCPAQIARPTVGLADRWLTGQSGIVVLVTFLLRDKLSYIFTGDKVVSCTVTDLCPLLVGTIVLFGI

SEQ ID NO: 45233 - protein, 103 aa, Zea mays
  Coding DNA Sequence Number=SeqID_1858
MAKKKTKEAPATKEAATTDAVASLPPLTEAVMPQISSGEIIVQFRGKLKEKGRRVTPRVGQLQPSYVMSRPALAESRHKSAAEGERSLGWLTKRQGHSADLRG

SEQ ID NO: 45234 - protein, 575 aa, Zea mays
  Coding DNA Sequence Number=SeqID_1859
  Gene Ontology: Cellular component=integral to membrane; Biological process=transport
  Homolog annotation: Hit_ID=Q69U97; Match level="QueryCoverage=36%, HitCoverage=72%, E-value=7e-65, Identity=53%"; Hit description =Putative anthocyanin-related membrane protein 1
  Pfam annotation: Domain name=DUF914; Domain location=87-372; Score =140.1; E_value=6.3e-39; Accession=PF06027.3; Description=Eukaryotic protein of unknown function (DUF914)
MVISAKPSFASMDAQVVFAEMPQRYIITFFSDSAGEMLPCLDTNVYDAKRGFVAKIDEYSVVLWPPFTDYLNWMLSRQPWPPPILLAKLDVPEILLAMICCSGIGDRKAKLQAQFTQMRPVVRVAQDAQDLLVECCVWFINLLSSESNEVHSYKQSLLNYILLDIIDVEVHYIVVSAYQYTSLTSVMLRNCWSVPCVIVCSWIFLKAKYGLRNLLGVGVCVARLILVLFSDVHAFGREKGLNFLTGDLLVIGGSMLHAFSRVTKEYFVHESTRVEVMAMLGVFRAIINGIQISIFKQKELRSTHWTADMWAVLMRTIAYQEKVDVMYFISFVGTATGFVIYSYRGSRQNTRETARVTHAMDEEAAAANNTAQVPVTFGQCLQFSWDPGGSNATHRLEGKPNFKKRGMLGKMNESLDRKGMPVFPEHPTIKVYEEGGSNQTLEDNVVVIFICLTEPRSHTTLWVADFPVFLDENLKDIFHWQELAFLAWEPWVEASRQPWRRFPELEVERISAIQDLHRSGKPLSAMVLQRASQFTVSKPWQSLNKFKSVDEALCDRSASNEPDLVSVDDPVNLSL

SEQ ID NO: 45235 - protein, 268 aa, Zea mays
  Coding DNA Sequence Number=SeqID_1860
MEVHCQTNFCQNEDGFPKLLRACTVRLGIRSQPEYDGREFVEHGTEKCVVTVYIGSSPHHVEWSVTAVGHRFRDTCQVIARKALRALCQIYEEVADTSLRFFPPFQRDRPVWMARMCALEGQQLLEDDPTVVYLTAYLLTLEAQYDFLARHHRQMIARTENVEKHNRQLHVDLTSPQARVAAFESREVIAVEALKQAKDEHVQKLMEAYLDVDKQEHPESSQDPPPELFEPLTMKKILAPSLEIKEEAVSTPPAPPPSEELQEPVPLE

SEQ ID NO: 45236 - protein, 62 aa, Zea mays
  Coding DNA Sequence Number=SeqID_1861
MAVGVSEALYAKAVSPDLLTGNRWGRLMYLLDLVDGVTWPSSLPPGQMVEWVTASAGEDQEE

SEQ ID NO: 45237 - protein, 284 aa, Zea mays
  Coding DNA Sequence Number=SeqID_1862
MTSHGSSDDGNALTHTDGLAREGFPRILWEVLQGAGYTTPPQYAVQQFEKHRVPRCRVRMTLEPHPLQPGWRSLDSESFGYRAEDTIEAIALYGLTTFCGFHPLELATHPIGLFPAEKEDDPMWKDRVEHAKDIWAIYPGQTAHLTVRCMNALYRLQVMRGEAMSHLMALLEATKITLDNREELVVDLSQEMVEKDLQVEQLSGEIHELEELVGTRENTIEVLEDQLLNTQQQLAEANEHLDMHHQEDDEDVDIEGGDEPASSMDTAGSGRPPSPESSVASFAH

SEQ ID NO: 45238 - protein, 46 aa, Zea mays
  Coding DNA Sequence Number=SeqID_1863
MSRVESRLLTPGSLEEMVAGITWPTTLPPGWTVEWDPASAEEEHEE

SEQ ID NO: 45239 - protein, 661 aa, Zea mays
  Coding DNA Sequence Number=SeqID_1864
  Homolog annotation: Hit_ID=O48967; Match level="QueryCoverage=19%, HitCoverage=28%, E-value=3e-36, Identity=62%"; Hit description =Putative uncharacterized protein
MEPGGGTAVGAVESLLTSSCFRKGAESRRRHRVCGAPSLPIWRSEPDGTPVLLGDVEAPPKPRSSLSSVAEVESEPLGRARRRPSAEARAESEPWGRAKRSSSSSGAEPESEPWVGRSRVHRLPGLSPSPRPGSGGAEFAVFRDLARVRALGRAERSSPSSGAEPESEPWVGRSGVRRLPGLSPSPSPGSGGAEFAVFRDLARVRALGRAERSGAVLLSGRSVERRSDDGHFGSAGWGACVRIKGLGRAGNTFAVGGGPRARRKSSGLYADGGYQLRIRSLEGTPNYGPRQIAQPSSKETPTSRYPGKGGRHVARGDNTLQGINGGSGPPWEGVGPQHIRTGPLGRVQDLRGYRPDPRDGSRTSLCRVWATLSRVPGFWGREYPGLNQGQAGVRSRHVSRPYHVHFRSPLMRRPDAATWHIARDVSQRAEPDVRPLGCAVSAFIAEKTRHLTIPLTERLPLHAKATQIVDIRAQGDYSSNEHQFAPRRVHSATQPENFLSDIWRASMMVQIVEHRAETSVDFLVEEEAASSTPQVPNHPLSGTAAVHAARQHTAAQTSRTPSRAAPGALSAAQELLRHPPSSTASSGAIKQWRDDVDRLLGMAHSTSTRSRPRSSRHQHEASASVRSPSVRGAQTNDLPCGGGCPDLSGEGARAPTKLRGS

SEQ ID NO: 45240 - protein, 24 aa, Zea mays
  Coding DNA Sequence Number=SeqID_1865
MANSGDDGGGSNGEERFSFKKNCY

SEQ ID NO: 45241 - protein, 360 aa, Zea mays
  Coding DNA Sequence Number=SeqID_1866
  Homolog annotation: Hit_ID=Q6J9V9; Match level="QueryCoverage=30%, HitCoverage=30%, E-value=2e-11, Identity=46%"; Hit description =Putative uncharacterized protein
MQAACDRTKGAHPLDFDASSMEAQAHTPCNQFVDCYVQETAPPLAPLPCLLDCGTSTATRGNPAHDPTVPTRHIGHGSVSRGRRRDGRYGQKWADSNGGGRRAEAAVKVVNQAHVPSWDSERTLSHGTGKGDTPKGILLREGNGPRAPLLIRGSKAGPSEGFNSRLRALGLRAHYWSEVRRPTPRKGSTATSGHSGSAPTTDQRLAFEGFDSRLRRRARDDPGYVRYITKARATLPSSLETPCSAPSKGNMALSPPPPCGKATQGPKSGLERHRKLRLARPQGSDSASAPEDDELRLARPQGSDSALASADDLRLARPRGSDSTSTSEDRLDLDLGGASASPDPGLGPTTSQEGPSFPYP

SEQ ID NO: 45242 - protein, 24 aa, Zea mays
  Coding DNA Sequence Number=SeqID_1867
MDAVQANGDRSNFAINGVEVYTIS

SEQ ID NO: 45243 - protein, 214 aa, Zea mays
  Coding DNA Sequence Number=SeqID_1868
MTTRRGGAEEPSRRSSGAGVGAATLATVKGQGTTTTAVVNERVRIEEIARTCEDEDGGRGSFATGPRRRRIGPFEGPDHASPEPSLGQGQTRRISVSPEAPLQRQAYFWLARGPVFAKKQPWPSRHANRPNRREGQRRLHRSDCCATRQSEADRQSGPASDTIGNSAPPDPGLGLGLSPGRRRTPLRPTQGSNSGSAPEDDELRSARPQGSDSG

SEQ ID NO: 45244 - protein, 108 aa, Zea mays
  Coding DNA Sequence Number=SeqID_1869
  Subcellular localization annotation: CTP_CleavageSite=48; ConfidenceScore=5.62e-01
MCSSHGNTWGVTTTSPKFSLGRNRELRLARPQASASGEGLRFARPQASASASASGEGLRLARPRASASASGRVTSSPDLNLSFRRSLRLARPRPRTDYATGDTSLPYP

SEQ ID NO: 45245 - protein, 177 aa, Zea mays
  Coding DNA Sequence Number=SeqID_1870
  Homolog annotation: Hit_ID=Q6QP51; Match level="QueryCoverage=68%, HitCoverage=52%, E-value=1e-22, Identity=52%"; Hit description =Putative growth-regulating factor 1
MTLGTSVTWPRLGLLPRGTLGHFRDQRERFVMESHRREAPSPRTLSNGSGSSKSPAGKQHCSPRSDYCANHQGKTNDNKSRPPPSSASSATGSSASPDLRPRPQLRPREKVSASPDPRPQPRPREKVSASPDLGPRPLEESHPRPTSTSASGEVSASPDLGLGPTTPLGIHHYPTPS

SEQ ID NO: 45246 - protein, 272 aa, Zea mays
  Coding DNA Sequence Number=SeqID_1871
  Gene Ontology: Mol. function=kinase activity
  Homolog annotation: Hit_ID=Q6QP54; Match level="QueryCoverage=33%, HitCoverage=32%, E-value=3e-21, Identity=60%"; Hit description =Putative kinase
MASLDHPDCFQSEATLNLVRDLLGWSAPAYAARIRVGAAPLGDLAFGEFVLVGVSRPGGPSGRRVSAACPSPDGSSAWASAKGGKERGGRIPARERWESHGLHVRPVPRSGALAVADYKRPRGRKERIQVYNGDVAECYVSSGGRASALSTCQCGSRRDLGTLLLRAAVVTRLVGRHHCLSGGASQTGHRSCSLRLESARGRVMMALPVDVAGLCPRLGDVEAPPKPRSSLSSMAEAESEPLGRARRRSSAEARAVSEPWGRAKRSSSSSGS

SEQ ID NO: 45247 - protein, 733 aa, Zea mays
  Coding DNA Sequence Number=SeqID_1872
  Gene Ontology: Mol. function=transporter activity; Cellular component= membrane; Biological process=oligopeptide transport
  Homolog annotation: Hit_ID=A2X8H2; Match level="QueryCoverage=81%, HitCoverage=98%, E-value=0.0, Identity=72%"; Hit description =Putative uncharacterized protein
  Pfam annotation: Domain name=MFS_1; Domain location=59-523; Score =7.5; E_value=0.011; Accession=PF07690.7; Description=Major Facilitator Superfamily
  Pfam annotation: Domain name=PTR2; Domain location=121-519; Score =297.1; E_value=3.3e-86; Accession=PF00854.12; Description=POT family
  Pfam module annotation: Pfam domain module=MFS_1::PTR2; Domain location=59-523::121-519
SANDGAGDTKMRAIVVVEEGEMSAPAATPKQGKCCEYTLDGSVDMKGRPAVKGKSGGWLAVNQGLATLAFFGVNVNLVLFLTRVLGQSNGDAANNVSKWTGTVYMFSLIGAFLSDSYWGRYKTCAIFQAIFVLGLALLSVSSHLYLIRPDGCGMEHAPCGPHSGKELGIFYIALYMIAFGNGGYQPNIATLGADQFDEEDPAEAHSKVSFFSYFYLALNLGSLFSNTFLSYLEDKGSWALGFWASTAAAATALLLFLSGTLRYRYFQPGGNPIGRIGQVAIAACRNWKAGVSTEVVSLYEGDEKADAGGRKLLHTQGFSFLDRAAHADTDSKLGARDPWKLCSVTQVEEVKSILRLLPIWLCTILYSVVFTQMASLFVVQGAAMRRTTPFSGFSVPPSSMSAFDILTVAATIFLYRRTICPFLARLSGRPAGPTELQRMGLGLVVGALAMTTAGTVEHFRKARATAAMSSDLHIMWQVPQYALIGVSEVMMYVGQLEFFNGQMPDGLKSFGSALCMMSMSLGNYFSDIIVSAVTRLTTTRGRSGWIPADLNEGHLDKFYFLLAVLAVADFAVYLVCASRYGSGKVDGRSSDDEEEGAAGQASFAPSSATAPASHAAVQPPPDSPPHTAAAPTARKNTTHTGAGAETDHHGTTSSSGCLWPRHPSMLDFPPSSRSPASRSGSSTWRDSSSLSSMAAAQKQREKAASQVWRAVVGWIGFLVQVLLQILRGTPSCA

SEQ ID NO: 45248 - protein, 100 aa, Zea mays
  Coding DNA Sequence Number=SeqID_1873
  Gene Ontology: Mol. function=protein dimerization activity; Cellular component=nucleus; Biological process=regulation of transcription, DNA-dependent
  Homolog annotation: Hit_ID=Q2QQX6; Match level="QueryCoverage=35%, HitCoverage=4%, E-value=1e-09, Identity=77%"; Hit description=Auxin response factor 24
MCSGGGAPLPLQRARKPTQPYLSLISPINPPRGLGAEAGRRGGGKDALFVELWKACAGPLSCVPPLGEKVYYLPQGHIEQEQIVEEDAVKFVCREAKQMH

SEQ ID NO: 45249 - protein, 302 aa, Zea mays
  Coding DNA Sequence Number=SeqID_1874
MRGLPRVAALVLKLIFLVFCDSPEKTWHWCEWRCDFSALGNRLASCMTCGPGPPCWTAGCREAEGAHNREAVVCFLCVGSPFRPLVSVKMRERLTAGRLHAPRASGHITTGQLHALVRWFTFFVLQPGCSPPPVVVQKDDHQPRGGEKQVGLRPPSCPQLQGCSSSLLGWKASRVEVLPSAWAGDPLLSPALGEEAFTSLEEEANFGYAGPAGYKRRQLPRAWLPGSDGSGAASDAASCRLVGARLSVHRTGDGRAEDGGEDLFAVALTLRWSLLLASHPERRSLSLLVQRWSLLKVPFAQE

SEQ ID NO: 45250 - protein, 158 aa, Zea mays
  Coding DNA Sequence Number=SeqID_1875
  Subcellular localization annotation: CTP_CleavageSite=67; ConfidenceScore=5.62e-01
MGTTSHRGLVARESPGSKENSAARSAIVRRRCLGSKASSSVSPPVCSKVATISPPIFSKVVSVSPPVCSEVATESTRVIWHHASSEGGEDFGEGLAVPPLGGCAGGQMALREECAGADVEDGICRNPPMSGCGSSDLWRRGGLGIRDIGLGGRHGGGV

SEQ ID NO: 45251 - protein, 81 aa, Zea mays
  Coding DNA Sequence Number=SeqID_1876
MGWRETEHEGGDRGFVLSCARLEEHLHVFDALYARQSTPAPDPARPAPRQAAPASPARARAYKSPSGIDRTPPRTLDLTGA

SEQ ID NO: 45252 - protein, 161 aa, Zea mays
  Coding DNA Sequence Number=SeqID_1877
MDRLICSPNDEIDLGEVFGTLNVEGSGSALFALFVHQPPPGNFRAFVPRAGDCVFRGRALDPARFAAGIEPGGREAAVQRGIYRRRARNPWNRGGATHRNRRSKPASPCSSPESRHRQKASSSADFVEGSRQKEEKLLAAVVFVFDSVHRARSAKSEGLRS

SEQ ID NO: 45253 - protein, 57 aa, Zea mays
  Coding DNA Sequence Number=SeqID_1878
MAHQTVRCATGAPTVRHRENTAADQPGPTWQMVHRTVRCTPDSPVPLSQKPYLLFFS

SEQ ID NO: 45254 - protein, 169 aa, Zea mays
  Coding DNA Sequence Number=SeqID_1879
MARTLRWSPLLGRLPDVEVVAAAGPRYGTRLSGYTGSRPPQETSFRVRDQAKRPQRLRTTPWNGLPFFGISPQAIGPSCFHREVLNCKPGRSIRMSLCLMERELFGDAPVVRKRYSFSHSKIVTSGSAYSRHLEGSFSAGGELRSPSWFGTWTRGESRRVSGGRQASAP

SEQ ID NO: 45255 - protein, 30 aa, Zea mays
  Coding DNA Sequence Number=SeqID_1880
MTKVMLAEGVQSSRNGRKQGYKRDVNAKSA

SEQ ID NO: 45256 - protein, 319 aa, Zea mays
  Coding DNA Sequence Number=SeqID_1881
MGNGRYEVNAQQVLRERAGIVRLLGIGVLRGNDARLRLRREVDARRVPCWGADAVDSLDSRRGAASCLAMPAPPPPPSVGKVTGQTRMLLFRHVGKTSLIPPPAGGLTAAIVVVARRRKEYHVVAAVDGHELKTPKTEHRPGLKWLLETVHLELDGKLFVNTQQAPTWRANCRRFDPGGSLDRRPGVGRGGDSSEVEAESGPGCRARRRSLSEVEDESEPWGWARRSPSSEVEVESEPWGRAMRSPSSDVEVEPELWGRARRSFLWRPRLDLAAVSLTLSSGTAVGAGQSTLFSCQVSQWSGEVTAVTSALSTEERASG

SEQ ID NO: 45257 - protein, 134 aa, Zea mays
  Coding DNA Sequence Number=SeqID_1882
  Subcellular localization annotation: CTP_CleavageSite=74; ConfidenceScore=5.20e-01
MVLAVVVLLGAVAVLVVVLLLLPRVPYVAVRAGWRCSAPTRSACPPGASSRWRTWRAHRAPRWATPAAPPWRPRSATAWCRSGWMGRPRRDGRSRGSSASTSGRAWRASSASSGPNEHRAPLQNASPKSKFLFF

SEQ ID NO: 45258 - protein, 209 aa, Zea mays
  Coding DNA Sequence Number=SeqID_1883
  Gene Ontology: Mol. function=transcription factor activity; Cellular component=nucleus; Biological process=regulation of transcription, DNA-dependent
  Homolog annotation: Hit_ID=A2X897; Match level="QueryCoverage=99%, HitCoverage=81%, E-value=2e-42, Identity=49%"; Hit description =Putative uncharacterized protein
  Pfam annotation: Domain name=AP2; Domain location=21-71; Score=58.6; E_value=2.1e-14; Accession=PF00847.11; Description=AP2 domain
MATTTATSSGEPSPRSSGKHAFYRGIRCRSGKWVSEIREPRKARRIWLGTYPMAEMAAAAYDVAARALRGADAVLNFPGAIASRAAPASASPEDIRAAAAAAAAAAQLEYSHQGRTANPPPPPASPPSPAAAAAQDWHQQHDAAASYTPQQEAGTDEFMDEEAIFEMPQLLRNMAAGMMMSPPRLSPDTSDESPDPSEAGESLWSYRDP

SEQ ID NO: 45259 - protein, 113 aa, Zea mays
  Coding DNA Sequence Number=SeqID_1884
MGGGQLIVFPKIGGGIIQLGGPAGRGEDVRAVAQTRFGENLELELTVAGLGVILDDGLQGLKVVLTTLISDLGHIEVKWYFLQINPKLRVLLSSPHICEPKDLRHLFGLVFAL

SEQ ID NO: 45260 - protein, 524 aa, Zea mays
  Coding DNA Sequence Number=SeqID_1885
  Gene Ontology: Mol. function=pyruvate kinase activity; Cellular component=chloroplast; Biological process=glycolysis
  Homolog annotation: Hit_ID=A2WX15; Match level="QueryCoverage=99%, HitCoverage=78%, E-value=0.0, Identity=81%"; Hit description =Pyruvate kinase
  Pfam annotation: Domain name=PK; Domain location=105-466; Score =429.4; E_value=5.2e-126; Accession=PF00224.12; Description=Pyruvate kinase, barrel domain
  Subcellular localization annotation: CTP_CleavageSite=41; ConfidenceScore=5.50e-01
MAAQVVAAAGTPVARPLGGGSGADALRPAARMPRERRTGAVAARGRRESQVVSVISRAPRPDAGVLPVSPDDDAAVKEEANFQHLKAIQQLATAANGVWSKPNVRRKTKIVCTIGPSTNTRDMIWKLAETGMNVARLNMSHGDHASHQKVIDLVKEYNASHADNVIAIMLDTKGPEVRSGDLPQPIFLESGQEFTFTIKRGVGTDTCVSVNYDDFVNDVEVGDMLLVDGGMMSFLVKSKTEDSVKCEVIDGGELKSRRHLNVRGKSATLPSITDKDWDDIKFGVDNQVDYYAVSFVKDAQVVHELKDYLKSCNADIHVIVKIESADSIPNLHSIITASDGFKGRHINFTTVNYCLFDILGAMVARGDLGAELPIEEVPLLQEEIIRMCRSMGKAVIVATNMLESMIVHPTPTRAEVSDIAIAVREGADAVMLSGETAHGKFPLKAVKVMHTVALRTEATIPGGETPADLGQAFKNHMSEMFAYHATMMSNTLRTSIVVFTRTGFMAILLSHYRPSGTIFAFTDE

SEQ ID NO: 45261 - protein, 96 aa, Zea mays
  Coding DNA Sequence Number=SeqID_1886
MHERISSVGMGNPLGTRNPHGYGLGQNFIPVMGMDFLAGVFFLRGYEFGQVIPNGFLPIAISKRGRVCFQTPPLAGGGAGGATRHCEFVIVTFLET

SEQ ID NO: 45262 - protein, 143 aa, Zea mays
  Coding DNA Sequence Number=SeqID_1887
MCGGVKGLCPGTDRAPKLGGYPGEEVSEGGKRVGLQPKGESPKEMGVVVQNDQVVFVAGEAKDRRRPKVTVDKIKGLNSPGRGSGKRKTGVTAKLTSMTEALRRAPSIGYDRVASKLGHDVRSRVPEATVPNGGGGGGSSKSM

SEQ ID NO: 45263 - protein, 149 aa, Zea mays
  Coding DNA Sequence Number=SeqID_1888
  Gene Ontology: Mol. function=protein serine/threonine kinase activity; Biological process=protein amino acid phosphorylation
  Homolog annotation: Hit_ID=A3AYY3; Match level="QueryCoverage=95%, HitCoverage=23%, E-value=2e-17, Identity=39%"; Hit description =Putative uncharacterized protein
MEHDLAGLPATPGLKFSEPQVYPLNLSFGIPFVLRFKFSLQKMVISDAKEPCILTNEHQTDVKAIEWRPISGKMIAFACKVGNSYTAWIKQYIISAMVTRCRLPLLSLIQVEQLHKIFKLCGSPSEEFWANLKLSRATIFKPHIRTADV

SEQ ID NO: 45264 - protein, 443 aa, Zea mays
  Coding DNA Sequence Number=SeqID_1889
  Gene Ontology: Mol. function=cysteine-type peptidase activity; Biological process=proteolysis
  Homolog annotation: Hit_ID=Q109R5; Match level="QueryCoverage=35%, HitCoverage=18%, E-value=1e-11, Identity=26%"; Hit description=Ulp1 protease family, C-terminal catalytic domain containing protein
MDSLDETNEVPVDDSQLDKHSTVDNESPLDGKIDEHTRLPIHPIEEDIFGTQINYLAPIDECKFALHHNKPKKDMATVIVQEDYMCNQGDMTLIESIKNIPYATMDVELVCIGSQVISKKFMECLFQPDSYLRDEIINSYIYLLIAQEHMKQRPGGTVHIEITFVFITINIRELHWYLVVLNAKRREIQILDSLGSSLGHKYLDCVLKGLQKQIDGVSHYMKLKDHNWLDLQVVYWPWKLIEFKDAKQTDMPKLTAILLSSDLNKRKGCLLYKNKTNKSTEDNETNSSGVEILEPSPNPNKRKRSPPISPEDDHISLYFEEICAKEENDVIPNPTFVNECGQDSLISGLSTKDMPVRKADMIEFLCDYIMTIQDATILDVNTGHFALHIMEWWESGLKAQFSMDGATLHRNLLIDLLTYEGNTYRFNIPVNIREYLDRIMEKD

SEQ ID NO: 45265 - protein, 54 aa, Zea mays
  Coding DNA Sequence Number=SeqID_1890
MSQGIIRIKPKGKAGLQKCSSGTPRSYPGTEVAVPGYNFVKLFDFSFNMIEGLG

SEQ ID NO: 45266 - protein, 322 aa, Zea mays
  Coding DNA Sequence Number=SeqID_1891
  Subcellular localization annotation: CTP_CleavageSite=80; ConfidenceScore=5.70e-01
MKRAVFWAASGRQKQKPRPNAQILGSFSRPRFAQKPRASHETKSRAKQASSGSRGLAIGFPPRPRLRGLSPRKDRRRRLRRSGSGATTTLPFAHPPHSSSGTRFICIPFRIRSSSSPGCLVSKRAVTIAAVVDGSVTLHCARVLTEEPQLRRQLPLPSSTLDSSPLSHLGVFADTIFVSPISFSSRTKQEYPSDFRINSGYSSEVPRSTSAKEISDKIFSVARETIRPGRGLTSFDATKLRVALEEIACMLEQDSLVLQEHLDIVNNFNIPVDSSYEPSTLSSPPPSDDDLTPHWDFAEHFQNFWGVEYDSDQMSSFNDNDV

SEQ ID NO: 45267 - protein, 60 aa, Zea mays
  Coding DNA Sequence Number=SeqID_1892
MAQSQLTAIFTSQARAILLPQPPNASEERQRKNGNLLGSDAPELWEDSPGRDSGKGEERL

SEQ ID NO: 45268 - protein, 635 aa, Zea mays
  Coding DNA Sequence Number=SeqID_1893
  Gene Ontology: Mol. function=DNA binding; Biological process =regulation of transcription
  Homolog annotation: Hit_ID=A7QBW0; Match level="QueryCoverage=42%, HitCoverage=100%, E-value=1e-108, Identity=66%"; Hit description =Chromosome chr1 scaffold_75, whole genome shotgun sequence
  Subcellular localization annotation: CTP_CleavageSite=74; ConfidenceScore=5.55e-01
MARPARKALIGAPSAARSRGLRRHAFPRSAVALFLALLVALSLAVLYRAAVSRSLGTSWSWGWDSLALPSFATSQEEEGAEGDDLDSEDLKLERVLKKASMRDNTVILTTLNAAWASPGSLIDLFIDSFRSGVRTNLLLKHLVIVAFDWKAYEECVKIHPYCFALGTDGVDFSEEKRFLTSGYLEMMWRRLDFLRLVLEKGYNFIFSDADIMWFRNPFPHFYPDVDFQIACDHYVRNATDLRNIANGGFSYVKSNERSIEFYSFWYSSRLRYPGYHDQDVFNAIKHDPYIVHIGLTFKFLSTKYFGGFCEPSRDLNEVCTMHANCCIGLQSKIHDLKIMMEDWRSYLSLPPNLKRLQISTWRVPQNCRNAQNWRIHTATLTGACALLCRTLEKGYPLLQYKDTVPAAISSRVVKKLCVGPDHGSPQPQATTLRQQQHPTPPRGRLRGRHVARKDNISQSINSESGPPWESVGPLYIQIEPQGKVQGLHVREPDPLDGFRTPLCGVRATHSRVPGFWDKEYPHLNQGQTGVRSQHVSGPYCIRFRSPLRALRGMMHVTRCAASAFNEPCPFLWRTATRPSRMRRACPIRWQATCPHCHMRYTHDDSRVTEKAAARYQYYMDYIHYGARRSPMRYRH

SEQ ID NO: 45269 - protein, 33 aa, Zea mays
  Coding DNA Sequence Number=SeqID_1894
MGGPVRTVTLVRACVRWLTLAARPGRQDFYFNA

SEQ ID NO: 45270 - protein, 214 aa, Zea mays
  Coding DNA Sequence Number=SeqID_1895
MGTDTAVDVTEAGLTMSASVGTLKRRASHQTGPPGKVQGLHVLESDPLDGFRTPLCGSRHVSGPYCIRFCSPLKRSPDAATWHGARDVSQRVEPDVRPLGHVAAAFNAAKAHRLSIPLAGDVPPQHLMSPVHSTGRRCAASAFNEPCPFLWRTTTRPSRRRRACLIGWQAACPHCHMRYTHDDSRITDEAAARYQYYMDYGHYDARRSPRHYMH

SEQ ID NO: 45271 - protein, 1070 aa, Zea mays
  Coding DNA Sequence Number=SeqID_1896
MLDEAARWDDLVVGLRPMSNGAKDVLARCLVSVGPATTAKASSEGCDWVTLAAESLVSRGTEEVPMPKGELVVFEAFFAAGLRLPAHRFVGEPSVEVFAKYYCLHWQKRMIGDEVAQFGSCTFTPKTDKTTMEVVELVPCARNKWGNWQDFWFYVAEGTVEDHPGLPVSEMCSHFYLAYPPFEVAEEDADEGALRCAAGLSSGRDLVEEFIAYGVWPLAHGWALGEVCPRRMPSHGGKLVRSPVFALDLHSRDPAAFVREAEDGAVRIVGQYVPRTEGQRSWDIRGSNDRLNRVFEMNRLPYGGYPGQDDVDRRGKKPAVESGDDPAPAAAPSSKKRKLGTAVGGLGVSDGFARELMRTCAAPGGRMSSPELRESSTRMLRVTRGWWPRNVPIPRAAGEDFFTSRMVREWKVFPYGRNIAVVVSAVMDKDRQGAAQKRQAVVRLHEARLKRQRGAAKATAPGGGLPPLAAKSAIPASSRAPEAAAAAGGSKTAKAAPASGRVPEAMKAARGLPPPGKRVADFATDISVEDYLVGLDEGQLVVDPPAAATTAVAVVPKAKGGALSAGGEMPALAAVRDEAGAVSRGLKEVKEALSQAADFADRAASGAFTAVVSAEVERLRMQHADAVREKLAADSKCRKLADKVAALVGEKTDLRRQLAEERREANEALAKAQAAQAEANLARVEGGLARERAEQLEERLRALQSRVERAEAATRTEVERTRKQLMDSYHELGAWTAEFEVPDREPGLRCLEWVQEELQALPTIVEGFMSYASLVTCEGAMNALSREGYRHYEVFDQADEDFERDIYKVEDSIVKESAGALYDRMWGPYGREVVRERAETARGQAARGERVDDFRALNSTLPDPESNPAEAALEPLPETAEGAPDAPAAAAAGEGPPPETAEGVPDAPAAAAAGEGPPPTAAPRVEDPATVAAEATAEAPATAGSSQVQDFGPAHATATTNFLAASIVDDGNKLDGSISKFSDFGDSGSLVEWTEESSDEDLDYFAALDVAAAEASPRTADAEDVPGPSTGCRRRRAVAKRRVSGADSSRLRVSRAGRQELLSLPATVST

SEQ ID NO: 45272 - protein, 420 aa, Zea mays
  Coding DNA Sequence Number=SeqID_1897
  Gene Ontology: Mol. function=histone acetyltransferase activity; Cellular component=cytoplasm; Biological process=metabolic process
  Homolog annotation: Hit_ID=Q8LPU4; Match level="QueryCoverage=37%, HitCoverage=44%, E-value=1e-65, Identity=68%"; Hit description =Histone acetyltransferase type B catalytic subunit
MSKREHIVHEKEIAISDIQQTVESVQLDIKHLLEAAAAKVAEVQLEVNQLYGFAETLNSLNIIQEHDIVFKDMLHSELTGLTNTIGESYRIQDECKLPMHISPDVNLDRHQEANGGSEQEGVELELQRELGPEKLREKLRQECLWKGTELAHGVADALFAVSPTEDLDGPIVHLPPPAVRLPREKHVSEEAGNHLFVESCIPLHDFTYIIISHDNATVTLLSNSHVSFLQLGAGTSLPGLVAAKILVLPPYQGEGYGLGLLEAINYIAQSKNIYDVTIESPSDSLQYVRSSIDCLCLLMFDPIKPALGAIVSSLKETNLSKRAQSLRMVPPADLMETICQKLKIKKKQFLRFNKEASFAVYWTHEIGDEDEQTVEQQPEDLRTQEQQLNELVDIQIEDIAGVAKNVTSRGKDKMAELAVQ

SEQ ID NO: 45273 - protein, 248 aa, Zea mays
  Coding DNA Sequence Number=SeqID_1898
  Subcellular localization annotation: CTP_CleavageSite=79; ConfidenceScore=5.61e-01
MVAIQGGRLPFKGDSPHLRPQPSRTESSPTRSKVFPLRHRGWVPRVMQAGPGQKKPNRRAQSARTSGTFGRRSRRRFTSAMMTASKRDRERGYSERDPSSRRKRAPSPPTDQRLAPEGFDSRLRARRARDDSGYVRYMAEARATLPRSRLRPLKGHDLASPEPSLGQRQPTQEDSRLARGARTQPRPRKAVSVSPDPRARTQPRPWKTVSASPDPRAQTRPRPRRSLRLARPRARTDHVTGGPSLPYS

SEQ ID NO: 45274 - protein, 186 aa, Zea mays
  Coding DNA Sequence Number=SeqID_1899
  Pfam annotation: Domain name=IQ; Domain location=34-54; Score=25.8; E_ value=0.00016; Accession=PF00612.18; Description=IQ calmodulin -binding motif
  Subcellular localization annotation: CTP_CleavageSite=58; ConfidenceScore=5.03e-01
MQASLRMVEHGLLQIKAAVQHEQQQPVLSARLQMSAAVGIQAAARGFLTRRRVREMCRQMLEVALVTVDLGTWGRDLALSTGHQQRHQTTISKCEHGTCPAGDKLQLYDSDGREGTPLIIDKSALFSATIFRYRPPRGRLRWLLLRHIPGARPCAPLSSRWHPWDPGGCTRASLMRGGCPPYHMRS

SEQ ID NO: 45275 - protein, 579 aa, Zea mays
  Coding DNA Sequence Number=SeqID_1900
  Homolog annotation: Hit_ID=Q6J9V9; Match level="QueryCoverage=15%, HitCoverage=32%, E-value=2e-08, Identity=42%"; Hit description =Putative uncharacterized protein
MKILEAERWLKGTNSHGVAFLQRQGGRTVGVPHPGARKPSWAESSPTRSKVLPLQHGGWVPHVMQAGPEQKKPNRARCMQPPSGYKQFSTFAQTSGRKGGQPYRRHATAPSGRASPTSNAPSMEAHAHASCNRRAGRYVQATAPPLAPLSRLLDYGTSTATRGNPAYDPAVPARRDGQCGQKWAGSDGGGRRAGAAVASSAKLTSHPGAVREPSLTGPGKGDTPKRTLLREGNRLRASLLIRGSKAGPSEGFNSRLRARGLHPHYWSEAGPRRVHSRLRHRARDDHGYVRYITKARATLPRYFWARLWASSRPLTNGARTSARITHQQLTGDTMFGAHRGGSGAALANPAPAKPLTASTYQPENLEPDPDPGGSPSRPRPPSGDEHTSGSPEALSSPRSNPDQIAAPTDQIAGAFNEKKDSAACAAPIAVPFDRVRGQAVSPGLWHHRKLRFARPRARTRAQPRKTANSAPPDPGLGLGLSPRRRRTPLRPTQGSDLGSVPEDDELRFARPQGLDSALASADGLRLARPRGSDSTSATEDRLDLDLGGASTSPNLGCGPTTSTGGAIITLPQAGSGYGK

SEQ ID NO: 45276 - protein, 313 aa, Zea mays
  Coding DNA Sequence Number=SeqID_1901
  Subcellular localization annotation: CTP_CleavageSite=70; ConfidenceScore=5.17e-01
MQSGCTPPPVVTQDGDLQFDGGGKQAGLRPLPLPQPQGFSSSVLGRGVCRVGVSPCVGGGLLLPSVIEGRAFAVRGAGGCRVPGSRTRVASEPLPAPPPATAAGRGSSADEIAGAAHGPTSNSTAFCPSLPHEFGHERGPPGSSIRPEVIAAAVRPPGAEVVVVVAAGAGDVKGTPRPLFDEPRPGVAVSARTEAELARKEDLVGRSLAGSSVSRTDTGVDLPRPRAGLMSSGDSWPRPRGDQPSRLLEPDSWRRPRRRWPGRDDEVILQSGDPRTTSPSEARSDLAEGVVNAEGAAAPFSRQDLSLQDRIIL

SEQ ID NO: 45277 - protein, 20 aa, Zea mays
  Coding DNA Sequence Number=SeqID_1902
MTVKNMYRRMRHMEDAMMSS

SEQ ID NO: 45278 - protein, 399 aa, Zea mays
  Coding DNA Sequence Number=SeqID_1903
  Homolog annotation: Hit_ID=Q6J9V9; Match level="QueryCoverage=41%, HitCoverage=40%, E-value=2e-16, Identity=38%"; Hit description =Putative uncharacterized protein
MQAACNRTKGAHPFDFDASSMEAQAHTSCNQRAGCYVQETAPPLAPLPCLLDCGTSTATRGNPAHDPTVPTRHIGHGPVSRGRRRDGRYGQKWADSNGGGRRAEAAVKSDRERGYPERDPSPRRKRAPSPLLIRGSKAGPSEGFNSRLRALGLRARYWLEVRRPTPRKGSTAASGHSGSAPTTDQGFVGWPSKGFNNRLRRRARDDPGYVRCITKARATLPRYPRTFPRPTGTIFVTESHQREASSPRTPSKGDRVRQITCRVRLTAVKSGLWCHRKLRLARPRARTRAWPRKTTNSASPDPGLGLGLGPGRRRTPPRPTQGSDSSSAPEDDELRLARPQGSDSASASADGLRLARPKGSDSTSTSEDRLDLDLGGASASPYSGLGPTTSQKGPSLPYP

SEQ ID NO: 45279 - protein, 63 aa, Zea mays
  Coding DNA Sequence Number=SeqID_1904
MADVIPIAPSLDDMWGPFARTPVLVLHLAMPRRRSHRDPNGNNKLAGAKGSSITIRNQLSGIP

SEQ ID NO: 45280 - protein, 743 aa, Zea mays
  Coding DNA Sequence Number=SeqID_1905
  Gene Ontology: Mol. function=cysteine-type peptidase activity; Biological process=proteolysis
  Homolog annotation: Hit_ID=Q5NKQ2; Match level="QueryCoverage=36%, HitCoverage=29%, E-value=4e-25, Identity=29%"; Hit description =Putative uncharacterized protein 9C20.3a
MDEGITKTRAIRCSPGKFIKLVNSLSDELKSEVVAKGFGGLLRFKPHLLSRKLLSWLMRKLNPETMKLEIGGGKEIQITEHSVWCVLQLPNVGNDPPPMSDADARALRDELGEQICGKSYRRISGINISVITDRLQKRTLNGELGLRAFFMAAFQCLLFSNTDTRIRIDDVKYTQDIQNMGNKNWCKAVVDRLSIAARLYRKDFAEKGINAPISGCGIFVAMLYVDNLQHGLDTSPFSIPRCAFLDSKMIDAIANMDLRGDVPPGTTEFGHLRLRSITDTCYSVPIGALAILHAPVPAPAPVAVPNPTAAPNSVAAASVPVATAAPTGTSADVLGTSHDPVGHASFNIQPPVFYQYPSFRSSFGQSITDLVGRSSKSDALNILKAFDESTSEAQSYAQKAVKYSTISRDLMAKAHHECYTGIQKLIADAIVEKRAAKERRRKEQELVQLHRRTNLEEVMVKKLYGVPLQLTLEQEQDQELLQMYRKTNLEESPPNSQPTRAPRITVRKRKASSNPAGNDQRPVVRSSDTHVKAVHSCNRAPPIVVIIAYTNLQLIIYYEQGAPETEEEPLSRDTGMQHPTAQDHITYSRRSDRSIQVANTQKTEAEKKAEIEMKNAEAEEAEKRKAEAEQADKKKAEEAENKRKAEAEVAEIKRKAVAEIKRKAVAEEAEKKKEEEAEDKRKAEAEEAEIKRKAEAEEAEIKRKAEAEEAEIKRMAAAEEVVKKKADAEKKVEAEEKRIQVAI

SEQ ID NO: 45281 - protein, 170 aa, Zea mays
  Coding DNA Sequence Number=SeqID_1906
MAPRILIFKPRTNKSRSDRDPHAVLPVNYHLLNSHAMDCSDIPALCAVKELISIPSRRRPHPSRPAPQPKSPCDREPLAAARKILFNHRRQVPILAAARKIVSHQPTGYRSRAPRSRSSADLLSWKPNDLAIAASCTEDLVQSSPPGPHTSSGAEDCEPPADGISVASSA

SEQ ID NO: 45282 - protein, 170 aa, Zea mays
  Coding DNA Sequence Number=SeqID_1907
MPWGHITCQKGGQAACTFRNKCGGRAAQSPYVMLCPLAYVMGNKPCGRIRPSVERGAEALRIEPGHASIPDPCLGYGTPSPGTLLWVVRSSIDGVRTPSNGSGLLYFGGPGCAHRGPAPSRPDGVVSENATLTAHEIPLGLFSARLRVAAQASCLHTVVRGTPNLGYRQT

SEQ ID NO: 45283 - protein, 225 aa, Zea mays
  Coding DNA Sequence Number=SeqID_1908
  Gene Ontology: Mol. function=aminoacyl-tRNA ligase activity
  Homolog annotation: Hit_ID=Q10BW3; Match level="QueryCoverage=41%, HitCoverage=21%, E-value=1e-10, Identity=43%"; Hit description =Aminoacyl-tRNA synthetase family, putative, expressed
MPPPSRPLPDPNHDPAQIQIHPAQRSRDYRISQQNIGLQGCGAVARVRLLHSPGVRLVHSAGGGGSVAREDLTTMIPRRALFPLACHNRSNAPPPTRTLASIPAAEAERECGAQDARVSHDDTAALVEEPTSLAELPRWRLRSMWELTSALNFLHIRWSFILYGAFRIHLLEKHHKSCLGHCTRASHSATWHSQSEVLEERQIQLPAYLGSGRQIDSFLGASTPH

SEQ ID NO: 45284 - protein, 196 aa, Zea mays
  Coding DNA Sequence Number=SeqID_1909
  Gene Ontology: Cellular component=intracellular; Biological process =RNA processing
  Homolog annotation: Hit_ID=A2XA40; Match level="QueryCoverage=72%, HitCoverage=12%, E-value=6e-46, Identity=65%"; Hit description =Putative uncharacterized protein
MEKFGWPLLNFRMFLVFSLSINNSQVKTLSLFEHLDSHIQSLISVIFQFCLTTRSTQMANSGGARIGEDGALRWSEWLAKDEESRQKLSTQENSQETETGGWSGWFDPSLGNTDANDLSKKSLEPSLSDGKGAEDLDAENSPAQDDVESLLKKPGIAVDAESYSEAKDAETWNRWALMELSRDNEPWMPLHEKYSN

SEQ ID NO: 45285 - protein, 449 aa, Zea mays
  Coding DNA Sequence Number=SeqID_1910
MDHCPGKKDRSTIEEGSVRAGDTEGMYCCSVLHYQQHWVSGNDIVLRGKAPVQAIQNAGSGLDVVPRNMPFVPQPREGSEVQEPNPGAPHGTLGVGVLRTVEVDAAPSLAGVVAAASGVPVPIEEVSGRYRPVERLHLGAAGELRVHPPNDAVDGEVLGLPDDGSVPVVVGRSAEIHLPPVRPQLPRVLVVGGVEDQDVEPVEVTLQKSRRAVQDQLSESHCLQPNPEYSGLRLLETHFPFLAEALLSFLASDNMDWAAASGSLSWGAAATDPGPTMLSFAGPSSSVADVEHNPTVTQIHETAHIANRCSQKLQELSSKKANVKKKQNMQNGKKSSTKGVRQTRRSRPDRALHPFLAFAHTTCCRITARARSQSPLASVICDPRRPHPGDFAGWRPLRATGDFAVAGGGAWTRGGCGRGVRAAVSRWLVGARGRAADAAVACGRRFRGG

SEQ ID NO: 45286 - protein, 182 aa, Zea mays
  Coding DNA Sequence Number=SeqID_1911
  Homolog annotation: Hit_ID=Q2R860; Match level="QueryCoverage=65%, HitCoverage=26%, E-value=7e-56, Identity=83%"; Hit description =Expressed protein
MVGPGSVAAAPHDRDPEAAAQSMLSLAKKERSASALLPNKKECEYRNGKWVSNNRRPLYSGFGCKQWLSESWSCKLTQRKDFSYEKFRWLPEACEMLEFEVSQFLRRMQDKIIAYMGDSQGRQMFQSMMCMVTGGKERLDVEDVGADYGFVLAPGAKKSRWLGLPVPEHQHNNYIPLVINAL

SEQ ID NO: 45287 - protein, 213 aa, Zea mays
  Coding DNA Sequence Number=SeqID_1912
MPLQTRPVTQRRPRGARCNGPDHTWASEQDEAVLRGDVTAGLRLVLNEAKGVPARFVFVKPATAARDDERRVASLPSPQQTAQSRKASRDPLYAFQVLDGPHAGDGHDLLRVGLDAPLGDDEPQEHASGDPEDTLLGIEFYAFRLETSECRSKVGKEVGGFPRLDYDVIDVGLDRSANVFAEHVVHAPLQWNPRFDRCEADGRELSDMLCESI

SEQ ID NO: 45288 - protein, 615 aa, Zea mays
  Coding DNA Sequence Number=SeqID_1913
  Homolog annotation: Hit_ID=Q6JAD6; Match level="QueryCoverage=95%, HitCoverage=82%, E-value=0.0, Identity=78%"; Hit description =Putative uncharacterized protein
MPCTKNASAPGGGDDEDPRCPFRQVKGKTVYLEQQEGRKKRRTDREARAAAAAAAAAAQAALGDQPQTPSDQIAFRARRLTSRPRSSSHTSASTPPPTLPAPVTPIAPSTSTAIPTTSTTPASTASPAPAPASAPLVPPPRFRERDETEVRPLVSDPRLFDLQRATAARVRRFRYVPVESWLPAQRDPTAGDLFSTRIQESFFRAQMSAQIALRVHRLLDLPAFLLAAGADSEAHLTYLPGLQTLLTISGRYVEEWVRVFYASVWIDPDHHCMRFRFEREDVTITASQIRQLFGFPESTTRLHSLCYGTSDPPRRPHGGVAPGTAHVAALFRPPFTDGSRRSPADFTTAAKYLYELIRRTLLPRMGYREATTHIQLWLLGALVSHSEFDVVDFLICEIEDIVLDGIRARRQLPYAHYLCHIFAQLIQPPRFQSTLEASRLVFGSYRPAPEIPVPASAHVFDSQAEDAALRQFDTQGTAADDDDDDDDFGVPPPPPPPMPPRSHDHEAGSSRAAPATPQAMDPALASILQTLTQQQAHLAAEQARLSERMLSMFQNMQDSQDQLQQQLLQDREESRAFMALMLQQSGSQFLRFRTSNPPPNAPRHQGYVRTIVTNL

SEQ ID NO: 45289 - protein, 254 aa, Zea mays
  Coding DNA Sequence Number=SeqID_1914
MKDCPSHLRTGLSSLLAYTLIKYNHSRLYEQSLDLNLHGLNPRIMTAGEHREDKEGECFVWFGHGGGLVPSGIIAKATGWRSTSDLGTPSCLLQQRTWLPLGYSVTYHGELSRFRRQLVIPSLRFVTGGFPLPDIWTFFIEDLSCIAGFRVVHCHYHTCFKGDIYFKDCLYHSCKVTLILTVFNIKYIDHPPFNPKKITIESSQEVFTVEIPRFGNNAKNPSEAPAPADDDPKQMKQTYVRHNTKRATGRGKGY

SEQ ID NO: 45290 - protein, 128 aa, Zea mays
  Coding DNA Sequence Number=SeqID_1915
  Gene Ontology: Mol. function=calcium ion binding; Cellular component =cytoplasm; Biological process=protein metabolic process
  Homolog annotation: Hit_ID=Q0IKM2; Match level="QueryCoverage=60%, HitCoverage=10%, E-value=4e-15, Identity=58%"; Hit description=Ca2+ binding protein cbp1
MKVILFIDEIHLMLGVRRTEDSMHTTNLFDPMLVRGQLRCTDTTTLVEYRKTFVLMRIELYKSMLEKEGAEGEEEAKRAYIAAREKSGCRVDAAAEEKVLSALTEKVDAMLQELEKEIDDADAQIGNR

SEQ ID NO: 45291 - protein, 383 aa, Zea mays
  Coding DNA Sequence Number=SeqID_1916
  Gene Ontology: Mol. function=cysteine-type peptidase activity; Biological process=proteolysis
  Homolog annotation: Hit_ID=Q8S456; Match level="QueryCoverage=76%, HitCoverage=54%, E-value=2e-83, Identity=57%"; Hit description =Putative uncharacterized protein 163K15.6
MTVRPGAGKELKITKETVRLILGLPSTGGGRDFIDWYGRTQQNITATVYGCSLIILIYYLDHLHHPASPQNKYDTPRIKYFDNEKIRDLARGDRRGPHQTGEPFGHAEHRPMFESLFDAHDKEVDKYRASLQQSHQMLVSKQIELSEAFGEMIDEVLRAATQCDTQQEDGDKLPTTSSPPINDSVSTPPVRTPDNQHHDRPTQVPTDDNKISEQVSSLNVDIKDSVMDVPILDKTLTSNEGQNPVVQDPPTSGAPKFDKTPLTEGFIDCIRDDDQLYNPDTIINTLILNVNVGSRLQRRCLPVFPKTPTVPSALALSARLPRDPDSAVVCLSALFGGCSASTRPSPVGGSPPWKPKNRMGTKGEGDDGDIESVEFPKCVVASN

SEQ ID NO: 45292 - protein, 273 aa, Zea mays
  Coding DNA Sequence Number=SeqID_1917
  Homolog annotation: Hit_ID=Q6QP51; Match level="QueryCoverage=34%, HitCoverage=37%, E-value=1e-17, Identity=57%"; Hit description =Putative growth-regulating factor 1
  Subcellular localization annotation: CTP_CleavageSite=18; ConfidenceScore=5.09e-01
MQVACNHTAGAQPFGFVTSSMGAQAHTSWTRKGDISKGILLREGSGPRALLLIRGSKAGPSEGGSKVGPSEGFDSCPRSRRVRDDSRYVGYMAEARSTLPRSGKSPAGRSDRSHFALSLTDLTGKQRRSPCSDCCATRQGEADNSQVQPQAQQEAPPRLTLGLSLGRRSPPRPTPGLALNLGLRRWSPPRPTPGLGLNLGLGRNRVLAQPRPRPQEESPPRPTLGSDRPRHGGYIITLPLASSGYGGTRPASHLARPGLRHSSDGHVTAYTGL

SEQ ID NO: 45293 - protein, 448 aa, Zea mays
  Coding DNA Sequence Number=SeqID_1918
  Gene Ontology: Mol. function=aspartic-type endopeptidase activity; Biological process=DNA integration
  Homolog annotation: Hit_ID=Q8S474; Match level="QueryCoverage=8%, HitCoverage=5%, E-value=5e-09, Identity=72%"; Hit description =Putative pol protein
MTTSFVVGRSKPGCGLCPALSFKDVHHPGWGGGRTELGPASTWAGDPLLPPSFKGEGHTPALRRRRPLAMRGKANCCFLDRVQLSVLHPGNGRAARGPATSRSSLRRRLHNTSYAARAVLVFWDGPVLVLVVRTGVRTCRCALGRPPLAGAVLVGRWPLSSVLRWWTPEEVASAEAVAPADETVSATCALGLRLFGFNGWFSSPMRGRERGPSSGSNLRLLCDELEPEAAVSAWTEAESARKEASSAQEQVASQAEEVHQRRLELGQVIREWDQPRSHAAEAVSRAEVLGGQLAEATERPTEGPSGDPACDGPSAVLTSPFEVEILLPVSSSEAGPDSVKGGNDAEGAATPSADDLFVGSRIAYPSESYFSRKVMSEDSVIDIVEKARKSFWLQNLGDDERPLPGRSKLVASSGVLPQPKYQVSHLEASGPDPSGVVASQRLLIPRRV

SEQ ID NO: 45294 - protein, 192 aa, Zea mays
  Coding DNA Sequence Number=SeqID_1919
  Subcellular localization annotation: CTP_CleavageSite=51; ConfidenceScore=5.59e-01
MGAIQVKAPSTQGTRSRLTRAQPRAKAADPGGFTSRPRIPSSNGRTFDSPEAQLGQASRRSNLGQIATPTDRIAGAFNEAPPRPTPELGLSLDSGRRSPPRPTPGLGLHLDLGRQTPPRPTLGLGLNLDSERRSPPRPTPGLGLNLDPGRRSPPRPTPGPGLSLDLGGASAFARPQARTDHITGGGIITLTP

SEQ ID NO: 45295 - protein, 462 aa, Zea mays
  Coding DNA Sequence Number=SeqID_1920
MGVPDLCARWRAINALQVAVGTGSSRCPAVAPDSPVYTGHVCALALDFPEGDEFELKSSGAPDTVRWHTGQSGVSLIPFHPTHSKVLPYGAGAGSHTSCKPAQSRRSQTAVRGAYNRPAVTSDPPLLPRPAGERGGQPCRRHATAPSGRASPTPNTPSMEAQAHASCNRCAECFVHATAPPLAPPPCLLDCGANTATRGDPAHDPAAPSWRGGQCGQKWAGSNGGGRRAGAATTSSAKLTSRPGGSERTLSHGVKTTRPCSVPRTARARATAAPPTTRPVVLTPRRDRQRLWQEKRATLHLRHNDRVKKGTGKGGYPEKDPSPRRNRAPSPPTNQRPAPRKGSTAASGYSGSAPITDQGFEGWPPKGSAPEDDELRSARPQGSDYAPTSADGLRLARPRGSDPTTATEDRLDLGFGGASTSPNLGHRPATSTGGAIIILPRDDSGRREQDRRPIWLTPPDGQ

SEQ ID NO: 45296 - protein, 160 aa, Zea mays
  Coding DNA Sequence Number=SeqID_1921
MGKGTKRKREPTPPSEDFGDSEYSEEEFSSESEGSPAPVSPPASSDDSDDSQGIAAEVWMYIRAVERSGLEGSDESEFSSDEEDSDGGEDEDDDDDDDGGDGDGDGSNGGGGNGGKGNTRGGSSTGSTRGGSSKGSTRGGGGKGSTRGGGGKGSSSKASG

SEQ ID NO: 45297 - protein, 335 aa, Zea mays
  Coding DNA Sequence Number=SeqID_1922
MPGCDLGPALSFKDVHHPCWGGERGEPGLYLPHGSAGHLLFQLLVDATFRPPPRFRGKDGSEDLPVRFGAARVRRCGIGGEADAAVGADVVAAGGSFPTVEAVSAAYGPTSGSLALMSGLRPLSGDANESLPVAASVLGPWLLLQRSLASRPELVAAGSPESLGSVGLAARGFSCLVKGNHRLLFDEPKPEATVSAWTEAELARKEDFVGRSLAGLSTGRTDAGVELPRPRAGLMSSGDSWLRPRGGRPNRLLGPDSWRRPWRRRPGRGADVVLRSGDPPTVSPSEARSDFAEGVVDAEGAAAPPPTRTVSTTVAKWFVPDCTRDSGQDLQVRAA

SEQ ID NO: 45298 - protein, 196 aa, Zea mays
  Coding DNA Sequence Number=SeqID_1923
  Subcellular localization annotation: CTP_CleavageSite=39; ConfidenceScore=5.37e-01
MSSRSLMHRVFPPSKPPDEGYPPSFRLIVGGTQLRGSCPAAPLRRRSPKTVTTSPWVGRSKPGCDLGPTLSFKDVHHPRWGGGRAEPELYLPRGFVGHPLLRRSRGRALTGPAGGSDFDNAGLVDGGRRQPQRVELVGLAPGAPSCRKAAAAPCAREGRPRCRALLGRRSCSGAALPLHRYGVSARRSVPHSSGRI

SEQ ID NO: 45299 - protein, 334 aa, Zea mays
  Coding DNA Sequence Number=SeqID_1924
MGGSEPGSFAEKDPFRATGAPVARRVGLGSRLACQKSEKRVHLARLHAACMAARPFCPLVWAKMGGRLNATPWELVPLSHRSASRIFITQPGRTPSPAVTRDGDLQLDGGGKRAGLRPLPLPQPQGFSSPRLGRGEYRVGVGPCVGGGPLLHSAMGGEAGIARGVRQLQRAWSPAASGFGATCGVGVCHGSRKRFFCRRGGRDRPRADLQLLRPSARPCLTSFGTSGGLLAAASTLRSALPLFGPPEQKSPSSPLLGQVTARRSSAFRCSAGLPPRSGVVRTCGGGTGVPFVMALRMPESLGPFGLVVWGSSSLVEETPRPPFGGPRPGVAVSV

SEQ ID NO: 45300 - protein, 156 aa, Zea mays
  Coding DNA Sequence Number=SeqID_1925
MEPGGGTAIGAVESLLTSSCFRKGPESHRRHRVRGAPLIAYLAELARWDAGLVPCGPSQLEVGLGDVEAPPKPRSSLSSVVEVESEPLGRARRSSSSSRAEPESEPWVGRSGVRRLPGLSPSPSPGSGGAEFAVFRDLARVRALGRVERSSPSSGT

SEQ ID NO: 45301 - protein, 156 aa, Zea mays
  Coding DNA Sequence Number=SeqID_1926
MGKSNKCKREPTPPSEDFGDSEYSEEEFSSESEGSPAPVSPPASSDDSDDSQGIATEVWTYIRAVERSGLEGSDESEYSSDEEDSDGDEDEDDDDGDDDDGGDGDGDGSGSGGGSGGGDGSKGSTRGGSSKGSTRGGSSKGSTRGGGGGSSSKASG

SEQ ID NO: 45302 - protein, 229 aa, Zea mays
  Coding DNA Sequence Number=SeqID_1927
MNKTPAFKVPLQTELRFRLRRYEQPHTIGGPAEQQKADGWLAIARSNSNDDDDFCSGGPNSSSDDLRADAAAMRPSPMPSLERQGRAESRRVGGQSVGGTDYLVGGETSSGCRGGRRRRERLRSHSGQRARHAAAASATNDERPSPRSLREGAGRRPRRDRPQLGALPSPALMMKILEAEGGAEATARLAFPRHRTGDRRVKGRTAMQSACNRAKWAHPFDSNAPSMEA

SEQ ID NO: 45303 - protein, 78 aa, Zea mays
  Coding DNA Sequence Number=SeqID_1928
MKTRRILSGTIIRGTLKAPNSQLGSDSGSAPEDGELRSARPRARTRAKSRKTANSAPPDPELGLELSPGRRRTPLRPT

SEQ ID NO: 45304 - protein, 104 aa, Zea mays
  Coding DNA Sequence Number=SeqID_1929
MNTEAITEEQQLRLKVVTKIKHDAEPKILKASREINGGDINTKHKGGFGLWSVKIVFLEDHETNFPPRKIQKLYMDRLMSRQPTQSASMYSIKSVLVVRDMARP

SEQ ID NO: 45305 - protein, 309 aa, Zea mays
  Coding DNA Sequence Number=SeqID_1930
MGIGWYEGDAQQVLHERAGIVRLLGVGVLRGDGARLRLRREVDARRAPRWGAGAVDSLDSRRGAASCLALVAPPPRPSAGEGTGRARMLFFHYAGKASSIPPPAGGLSAAIVAVARRGKEYHVVAAVEGHELKTPETEHRPGLERLLETAHLELDGKLFVNTQQAPTWRANCRRFEPGGSLDRRPESEPWGQAKRSSSSSGAEPESEPWGRAKRSSSSSGAEPESEPWGRPKRSSSSSGAKPESEPWGRAKRSFPWRLGPDMAAVSLTLSSGTTVRAAQAALSSCQAGQWSGEVTTVTSALSTGGRASG

SEQ ID NO: 45306 - protein, 366 aa, Zea mays
  Coding DNA Sequence Number=SeqID_1931
  Homolog annotation: Hit_ID=A2YGC2; Match level="QueryCoverage=43%, HitCoverage=67%, E-value=1e-09, Identity=28%"; Hit description =Putative uncharacterized protein
MGLGVCGSLCQGGYEIDGSGYDYGSGKRYSFRLERVVSIATTAQEKMKPWKETSRSSKTTTSSRRGLAATPSRLPVKAAEQEQQGSSFSLHQEIESVRSCSPVLPLEAPPSPPQGVPASGVAAGGDPDDGDGDDSSSHDTDFSANPEPEGWVARPITRDAARGCHFHDALDTLLRRAFDRHTWSVEYRCVVYQHSRGVYPDRWEATCLVRCPENSLQGAEACSEHYSISERDSAEVAMQDAARRALSHYCSVFGGAADGLDLKYYPRRPSGSTGGVIVSPVGEGNPRLSSTVNLAAVLNTELDHALDELSRARAEIALLRAERAERRYLDGGSPAPVGTQHPYRSPQRGHQSYGNPDCKTKITLEP

SEQ ID NO: 45307 - protein, 303 aa, Zea mays
  Coding DNA Sequence Number=SeqID_1932
GPGKGDTPKRILPREGTRLRASLLIRGSKAGPPEGFDSRLRSRGPYTHYWSEVRRSAPRKGSTAASGYSGSAPITDQGGNDLVMESHRREASSPRTPSLGDRVRQITRSSPETSCSAPIEGNMALPPPSSLRKGDAGAYVKKSSLSPDRPLDPVQRLGGCSCKPGSGRTVDSVNIPARELGTRPYTRATASSHEGTTRPAEALRKALRPRRSETTPSRPRGLHPAGALARTHPETKRNRERLGSDSGSAPEDGELRSARRRARTRAKSRKTANSAPPDPGLGLELSPGRRRTPLRPTQGSDSG

SEQ ID NO: 45308 - protein, 160 aa, Zea mays
  Coding DNA Sequence Number=SeqID_1933
MGRICPGVSQLSDSPRCQEEVCAGLLQRFTRLRPLATFEHWKKQTATCSTPSAAPEHARARARAAPKPSQCPAIPNPVQPSEKTVHVSVKLPERGIGLCFTGEAGPRSPDFNRPLATVDREYILVPEQGAAQEVAPDPAPEPAPEDLPATALEGKPRFYA

SEQ ID NO: 45309 - protein, 681 aa, Zea mays
  Coding DNA Sequence Number=SeqID_1934
MGELGVSDSFAMELMRTCADPGGRMSSPELRDSSARMLEVTGGRWPKNVPIPRAAGEDFLTSRMVRDLRVFPYGRNIAVVVSAVMDKDRQEAAQKRRAVIRLPEARPKRARGTAKAAAPGGSQPTLATKSAAPGSSKVSEVAKAASADGTKSASAGAAKARELPSPGKRVADFGTNISVDDYLVGSGEGQLVVVPPAVATMVSAAVPGVKGSALSAGGEISALTAVKDEAGTVSRRLREASQRLSQAADFADCVASGALTAVVSAEVERLQAQHADVVREKSAANSKCRKLEEKVAALEGERTDLRCQLVEERREANQALAKAQSAQAEANLARVEGSLASQHAEEWEARFNALQARMERAEASTRSEVERTRKQLMDSYRELGARTADFEVPDRESGLRCLEWLQEELLALPTIVEGFMSFASLVTCEGAMNALSREGCSHYEVFDRSDEDFEREIYKVEDPVVKDSTGALFDRMWGPHGREVVRERSDRARDQAARAENVEDFGPLNSARPEAEANPVAAEAEVQDFGPAHATATANFVAASTVDAGNESDKSASKFSDFSDSGSSVEWTEESSDGDLDYFAALDVATAEASPRVTDAKVLPGSSAGRRRRRAVAKRRVSEVDGDQLRVGRAGKRELLSSPVGASVGEGELRSLFEGEELRIMLFNYREMGIIPKVEPM

SEQ ID NO: 45310 - protein, 54 aa, Zea mays
  Coding DNA Sequence Number=SeqID_1935
MELLLVTLELLRWLLLPWEDSCASFTSTTSLLVIFNHLIGIDRIKPLTRQFGAP

SEQ ID NO: 45311 - protein, 370 aa, Zea mays
  Coding DNA Sequence Number=SeqID_1936
  Homolog annotation: Hit_ID=A2YGC2; Match level="QueryCoverage=41%, HitCoverage=64%, E-value=2e-07, Identity=29%"; Hit description =Putative uncharacterized protein
MGRLEPRAEWESRFMGKVCNLYRVLETGISAVLTMARIRCTACKSVIPFLPSRLAKNPLRRTVLGQSSHLERLHRRLHEEQECRCQEQEQEQQDSSPSPQREVESVRPLSPAPQPEMPPAPPQGIPAAGGDPDGDRDDDDAGGSSSYGTERLEEPEPEGWIARPITRDAAHGCHFHDALDTLLRRAFNRHTWSIEYRCVVYQHRRGLYSDQWEATCLLHHPDDDLWGAEAFSEHYSITKRDTTEAAMHDAARRALSQYCSLFSGVADGLDLKYYPRRSTGSAGGVIVLPVGEGIHRLSSMVNLASCSTQSWTTPLMSWATFGQRLRNCVLNARHATILMVVLPPLSGFSTLTVHRPVVASTMVPQTAGPG

SEQ ID NO: 45312 - protein, 143 aa, Zea mays
  Coding DNA Sequence Number=SeqID_1937
MEHRPGLERLLETAHLELDGKLFVNTQQAPTWRANCRRFEPAGSLDRRGNDGASCDVVGPSHGLGEVEAPPRSRSSLSSKAEVESEPLGRARRRPSAEARAESEPWGRAKRSSSSSGAEPESEPWGRAKRSSSSSRAEPKSEL

SEQ ID NO: 45313 - protein, 150 aa, Zea mays
  Coding DNA Sequence Number=SeqID_1938
MGIPNHTTYVALNPCICQPFPQILHNVNRYELPGSTVLLRLASSQEGLPDHVASCQVSPHQAYIEWSLSDSDGDTTPRLPSRASHPPSLVFIISNPKFGTWQRARLSIIKILFIKGYQGRVGPTDDIILRRCPISALSKGRLGSSSASRD

SEQ ID NO: 45314 - protein, 137 aa, Zea mays
  Coding DNA Sequence Number=SeqID_1939
MERRVELLQSMEEEGALGREWSCCSAIGKKGEGRHGWELGCSSFTGTMDPGRMTLLCSARTGAWGGDVHGCFCHCAREARGKGARLWGPCSRAGVLLHSREPSGGRQEVLRHVGEERRPAGAARRLKGEEREKCGGG

SEQ ID NO: 45315 - protein, 164 aa, Zea mays
  Coding DNA Sequence Number=SeqID_1940
MGKNNKRKREPTPPSEEFGDSEYSEEEFSSESEGSPAPVPLRESSDDSDDSQGLAAEVWTYIRAIECSGLEGSDESEYSSDEEDSDGGGEDEEDDDDDGDDDDDGDGDGDGSSSGRGSGGDSKVGDGGGSRGSNQGGSSRGSNQGGSSRGSTRGGGGGSNRASG

SEQ ID NO: 45316 - protein, 173 aa, Zea mays
  Coding DNA Sequence Number=SeqID_1941
MAASASPVPQRESDRRNQRSSFGYQEIKLFEFYEAEDPEHLFGEGKDVWFTDDDEDGYDHAYGNGKEGVEADLQEFQDFDEGVIVSPVGEDNPRLSSRVNLAAVLNTELDHALDELSRARAEIAQLRAEHAERRHLDDGSLAPVETQHPYRSPRRGHQSYGNPDCKTKINLEP

SEQ ID NO: 45317 - protein, 493 aa, Zea mays
  Coding DNA Sequence Number=SeqID_1942
  Pfam annotation: Domain name=Extensin_2; Domain location=142-450; Score=-138.8; E_value=0.073; Accession=PF04554.4; Description =Extensin-like region
HLERLHHRLHEEQEHRRQEQEQQGSSFSLQQEIESMRSSPVLPLEAPPAPPLSAPALRVAAGGDPDDGGGGNSSSHDTDFSADQEPEGWVARPITRDAAHGIVVGSTRTAGRQPAWCAVWRTVSRVLRSAQSTIPSLSGTQLSQPVGSLPAAQLARSVAQLGGPAPPPHVAHLAHPARSSPTPKTLGHALPQLPPPPPPGGARSSAPPPFPLPPSLSPIPRTSLSLPRRRSPSPRAVSPSLIPFPRPSLSPAPLQRCRCGPARLASAQRPGVASSVAAAGARPRYGRGRAASAARRGPGSAARARGLGVTCQRAVARGQPVRARPPARCAVAPLAARRGQPARRGSSPACQRSGARPALPGRLARLSWCGAWPRHGTILGTVAKERSARPAAWLSEPCAVSQLASVARAAQHGSAIAASAAPVPQNQQSSFGDQEIKLFEFYEAEDPEHLFGEGKDVWFTDDDEDGYDHAYGNGKEGVEADLQEFQDFDEFED

SEQ ID NO: 45318 - protein, 132 aa, Zea mays
  Coding DNA Sequence Number=SeqID_1943
MNSSEHGFAIPVTRVLGSSLCKLDDLTRKLSEGLDRTEEDGKGAGHDGCSRAALAGRGEVAGAKRGLGEVRRGTEEATGKAAEHWDGLYSRGAGVVTGGRGVNMWDLCSKVMKFTTTFIFGPSHDHKVYMTF

SEQ ID NO: 45319 - protein, 747 aa, Zea mays
  Coding DNA Sequence Number=SeqID_1944
  Gene Ontology: Mol. function=DNA binding; Cellular component=nucleus; Biological process=regulation of transcription
  Homolog annotation: Hit_ID=A2YY63; Match level="QueryCoverage=82%, HitCoverage=92%, E-value=0.0, Identity=71%"; Hit description =Putative uncharacterized protein
  Pfam annotation: Domain name=NAM; Domain location=119-247; Score =270.2; E_value=4.3e-78; Accession=PF02365.6; Description=No apical meristem (NAM) protein
MACGSLDTGSAGLERQNKQNHQCYVIILGFCAVYHGVPKRPLAFLIAQATPFFLLSSLSGLSPIHSTPIHFPPLSTLAAPPAVCSGGAYMTHPSSPSSSAPPPPPAAAAAAAAAEATSLAPGFRFHPTDEELVSYYLKRKVLGRPLKVDAIAEVDLYKLEPWDLPPRSRLRSRDSQWYFFSRLDRKHANRARTNRATSGGYWKTTGKDREVRHGPRVVGMKKTLVFHAGRAPKGERTNWVMHEYRLEGDAAVEIPQDSFVVCRIFQKAGPGPQNGAQYGAPFVEEEWEEDDADVGLLPVEGDAAVDPEVPPGPVEIPGALERGYLQMSDLIQGLGDRNGNGTPSLPVSDTSHNSNHSEDVDGNSGDILSDPNLGSNFIQCVEPGEQNSLMLNGNIISNANAGDFFNNSSPSDGFLELKDFADAADLDFPLGNGSTIWPSDGWAWKTPDSAEAVNGANDEIPPLPDDQIFQPDELEQLLQSIQEDSHLGSTIIDPMHSSMTNSVLPEDDYLMFYDAPFDSTMCDGYGQNGILGSAAANLSGIGMMEDGMAYFDAMDDNSFNDTLGSIQQSAGSSSHAFNGPVLTQEVNNTMCTYSPTQKVLEPNFLVGAPSSARLPEAGSQLNCVVLPDGQAKSSTIGKGFVKILDSISAPPAFAGEFPAIHRKSLAHISGGRPNTLHVSAEVIRVGSLAVPSGADKWALHKDQDMELVFSADFEPDTRLHCAAIAITAMLRGEFRPFLSFGNNAQSE

SEQ ID NO: 45320 - protein, 122 aa, Zea mays
  Coding DNA Sequence Number=SeqID_1945
  Subcellular localization annotation: CTP_CleavageSite=64; ConfidenceScore=5.52e-01
MKRSEPSGRKTPKTNNVMKLYENSAARSAPTAVSATPATTDNKSRSTTEFSLGRNRKLRLARPHASASGGGLRLARPQAPASGGGLRLARPPDSASTPVSGGIASSPDPGLGLKRSLRLDRP

SEQ ID NO: 45321 - protein, 305 aa, Zea mays
  Coding DNA Sequence Number=SeqID_1946
MGCYSAALLLLSLEERDLVEIGTFQPLLGFKDFCRAARLHSPTNGQFGGEKQVGLWPPPCPQLQGSSSSGLRRRSALSGGLPPHGPITLFFPQRLGEKGILQPCGGFLQPCGGRRTAAPWTRCSFPSFVRAAVVPHAGRPRPGPPRTVSRAGGLPGTSYAARAVLVFWGGLGEDRSEDLPVRFGATTVRRRGVGGFEPTVGALRLFGLSGLSSPLVWGQVAGKPLGVHHPAAPWCGGCSYPWERNRSPVCKEIYRVFAGAKRNRLNFWNPRLLCDEPEPEAAVLARIDAESARKETSSAREMAAS

SEQ ID NO: 45322 - protein, 39 aa, Zea mays
  Coding DNA Sequence Number=SeqID_1947
MEPVRTVHRSHDGAIHGPQIFDHAARGRSWRRGIRAVDP

SEQ ID NO: 45323 - protein, 79 aa, Zea mays
  Coding DNA Sequence Number=SeqID_1948
MARQHGRAGWQDPLVGVASRSCERVGVPPTMEVLLGSETTDQAKDGGKKSFEVPSAREKVKEAEEPKAKGEEEGLQSQG

SEQ ID NO: 45324 - protein, 131 aa, Zea mays
  Coding DNA Sequence Number=SeqID_1949
MSIGQLLLPIVLLRTMPPPPPEYEVDLPASALVMEVASVILLVNEVTCSLACDDVPVSVAEELLRVTTKVTKPLEGILAQHNGEVQYHDIFSHPSSSGSDRVDNQSTSWILLSFIFVDVGDLEVQQSLRHT

SEQ ID NO: 45325 - protein, 149 aa, Zea mays
  Coding DNA Sequence Number=SeqID_1950
MPMLMMPCSSFSYSNTRGVTLGPINPWPCHLEPKPDHHGEHRRTEDVPLPSCSRLWGARHSLGRAECFATPSWGVSWDTRSGALVRGTGALAMVAAAPVLYAVGAKRQVVGKKNVSRLITDGWLRSDLAIGLTSAVRFRSDGNELSWVF

SEQ ID NO: 45326 - protein, 142 aa, Zea mays
  Coding DNA Sequence Number=SeqID_1951
MVNREDVPKSKINAEWLERDMVSTGVAKVVRDLLYFMRREVLHQQGLFYNNVLPLYIYHERFFGDSGEDTGGQGGPGTPQVPNSPTKRTIRRRIVFYFSFSRSLAAPGLSGSAVCGWAGSTPHSARSGRAASGQRGQDSVQP

SEQ ID NO: 45327 - protein, 88 aa, Zea mays
  Coding DNA Sequence Number=SeqID_1952
MQAACNCTIGAHPFDFDASSMEAQAHTSCNRRAGTGKGDTPKGILLGRKRAPSPPTDQRFEGWPLGRVRQPPQSTRAPTPPTDQRFEG

SEQ ID NO: 45328 - protein, 153 aa, Zea mays
  Coding DNA Sequence Number=SeqID_1953
MRPPPRPQLQGSSSSLLGQGRAEPELYLPYGPAGRLLLQQSEERALTGLAEGADFDNVGPIGRKRRQLQRACFRCHLPPLGGAWLSACCTGDCCAARTGGPSKTSRAVRAAFVFLGCPALAPARRLRAEVDARPSGRTRVGIYRWAGGYGRWC

SEQ ID NO: 45329 - protein, 338 aa, Zea mays
  Coding DNA Sequence Number=SeqID_1954
  Homolog annotation: Hit_ID=A2XFR6; Match level="QueryCoverage=55%, HitCoverage=53%, E-value=1e-29, Identity=39%"; Hit description =Putative uncharacterized protein
MDSAVQSLWTVSKRRLRWSLPYTAAHGPLVVEEVLVDLPRIRVEHGVILEDSLEELLPTPTPSAESLAFAVRSSTSAPPAPAVQAPAPGDDDPEDSGDDNDEDDDDNEDEEEQVNEETNYAQQDYFMGFGPVTKHYTSMFEMGHFPNLLQDVLHALGTYVRPLYETRRVSEPPRACYYITRIHVMVMDAGDRGFRTLSAHESLTPLSSYAASVGDAARRTLWSLSHTYRQQLHDTRFRHLPLCLSGGNQTNIVLGEAGEDRLNTLAGVVVGLNTDLDSATLDLSRVHLELEDAHARIAALEALLQGRDPPEAQAPAMALSPPRKRLHYGEPGSITRLL

SEQ ID NO: 45330 - protein, 119 aa, Zea mays
  Coding DNA Sequence Number=SeqID_1955
MARVCFGLGGRRKHALQDDPILQARILTLEGRSSTLGVDYTFGEESGSSRRLGWPPRGLGRLSPEDISPARGLGRSTPASVPLTDDPARLRPTKSSFRANSASDRADTATPGFGSSKSG

SEQ ID NO: 45331 - protein, 195 aa, Zea mays
  Coding DNA Sequence Number=SeqID_1956
MRIKLKTMKKKIKTISHLKRRTIIKGEMTMIKTRKMIKKNRVKDRLTQESTKRYKDITPCSGLDSHNEHTPALKVPLQTELRFHSRGYEQPPHRRACGTTNSRWLIADHCSSSDNDLRLGRLNSSSDELRTNAATGRPSPMSPHEGRGQVVKAKEPEVCLRVAPTVSSVEKPSLATTTSSTDDSDHLRAGATPTK

SEQ ID NO: 45332 - protein, 213 aa, Zea mays
  Coding DNA Sequence Number=SeqID_1957
  Homolog annotation: Hit_ID=Q6J9V9; Match level="QueryCoverage=19%, HitCoverage=23%, E-value=9e-07, Identity=50%"; Hit description =Putative uncharacterized protein
MQVACNRTTGTHPFDFDASSMEAQAHTSCNRRAGYYVRETALPLAPMSCLLDCGTSAATRGNPAHGPTVLIEHIGHGSVSCGRRRDGRYGQKWACCNGGSGRAEAAVKSSAGSRPLLEQQGSPLPRREDDALVFRPSNGSSNDCPANHSSRRINSAAGQATPLAGTGKGVTSKGILLREGSGPRALLLIRGSKAGPSGGFDSRPRALGLQAHY

SEQ ID NO: 45333 - protein, 65 aa, Zea mays
  Coding DNA Sequence Number=SeqID_1958
MVVVPGYGAAARCAHAAVLGCQGWPQVVHPRAGSGHWRGWISGVGFGSSGYGDIPVRDVILATGS

SEQ ID NO: 45334 - protein, 214 aa, Zea mays
  Coding DNA Sequence Number=SeqID_1959
  Gene Ontology: Mol. function=monooxygenase activity; Cellular component=endoplasmic reticulum membrane; Biological process =electron transport
  Homolog annotation: Hit_ID=Q10HZ6; Match level="QueryCoverage=80%, HitCoverage=31%, E-value=7e-39, Identity=48%"; Hit description =Cytochrome P450 79A1, putative, expressed
MHCLVSKKPVFRWVHGLLKDMNTKILCLRFGAVHVVVVACPEIAREVFRTNDAALASRPETDACELFSLGYKGASLSPYGEQWRKMRRVLTSEILSASMEQRQQRRRAQEADYLVRSLYSQCCSSASAAASSASSAVVDIRHVARHFSSNMIRSLVFGKRHFGGGAGPGAEEVHPTIHCIQVFHFSTTTRALAFNSRHTKEIKSSPNSTQRHSD

SEQ ID NO: 45335 - protein, 267 aa, Zea mays
  Coding DNA Sequence Number=SeqID_1960
  Gene Ontology: Mol. function=translation initiation factor activity; Cellular component=transcription factor complex; Biological process =regulation of transcription, DNA-dependent
  Homolog annotation: Hit_ID=Q8W0W3; Match level="QueryCoverage=44%, HitCoverage=38%, E-value=6e-61, Identity=94%"; Hit description =Transcription initiation factor IIB
  Pfam annotation: Domain name=TFIIB_Zn_Ribbon; Domain location=4-47; Score=68.1; E_value=2.9e-17; Accession=PF08271.3; Description=TFIIB zinc-binding
MSDSYCPDCKKQTEVAFDHSAGDTVCTECGLVLEAHSVDETSEWRTFTNESNDNDPVRVGGPSNPLLTDGGLSTVIAKPNGAQGDFLSSSLGRWQNRGSNPDRSLILAFRTIANMADSLCCPKDGQWNMIKKQVVDGARVGNWACVNFCQKLRADSVGKFCSDLIKWSRTTGVDMDNLRLPIYTARPEQAETDLRRLYQDARNKLRWQKFDLLLAILPEKNGGLYGNFKRICETEIGIMSQCCLDKNVRRAGPAYFANVAIKINAKG

SEQ ID NO: 45336 - protein, 140 aa, Zea mays
  Coding DNA Sequence Number=SeqID_1961
MAHEVLEGDDLADQERGAAVAAASSSSGVLEAVSAMTLSTMNVAQLSQQPPHCRGSSCIRVEARVLGILGKGAGFSPSTAMGRQWWHDGDTRVAAVGLGEVARGGAAARSRDGAVARPRATTFAAGSGRCVRVLGKREWE

SEQ ID NO: 45337 - protein, 183 aa, Zea mays
  Coding DNA Sequence Number=SeqID_1962
MEGHSTPLSSPAAASFTHTPAGAEYSEDAIGGEPSSPFPPPEKTRRNCLRIGFKMSSHDAKLLQNLVLNLASSVETGALNIRSFLEEAFMHLGDEHYLLNALLAIRKEVDLMEQDALESKARSDPEKERMEEEIKVLEHVNPLPQNPFTPPLPHQNCMRPVTMTRMTPTDPLGIAFGTCKCGT

SEQ ID NO: 45338 - protein, 50 aa, Zea mays
  Coding DNA Sequence Number=SeqID_1963
MPLELLHMDLFGLIAYISIGGRKITNPRDLKGILETGSKRVRIKDQEDKK

SEQ ID NO: 45339 - protein, 190 aa, Zea mays
  Coding DNA Sequence Number=SeqID_1964
MAVTYTCRNSDEFVVPSYFSGRCGRNLGGHDAVRRWSARAVQPTLAKGTPVWDRAPTGVCGASAAKSRSRGCTTSARWLMSWATSSGSPPEREVEGKARTRVSTRPLHTPGSSSFRGPIGVRTYPEAPDLYVYRGPVSFFGGPNLLRCGASPCHMAPFGPPHPVGSGVVLRVARRRRMGAVSSCSRRGYP

SEQ ID NO: 45340 - protein, 26 aa, Zea mays
  Coding DNA Sequence Number=SeqID_1965
MRLHTLRDDVVLYSQRCLMLIKGSGK

SEQ ID NO: 45341 - protein, 59 aa, Zea mays
  Coding DNA Sequence Number=SeqID_1966
MGLGVCGSLCQVWVRPLGRSARHCGTGGYEIDGSGYDYGIGEDEAVEEDFQEFQDYDEF

SEQ ID NO: 45342 - protein, 319 aa, Zea mays
  Coding DNA Sequence Number=SeqID_1967
MHRVLPPSEPPDGEHPCCFRLAVVGGTQLRGSWYLSAIARLQGFSLGSPAASPCRWSPKTVTTSLMVGRSKPGCGLCPALSFKDLHHPCWGGGRAEPGPVFAWAGVPLLPPDFGGGNHPPALRRRRPPAMPGKANCCCPARVQHSVLCPGDGGQPHWGVSLHVVRREGGTRVLGWSHSRFRGEDGSEDLPVCFGAAGARWCGVGGQVDVTVGAEVVAAGEVLVANEIAAAVRAPGLGSLALIACPRPSSGDVGEGLIAAASALRSSLLLFGHPERRSLSLLPEWGAASHLGFCHPAGPPMWGIVRTYGGGTEVPFVMAP

SEQ ID NO: 45343 - protein, 144 aa, Zea mays
  Coding DNA Sequence Number=SeqID_1968
  Subcellular localization annotation: CTP_CleavageSite=70; ConfidenceScore=5.03e-01
MDELFSKLKSTEIDHQIRSKIKNPGAPTIALVSGGGSSSNPSPAMFSLSSLLTITEEQVESLEDDELGLMASRFTRFHNNRQNQRRVVGPRMDALTATTPTTSLLVAPRRASRRPPLTTTTLVDARASGSTPLANTSLVGGCKI

SEQ ID NO: 45344 - protein, 194 aa, Zea mays
  Coding DNA Sequence Number=SeqID_1969
  Homolog annotation: Hit_ID=Q6YXD4; Match level="QueryCoverage=65%, HitCoverage=14%, E-value=6e-09, Identity=31%"; Hit description =Putative uncharacterized protein OSJNBb0005C03.31
IKKIRRRYSTVQPSGVGLRKLGFLRWNRAFYTTYTSQASGTKTKQAATGLVKPGLVNYKDNPVPPHYAVVEVLEITDNGCEDWEIDFPVEGIITLHEAINELVLWHRRDIKFGDEPSSTPMQQKASSIIPHPMVQEDMTPTSKKIVETIISPLAKELDEGGVDKIVPQNVDVNIKKEPKVGTNVERANYFKEDS

SEQ ID NO: 45345 - protein, 60 aa, Zea mays
  Coding DNA Sequence Number=SeqID_1970
MAPPCLGRRCYGSRWVDHYVNWNMERPPGKTVLPQGWYGMPLAELGKLVEDYLTRKGQGQ

SEQ ID NO: 45346 - protein, 184 aa, Zea mays
  Coding DNA Sequence Number=SeqID_1971
MGMGRRGRGLPHRFDGKRKRAPSPPSKDFGDLEYSEEASSEYDRSLAPASPVASSEDSDDSMGLSAVARAYWRSIEHAGLGGSDDSEEVSSEEVDSSDSSEEWSGGEGDGGEDDGSSGDNDGEGGGGDNGEVNGDSKGDDNSDSRAMVTAARATTTAARAMATIAKATARATARATVTVARSEA

SEQ ID NO: 45347 - protein, 144 aa, Zea mays
  Coding DNA Sequence Number=SeqID_1972
  Homolog annotation: Hit_ID=A3BRS0; Match level="QueryCoverage=70%, HitCoverage=42%, E-value=6e-08, Identity=34%"; Hit description =Putative uncharacterized protein
MDLEKPKSTISVDELTKEHEELKCSHVDLAQSKSSFELEFLGTKDDTCQELKEENARLKMSLTQLKGKCTAQPSQDNRDHMVKKLEMGTTVACTKSLEENVKDLRIAKRKEQKKKINTSAKSLNRASMQDQATLHTKRSKKCSE

SEQ ID NO: 45348 - protein, 138 aa, Zea mays
  Coding DNA Sequence Number=SeqID_1973
  Homolog annotation: Hit_ID=Q8LMF2; Match level="QueryCoverage=47%, HitCoverage=7%, E-value=3e-08, Identity=41%"; Hit description =Putative uncharacterized protein OJ1325D05.18
MPSKVPMMLSKTFFVTCIKSMLWQISISFQYGRYLKKIDCFLKVVAYRFYWKDLGGEHPEDKPNLSISLFPYGDKQPPGTVLCSYYVCEWCRVTFHYMVNREDVPKSKINAEWLERDMVSVGVAKVAVHHKRFLEPPV

SEQ ID NO: 45349 - protein, 211 aa, Zea mays
  Coding DNA Sequence Number=SeqID_1974
  Subcellular localization annotation: CTP_CleavageSite=30; ConfidenceScore=5.40e-01
MSSRSLMHRVFPPSKPPDGGYPPSFRLIVGGTQLRGSWYLSAIVRLQGFSSCSPAAPLRRRSPKTVTTSPWVGRSKPGCDLGPTLSFKDVHHPRWGGGRAEPELYLPRGFVGHPLLRRSRERALTGPAGGSDFDNVGLVDGGRRQPQRIELVGLAPGASSCRKAAAAPCAREGRPRCRALLGQCSCSGAVLPLHRYGVSAWRSVPHSSGRI

SEQ ID NO: 45350 - protein, 336 aa, Zea mays
  Coding DNA Sequence Number=SeqID_1975
  Homolog annotation: Hit_ID=Q6J9V9; Match level="QueryCoverage=22%, HitCoverage=25%, E-value=2e-29, Identity=86%"; Hit description =Putative uncharacterized protein
MTISGGTQPGCMIKILEAEQRLESAAPHGVALLQQQQEEGNTGAPHLGAQKGERRDEREECEGMAIARGVDPFLKADLLTRTPKRHGQNLHRRAPGFSPSDAGAGSHTSCELTRNQRDRERGYCEKDPSRRRKRAPSPLTDQGFEGCALRGLATAQSTRAPSPLLIRGSKASPSEGFDSRPRARRVRDDPGYVCYMAEARATLPRYPRTFPRPAGTICNGIPPEEASSPRTLSNGSGSGKSPAGKQHCSPRSGNCASHQGKANNSHGLSRVRSRAQQGALPRPTPGLGLSFGLGRRSPPRPTPTSASASASEESPPRPTSASASEESPPRPTSASD

SEQ ID NO: 45351 - protein, 105 aa, Zea mays
  Coding DNA Sequence Number=SeqID_1976
  Homolog annotation: Hit_ID=Q76CY8; Match level="QueryCoverage=54%, HitCoverage=13%, E-value=8e-08, Identity=48%"; Hit description =Essential protein for meiotic synapsis
MSDVSPTKVTKHNNGDLLYMKAIDTNTEHAEPKHKYLLRELPELQQNVSMQSGQEDFAVDKDSSRTLTSVRETPPATLPMHEQEDGLDFVETLFNSGGIDGDRRP

SEQ ID NO: 45352 - protein, 151 aa, Zea mays
  Coding DNA Sequence Number=SeqID_1977
  Homolog annotation: Hit_ID=Q10M76; Match level="QueryCoverage=29%, HitCoverage=20%, E-value=3e-08, Identity=66%"; Hit description=VQ motif family protein, expressed
  Pfam annotation: Domain name=VQ; Domain location=46-76; Score=47.3; E_ value=5.3e-11; Accession=PF05678.5; Description=VQ motif
  Subcellular localization annotation: CTP_CleavageSite=61; ConfidenceScore=5.60e-01
MLMQGAVAATDCTPTSAAASPSSFARCRLGPAGGHAGKRRRPRPSKRAPTTYISTDAATFRAMVQRVTGADEADLQPPQQDGLGLGLLLPHLGAERFLQAAGHAAPHVAAAPYTPAPPAAAAEQQPLYPTLDSWNVMHGKKTEVVSALTGQ

SEQ ID NO: 45353 - protein, 82 aa, Zea mays
  Coding DNA Sequence Number=SeqID_1978
MKLWKETSRSSKTTTSSRCGLAATPSRLPVKAAVIYVSFPHFDLLKGEAQKIQRLTQRRSCEAGKLRHVRRKGNRLKDEKAI

SEQ ID NO: 45354 - protein, 172 aa, Zea mays
  Coding DNA Sequence Number=SeqID_1979
MRLHILRGMKAEVILAFADICTHEVQTSTGGAAAPSASTPPPSESDPTLEGGTVGGSPPRRKMSAPRLGHRRQGLLQEPGPSRRLGWPLRSHSQLSPKDISPAHGLGSPTSGLVLQVDDLARFQPPLLRLLGLGKRPRVSLTEQEKPWVARLTEPRDSYASGIRIPHSSPSA

SEQ ID NO: 45355 - protein, 111 aa, Zea mays
  Coding DNA Sequence Number=SeqID_1980
  Subcellular localization annotation: CTP_CleavageSite=82; ConfidenceScore=5.10e-01
MAWRPPAPLLRQQAPSRQAAAPPPSASCAQEQELLGSTPTPQLSPWPRPSLFPAPWHAPANLPNREPFPLRAGSPGPISACSMSMAQQQLGFHTWTPLYSSPLSVHGRTPM

SEQ ID NO: 45356 - protein, 343 aa, Zea mays
  Coding DNA Sequence Number=SeqID_1981
MSSSSSSAAATPPAAASSEETLSSWVVEELRAGDSVDFGVSRMSSARVEDMQRLGYFGGGVARAPGTEEVPEPEGELVVFEAFFAAGLRLPAHRDGQGSPGAAQKRQAAVRLVEARPKRQRGSAKAAAPGGGKPPLAAKSGVPASSKAPETAAGAGGSKPVKAVPPPNRVAEAAKAARALPSAGKRVADFATDICVEDYLGGSDEGQLVIVAPAAATAVAAAAPKAKGGALSAGGEVAALAAVRDEAGAASRRLKEVVESLSQVADFANRTASGAFTAVMSAEVERLRTQHADAVQEKSAADSKCRKLADKVAALEGEKADLRRQLAGERRETNEALVKAQAS

SEQ ID NO: 45357 - protein, 233 aa, Zea mays
  Coding DNA Sequence Number=SeqID_1982
MEDEASRGAASVGVGCPLLPLASGGERHPPASRRLPPAMPGEAGRRHSARAQHYVLRPDDGCAAHREGSAHALGGPGKGEDLPACFEASAAGDGFSTEEIANSASSPGSSSPGLNGWLSSSVGESPSAVAPAPKPLLKLLRRSGRGSGWRPWEMVGRGPRGNRPSRLLGPDSRRSPWQRLPGRGDDVVLRSRDPRTASPSEARSGLAEGVVDAEGVAPPFQRQDPSLQGQSVL

SEQ ID NO: 45358 - protein, 492 aa, Zea mays
  Coding DNA Sequence Number=SeqID_1983
  Gene Ontology: Mol. function=hydrolase activity, acting on glycosyl bonds; Cellular component=beta-galactosidase complex; Biological process=carbohydrate metabolic process
  Homolog annotation: Hit_ID=Q6ZJJ0; Match level="QueryCoverage=93%, HitCoverage=54%, E-value=0.0, Identity=77%"; Hit description=Beta -galactosidase 11 precursor
  Pfam annotation: Domain name=Glyco_hydro_35; Domain location=45-352; Score=531.7; E_value=8.1e-157; Accession=PF01301.10; Description =Glycosyl hydrolases family 35
  Pfam annotation: Domain name=Glyco_hydro_42; Domain location=66-392; Score=-257.1; E_value=0.07; Accession=PF02449.6; Description=Beta -galactosidase
  Pfam module annotation: Pfam domain module=Glyco_hydro_35::Glyco _hydro_42; Domain location=45-352::66-392
MSHRVRLAAAALVAVAALALALAPGAAAKWQRTRNGTVVSYDRRSLMFDGHREIFLSGSIHYPRSPPDMWPELIAKAKEGGLNTIETYVFWNIHEPEKGEFNFEGQNDVVRFFQLIQEHDMYAMVRLGPFIQAEWNHGGLPYWLREIPDIVFRTNNEPYKMHMETFVKIIIKRLKDANLFASQGGPIILAQIENEYQHMEAAFKDEGTKYINWAAKMAISTNIGIPWIMCKQTKAPSDVIPTCNGRNCGDTWPGPTNKSMPLLWTENWTAQYRVFGDPPSQRSAEDIAFAVARFFSVGGTLANYYMYHGGTNFGRTSAAFVMPKYYDEAPLDEFGLYKEPKWGHLRDLHQALKLCKKALLWGTPSTEKLGKQLEARVFEMPEQKVCVAFLSNHNTKDDATMTFRGRPYFVPRHSISVLADCETVVFGTQHVNAQHNQRTFHFADQTAQNNVWEMFDGENVPKYKQAKIRLRKAGDLYNLTKDKTDYVWYTSR

SEQ ID NO: 45359 - protein, 423 aa, Zea mays
  Coding DNA Sequence Number=SeqID_1984
  Gene Ontology: Mol. function=kinase activity; Cellular component =ornithine carbamoyltransferase complex; Biological process=amino acid metabolic process
  Homolog annotation: Hit_ID=Q6QP54; Match level="QueryCoverage=17%, HitCoverage=26%, E-value=2e-13, Identity=54%"; Hit description =Putative kinase
MALPVDVAGLRPRLGDVEAPPKPRSSLSSMAEAESEPLGRARRRSSAEARAVSEPWGRAKRSSSSSGAEPEPEPWGRAKRTRVRAQGRAERSSPSSGAEPESEPWVGRSGVRRLPSLSPSPSPGSGGAEFAVFRVLARVRALGRAERSSPSSGAEPESEPWVGRSGVRHLPGLSPSPSPGSGGAEAWLPVSITLSSGAAVGVAQAALSFCQTGQWSGEVTAVTSALPEDARQDKAKLEEKAKEESEFPLKVISNAEAAAAVPSGVRGGAREQESPGLRGALQLADWRSWRGREEEPQRPRRYSFRRHRSGAAEWAAVVLFMVLAVVVLLGAVAVLVVVLLLQPRVSYVAGAPLGAAGSAAMEAALRDGVVPFRVDGEARTRWKVAGIIGVDQWTRLACQLRFFWPNGTVLPFRCISKSKFLFF

SEQ ID NO: 45360 - protein, 179 aa, Zea mays
  Coding DNA Sequence Number=SeqID_1985
MIQMGQVNMIEIKEAAEKGRNGKAKAVEKERGVNNGLMGILCRNSKPMANPPRTEFPQRKNPDGYEVEKFSFRNDGHMNTGAPPHHSAIVLKVARAACYHSALPPKRRFRVQSLGITSKMPTSPSSRSALPPKHRFRVQSLGITSKMPTSPSSRSALPPSRRFRVQSLGITSKNANVAF

SEQ ID NO: 45361 - protein, 152 aa, Zea mays
  Coding DNA Sequence Number=SeqID_1986
MGKSKKGSGSSPRSGDKCKREPTPPSEDFGDSEYSEEEFSSESEGSPAPVSPPTSSDDSDDSQGIVAEVWTYIRVVERSGLEGSDESEYSSDEEDSLDSSEEDSGGNGGDGGDDGGNGDGGGDSGRGGDGGSKGDHSSGSKGSSKGSNKTSG

SEQ ID NO: 45362 - protein, 172 aa, Zea mays
  Coding DNA Sequence Number=SeqID_1987
MARSLTPERPIVKELVGHIGSPGLVPPAALGMATGTFYPCAYRDLANATGEACANSAFRFRETGTDASWWSSRRAAYEHLEEAHKQDVVQTGPSQKGEMDDNRVDELVDAIWLTVVWLQLPLCQSLERCSWMVAESKPHPIANDIRDRPMVFVVVAFEDRLGLFKAVANNGQ

SEQ ID NO: 45363 - protein, 283 aa, Zea mays
  Coding DNA Sequence Number=SeqID_1988
MKTQLQLMEVVLRPVVVDRPPEDYDRVVDDVPTMPDAQSGPNLIPLSQPGDGLQTDSPACISLAQTNCSKFHWHYIFILDHEHFAHSICRGTDDLVHVAGETAALVVDPQTVACGCFGDGFIALNSLEFRNEEESYAFVMTADSDDDRPVGELTIGVWSLTAHPAWARARKVGVPHTIPAISGSAFLTPPSEDFGDSEYSEEEFSSESEEVWTYIRAVERAELEGSDKSEISSDEENSSDSSEEGGRDGDGDGDGGEGGGKGGSGDGKDDSKGSSKGSNNASG

SEQ ID NO: 45364 - protein, 133 aa, Zea mays
  Coding DNA Sequence Number=SeqID_1989
  Homolog annotation: Hit_ID=Q8LIF0; Match level="QueryCoverage=46%, HitCoverage=13%, E-value=2e-18, Identity=67%"; Hit description =Putative uncharacterized protein OJ1316_A04.113
  Pfam annotation: Domain name=BSD; Domain location=47-112; Score=26.8; E_value=8.1e-05; Accession=PF03909.8; Description=BSD domain
MGAPAICARCARIYCAAGSRWRQDSRCSGVTPDSPADPATFTSDPEDDEDFAAWSKGFILDEKEEEIEALCYDSDALEAMADRLVPDAVPREVFWPRLVPDILVPYARSATAMLGQRPRRTLRSPSSSRGDAG

SEQ ID NO: 45365 - protein, 135 aa, Zea mays
  Coding DNA Sequence Number=SeqID_1990
MTPEKILGKFVSGRMMVESRLEGVNRRNLKFTNLSTHYKPGLALELNSSPKERVKTNHKQIRRMTRARNRRNNFGEVGCVQPKGCSVWVHRTVRWGTGQCPVRQTGVYQLAALGTSTTVYDYKSPDCPVVHRTVR

SEQ ID NO: 45366 - protein, 534 aa, Zea mays
  Coding DNA Sequence Number=SeqID_1991
  Gene Ontology: Mol. function=cysteine-type peptidase activity; Biological process=proteolysis
  Homolog annotation: Hit_ID=A2X4U2; Match level="QueryCoverage=62%, HitCoverage=39%, E-value=3e-35, Identity=31%"; Hit description =Putative uncharacterized protein
  Pfam annotation: Domain name=Peptidase_C48; Domain location=34-217; Score=-8.6; E_value=0.00077; Accession=PF02902.10; Description=Ulp1 protease family, C-terminal catalytic domain
MDSLFVGLSHNKPKTSVANAIVREVLSHDWLLLDYICTQGDLALIDFIKEIPYEPRVEVVLIDDAFVERKWMECLFQPNAYLGDEVFIPINIRETHWYLAMIHARNMEIQVLDSLGTSQDRKDLTDSIKGLQRQIDMISQRKELKDHRWPDLQVASWPLREIDMGYAKQTDSSSCGLFILNYIEYWTGDELSDSFTQEKMADILLSSDLNKRRGCLLYKNEKEVNSGSPSDVEILENPTDSNKRKLLHMLDDSEVVYEDEEGPITQADLQRWFVDDWDKRVPVKVSTDGCTNDFLMVGLSTKDMPVTKADSIDVLCDYIMAIKDDAILEMTWVRSFNPFKIEISVKDLQNILTINQDMILRCFDMDVRLLANKESRRPKEEIINNRKHYMDMRFWVLMPWKFNGCHALFVIDHVKKHVTFIDFTPTQDWCKHMPYKRFAEAIIMASKNIRLLTARNVLDGRRISLSGNIQFRLDAKIIRRNFVIDLLNYEDNSCRYVSHPVLEGKPNANHVRARISYSRTQQLHNMDIITQCSN

SEQ ID NO: 45367 - protein, 69 aa, Zea mays
  Coding DNA Sequence Number=SeqID_1992
MNVCELTLAVSHTPQVKNRYHRMRRLEDAAITPVIYKDVTFDPVPLYIICVRLGPSTPGVYVSARVLDP

SEQ ID NO: 45368 - protein, 266 aa, Zea mays
  Coding DNA Sequence Number=SeqID_1993
  Gene Ontology: Mol. function=heat shock protein binding; Biological process=protein folding
  Homolog annotation: Hit_ID=A2WU69; Match level="QueryCoverage=20%, HitCoverage=8%, E-value=3e-21, Identity=85%"; Hit description =Putative uncharacterized protein
MQALPTSNQRGCIGLSQANMFLIEMRQAALEERTKRYFMQRLTWENKYRERVQSAIQKCNAGEKRRLGLLESEKRRVQSRLLQIQLAVKTASNQRKSERSKLNEQLEEKLQKLFNLSQTKISAFGEAMLHTIGYIYVQQAARELGKSRVYIGVPFIAEWVRDKGHHIKSQVNAASGGRKRLHSSYTGEYLSVDGIPLFQQLDKGAKVVVALFKLVALLQNWTVMVSQKDKERVAELIRNMSAESMYRRENSLRVETSTDQQAAPSQ

SEQ ID NO: 45369 - protein, 369 aa, Zea mays
  Coding DNA Sequence Number=SeqID_1994
MMVCLGLGGRRKHTLQDNPILQARILTVGGSSSTLGVNYTFGEESGSSRRLGRSPRGLGQLSPEDISPARGLGNSIPASVPPVDVPARLWPIKSSFRANSASVRADTATPGFGSSKSGRGVPLTKQEKPRQQGRLSRGTPTPPGYGYLTRHLCTGRLTLGEAVQITNRRVLVLENSEKTRLRAKNTYMYEQPHTIWGPAEQQKTDERLAVARSNSGDDDDFCSGGPNSSSDDLRADAAAMRPSPMPSLERQGRAEGRRVGGQSVGGTGYLVGGRTSSSCRGGRRRRERLRSHSGQRARHAAAASATNGERPSPRSLREGAGRRPRRGRPQLGTLPSPAPMMKILEAEGGAEAVARLDFPRHRAGGHRLG

SEQ ID NO: 45370 - protein, 1234 aa, Zea mays
  Coding DNA Sequence Number=SeqID_1995
  Gene Ontology: Mol. function=ATP binding; Cellular component=nucleus; Biological process=apoptosis
  Homolog annotation: Hit_ID=A7NUQ8; Match level="QueryCoverage=46%, HitCoverage=95%, E-value=0.0, Identity=67%"; Hit description =Chromosome chr18 scaffold_1, whole genome shotgun sequence
MAERYQLPRSCVPPTTRRKDCGCPPSGGSKGGKTRCIREREDMVAFQGDHPPFKGDSPYLCPQPSWAESSPTRSKVLPYGAGAGSHASCKLAQSRRSQTAARGACNRPAVTSIPSLSPRPAGERADSRAGGMQPRQVGAPLRLPTHPAWKPRPTHHATGAPVATCEQLHHRSHHYHASSTAEPEPRLEATLRTTQQCEPGATVNTTKNGPAVMAVAGGQEQRSRRQPSLRPIQGQRENPLSRGSKRRFAFAIMTASKKAPSLPTDQRFKGWPLGGVQQPPQSAWVPHPLLVRGSKAGPLEGFNGRLRPVGLRAHYSSGVRRLALEGGNDLVTESHQREASSPRTPSKGDRVRQITRRGSGAALANPSPARPLTASTYQPENLGPDRALGPGLRRHRKLRFARPQGSDSGSAPEDDELRFARPQGSDSGSAPEDDELRFARPQGSDSGSAPEDDELRSAQPQGSDSGSAPEDDELRSGRPRARTRAQPRKTMNSAPPDPGLGLGLSPGRRRTPLRPTPGLGLSPGLSRRSSPRPTQGLGLDLGLGRQTRPRPRRSLHIAQPRARTDHSHMSTPHSSSTSSVPPHRASPPQIPQSLTLAPTASSASPSSSSASGMRDAAEDDSDSPPSQMSEDDPGGGGGDRWEPDLRGGNGGGGGGGRWAPPDQVLENVLETVLEFLTAARDRNAASLVCRSWYRAEAQTRRELFIGNCYAVSPRRAVERFGGLRAVVLKGKPRFADFSLVPYGWGAYVSPWVAALGPAYPRLQRICLKRMAVSDDDLALVASSFPFLRDLSLVCCDGFSTLGLAVIAERCRHLRVLDLIEDYVEDDDEELVDWISKFPESNTSLESLVFDCVSCPFNFEALEALVARSPALRRLRVNHHVSVEQLRRLMARAPQLTHFGTGAFRSEGAPGGGLAVTELATSFAASRSLVCLSGFREVDPEYLPAIYPVCANLTSLNFSFASLTAAELKPAIRNCTNLRTFWVLDTVGDEGLRAVADACSDLRELRVFPLDASEDSEGSVSDVGLQAISEGCRKLESILYFCQRMTNAAVIDMSKNCPELVVFRLCIMGRHRPDRDTGEPMDEGFGAIVMNCKKLTRLSVSGLLTDKAFAYIGKHGKLIKTLSVAFAGNSDMALQYVFEGCTKLQKLEVRDSPFSDRGLLSGLDYLYNMRFLWMNSCRLTMRGCRGVAQQMQNLVVEVIKDHSEDEGEAETVDKLYLYRSLAGPRNDAPPFVTLL

SEQ ID NO: 45371 - protein, 238 aa, Zea mays
  Coding DNA Sequence Number=SeqID_1996
  Subcellular localization annotation: CTP_CleavageSite=45; ConfidenceScore=5.33e-01
MVAFQGGHPPFKGDSPYLRPQPSWAESSPTRSKVLPLRRGGWVPRVMENGPGQKKQTATRGACNRPAVTSIPPLLAQTSGIGGPGPHVMQPARWSLHASNSHRHSHHSSRLLDSRNQYRDSRQPSRMTQQCQPGASITGQSAAGEGATVDAANNGPTVMAVAGGQKQRSRRQPSSRHLVGQRANPLSRREDDASVSRSSNGLRTRNGCPVNHSLRHINSAAGQAAPQAGEASDASPSP

SEQ ID NO: 45372 - protein, 66 aa, Zea mays
  Coding DNA Sequence Number=SeqID_1997
MRIALSLDPERDFAQFVAIVAKGLPHPKFTSRVEVEMPIGSHGCLDGLGILHSKLGALLELLDLKS

SEQ ID NO: 45373 - protein, 46 aa, Zea mays
  Coding DNA Sequence Number=SeqID_1998
MAMMGSTSEKMYLCQVKKQQTFVASVQRWYPKKRTKTKAAGGKTLR

SEQ ID NO: 45374 - protein, 161 aa, Zea mays
  Coding DNA Sequence Number=SeqID_1999
MTFAFINIHLDIYRIIIIISQKTDASAMRKTSKKEEMFMLRCVRKEGKMFFAFGSKVKFRSQQSRLYTDKGDKIYYKVMGLPLDAQSSGRRLDVDERVEQCRAVAGVLHVLARFVQVLQMQHLRGIHTYREEAPRTELLGLRRRLGEGESRAATAGLQVAN

SEQ ID NO: 45375 - protein, 280 aa, Zea mays
  Coding DNA Sequence Number=SeqID_2000
MEGSFVIRTSYCLEVEGFPHLLRSCALRMGICKKPEYVWKEYRENRIEKCSMAVYLGESQNYPNHPPFQVIFTGHRFPDTCQNVARKALCQLCQNYSREVFETPLRYFPPNNKNTPTWRKRLHALSRRDPTEDDPTIVYMAGYLHTLDNHYDDLFSHCTHLNSRVESLEQQIKKLKEEKASLQESLEIAEGEEANTREAYRTLKMDYDKKLKKLTPTKKIRKRTKSQVVILSPWQMASDKITPTASGIGARFPLRAEGKVGGEGSETHLPAPPELPLDLA

SEQ ID NO: 45376 - protein, 190 aa, Zea mays
  Coding DNA Sequence Number=SeqID_2001
MSSRSLMHRVFPPSKPRMGDIRRLSALSLEERNSVGVGTFQPSFGFKDFHQPARLYPPAGGHPRRFKDVHHPRWGGGRAEPELYLPRGFVGHPLLRRSRERALTGPAGGSDFDNVGLVDGGRRQPRRVELVGLAPGAPSCRKAAAAPCAREDRPRCRALLGRRSCSGAVLPLHRYGTSAWGSAPHSSGRI

SEQ ID NO: 45377 - protein, 418 aa, Zea mays
  Coding DNA Sequence Number=SeqID_2002
  Subcellular localization annotation: CTP_CleavageSite=66; ConfidenceScore=5.67e-01
DSNSSRSGSSNNNSGRPASRATGRASPSSASEDAPPPSAAMPAGGSGSQQHTSAGNVTCDPSAVTVASSASASSPPPAAAEEVPAAFSPTMQGDAGAEVAPSGPQDPPVTVEAMPSGCQVPTRGPEETEAAILREWEALETEHQRLGDWCTQLEKRTKAASCQFASERAELEQECEDLKEDIRKVSDREQEKLQQELVDKANNIACVEESLRAKDASLEKRATDLTWQEEDLAFREEMWARWNKLLDELELEAEEKGKRLEGKVRALEEQTTLGPQAVEVMRKTLDDLWADQRAGAQRIAAWADEASTTLVPLGMSPIPTLVRPASISDALPVLDSAADRLLRLDQILGARLEAEGSRLCRSVIEYVLTCFRSHDPTVSLGPVVAGPVVDTEDAAREGVQGVVDMVVGRFQRDPTDDE

SEQ ID NO: 45378 - protein, 134 aa, Zea mays
  Coding DNA Sequence Number=SeqID_2003
MEYLVYSDHRFRQLHVLSPAANSAKIADGPIYLGPSFPDTKSIIDICKYFKECFAEKQPWPNRLTNRPYRRRIQCEDRLTPYPDTRVSVGKVEDSASASASGGIASSPDPGLGLRRSLRLARPWARTDRATGDT

SEQ ID NO: 45379 - protein, 103 aa, Zea mays
  Coding DNA Sequence Number=SeqID_2004
MAAVGALQKGAWVAVVRCKGGMGGGASAHGGGHACGGTEKTFLRKTKRKHTSSAMISTNKSNVLNKGRIEFFQSMDYSDSGAKHNYYCLAPELRTMLNATFEH

SEQ ID NO: 45380 - protein, 23 aa, Zea mays
  Coding DNA Sequence Number=SeqID_2005
MAHRTLSSAPPDSPIPKTGLPKQ

SEQ ID NO: 45381 - protein, 226 aa, Zea mays
  Coding DNA Sequence Number=SeqID_2006
MSQQLRHASQQLKHATAFADHVASGALTSEFAAEIERLRAQHTDAVREKSAAENKSRRLTERLAAAEAEKRDLRRQLVEERRDANKAIVDAQATQVEAKLAWVEASLARQRAEELEARLNGLRNRVDKTEASTRAEVERTHAQLVDAYRELGARTAAFEALGQEVGLRFLEWLQEEMGVLPTIVTGLMYFASLVTCEGAVNALSREGCRHFEVFDRSDEGFERKIF

SEQ ID NO: 45382 - protein, 207 aa, Zea mays
  Coding DNA Sequence Number=SeqID_2007
MPSWLSERFWRPVHVMSWLSEERLSPMERPSSEVEVESEPWGRVRRRPPSEVEVESEPWGRARRRPSSEVEVESEPWGRARRSPSSEVEVESEPWGRARRSFLWRPRLDLAAVGLTLASGTAVGAGQAALFSCQAILALNAPAIRLVGVTIWPRLLLREACPSWASGESKLCADGGYQLRLGVLGVPKVHNKPIKIPRKGFNKESKG

SEQ ID NO: 45383 - protein, 149 aa, Zea mays
  Coding DNA Sequence Number=SeqID_2008
MQSRIELCLCVCLLGRAKRRDACGSSHLWLRRQGTVGVSRRCCSVQRSAAFSLQPSSLSISHGAQRCVLVQWRGRLIKCALNPSSERQQQGHRRGMDHQFTHTSFDMACEFSVPLRCLPASSSPFPLFFQNAHLKKKRARTELQFSRFL

SEQ ID NO: 45384 - protein, 31 aa, Zea mays
  Coding DNA Sequence Number=SeqID_2009
MHPRAVAKGAYARWKTPDIGPTRQNNRDAGA

SEQ ID NO: 45385 - protein, 65 aa, Zea mays
  Coding DNA Sequence Number=SeqID_2010
MNVCELTLAVSHPPQVKNRYHRMRRLEDAVINPVIYKDVTFDPVPLYIICVRLGPSIPGVYVRAR

SEQ ID NO: 45386 - protein, 146 aa, Zea mays
  Coding DNA Sequence Number=SeqID_2011
  Homolog annotation: Hit_ID=Q8S0F0; Match level="QueryCoverage=71%, HitCoverage=11%, E-value=2e-07, Identity=34%"; Hit description =Formin-like protein 1 precursor
MGKTRGSNFASESEPDGSDIRRISESAGKIAIPSGGCVGGGDAKFLHPERTSLFARDKFGGSGGGGVREAAPASATSAEFLYMGTLASRAGERSSDTTSSDDEVSRSSPELRPLPPLARQCAPAPSRSPDGASPSFGECWGLVLKC

SEQ ID NO: 45387 - protein, 53 aa, Zea mays
  Coding DNA Sequence Number=SeqID_2012
MGLGVCGSLCQGGYEIDGFGYDYGAGCQHCNHCSSEDEAVEGDFQEFQDYDEF

SEQ ID NO: 45388 - protein, 241 aa, Zea mays
  Coding DNA Sequence Number=SeqID_2013
MTRQQWRSPQHVRHCEKVLAPVFLWGGDNEAIKAKELEARRQVALMVLPAEATTSAMGSLTSDDDHLSTDDRATPTPVGDSCLSTREEVLAPVLLQSQDKTIQEHGGRSRGVRRLVRPPEAASEAAPKPPKPRHRARGGWRRLQSAGPAYPKFTSFARLLRCNWRSNIGSQAHMSCNRRAGYRNQCGNSRHPAHGPTVTLSTKEQQANRQSDSGPTYRLASSPEAGPGATVGTLNQGYPLL

SEQ ID NO: 45389 - protein, 172 aa, Zea mays
  Coding DNA Sequence Number=SeqID_2014
MRRESALHSGSTGEEAFLGNLRESQNKTADGATSCAPDEDYLLQVENREFTCSKNPIIHFAHKGVDTDYKKEGSKRSWNGAPPSRLSSTFALNEGWKGIHHRSNSFLPRHPLHWGGDWSHLPSPTTSLPCQGKNLPSEKLDDGGIVAGIFGDITRLGSGTQRSPYPGMKSQK

SEQ ID NO: 45390 - protein, 131 aa, Zea mays
  Coding DNA Sequence Number=SeqID_2015
MKRSMSPDHPSLMPEGHPVEVNRHWTTSSMPSARITRTCVIPCGTAGTSSIPSGMADHSSLYHLPHHEEGLASPDSLSSRKGEGVEHFHALTGRSMSSSEDMGRKRTEGNKSSMTGRSWWTPLMPQLPIGG

SEQ ID NO: 45391 - protein, 38 aa, Zea mays
  Coding DNA Sequence Number=SeqID_2016
MTGYRLDDRLVAMAGEPQARDGVRMAGYDDWVGGWAST

SEQ ID NO: 45392 - protein, 64 aa, Zea mays
  Coding DNA Sequence Number=SeqID_2017
  Subcellular localization annotation: CTP_CleavageSite=26; ConfidenceScore=5.51e-01
MHRSPILKNKRSPKKSAKKSKKWAVSQRLVAHRTSVSDCNGRIQRSTATGANGRLTRRAPDTAQ

SEQ ID NO: 45393 - protein, 251 aa, Zea mays
  Coding DNA Sequence Number=SeqID_2018
  Gene Ontology: Mol. function=hydrolase activity, hydrolyzing O -glycosyl compounds; Cellular component=cell wall; Biological process= carbohydrate metabolic process
  Homolog annotation: Hit_ID=A3AAD1; Match level="QueryCoverage=58%, HitCoverage=41%, E-value=9e-55, Identity=68%"; Hit description =Putative uncharacterized protein
  Pfam annotation: Domain name=Glyco_hydro_16; Domain location=24-130; Score=-53.2; E_value=0.0014; Accession=PF00722.12; Description =Glycosyl hydrolases family 16
  Pfam annotation: Domain name=XET_C; Domain location=162-206; Score =18.3; E_value=0.0002; Accession=PF06955.3; Description=Xyloglucan endo-transglycosylase (XET)
  Pfam module annotation: Pfam domain module=Glyco_hydro_16::XET_C; Domain location=24-130::162-206
MPSEIVNADQLFVGNQPSVGRHLEDMDYPVNGRHSQPSSVHTDEARLSEALDSRFGISRGIIRLIDVVTTCAYVVTGLCFYVDDTPIREVVRHPDMGGDFPAKPMAVYATIWDGSAWATDGGKYKVNYKHAPFASDFSGLVIVGSRADDPVLRDQEDLLGLVTADYYAAVMTPRERAAMRAFRARRMTYTVCYDAVRYADGPFPECDNSDEERESFSAWGESKTVVVRPRARGRRPRGRKVGAGARRHGTC

SEQ ID NO: 45394 - protein, 183 aa, Zea mays
  Coding DNA Sequence Number=SeqID_2019
  Homolog annotation: Hit_ID=A3AAD1; Match level="QueryCoverage=30%, HitCoverage=14%, E-value=7e-14, Identity=67%"; Hit description =Putative uncharacterized protein
  Pfam annotation: Domain name=XET_C; Domain location=1-36; Score=7.9; E_value=0.003; Accession=PF06955.3; Description=Xyloglucan endo -transglycosylase (XET)
MTPRERAAMRAFRARRMTYTVCYDAVRYADGPFPECDNSDEERESFSAWGESKTVVETPTSYVRPLKAKKNTTQGRQRRMTSTRGRERAIHTKRSLGQSHCFSGDLSFGCNKFLEFICPETKLLDSKMLFAHQYVGDVMLVIHLYGDFHFIFEILVKHRFNSCNGFFQLRKKHAMWRIEPQTL

SEQ ID NO: 45395 - protein, 84 aa, Zea mays
  Coding DNA Sequence Number=SeqID_2020
  Subcellular localization annotation: CTP_CleavageSite=37; ConfidenceScore=5.09e-01
MGLLMGSNGNPTVGMRNLLGTRNPHGYGFGQNFIPVMGMSFLAGVFFLRGYEFEVNGTERDCESGMVTERLRSVDFFGVDWFRI

SEQ ID NO: 45396 - protein, 293 aa, Zea mays
  Coding DNA Sequence Number=SeqID_2021
  Subcellular localization annotation: CTP_CleavageSite=70; ConfidenceScore=5.08e-01
MEETHLHVFDAFRPRQSTLTRAPACPAPRLSQTSAVARARAYKTLPGFDYTLPRTLKPHRSLARRRLPVRSESAAAQSPCHRRPAIRAIPNPVQPSEKTVHTSVRLPERGIGVCFAGEASPRSLELSTPPEYVDRVNHSTILRFLVHTVATLPREAHRALGLNQFAVVWLVYSPPTRTPACARGPGDSGHPRRQAVPRRDRQSLPEPTPPSAGPPSPPDNLEKLYKNNPKTIQIHYVILKENLSLKDCNLADGEYILVPEQGVAQEVAPDLAPEPAPEDLPATALEGKPRFYA

SEQ ID NO: 45397 - protein, 217 aa, Zea mays
  Coding DNA Sequence Number=SeqID_2022
DFPFKSDDGNALTHTDGPSTRGLSPHFVGGWRSLDSESFGYRAEDTIEAIALHGLTTFCGFHPLELATHPIGLFPAEREDDPMWKDRVEHAKDIWAIYPGQTAHLTVRCMNALYRLQVMRGEAMSHLMALLEATKITLDNREELVVDLSQEMVEQLSTDIQELEELVGTRENTIEVLDDQLINTQQQLAEANEHLDMHHQESQDQEANEDVDIEGRR

SEQ ID NO: 45398 - protein, 187 aa, Zea mays
  Coding DNA Sequence Number=SeqID_2023
  Homolog annotation: Hit_ID=Q6JAD6; Match level="QueryCoverage=25%, HitCoverage=6%, E-value=3e-08, Identity=70%"; Hit description =Putative uncharacterized protein
LLLSLHLDSGSAMRLRYNHLMRILDYLTFSVLQRHGAQMSAQIALRVHRLLDLPAFLLAAGADSEAHLTYLPGLLTLLTSSGRARYNGPDRTWASELDEAALWDAFVAGLRLVPIKRRVSLPALSLSEQRLSSGDFERRVAFLPSLQHLPSEGPVRQSHLVPKTSLDGGDAALARSGSAGVFDVTVD

SEQ ID NO: 45399 - protein, 207 aa, Zea mays
  Coding DNA Sequence Number=SeqID_2024
  Subcellular localization annotation: CTP_CleavageSite=70; ConfidenceScore=5.02e-01
MEETHLHVFDAFCPRQSTLTRAPACPAPRLSQTSAVARARAYKTLPGFDYTLPRTLKPHQSLARRRLPMRSESAAAQSPCHRRPAIRAIPNPVQPSEKTVHTSVRLPERGIGVCFAGEASPRSPELSTPPEYVDRVNHSTFLRFLVHTVATLPREAHRALDCNLADGEYILVPEQGAAQEVAPDPAPEPAPEDLPATALEGKPRFYA

SEQ ID NO: 45400 - protein, 50 aa, Zea mays
  Coding DNA Sequence Number=SeqID_2025
  Subcellular localization annotation: CTP_CleavageSite=28; ConfidenceScore=5.11e-01
MDAKPIKTPMGNNAISTSTREPRQGPTRQSNPVARWTAKLFQQPFPPENL

SEQ ID NO: 45401 - protein, 45 aa, Zea mays
  Coding DNA Sequence Number=SeqID_2026
MFVLPHDPVLCAVLIFFTKLIQVPKSKINVEWLERDMVSVGVAKV

SEQ ID NO: 45402 - protein, 152 aa, Zea mays
  Coding DNA Sequence Number=SeqID_2027
MALLDPPKCFQPKVALNLVRNLLGWGAPAFAGRIRVGTSPLGDLAAGEFVLFVSNLPCGLALPISSFFVLLLEELGLQPLHFMPRFILQAVVYLYEMSVGATLLPPAFGRKGLVQQPSGGEKQAELRLYLSRELHQHPMDLVWEAKPCARTP

SEQ ID NO: 45403 - protein, 172 aa, Zea mays
  Coding DNA Sequence Number=SeqID_2028
  Subcellular localization annotation: CTP_CleavageSite=41; ConfidenceScore=5.60e-01
MPSHSPYALRPSTFRAPGWGAPALLSSCCRWRNATSRKLVPFSHHSASRIFIRQPGCIPKTVTTSLMVGRSKPGCNLCPALSFKDLHHPCWGGGRAEPELCLLHGSVGHLLLQHSGEKALTGPAEGVDFDNAGPSGRKRRQLQHVWFASLAGSGTASGATSHHWAEYGYHSS

SEQ ID NO: 45404 - protein, 136 aa, Zea mays
  Coding DNA Sequence Number=SeqID_2029
MSRPRSSPGQLRERLGEIWVEAEAQIPSPPSSSRQAWDLGAGTWSNLQVGLAHGAKELVAAEGQEGRERGEQVRGDGEHQRLRGGGEEGVRQPRRRLVRPPRRGGGRGEVEQERVERDQGAVASARRTANGRGQKS

SEQ ID NO: 45405 - protein, 434 aa, Zea mays
  Coding DNA Sequence Number=SeqID_2030
MAPLVDVAGPRPRLGDVEAPPRSRSSLSSVDEVESEPLGRARRRLSAEARAESEPWGRAKRSSSSSGAEPESEPWVGRSGGLSPSPSPGSGGAEFVVFRGLARVRALGRAERSSSSSGAEPEFEPWVGRSGVRRLPGLSPSPSPGSGGAEFPMVSEAGPDCLSASLCRVAQQSERCRRRCPSVRPVSGAANFWAASGRQNQKLEPNAQIFARLLRDALRLEAPRPRSAGSGLQLASVRSPPPTSLGLYPTQRASATANPTRRRYAPNAPPPGSRTHVGASAPSRRNLSPRLRLRRLHPRPADLQLIQYIITADSIADKAIGRMQEIADKIFSIARETIRPGRGLTSFDATKLHVALEDIACMMEQDSLVFQEYLDKVNNVTHQPDSNYEPSDLSSPPPGEDNLSLDWDFAEHFEKFWGIEYDSDQMPSFSDNEV

SEQ ID NO: 45406 - protein, 480 aa, Zea mays
  Coding DNA Sequence Number=SeqID_2031
  Subcellular localization annotation: CTP_CleavageSite=35; ConfidenceScore=5.10e-01
MSSSSLMRRVFPSSKPPDGGPAAPLHRRSPEMVTSGLMVGESEPGCGLCPSLSLKDFHHQGWGGECAELSCSVPGLQTRVASEPLAAPASATAAGRGSSAGAIAGAGHRLTSNSTAFCPSLPHEFCRGRGPPGSSIRPRVSAAAVRPPGAEVVVVAAAGAGDGAPFFGLPLLRRPSPSEWGCNYLRRGNRSSVCNGISNAGVFVHCGCRGLNMYESLGPIGLVVWGSSSLVKETPQPPFDEPSGPGLSARPPSAHPPPSLTARPALPVGARLPRARPLPRSLSARGPNPSAPLLSRPHPLSSLSLRRGPGLSAPSSPRNRRRAARAHLPRAHVARGTRPTSPSATCAPSPLALTLSPHLRPVDPLSPPRCAHAEHRRHNPAVPSSVLRRRWSSAAPLAPVSSAPTPATRNAPQFPLPLPISLCPRSPVVRRAAATVDPGPRRVSVAAEESPEPALRAPPVARAPRLRRALRRGDERRRPS

SEQ ID NO: 45407 - protein, 25 aa, Zea mays
  Coding DNA Sequence Number=SeqID_2032
MALFFLLINHNALYDEIPTDLDWLN

SEQ ID NO: 45408 - protein, 173 aa, Zea mays
  Coding DNA Sequence Number=SeqID_2033
  Subcellular localization annotation: CTP_CleavageSite=65; ConfidenceScore=5.33e-01
MSGAPEDSNFNSSPLGNSGGDSAIIHRTVRCTPDMSGAPRKSGLRNSPASGILFSCSAIIHRTVRCNSGPTAICDALNARAARAEEKSNWKCLGSSSQESAESGGTGLSGGAPDSVRRQAGSSEMAALGNSPATYDYNSPDCPVCTGLSGEPPVGRANGRPRDLRGPRGRANG

SEQ ID NO: 45409 - protein, 92 aa, Zea mays
  Coding DNA Sequence Number=SeqID_2034
  Subcellular localization annotation: CTP_CleavageSite=59; ConfidenceScore=5.29e-01
MAGGNELAGAKGKWLAGEGTGSCSVTKVPVSECLVPRLSCAKTVPNGFGLSSNFPRMCSSFEKQRTKMIFGKRSENSGIQKSEFPKDSLIKG

SEQ ID NO: 45410 - protein, 148 aa, Zea mays
  Coding DNA Sequence Number=SeqID_2035
  Homolog annotation: Hit_ID=Q6J9V9; Match level="QueryCoverage=29%, HitCoverage=24%, E-value=1e-07, Identity=52%"; Hit description =Putative uncharacterized protein
MQVACNRTAVAHPFGFDASSMEAQAHTSCNRRAGYYVQETAPPLAPMSRLLDCGTGAATRGNLVHGPTVPIERRSRGKRHLWQAKRATFHLRHDDRVKKGTRKGDILKGILLREGSGPRALLLIRGSKAGPSEGFDSRPRALGLQAHY

SEQ ID NO: 45411 - protein, 191 aa, Zea mays
  Coding DNA Sequence Number=SeqID_2036
MMTTSLVVGRSKSGCGLCPTLNFKDLHHPCWGGGRGESGPASAWAGDPLLPPAFGGERHPPALRRRRPPAMRGKAYCCCRARVQLSVLHSGDGHAACGPATSRSSLRRRLHNTSYAARANGSEDLPVRFGAATACWCGVGGQVAAIVGAKVAVAIGEAASSEAVASADETVSAICAPGLRLFGFNGWFSSP

SEQ ID NO: 45412 - protein, 129 aa, Zea mays
  Coding DNA Sequence Number=SeqID_2037
MVFLPSCGKCSTPPVTLRPLCTQCSYMKSIGTDDTTETATMKTLMTFCGYHPLEMVMHPLGLFLAEKRDGPMWCNRVSHVKDVWAMYPDLVGRITVQCMSALYRLQALQSDAMAHLANLAQTTKLTLDN

SEQ ID NO: 45413 - protein, 458 aa, Zea mays
  Coding DNA Sequence Number=SeqID_2038
SQMEVRCQTSFCQNEDGFPKLLRACTVHLGIRSQPEYDGHEFVEHGTEKCVVTVYIGSSLHHVEWSVTAAGHKFRDTYQVVACKALRTLCQIYEEVADTPLRFFPPFQRDHPVWMARMHALEGKQLLEDDPIVVYLTAYLLTLDAQYDFLARHHCQMIARAEDAEKHNRQLHVDLTKAQARATALESREVIAVEALKQAKDEHVQKLIEAFLVTHNQRRALRIQEPAPSNPVQPMRDEDPQILEGHPVSIEGEKKAWELPEGAIVLEGIPVFPQAMDKQEHPESSQDPSPDLFEPLTMKKIPAPSLEVKEEAASTPPAPPPSEELQEPIPLEKSSTPCCHLSRRQKNPACMRGSFASPDLRPRPRKEVSALGLGLNLGLGRRSLPRPTPGLSLNLGLGRRSPPRPTPGLGLNLGLGRRSLPRPTPGLGLNLGLRRSLRLARPWARTDRATRDTSLPYP

SEQ ID NO: 45414 - protein, 344 aa, Zea mays
  Coding DNA Sequence Number=SeqID_2039
MMTTSLVVGRSKPGCGLCPALSFKDLHHPCWGGGRGESGPASAWAGDPLLPPAFGGERHPPALRRRRPPAMRGKANCCCRARLQLSVLHSGDSRATRGPAMSRSSLRRRLHNTSYVARAVAAIVGAKVAVAIGEAASSETVASVDETVSATCAPGLRLFGFNGWFSSPPSGVEVVHTRGSGTGVPLVMNLRSLCDELEPEAAQRRLELGQVIRERDQPRSHAAEAVSRAEVPGGQLVEATEWPTEVSAWAGALAETRAVRAQARCWRPPSRWRSFRPCRRPRPGQIPPKVETTPRVLLLPLPMSEPAGTVCLYRIAYPSESYFSRKVMSEDSVIDIVVKARKSF

SEQ ID NO: 45415 - protein, 142 aa, Zea mays
  Coding DNA Sequence Number=SeqID_2040
MGKSKKGGSSSHHSGDKRKCEPTPPSEDFGDSEYSEEEFSSKSEGSQAPASPPTSSDDSDDSQGIAAEVWTYIRVVERSGLEGSDESEYSSDEEDSSDSSEEGSGDDGGDGDDDGGDGDGGSGSGKGGDGDSGSKGSNKASG

SEQ ID NO: 45416 - protein, 305 aa, Zea mays
  Coding DNA Sequence Number=SeqID_2041
MVGRSESGCDLGPALSFKDLHHPGWGGGRAEPELYLPRGFVGHLLPQHSRERALTGLAGGPDFDNAGLVGGERRQLQRVGLAGSAGSGSAPGAPSRRESGCRAARTGGPPKTSRTARAAFVFWGCPAFAPVWRLCAEVGASLVREDPSGDLPVDRWLPSSALRWWRLKKSSSPTGSPPPSALRASGSLALIACPRPSSGDVGEGIVAAASALRPSPLQFGHLEQRSLSLLPERAAPKPEAAVLAWTEAELAQKEDFVGQSLAGPSTGGTDAGVELSKPRAGLVSSEDSWLRLRGGRPSRLLGPDS

SEQ ID NO: 45417 - protein, 35 aa, Zea mays
  Coding DNA Sequence Number=SeqID_2042
MSQEAPSLPYPKLTQATGNKTGIPSGSLRVSLNIQ

SEQ ID NO: 45418 - protein, 381 aa, Zea mays
  Coding DNA Sequence Number=SeqID_2043
  Gene Ontology: Mol. function=hydrolase activity; Cellular component =peroxisome; Biological process=DNA repair
  Homolog annotation: Hit_ID=Q6YVH6; Match level="QueryCoverage=92%, HitCoverage=85%, E-value=1e-148, Identity=74%"; Hit description =Hydrolase, alpha/beta fold family-like
  Pfam annotation: Domain name=Abhydrolase_1; Domain location=123-362; Score=60.2; E_value=6.8e-15; Accession=PF00561.11; Description =alphabeta hydrolase fold
  Subcellular localization annotation: CTP_CleavageSite=6; ConfidenceScore=5.16e-01
MSVASVAALRTAGSGRRRGAGSQQTGLNGERLRLCQRRELVTKAGIALAVSCSMATSPASANGAAQGLEILPFKADGYNFWTWRGRRIHYVEQGAGRPVVLIHGFGASAFHWRYNIPELAKKYKVYAIDLLGFGWSEKALVDYEATIWMEQVSDFLREIVKEPAVLVGNSLGGFTTLFTATEVPELVRGVVLLNSAGQFADPNKPAAAPAEEEEGGSALSRYIVQPLKEAFQRVVLGLLFWQSKQPARVEKVLKSVYIDPSNVDDYLVGSITAPAADPNAGEVYYRLMSRFMSNQSRYTLDRLLGKMSCPLLLLWGDLDPWVGPAKAARIQEFYADTAVVHLQAGHCPHDEAPEQANRALLEWLAALDARAKSAEPSLQTV

SEQ ID NO: 45419 - protein, 148 aa, Zea mays
  Coding DNA Sequence Number=SeqID_2044
MEVPLAVEAARAGRCSTTPRPEPSPCGQVRPECLPSSGADSLECPRLLRLRLSSRPLEARMPPPLPPPTTSWRWLHPPLTRSSTPAPLPASYWAEALRIATHLLNRLPSKAAKRGPSGPLRRTVRGTRMTLGQNQCKNPSVHYGPSGG

SEQ ID NO: 45420 - protein, 333 aa, Zea mays
  Coding DNA Sequence Number=SeqID_2045
  Gene Ontology: Mol. function=catalytic activity; Cellular component =membrane; Biological process=metabolic process
  Homolog annotation: Hit_ID=Q7G3D3; Match level="QueryCoverage=78%, HitCoverage=11%, E-value=1e-140, Identity=93%"; Hit description =Acetyl-coenzyme A carboxylase ACC1A, putative, expressed
  Pfam annotation: Domain name=Carboxyl_trans; Domain location=28-333; Score=100.8; E_value=4.1e-27; Accession=PF01039.13; Description =Carboxyl transferase domain
  Subcellular localization annotation: CTP_CleavageSite=51; ConfidenceScore=5.87e-01
MRINVGATSPRSSFPSSCHACSRRPPCRQTCPRGRASPPWASSRRSSSPPRASPQKNHQFVLADNNMTPKLTTQDYSRLSSSVIAHELQLKNGETRWVVDTIVGKEDGLGCENLHGSGAIASAYSKAYKETFTLTFVTGRAVGIGAYLARLGMRCIQRLDQPIILTGFSALNKLLGREVYSSHMQLGGPKIMATNGVVHQTVSDDLEGVSAILKWLSYVPPYVGGPLPIMKPLDPPERPVTYLPENACDALAAICGIQDGEGRWLGGMFDRESFVETLEGWAKTVITGRAKLGGIPVGVIAVETQTVMQVIPADPGQLDSAERVVPQAGQVSQ

SEQ ID NO: 45421 - protein, 52 aa, Zea mays
  Coding DNA Sequence Number=SeqID_2046
MEILTTKSILFTNNARELLLKSLDVSNLVYNGDRGARGWEALAMTPRGDGPR

SEQ ID NO: 45422 - protein, 164 aa, Zea mays
  Coding DNA Sequence Number=SeqID_2047
MENLSTMTPTIVIGKIAAFEMSRKMCRGEEPTFSRPYAFACDGRKAPDGAAPQPPLARGRLSSPAPGGAAPQPPLARGPSAPGAAPPAPDGTAHPGPPARDPSAPRARPLGPLRAAASAPGAACVASRAPARGDEDDGFGYDYGNGEDEVVKEDFQEFQEYDEF

SEQ ID NO: 45423 - protein, 84 aa, Zea mays
  Coding DNA Sequence Number=SeqID_2048
  Subcellular localization annotation: CTP_CleavageSite=61; ConfidenceScore=5.07e-01
MGGGLLAAAPALRSVLPLFGPPEQKSSSSLLLEQYLDFFVGNRDVCASESCFSRKVMSEVSVSRRRGSPLALSALPLTRTFTRP

SEQ ID NO: 45424 - protein, 195 aa, Zea mays
  Coding DNA Sequence Number=SeqID_2049
  Subcellular localization annotation: CTP_CleavageSite=27; ConfidenceScore=5.18e-01
MMVLDSIVATSFTILLLFSLPSCLRLRATLFSAEGVGACASSPYSSDTSPDTDPRSGYCTSTRMFHSMRTPSFSSSSDVSFAFPAFALFFLPNLLRPPTVVATSRPTLVDVGTRRVGLALSLSPCVPPRRTRWHLPRFSYLGDEESRRLRLRDESMCDMKQHERAPKLWPKKHRLSTTTKVEDGTDLKDKGLLNP

SEQ ID NO: 45425 - protein, 424 aa, Zea mays
  Coding DNA Sequence Number=SeqID_2050
MALPADVAGLRPRLSVVEAPPKPGSSLSSVAEAESELLGRARRRSFGRGQGGVRALGSVGVAQAALSFCQTGQWSGEVTAVTSALPGGARQDKGLLLSEGKASGELEMCPPLEGGLGRDGNPSGPLQLYADGGYQLRIRRLEEERNPVVVGALPLSLGFKDFHHAARLQSPASGHLEGIRGRRAFTSLAEEANFGYVEPADCRPAGRHVRRIHGFSRAGGRTGGPYKTSYAAFLDGLVLTPAPPPTGAEVAAVVGAEVVATAEVAAAVGAEVVASAGEPLGASYPVALLVWRLDLLRLDTSVSEKVVNNSREAASPRAVERAGPRYGTRLSGYTSSGPPQETNAFGYGTRLSGHIGSGPPHGTGSCSLEPARRLSDLPTFVSGALNCKPSCSIRMSSYQQAGFMGTDPTRLAYTIGLRDSFSRS

SEQ ID NO: 45426 - protein, 235 aa, Zea mays
  Coding DNA Sequence Number=SeqID_2051
MAREESTGPRVEQVVSTGLHVVLVWSTRPRVAQAGSMGPHVGWEEARAEASRLHVVQATTQGGRLGWRGNRIRLEKGVKIGRWGGASKGKHIFIEDDVTRDDDAVIAGTTEHAKVVVGGVVPYRAKWGVGWLTAFEGRRLRRSWVAKTTMPSDGGGGGDQGGRWRRAGGGRPERVEGLSAVTARERVPGGQILHRKTRGVKLNGTRIVGGEPTNIKEIIGDVWGYENVVEIERPR

SEQ ID NO: 45427 - protein, 126 aa, Zea mays
  Coding DNA Sequence Number=SeqID_2052
MCSPVDHAYATRDLVDTSQAMRGPPTSLARFADPALVYHRRGRATPSKPTDSGPSTGAAHFAEPVVYHCHKPATPADLDVPAARSKTPVYHPVAIHRDHRHIQLQIIDQRMKVLQYPMPGCRWSGF

SEQ ID NO: 45428 - protein, 245 aa, Zea mays
  Coding DNA Sequence Number=SeqID_2053
  Homolog annotation: Hit_ID=A9NV46; Match level="QueryCoverage=45%, HitCoverage=100%, E-value=2e-19, Identity=40%"; Hit description =Putative uncharacterized protein
  Pfam annotation: Domain name=DUF1754; Domain location=136-245; Score =156.6; E_value=6.6e-44; Accession=PF08555.1; Description=Eukaryotic family of unknown function (DUF17
MEHTELRRSNGQLTYERCTRKKQHRFQTTASAAEEPYKGHTQKRRRIGRRCRAGEQSVSRSEQRNYTLASPIHWSPSQQQDDGAMSLRHDDRALSSDSDTNTNTDTAWNRRSGSDTDTDTDTDTVNDAIPFALMLEYQNVVGGRLKLKGKALDVKDGGVMKKKKKYQREESSQTESDKNGDERNPHSNYDYLTPAERRYMEQKQKIDMKKMAKVANKSYKDHMQDFNQYLANLSEHYDIPKVGPG

SEQ ID NO: 45429 - protein, 178 aa, Zea mays
  Coding DNA Sequence Number=SeqID_2054
MPTATPIPTADWPVTFVLNVTVGPCARCLESLHWFWKLIFSVFRVGPEKTWHWREWRCDFSAPGNRRAGCMTCGPGPPCRTTSCSEVEGAHNYGAVRFAFLTAGCSENEGAHNRGAVVCSLCGGSPSSFFGSVSMTCGAWPPCHRVGTLVHVGGDHARDASGREWGDLPLKRDRSPSQ

SEQ ID NO: 45430 - protein, 192 aa, Zea mays
  Coding DNA Sequence Number=SeqID_2055
MAPRYQLHWNLDAALALTWRDLGIIDHGTEEEEPLASLVKEIMGEALCLCEMVIVRMWVPFVSILIRFGLRRLLTLLFTLQLQPSSNDVLVFQHLDVTKKSSKIVERLLETVVEHERWNREICKETAEPNGIAGEIYITKANGITSFRVFVSESELLFHAVSVFVSESELLFHAVFVFVSESELLFQAGFGR

SEQ ID NO: 45431 - protein, 74 aa, Zea mays
  Coding DNA Sequence Number=SeqID_2056
  Homolog annotation: Hit_ID=Q7XBD4; Match level="QueryCoverage=51%, HitCoverage=3%, E-value=9e-09, Identity=71%"; Hit description =Cinful1 polyprotein
MSIVRVGEDNSVPAPEENEVVIFPKLLQSWASVPTEQNDLIAREDIKEVIMRPIWSRFGLRKPKVEIDEAAEAC

SEQ ID NO: 45432 - protein, 99 aa, Zea mays
  Coding DNA Sequence Number=SeqID_2057
MSEFWKHLVELHGVKSLTCEKFSGVIILKMRPLEKEKMNSEQNSPSYSRKFFNLEDEILLRGVPSDLDPSDLGQNHSVKKHKGYEGWSRAEAMRRGAST

SEQ ID NO: 45433 - protein, 148 aa, Zea mays
  Coding DNA Sequence Number=SeqID_2058
  Gene Ontology: Mol. function=cellulose synthase (UDP-forming) activity; Cellular component=membrane; Biological process=cellulose biosynthetic process
  Homolog annotation: Hit_ID=A2Y0X2; Match level="QueryCoverage=57%, HitCoverage=7%, E-value=2e-39, Identity=87%"; Hit description =Probable cellulose synthase A catalytic subunit 1 [UDP-forming]
  Pfam annotation: Domain name=PHD; Domain location=52-100; Score=-1.2; E_value=0.018; Accession=PF00628.20; Description=PHD-finger
  Pfam annotation: Domain name=zf-C3HC4; Domain location=53-97; Score =1.2; E_value=0.066; Accession=PF00097.16; Description=Zinc finger, C3HC4 type (RING finger)
  Pfam module annotation: Pfam domain module=PHD::zf-C3HC4; Domain location=52-100::53-97
MANRPLARPTARTPQSRPPDACSHNRNEFVMIRHDGDAPGPAKPTKSANGQVCQICGDSIGVSATGDVFVACNECAFPVCRPCYEYEREGNQCCPQCKNRYKRQKCWFPGNFFEWDYKDKDGVKGLCIVGAINNYTSQLPTYGRSYPP

SEQ ID NO: 45434 - protein, 114 aa, Zea mays
  Coding DNA Sequence Number=SeqID_2059
MDITRKMDIAKVILGKKKKRREVQRAWLCTAKAAQSGTPDCPVVHRTVSGGAPDSVRCARLNFSELAALGNSPATYGYNSPDCPVCTGLSGKPMVGRANGRPRNLRGTRGRANG

SEQ ID NO: 45435 - protein, 19 aa, Zea mays
  Coding DNA Sequence Number=SeqID_2060
MAYSLLEPNTARAAMAYYD

SEQ ID NO: 45436 - protein, 241 aa, Zea mays
  Coding DNA Sequence Number=SeqID_2061
  Pfam annotation: Domain name=IQ; Domain location=115-135; Score=27.0; E_value=7.2e-05; Accession=PF00612.18; Description=IQ calmodulin -binding motif
  Pfam annotation: Domain name=IQ; Domain location=73-93; Score=25.0; E_ value=0.00028; Accession=PF00612.18; Description=IQ calmodulin -binding motif
  Pfam module annotation: Pfam domain module=IQ::IQ; Domain location =115-135::73-93
  Subcellular localization annotation: CTP_CleavageSite=50; ConfidenceScore=5.19e-01
MDRRSMTPGISSRLSSPPPAAHPSPPPAAAPSAAATPSHPPSPTPDAFTRLEEKWDQFVVMFHRYKEKTEKELQAAVRLQAAARGFLARRQVQSLRREKHLAVASRATPWPSSHEQAVVRLQAAVRGFLVRRAVRKLHLLISSSLHQLATCAPNHQVSSILFEPPAEVEIWVCSPPARPKRVVSFIRATALVLDRPIIRTSWFLLHLSSNLEDELVLKGGGDVMGIIGSERQQPGWDKARE

SEQ ID NO: 45437 - protein, 154 aa, Zea mays
  Coding DNA Sequence Number=SeqID_2062
  Gene Ontology: Mol. function=aspartic-type endopeptidase activity; Cellular component=chromatin; Biological process=chromatin assembly or disassembly
  Homolog annotation: Hit_ID=Q10PL9; Match level="QueryCoverage=41%, HitCoverage=30%, E-value=2e-20, Identity=79%"; Hit description=Maf family protein, putative, expressed
MAASSALRSADIDEKAIRKENPEELVVALAHAKADAILEKMQNNGMMKEILDSQDTTLMITADQHLAPNLESSSFEDWWEGVVAVPADPAYKGLHKGLNSLIILGAWAIWNHHNRCVFNGVQSSSSMVINWVKEESHIWCRVGASDLSSILMLQ

SEQ ID NO: 45438 - protein, 40 aa, Zea mays
  Coding DNA Sequence Number=SeqID_2063
MVQELDYGYMMDITRKMDIAKVILGMLELRNVNLDQVKPT

SEQ ID NO: 45439 - protein, 291 aa, Zea mays
  Coding DNA Sequence Number=SeqID_2064
  Gene Ontology: Mol. function=sequence-specific DNA binding; Cellular component=nucleus; Biological process=regulation of transcription, DNA-dependent
  Homolog annotation: Hit_ID=A2X8L5; Match level="QueryCoverage=97%, HitCoverage=55%, E-value=1e-82, Identity=57%"; Hit description =Putative uncharacterized protein
  Pfam annotation: Domain name=WRKY; Domain location=36-96; Score =138.8; E_value=1.6e-38; Accession=PF03106.6; Description=WRKY DNA -binding domain
MWLLCLVSRKNQARKVVCIPAPAASAGGRTTGEVVPSDLWAWRKYGQKPIKGSPYPRGYYRCSSSKGCPARKQVERSRTDPSLLVITYNSEHNHPWPTQRNALAGSTRSHHAKSSKNKYSSHSLPQTPNLKAEPEHHQASGAVPSATAATAATATSTTTTTSTTSNSTPPPPPTMAVKEEAIMVGSEMEKVIDHHDASGWLDHGDLMQQMFSQSYYRPMIPEAAGGGLHADDFFADLAELESDPMSLIFPAGGEPGKENKSLDADPLFNMLDWGATNVAATSSFEQDESGW

SEQ ID NO: 45440 - protein, 36 aa, Zea mays
  Coding DNA Sequence Number=SeqID_2065
MKLWKETSRSSKTTTSSRCGTIWTSQTYDVIDYFPY

SEQ ID NO: 45441 - protein, 230 aa, Zea mays
  Coding DNA Sequence Number=SeqID_2066
MTLGLTSQARFTNSLEERPFQQESLLMTFLSRPFGVVKPHARTADPGLHAELFTFAKIQRRSAIIHRTVRCTPDSVRCHKEEWLWNSPVSGICSAIIHRTCPVYTGLSGEPAEQRLLRANGHLQVHLMRARSAQKSGTRETVHRTIYSTCPVYTGQPGGPRSQKLQRSEPNGLVTWLAHRTCPVCTGLSGAPYDSQLHQTASLVVGAINTPNHPTFKSSKFSHFNYLQEL

SEQ ID NO: 45442 - protein, 459 aa, Zea mays
  Coding DNA Sequence Number=SeqID_2067
  Gene Ontology: Mol. function=pyridoxal phosphate binding; Cellular component=nucleus; Biological process=regulation of transcription, DNA-dependent
  Homolog annotation: Hit_ID=Q6L5E0; Match level="QueryCoverage=14%, HitCoverage=8%, E-value=3e-15, Identity=65%"; Hit description =Putative uncharacterized protein OJ1651_G11.5
  Pfam annotation: Domain name=DUF1296; Domain location=272-331; Score =40.1; E_value=8.2e-09; Accession=PF06972.2; Description=Protein of unknown function (DUF1296)
VQPELLQPMIPEAAGGGLHADDFFADLAELESDPMSLIFPAGGEPGKENKSLDADPLFNMLDWGATNVAATSSFEQDESGCPPCGLPSPNPHLHARHNRPQSHDPISSPSREPIPALPPLLQQPSRKGRTWWGRRGVLSPPLDHLAGLLEVRVVRGVDLAIRDLRSSDPYVVLRIGKAQVRFSSPPFWFALLLVGFIGKRSGELKSVAPLRQPRATAPNRRPGSRRGRSRWRLLWWLRGRERERHEGRWPWRRRELRQPSYATSDGADAAAIPVASRKMVQSLKGILANRSEGEIYATLCDCGMDPDIAVERLISQGSKASVTRALQRAERYRTELLKERDFLRAMMLVAERAFQSPDALLVLEKVLAKFLVMYPNYASALDVGRLHDDQYPHLDKVCLHCDARAPSPHPRNARRDSPPPRADIVERVAQQTVHTMAPPNPPVPHGFNAATSAATSSFP

SEQ ID NO: 45443 - protein, 88 aa, Zea mays
  Coding DNA Sequence Number=SeqID_2068
MAYISLIHCIHLDCNLAVGEYVFILEQGATQEEAQELAQEPTNEDLPAARAFEGMLQDVVDGVTWPSTLPPGWKVEWDAASTGEDQEE

SEQ ID NO: 45444 - protein, 69 aa, Zea mays
  Coding DNA Sequence Number=SeqID_2069
MARVACTLLAKDCLKGVVCSRVARTCSCNGGSVGMVDISKSYEKHMSCGTRIVLLWMVLNAGGQDLLIG

SEQ ID NO: 45445 - protein, 335 aa, Zea mays
  Coding DNA Sequence Number=SeqID_2070
MEFVSRVARPLPHALAPVEIPPLRARRARRSLFSPWRTLLCCCPPDTRACHWLALTLARLLVVTVSHSLLVHRASRVLAFVVELLNPSSLARDFVVARALIGFVSLPARSRYNLVVIPYVIKKSQESGEDEASSVIFTKCLTPARTSRRASSSSTPSPQAVKTLYCWPRVTSSTKKNPTGACGPNNLGGSATEGLAIPNMNFPVFDGTNPKLWKHRCETYFEFYAVPIEEDVLLHMGRREVRRPEFSSLARTPVKAVPMPLPLPPVIATRTSGTTEDRRSSGWYQRIGEDIKLSALRDYRRSKGFGEFCQFPGKSSHGSHAGSAATYQASEGKSG

SEQ ID NO: 45446 - protein, 218 aa, Zea mays
  Coding DNA Sequence Number=SeqID_2071
MEETHLHVFDASCPRQSTLARAPACPAPRPSQASAMAHAPAYKALPGFDCTLPRTLKPHRSLAHRRLPVCSMSAAAQSLCHRRPANKAIPNPVQPSEKTVHTSVKLPERGIGVCFAGEASPHSPELSTPPEYVDRSLPEPTPPFAGPPSPPIALLTRPETWSPIPVMVGTSAVTARRPVGVSEALYAKAVYLARFKNSIRIVCFSQLMRLLDPCCYIE

SEQ ID NO: 45447 - protein, 112 aa, Zea mays
  Coding DNA Sequence Number=SeqID_2072
MGKPVPSLLMLLLYRAINNFCEVTTFPLVTQCSNMDQAVSLAARSRRFESSFYPCKIRAHRLGVQCLTDPDCRLAVTALVPTITGMGDHVSGRVRSKVCGQVHSGFRNHYAK

SEQ ID NO: 45448 - protein, 25 aa, Zea mays
  Coding DNA Sequence Number=SeqID_2073
MDRYLRVERPRNKSTIEENELHIPW

SEQ ID NO: 45449 - protein, 35 aa, Zea mays
  Coding DNA Sequence Number=SeqID_2074
MARVARTLLAKDRLKGVHTLESLFFSRVMSHFDYD

SEQ ID NO: 45450 - protein, 454 aa, Zea mays
  Coding DNA Sequence Number=SeqID_2075
  Homolog annotation: Hit_ID=Q5NAA7; Match level="QueryCoverage=82%, HitCoverage=73%, E-value=2e-26, Identity=29%"; Hit description =Putative uncharacterized protein B1008C01.13
  Pfam annotation: Domain name=DUF1618; Domain location=211-357; Score=- 1.2; E_value=2.9e-05; Accession=PF07762.5; Description=Protein of unknown function (DUF1618)
MSATSSFTAGESSRAGEQPERDEVVEFLDCPWVALSSAIVVIGANDERARMLAPGASDIFLDLQPPLVGASYLVLPERIVAHYRYSGYQPCVLSACSNCLLFLAIQAEGVSNPAFFLGNARARTVVRLPDVPAHLGVNIIRRQSIGLIADQRHDGHYMVAQLHPTWTTLHKTLLCYSTVTDQWTARPLASAEEHPRWGAHGVLAHGGLLWWIDVSYGMLVCDPFAADDNLHLRFIPLPVGSMLMAQPELMAHGLRFISRSGLMAHQRFIRPSQGKLRYVEIQGAPSGMLTTNYQPPSNPQVRMFTLVSQEGQHHWVHEYTATFLDIWSYRSYADAGLPRGVVPSLALIDPNNANIIYFFQGTTLFAVDRYARKVLHHLQYLVDVVDSTYADLTLQNSRYVSAWELPPGVFVNGHGPNDTEKTKLLTYPSSNRKIPCDESEIGSLLPSLSSMESM

SEQ ID NO: 45451 - protein, 442 aa, Zea mays
  Coding DNA Sequence Number=SeqID_2076
MASLGHPDRFQSKAALNLVCGLFGWSAAGLAERIHAGAVPLGDLVAGEFVLFVSYISYGASSSFAPKVTPPPPDTRPTGGFGSQQQESAESGVGEATRTAPPASHVPTGGPAAATLTSGGATTVEEVPAGGPAPAPATGGDLGGASSSVPLFAPEEMELEEHTKAASRQFLSERSQLERDRKEYKRDLQKTLEEQRIQQTKVVERLQKLQQVLEGKASDAALTQEKLKAKEQSFDRRETDLARREMDLSRRETDLTFWAEMLTRRSEMMTEHELEAEEKEKKLEERIRQIQAAQAAPGPQAVEATRKALEDLQAEHRVEVQRIAAWAGKVSTTLVPLGMSPLPVSELPTSISNALLVLDSTTDHLRRLDQILGACLEADGGRLCRAVIEYILTCFRSHDPAISLEPVIAGPVAATEDAAREGVQDVVELVAEHFQRDPTDDE

SEQ ID NO: 45452 - protein, 444 aa, Zea mays
  Coding DNA Sequence Number=SeqID_2077
MLPSEGAEHGVSGELLAAFEPLISREAQGLFSFTEKDPFRVIMAKAKRRSLLLPEAPPVPPRNQCDRASGTQLRGRWYLSAIVRLQGFSSVSPAASPRRWSPKTVTTSPWVGRSKSGFDLGPALSFKDVHHPRWFGLSRSSTSPRGFVGQPLLQHSRERALTGPTRGADFDNAGLVDGGRRQLQRVGLAGLAPGAPSCRKGGCRAARTGGPPKTSRAARAAFVFWGCPALAPESLGSVGLAVRGFSCLVKGTPRPLFDEPKPGVAVSAQTEVELARKEDLVGQSLAGLSTGGTDAGIELPRPQAGLMSSGDSWPRPRGDRPSRLLEPDSWRRPWRRWPGRGDDVVLQSGDSPTASPSEARSDLGEGVVDAEGAAAPFKIVRASESCFSRKAMSEGSVTDAVEKARRIVSAEELSSVKTCSVRGITYPNASYLSQKVMSEDPLSK

SEQ ID NO: 45453 - protein, 76 aa, Zea mays
  Coding DNA Sequence Number=SeqID_2078
MTSVALNLLRKQGNVSRIHATLPAMLLQGSRHLSDSHVLHLEHLDEPCEDVKDADDCTALLDAFVYIEMSSAALRV

SEQ ID NO: 45454 - protein, 65 aa, Zea mays
  Coding DNA Sequence Number=SeqID_2079
MTKVMLAEDVQSSRNGIKLRLDHALVYPQPDSENTCSHTWKTLSNHVFEDLRKPKAPNTQLYNGV

SEQ ID NO: 45455 - protein, 47 aa, Zea mays
  Coding DNA Sequence Number=SeqID_2080
MSGAPTALWLPTVDFAVEGKKSGTGHCPPVINVEWVTGSSECGRLKP

SEQ ID NO: 45456 - protein, 179 aa, Zea mays
  Coding DNA Sequence Number=SeqID_2081
  Gene Ontology: Mol. function=transcription factor activity; Cellular component=nucleus; Biological process=regulation of transcription, DNA-dependent
  Homolog annotation: Hit_ID=A3AN33; Match level="QueryCoverage=51%, HitCoverage=13%, E-value=1e-34, Identity=70%"; Hit description =Putative uncharacterized protein
MEGFVCVGSTGAGTGGLGDTKPEAHLWDNSCRKDGQTRKGRQGGYDTEDKAARAYDLAALKYWGPATHVNFPVENYRDELEEMKGMTKQEFIAHLRRRSSGFSRGASIYRGVTRFVCTDYYATAFRFLRDHLNVHANCIAGTTRKEDDSLGLEGSLETRIYTSAFSVRKIVPFGCRSRF

SEQ ID NO: 45457 - protein, 307 aa, Zea mays
  Coding DNA Sequence Number=SeqID_2082
MGNTHSPSALSLEERNFAEAGSPAASPRRWSPKTVTSSLMVGRSEPGCDLGPALSFEDLHHPGWGGGRAEPELYLPRGFVGHLLPQHSRERALTGLAGGSDFDNAGLVGGERRQLQRVGLTGSAGSGSALGAPSHRKSGCHAARTGGPPKTSRAARAAFVFWGCPAFAPVRRLRAEVGAPLVREDPSGDLPVGRQRPSSVLRWWRLKKSSSPTGSPPPSALRASGSLALIACPRLSSGDVGEGVVAAASALRPSLLQFGHPERRSLSLLLERAAVSDLEPCRPAGPPMWGVTHTRGDGTGVPFVMAP

SEQ ID NO: 45458 - protein, 110 aa, Zea mays
  Coding DNA Sequence Number=SeqID_2083
MGGGGLGAGGAQAEAGRARLGWARLGRATSRIENPRRARPLNGIKSRTEIRNGTRRTFNIRQRNVLRHDATPMTLRFWFIHNTDTCRYTGLKLGRRGKWGKRKESNARIW

SEQ ID NO: 45459 - protein, 216 aa, Zea mays
  Coding DNA Sequence Number=SeqID_2084
MSTTDIPVLHSGEVVHLYPQVMLPICHGVDRTPYTSTKEARQGTTTRPLQSSTNFRKPATVFRKLQCRDPSSDRHRSKINPKYLPTLTTPLLPLPLSGSYHESCPQAPWPRRSTVSRWRMAIDDEFSVSPTSPPPAEITSASSATICIHGATNRGSSGDEVGPPTTAAKYPSFYSVRLYNNGGEAIDSVELGIPVLRLYVPEAMPEIEVQNPTDLR

SEQ ID NO: 45460 - protein, 86 aa, Zea mays
  Coding DNA Sequence Number=SeqID_2085
MAAAELPSLDNASPNGLVVHNGNMLYLLLALGLLDCSSWLLGQEGEVPADSASRTDFLMSDCSGDTVADAEGSASETAAKAGVDSA

SEQ ID NO: 45461 - protein, 90 aa, Zea mays
  Coding DNA Sequence Number=SeqID_2086
MKGGHEMSDEAIRKNEKESHDAQEEAKRAEEAAERTRLIAELSPPPEPYNPEADPAMKESLDIIRIANEVVDEAIDRLLNEATEKLLKED

SEQ ID NO: 45462 - protein, 340 aa, Zea mays
  Coding DNA Sequence Number=SeqID_2087
  Homolog annotation: Hit_ID=Q6J9V9; Match level="QueryCoverage=32%, HitCoverage=32%, E-value=3e-10, Identity=43%"; Hit description =Putative uncharacterized protein
MQAACNHTKGAHPFDFNASSVEAQAHTSCNRCAGYYVRETAPPLAPVPRLLDCGTGAVTRGNPAHGPTVPTEHIGYGDWERGYSERDPSPRRKRAPSPPTDQRFEGKQPPQSIRALRPLLIRGSKAGPSEWFDSRLRALGLRAHHWSEVRRLAPRRGSIAASDHSGSAPTTDQGFVGWPPKGSTAASEHAERGMTLEGGIEPSDPIERDRVRQMTYRYFWSVPLGHKPTLIERGTGVHSDHPLATHWRHDVRRPPRATWRFPPPPCGKATQGHMKKAESVLDRPLALCGGSGAALAKLAPAKPLTASTYQPENLEPDYAPGLRPVHMREQPDRPKHHETR

SEQ ID NO: 45463 - protein, 88 aa, Zea mays
  Coding DNA Sequence Number=SeqID_2088
MPHPFPPPIALDCLAGDFTAASTRQCAVDRPPQASTAEEVSDPPEFIALEEGQEPDPSEINLLCQESFDEGKSILPLMHNLPILSTTT

SEQ ID NO: 45464 - protein, 66 aa, Zea mays
  Coding DNA Sequence Number=SeqID_2089
MALEAGLSCCQPHSIDWHSSRSRAGGAVFLSGTLQDMVDGVTWPTTLPPGWTVEWDAAPAGEEQEK

SEQ ID NO: 45465 - protein, 99 aa, Zea mays
  Coding DNA Sequence Number=SeqID_2090
  Subcellular localization annotation: CTP_CleavageSite=57; ConfidenceScore=5.89e-01
MASSPVLAISPIPLPSPSAYKRTRSSPFFATQLQPPPLPSSLSHSSKHRRAPFTAPSCQELRHTSTFTTRHFPHSIMSGKLTGGFAAAGTHHRAADRPP

SEQ ID NO: 45466 - protein, 319 aa, Zea mays
  Coding DNA Sequence Number=SeqID_2091
HTARKSVIPFLPSRLAERPLHRTVSGQSSHLERLHHRLREEQERRRQHGEQQGSSSSPQQEVETVRPRSSVAQLEAPLVPPRDVPAVGGAVGGATGGDPDDDDSNHSTESSEPQEAEGWVARPITRDAARGCHFHDALDTLLRQAFDRHTWSIEYRCVVYQHSRGRMTSGGAEAVLEHYSISERDTAEAAMQDAARRALSQYCSLFGGVADGLNLRYYPRRPTGSTESVVVSPVGEANPRLSSTVNLVAVLNTELDHSLDELSRARMEIAELRAELAERHHQEGGSPAPVGTQHPYRSPPRGHHTYGSPVCKTRIDLDP

SEQ ID NO: 45467 - protein, 241 aa, Zea mays
  Coding DNA Sequence Number=SeqID_2092
MTPPQYAVQQFEKHRVPRCRVRMTLEPHPLQPGWRSLDSESFGYRAEDTIEAIALHGLTTFCGFHPLELATHPIGLFPAEKEDDPMWKDRVEHAKDIWAIYPGQTAHLTVMRGEAMSHLMALLEATKITLDNREELVVDLSQEMVEKDLQVEQLSGEIHELEELVGTRENTIEVLEDQLLNTQQQLAEANEHLDMHHQEIQDQEDDEDVDIEGGDEPASSVDTAGSGRPPSPESSVASFAH

SEQ ID NO: 45468 - protein, 150 aa, Zea mays
  Coding DNA Sequence Number=SeqID_2093
MDSGAGGDSVAGSRTSRVRRTRKLHFVGPPPELSLESQVLIKPSGKTWIDDSFTGTGHYMQKQHKLPDDGSYDTNAGYVFEYNANDVVADAMYYARIQSIKAWYRASADDRPMPNTKAEWSSIYLTEEQYLESLAGGSGYNSDQPGDGYE

SEQ ID NO: 45469 - protein, 77 aa, Zea mays
  Coding DNA Sequence Number=SeqID_2094
MPPWIGRSTRRRRARPPAHVDRAIPAISDDEPYLGMIARPSPSQPYPSPDLPRRRTKTYHYQRMPTKITFRTEPTPN

SEQ ID NO: 45470 - protein, 229 aa, Zea mays
  Coding DNA Sequence Number=SeqID_2095
  Subcellular localization annotation: CTP_CleavageSite=44; ConfidenceScore=5.22e-01
MKMCFPLLAPPHLPILTPFSSLIRLPLHPRRQPCVVACTTCSLDASARASSHPTCGPIDPACATRGLVDHTSTTCNPVDTTCSTRGPVDSSRAMRGPVDSSRAMCSPVDHAYATRDLVDTSQAMRGPPTSLARFADPALVYHRRGRSTPSKPTDSGKSTSAAHFAEPVVYHCHRPATPTDLDVPAARSKTPVYHPVVIHRDHRHIQLQIIDQRMKVLQYPMPGCRWSGF

SEQ ID NO: 45471 - protein, 146 aa, Zea mays
  Coding DNA Sequence Number=SeqID_2096
MAGYLHTLDNHYDELSSHCTHLNSRVESLEQQVKELKQEKASLQESLNIAEGEEANTREDYRTLKMDYDKKLKKLAPKKKIQKKTTNQGCQTEKKKKKAPLALPPPRIDDWSDDEDVSLASLDDLLKAFGDTLDKEFASTSGNALV

SEQ ID NO: 45472 - protein, 303 aa, Zea mays
  Coding DNA Sequence Number=SeqID_2097
  Homolog annotation: Hit_ID=Q6J9V9; Match level="QueryCoverage=49%, HitCoverage=46%, E-value=1e-08, Identity=35%"; Hit description =Putative uncharacterized protein
MQAACNCTKGAHPFDFDVSSMEAQAHTSWTGKGDTPKGILLREGNGPRAPLLIRGSKAGPSEGFNSRLRALGLHAHYWSEVRRPAPRKGSTAASGHSGSAPTTDQGFVRWPSKGFDSRLRRRARDDPGYVRYITKGSGYGPESLRRSTDRPDKRTAPPAPLRLDRVRLTAAKSGLGRHRKLCLAQPQVSDSASAPEDDELHLARPQGSDSASAPEDDELRLARPQGSDSASAPEDDELRLARPQGSDSALASADGLRLARPKGLDSTSTSEDRLDLDLGGASASPYPGLGPTTSQEGPSLPYP

SEQ ID NO: 45473 - protein, 222 aa, Zea mays
  Coding DNA Sequence Number=SeqID_2098
MATSGLMVGESEPGCGLFPSLGLKDFHHQGWGGESAELGSAPAWAVAGGGHGLTSNFSAFCPSLPHKFWHGRGPPGSGIHPEVSAAAVRSPGAEVVVVAAAGAGDGAPFVGLPLLRRPSPSEWGFSPVDYLNRFTKHESPRVKVTGEYEQRRSWLENGNLVGRSLAVWSVSGADAKVDQPRPRVGLAPLEAGWPRPQGRRRCRGCYGSLQREDPSLQDQTVL

SEQ ID NO: 45474 - protein, 85 aa, Zea mays
  Coding DNA Sequence Number=SeqID_2099
  Subcellular localization annotation: CTP_CleavageSite=32; ConfidenceScore=5.60e-01
MNRTSTSSVTPTALTALYPNPTCSGPGSSRISSSAGRARKLPFNECKQGSLLTLHLACIGGKERGIGKTRPYTLISTRKRHSGSD

SEQ ID NO: 45475 - protein, 162 aa, Zea mays
  Coding DNA Sequence Number=SeqID_2100
MDKDVRAGRILMRRPGVVVPEDIIADVLAASAGGVEITLEYVSMLYYFEGIVITLSHCVNVLQPGCFYFSYAFECQLGAPKIKSVGNTASDPYTMKNGVFLCNARLGWVRRLHTTYGSSLIHFPASFSLLSNTFFMSASSILPLALSTCPLALGCATDAYLI

SEQ ID NO: 45476 - protein, 140 aa, Zea mays
  Coding DNA Sequence Number=SeqID_2101
MAAQGESRHGRAEEGHGHGFALRSPGSASTSAWLACLRLLEPPETKSYVVRTEVPDDVPLAGNPVGQEITQTVSHVSSTLEGGLDHGDTLALDIVGQGHPAPVGTTEGASASEGAAKDNPAPEGGAEDDCNTPGVTVTKT

SEQ ID NO: 45477 - protein, 211 aa, Zea mays
  Coding DNA Sequence Number=SeqID_2102
MGTDSNLPWMNRTSGQKGAGMVVFFFPSPFEGGGIGRIAQCVLLPWYGIFTSFFRGIHVHSLVGEVDNGVLQVSETPTDWSSFFRGLLSHGQRGVIFFWAVSGGAPHRLASAPLEISKEGIFSGGSATRCRVPSTSAMHVMVPKQNIAPGLRVILFLKMTVMEITLIINTPPTWRTNCRCLESDRTPRGTLTVLLGRTVSLIVARWFMSDA

SEQ ID NO: 45478 - protein, 550 aa, Zea mays
  Coding DNA Sequence Number=SeqID_2103
MDGHAACKMAWSPPVSRVDRAHLMLRRHIASRLIHNKCEGRAAQRPYVRLRPLAYVTGSWPDGSIGSPPEQGVEAYAIWFGHVSAPDPRLTLIKVRVLLPLESRNLVVSDPDPTQGGPGPVPGVQSVPAEVLDLARRSGLCIQGSDTFPWGSGPTIDTLEYIVSSGHVAALEPPTWWGQALVPIVAPASGEDTSLQVGPKLDWRLARCFRALADEPAPKEDDSWARAPVPEASPLLSAEMKRRGEAGSPWRASGEIFCGISGRQRGNLSLKRGFLSAVAILLTRSALSPSSSPRSSAAVAAMALLDPPERFQLGWGVPAFNRRICVGASPPGDLAVGEFMLFVCNLPCGLALPISSFFVLLLEEHGLVGVALFGQCLVSRMFISLVEVESELSCGSIFCMNFIASCSGLVVRLHELVELWLRSSGQATERRVPPCFQLFGFNSPDITSNDEGSFVLAHVTRRPPPPASHPEGRTGRHEDGGRALSARPCWCRVVHTCRNGARTSLEDQQAGLMRADLTGLAYIYSCIDSLKYWTHEEPIKVSGGRQASAP

SEQ ID NO: 45479 - protein, 158 aa, Zea mays
  Coding DNA Sequence Number=SeqID_2104
MTLLRLVEDVRQHEFHSQLNSNPGIIPLLGASIQGRFGSDYPEPYGKRNMISTLHNSKLVLRAIRSSKVGLPYQRAKKSDYVGTDLHSAAVPYTRGGTRPRGRVVEKMIPSRPVVGGVLRFCWARNGSTRLGWFRLEVGATEGKGNAKKRERRTAGAR

SEQ ID NO: 45480 - protein, 26 aa, Zea mays
  Coding DNA Sequence Number=SeqID_2105
MEMIGSIRERLEAEHHLRVEKVVFGY

SEQ ID NO: 45481 - protein, 329 aa, Zea mays
  Coding DNA Sequence Number=SeqID_2106
  Subcellular localization annotation: CTP_CleavageSite=48; ConfidenceScore=5.37e-01
MGMHPFDFDASSMKAQTHTSCNRRVGYYVRKTPPPLAPVPRLLDCGTGAATRGNPALSPTVPTKRIGHGSVSRGRRRDDRYGQKWTGRTGKGDTTKGILLCEGSGPRALLLIRGSKAGPSEGFDSRLRALGLRAHYWSEVRRLAPRKGSTAASGHSGSAPTTDQGFEGWPPKGSIVASEHAERGMTLGTSNTWPRLGLRSRGTLGHFRDQQERFCNGIPSEGGIEPADPVKRDRVRQITCSISCKGLVGAIQVKAPSTPGARSRLARAQPRAETMDPGGFTPRPRASSSNGRTFDSPEAQLGQASRRSNLGQIASPTDRIAGAFNARIA

SEQ ID NO: 45482 - protein, 337 aa, Zea mays
  Coding DNA Sequence Number=SeqID_2107
  Gene Ontology: Mol. function=methyltransferase activity; Biological process=metabolic process
  Homolog annotation: Hit_ID=Q5GAR3; Match level="QueryCoverage=100%, HitCoverage=100%, E-value=1e-171, Identity=92%"; Hit description =Putative uncharacterized protein
  Pfam annotation: Domain name=TP_methylase; Domain location=48-263; Score=140.6; E_value=4.3e-39; Accession=PF00590.11; Description =Tetrapyrrole (CorrinPorphyrin) Methylases
  Subcellular localization annotation: CTP_CleavageSite=14; ConfidenceScore=5.13e-01
MTVPRHHFLISPLRLASAATVPFARRFSNAASSNKPEPLLSEPDLESGLYLVSTPIGNLEDITLRALRVLKCANVILSEDTRHSGKLLQHYNIKTPLLSFHKFNEREREPTILRRLHEGEAVALISDAGTPGISDPGMELARLCATEKIPVIPIPGPSAAIAALSASGLPSNEFTFVVRNYWGQFIFSILVGFLPKHARSRRDRLEISAREAATQIFYVPPHGIQQFLVDAASSFGDSRHCVVAREITKIHEEFWRGTLGEANEAFATRQPKGEITVLIEGKLISDDEIPSEDFLEHELRELTAKGYTLSAAVKLVTEATSAKKKDVYALALRLFGK

SEQ ID NO: 45483 - protein, 57 aa, Zea mays
  Coding DNA Sequence Number=SeqID_2108
MESHDLRAEWESRLVGGYEIDGSGYDSGAGCQHCNHCSGEDEAVEGDFQEFQDYDEF

SEQ ID NO: 45484 - protein, 86 aa, Zea mays
  Coding DNA Sequence Number=SeqID_2109
MAHRRRRKAVEEVGGGMQGLCPVAGRERRLKEKAADHISGGSNDALDPTILSRGPRWPRRRCQVVEVVAETKTGGGDAPVDEGRIV

SEQ ID NO: 45485 - protein, 212 aa, Zea mays
  Coding DNA Sequence Number=SeqID_2110
  Subcellular localization annotation: CTP_CleavageSite=65; ConfidenceScore=5.52e-01
MPPPPPPVRDAPTAPHRPRESASGHQKVRFRRKRLAVARRPTPRHLAHTPTSIAHRTVSISTSCSSSSVSPTTSHPVVVALTAAPAIEACGDVLLRYPLQPGGSAPHPAPAPAGRAGPVPHQHAALREHHHIRHAHLRRGQRLAALHVPPRPPRRAEKTPSTAASSPAAASTSNHALAYASVATRRSVTLAGTPGGSVRLFSPSVAPPMAGW

SEQ ID NO: 45486 - protein, 409 aa, Zea mays
  Coding DNA Sequence Number=SeqID_2111
MVAIQGGHPHFKGDSPHLRPQPAWTESSPTRSKVLPLRHEGWVPYVMQASPGQKEPKPPRAVRATAQRLQAFLHYRPDQRVKGRTAMQAACNRTKGAHPFDFDASSIEAQAHTSYGRKQQSSRQQAHAPSWDSERNLSHGVKTTRPCSVPRTARARTTAASRTTRPVALTLRQDRRHLWQAKQATLHLRHNDRVKKEVRRLAPRKGSTAASGHSGSAPTTDQGFVGWPPKGSDSRLRARRARDDPGYVRYITKARATLPRRPLGLPASNSLETPCSAPSEGNMALPPSSLRKGDAGAAWTQPWPRKTVSASPDPRGRTQPRPRKTVSASPNPRARAQPRRWTTDFASPDPRARTQPRHRKTVSASPDPGVGLSLDLGRQTRPRPRRSLRLARPRARTDHVTGWASLPYP

SEQ ID NO: 45487 - protein, 380 aa, Zea mays
  Coding DNA Sequence Number=SeqID_2112
  Gene Ontology: Mol. function=oxidoreductase activity, acting on the CH-OH group of donors, NAD or NADP as acceptor; Cellular component =cytoplasm; Biological process=malate metabolic process
  Homolog annotation: Hit_ID=Q9FRT2; Match level="QueryCoverage=43%, HitCoverage=27%, E-value=3e-72, Identity=84%"; Hit description=NADP dependent malic enzyme
  Pfam annotation: Domain name=malic; Domain location=4-165; Score =240.2; E_value=4.6e-69; Accession=PF00390.10; Description=Malic enzyme, N-terminal domain
MDLQERNEWLFYKLLIDNVEELLPIMYTPTVGEAYQKYGSIFSKPQGLYISLKEKGKILEVLKNRPERSIQVIVVTDGERILGLGDPRCQGMGIPVGKLSIYTALGEVRPSACLPITLDVGTNNEELINDKLYIGLRQRRATGQEFTNFLQEFMTAVKHNAGYKHKEQQTQGVIDQIIKEHLGQVAAFQAGAQFNQHLLLAFLGAVGCGPPSLSNSASSWHNLVNQKINWKLLTPDQPQPGAHHYPDSAINMRSKWHGSAQLFLDKFGDGIFAGSNELHSFLIVFEDVVDHIQPRKKQQQQWGGTVGLVGQKDHSMLPKWLADSLITFKQILHRLGGKPKLKKGMSGISIGLRPWFSLVLHGGLVCYKRGTSTGRGGIEY

SEQ ID NO: 45488 - protein, 142 aa, Zea mays
  Coding DNA Sequence Number=SeqID_2113
  Gene Ontology: Mol. function=oxidoreductase activity, acting on the CH-OH group of donors, NAD or NADP as acceptor; Biological process =malate metabolic process
  Homolog annotation: Hit_ID=A2WUL9; Match level="QueryCoverage=32%, HitCoverage=8%, E-value=1e-15, Identity=89%"; Hit description=Malic enzyme
MSLHTKLILDAISELFDKFHAWWAKRDAPREASRRVPVPTQSAAMAEAARRAAAHERLNLSACASLDDASLVASVVGGPATAATWWLCVSASAQGDMESTLKGIRGSNAPCVLDLDDAATVVGGVEDTYGEDRATEEQLVTP

SEQ ID NO: 45489 - protein, 58 aa, Zea mays
  Coding DNA Sequence Number=SeqID_2114
MGSSSLRAEWESRLVGGYEIDGFGYDYGAGCQHCNHCSGEDESCGKETSQEFQDYDEF

SEQ ID NO: 45490 - protein, 396 aa, Zea mays
  Coding DNA Sequence Number=SeqID_2115
MGGSEPGSFAEKDPFRATGVPVARRVGLGSRLACQKSEKRVHLARLHAACMAARPFRPLVWAKMGGRLNATPWELVPLSHRSASRIFITQPGRTPSPAVTRDGDLQLDGGGKRAGLRPLPLPQPQGFSSPRPGRGECRVGVGPCVGGGPLLHSVMGGEAGIARGVRQLQRAWSSAASGFGATCGVGVCHGSRKRFFRRRGDRDRPRADLQLLRPSARPCLTSFGTGGGLLAAASTLRSALPLFGPPEQKSPSSPLLEGNRLSRLLGPDSRRSPWAAAPPEAGSGFAEDVVDAEGATAPFGVKTRACRIRSSCSVCFLRPPRPEENTLAALAKLRLFSSCFEHLDFAGNRDVCVSKSCFSRKGRVRYLYPRGVGIPRLGRPCRLRVLSPVHEALSLT

SEQ ID NO: 45491 - protein, 109 aa, Zea mays
  Coding DNA Sequence Number=SeqID_2116
MAMAARSFSNFCLSIMLYSTGSTTDLQADAGAMDPSGLLFASSTLAPLLPLLYDNDGTQAIELLKKFLEAPLRQTPVHRVRRVPPPPTPPSDWCSNIIGNRWLRVRWGL

SEQ ID NO: 45492 - protein, 264 aa, Zea mays
  Coding DNA Sequence Number=SeqID_2117
MAVRAVVKRQSPSVSTSSTWSLTLVPELGEELERALVPAGARWCRRGRPGGSSVGAAFRRAARRRRQAGTHGPARGRPSRAPMRRRHPPCRPTGGARAPTPVPRELQRLEQGRDVRAEELVAAEGQEGRERGDRVRGDGEHQRLRGWERKECGGYDVWCDRCDAVAGAVRWSRSESSGSESSGSEEQDPWPSEETTSVGAGHGRRHQGAGRGIQGLQAPLGFRGPTGRRGCYLPSTNLCSRGGGSGSTTRDPPHDSLVDMGMTE

SEQ ID NO: 45493 - protein, 233 aa, Zea mays
  Coding DNA Sequence Number=SeqID_2118
MQAACNRTKGAHPFDFDTSSMEAQAHTSCNRRAGYCVQETAPPLAPLPCLLDCGTSTTTRGNPAHDPIVPTRHIGHGSVSRGRRRDGRYGQKWAGSNGSGRRAEAADRRHLWQAKQATLHLRHNDRVKKGTGKGDTPKGILLREGNGPRAPLLIRGSKAGPTEGFNSRLRALGLRAHYWSEVRRPAPRKGSTAASGHSGSAPTTDQGFVGWPSKGSTAASDAERGMTLGTFDT

SEQ ID NO: 45494 - protein, 167 aa, Zea mays
  Coding DNA Sequence Number=SeqID_2119
MKKSNGSSKREICCGGEGENKVCLGKGRDHHAKDVSEASSSSVVHTNREEGGFMEINGKASSKSKVIDGLFNSGNRRDRCPSKNKHIIDILKHRARDIINSRVAKILDIDPMDNKAMENVNDNDEQIGRYRITLTEAFLQEIQVPKTSFSNTRLLLMLRRFFIQPNY

SEQ ID NO: 45495 - protein, 427 aa, Zea mays
  Coding DNA Sequence Number=SeqID_2120
  Gene Ontology: Mol. function=metalloendopeptidase activity; Cellular component=membrane; Biological process=proteolysis
  Homolog annotation: Hit_ID=A2Y2N2; Match level="QueryCoverage=26%, HitCoverage=64%, E-value=6e-41, Identity=56%"; Hit description =Putative uncharacterized protein
  Pfam annotation: Domain name=PPR; Domain location=255-289; Score =30.4; E_value=6.5e-06; Accession=PF01535.11; Description=PPR repeat
  Pfam annotation: Domain name=PPR; Domain location=290-325; Score=6.3; E_value=1.4; Accession=PF01535.11; Description=PPR repeat
  Pfam annotation: Domain name=PPR; Domain location=326-360; Score=4.1; E_value=2.5; Accession=PF01535.11; Description=PPR repeat
  Pfam annotation: Domain name=zf-DNL; Domain location=195-248; Score =10.9; E_value=0.0001; Accession=PF05180.3; Description=DNL zinc finger
  Pfam module annotation: Pfam domain module=PPR::PPR::PPR::zf-DNL; Domain location=255-289::290-325::326-360::195-248
MSSPPEFLVSGLDPSELERARMGGGNGETTQLGEPLLAKKAKAYRPRCPGCREDRLNAEREGVFPLKDVFLIWLVTITCNKAVSAHELGHLKCDHGVWLTFANILTMGAYTVPGFDMVAGFLEEQLYRWLRAAELTCDRAALLVVQDPKPRDGGGLRAGSVAQGVPREGAGGDLQIKSFLSAYTLFHLGFMVGYMRVAFAYNVCGQRTTRAINPHAYTNETVFVQIWSSACWAARASTTPSARCSTKCRSRLDVHAYTIVLHALSRAGRYERTLELFAELRRQGVAPTLVTYNVVLDVYGRMGRSWPRIVALLDEMRAAGVETDDFTTSTVIAACCRDGLVDEAVASTIELYIEYQKERVHMVDDARLAFELSTVLSKEGIEVCMVPSADRPDDAKFAVPLLESDFDFAIAKLTIRLSSLNDFISCY

SEQ ID NO: 45496 - protein, 128 aa, Zea mays
  Coding DNA Sequence Number=SeqID_2121
MAAVGALQRGVGGGSALQRGRGAVVVRMEAGTRAGARVSGGVNDPDVCGLWFQESLPLCMLIPGFKGKLPGIFLEKTFLRKTKRKHTSSAMISTNKSNVLNKGRIEFFQSTDYSDSRLSITTIAWLLN

SEQ ID NO: 45497 - protein, 100 aa, Zea mays
  Coding DNA Sequence Number=SeqID_2122
MKIKTMSHLKRRTLIKEEMKMIKTREMIKKFKVKDHHTQESTKQFKEITLSTPYLVTFTRGLEPLALTQDVHKESQSKGGISNSHTTQRSQRIRTRKTQT

SEQ ID NO: 45498 - protein, 263 aa, Zea mays
  Coding DNA Sequence Number=SeqID_2123
  Gene Ontology: Mol. function=kinase activity; Cellular component =ornithine carbamoyltransferase complex; Biological process=amino acid metabolic process
  Homolog annotation: Hit_ID=Q6QP54; Match level="QueryCoverage=30%, HitCoverage=28%, E-value=4e-14, Identity=55%"; Hit description =Putative kinase
MAHPVDVAGLRPRLGDVEAPPKPRSSLSSVAEVESEPLVRARQRPSAEARAESEPWGRAKRSSSSSGAEPESEPWVGWSGPESEPWVGRSRVRRLPGLSPSLSPGSGGAEFAVFRGLARVRALGRAKRSFLWCLRPGLTACQPHSVKWYRSRSGAGGAVFLSGRSVERRSDGGHFGFLGWGARVRIKVSGRLCIKCSCDLVGRCGDLVRVASWRRQGLGRAENMFAAGGGPRARRKSSELYADGGYQLRIRSLEGTPNYGPRQ

SEQ ID NO: 45499 - protein, 52 aa, Zea mays
  Coding DNA Sequence Number=SeqID_2124
MARRPRPPSVLAHPGALARPGVDPRATPSSPKPRVSHENHKVMAMHHGSAAW

SEQ ID NO: 45500 - protein, 117 aa, Zea mays
  Coding DNA Sequence Number=SeqID_2125
MGENPEIGLTQMNKNGNLQDRIRVQVGQVQIVEIKESAEEGRNGKSKAADKKRNIDDILMGVLRRNSDPAANPPRAEFFWRIEHDSAITSKTLVSSAIARRLPLKRRYHQISLGGYF

SEQ ID NO: 45501 - protein, 426 aa, Zea mays
  Coding DNA Sequence Number=SeqID_2126
MALDKEGNLGTGKAIFAECCCQGTRQRDWQRGPLEDSLPSASPLDTRQRSLLCRVPTRALGTGTGGTKTQNRPSSTSGSWLPRYKGDEELGGMLPTTDSTLGRDSTEGALENSLTSSLVTGKGQVDGFEVLQAGASAPGAGAVGLFSLASAGGRVYEALLSRAPLEASPAPPLVASAAGVAVGGDPDDRDGDDSSSSHSTDLSEEQEPEGWVARPITRDAARGCHFHDALDTLLCRALDRHTWSIEYRCVVYQHSHGAYSDRWEATCLVCRPEDGLRGAEVCSEHYYISKRDSAVASMQDVAQRALSHYCSVLGGVADGLDLRYYPHRPSSSTGGVVVSPVGEDNTRLSSIVNLAIVLNTELDHALDEQSRARAEIAQLRAERAECRHLADGSPTTIGIQHPYRLPRRGHHVYGNPDCRTRINLEP

SEQ ID NO: 45502 - protein, 55 aa, Zea mays
  Coding DNA Sequence Number=SeqID_2127
MVTFMMMINNGDYNPDLWYFLLEGVPLGCPYCSQCSGGEAGNMYDFKEFQEYDEF

SEQ ID NO: 45503 - protein, 57 aa, Zea mays
  Coding DNA Sequence Number=SeqID_2128
MVGTSAVTARRQPGSVEHCIQGGTLQDMVDGVTWPTTLPPGWTVEWDAAPIGEEQEE

SEQ ID NO: 45504 - protein, 95 aa, Zea mays
  Coding DNA Sequence Number=SeqID_2129
MAHRIALPTRGGGRPKSGEGESASPVRQCLGSSFEKLHGFTGMRSRGWGEAGGQQKGLATTAVLGQRWWAVLRQKYLLRQLVSSLMLRPAAAFPQ

SEQ ID NO: 45505 - protein, 326 aa, Zea mays
  Coding DNA Sequence Number=SeqID_2130
  Subcellular localization annotation: CTP_CleavageSite=83; ConfidenceScore=5.49e-01
MKRTVGVEVGNTRRGAGVPASSVASPARRVSVTAPSLNVTPTTGDPTLVIDATTMTGAPTTMTCPISPGSCLPPTPGLRGRTVDAAGRHYSPRRHGHRNRSSPVGSTSAASPLWSSCCAATRDPQRATEKTATPSHDCRCIVSQAISAERACHRNIRTTQHRCHRRRCRAQHSPATITMDAALEVAVGSKTTQPVSGMENAQQATTAFPELGEPAPTTVKKQEARPTRRSMWLRQSHGRMGTSRNTRQVLLKRLGLLPKEGQSSDQSATSASLETCINLFKGPLSSLVLQALMDLCGILPPQDLRRRNHDSSQGPSIAAILLDHSA

SEQ ID NO: 45506 - protein, 224 aa, Zea mays
  Coding DNA Sequence Number=SeqID_2131
  Gene Ontology: Mol. function=carboxyl- or carbamoyltransferase activity; Cellular component=ornithine carbamoyltransferase complex; Biological process=amino acid metabolic process
  Homolog annotation: Hit_ID=Q8SA97; Match level="QueryCoverage=28%, HitCoverage=11%, E-value=2e-10, Identity=60%"; Hit description =Ornithine carbamoyltransferase
MAPPVDVAGLRPRLGDVEAPPRSGSSLSSVAVVESEPLGRARRRPSAEARAESEPWGRAKRSSSSSGAEPKSEPWVVRSGVRRLPGLSPSPSPGSGGAEFAVFRDLAQVRALGRAEWSSPSSGAEPKSEPWVGRSGVRRLLGLSPSPSPRSGGAEFAVFRDLARVRALGRAKRSFLWCLRPGLTACQPHSVMWHRSRSGAGGAAFLSGRPVERRSDGGHFGSVG

SEQ ID NO: 45507 - protein, 513 aa, Zea mays
  Coding DNA Sequence Number=SeqID_2132
  Homolog annotation: Hit_ID=Q6J9V9; Match level="QueryCoverage=17%, HitCoverage=33%, E-value=3e-12, Identity=52%"; Hit description =Putative uncharacterized protein
MNKTPALKVPLQTELRFHLRRADAAATRPSPMSPLEGREQAEGRRVGGQSAGGTDYLVGGETSSGCLGGRWHRKRRRSHSGRRARHAAAASATNGERPSPRSLREGAGCCPHGDRPQLGALLSPALMMNILEAEGGVKAAARLASPHPGTGDQRVKGRTAMQAACNRTKGAHPFGFNASSMEAQAHTSWTGKGDTPKGILLREGSGPRAPLLIRGSKAGPSEGFNSRLRELRLRAHYWLAPEGFDSRLRRRARDDPGYVRYITKARATLPRARPPSQPRTTISVSPDPGLRLGLGSGRRRTPPCPTQGSDSASAPEDDELRLARPQGSDSASAPEDDEIRLARPQGSNSALASDNGLRLARPRARTRPRPRKTDSTSTSEEPPPRPTQGSDRPRHRGAIITLPLASSGYGEQDRRPIWLAPGSHTRRLAARRGRDGAYKPLAPSHADACNPLLQAHPTWAQDNTKAAGFPFTPVSLFLPPFVLRLAPTHLGWDTRRQFTRQSRDPPRSKRRQS

SEQ ID NO: 45508 - protein, 694 aa, Zea mays
  Coding DNA Sequence Number=SeqID_2133
MEVVELVPCARNKWGNWQDFWFYVAEGTVEDHPGLPVSEMCSHFYSAYPPFEVAKEDADKGALRCAAGLSSGRDLVEEFIAYGVWPLAHGWALGEVCPRRMPSHGGKLVRSPVFALDLHSRDPAAFVREAEDGAVRIVGRYVLRTEGQRSWDIHGSNDRLNRVFEMNRLPYGGYPGQDDVDRRGKKPAVEFGDDPAPAAAPSSKKRKLGTAVGGLGVSDGFARELMRTCAAPGGRMSSPELRESSARMLRVTGGWWPRNVPIPRAAGEDFFTSRMVRRRGSGGAAKATAPGGGLPPLAAKSAVPASSGAPEAAVAAGGSKTAKAAPVSGRVPEAVKAARGLPPPGKRVADFATEISVEDYLVGTRRRCVPPAEGGEGGTSQAADFADRAASGAFTVVVSAEVERLRTQHVDAVREKSAADSKCRKLADKVAALEGEKTDLRRQLAEERREANEALAKAQATERAEQLEERLRALQSRVERAEAAMRTEAERTRKQLMDSYHELGARTAEFEVPDREPGLRCLEWVQEELQALPTIVEGFMSYASLVTCEGAMNALSREGCQHYEVFDQADEDFERDIYKAEDSIVKESAGALYDRMWGPYGREVVREWAETARAARGERVDDFGALNSTLPDSESNPAEAALEPLPETAEGAPDAPTVAAASEGPPPETAKGVPEAPCSRCSRRRPAANCCAEG

SEQ ID NO: 45509 - protein, 123 aa, Zea mays
  Coding DNA Sequence Number=SeqID_2134
MGTQGSGMLVAFFFAEGPPSKNTFGRVICKQTQHEAFENKSPTLAPTSGELTSTVETMASFNNQAIAPSVIVGTCSQLQGDPTGVNSDVNRVLAQDGNSSVNLASQGHCAGVFIGIRVPSVLC

SEQ ID NO: 45510 - protein, 252 aa, Zea mays
  Coding DNA Sequence Number=SeqID_2135
MTSHGSSDEGNVQSHTDGLAREGFPRILWEAGVRWTPSRSDTKAEDTIEAIALHGLTTFCDFHPLELSTHPIGLFPAEKEDDPMWKDRVEHAKEIWALYPGQTAHLTVRCMDALYHLQVRRGEAMSHLMALLEATKITLDKREELVGDLSTEMVEKDLQVEQMSNEIQELEELVGTRENTIEVLEDQLINTQQQLAEANQHLDMHHQEIQDMEANEDVNIEGGEEPEPASSLDTAGSGRPPSPESSVASFAH

SEQ ID NO: 45511 - protein, 51 aa, Zea mays
  Coding DNA Sequence Number=SeqID_2136
MAPTFPCSRARAPLPGGCDDDEEDGYDYAYGNGKEEGVETDLQELRDFDKF

SEQ ID NO: 45512 - protein, 65 aa, Zea mays
  Coding DNA Sequence Number=SeqID_2137
  Subcellular localization annotation: CTP_CleavageSite=45; ConfidenceScore=5.15e-01
MAMMGSTSEKMYLCQVRKQQSFVVSVQRWYPRKNPSSDVGRGRMFASHIENNNLMCGRVFCLPGL

SEQ ID NO: 45513 - protein, 75 aa, Zea mays
  Coding DNA Sequence Number=SeqID_2138
  Subcellular localization annotation: CTP_CleavageSite=34; ConfidenceScore=5.06e-01
MSCAPAIVSANTKTPKGEKTDDNRGMVVTTCSLNGMLLSSSYTFLPSHSGELQSTGGTGERLDERLRGETEICSS

SEQ ID NO: 45514 - protein, 186 aa, Zea mays
  Coding DNA Sequence Number=SeqID_2139
MANVLDAVLETTKALSLAPTKKIVEAAKAQTEAETGQAETEATKAQAEAKAGPSAPSEMKVVTPEVQAGQQTSDTILTAAQDQHPHTRTTRTDAWGPAASPHPLTISVAGTWARYRALASTTSDWAQAVRPPNPTARPSLADERANVAASGAAPRPFLCIHMLTALDQGTSNLAATSPENTGCRNQ

SEQ ID NO: 45515 - protein, 353 aa, Zea mays
  Coding DNA Sequence Number=SeqID_2140
  Subcellular localization annotation: CTP_CleavageSite=60; ConfidenceScore=5.36e-01
MWKLLRSRGRVCLPWPRSGPSPRFGRGGDRWLMLGRSPSPGVGRSGVRRLLGPSPSPSPRSGEEEIVVFWDLARVRALGRAEFAVFRDLARVRALGRAEFAVFQDLARVRALGWAEFAVFWDLARVRALGRAERSFLWCLRQGLTACQSHYVKWHRSRSGAGGAVLLSGRPLQLYADGGYQLRIRSLEAAIAGILSLVALGLPVTDEQPTEIPHMLILLPEQSCLQPPSRQTLSAALQAPGMQPGPLLPPPFALQDPDDFNLSWDQVDEAIGASAHLRGRNFPKRAAGGCVRRNEYLEEEETNLANEDDEDEEYILDDLDVEDEIEGSNSGNDGDDQGVYAHGLNIDEFDDGY

SEQ ID NO: 45516 - protein, 465 aa, Zea mays
  Coding DNA Sequence Number=SeqID_2141
  Subcellular localization annotation: CTP_CleavageSite=60; ConfidenceScore=5.09e-01
MGASSSRRGRGLPYRFRRGREPAGDSTAASARLPRVAAPVPQSRRRSIGASGASRIFITRAGEEGRGESGPASAWAGDPLLPPTLGGEGHPPAVRRRRPPAMRGKANCCCLDRMQLSVLHPGQRSCRARVAAVTEFAEGANFDDAGPVGRERRQLQRAWHVGSAGSGAASGVASHRLVRAWLSVHRTGDCRTARSTTPPRGGRCRPICENLSGDLPVQAGASAIRRRGAGAQVAAVVGAEVVAAREGFSADETIGAICGRTPGSLALMACPRPSCGGVDEGLSTAAFALRSSLLLFSRPKRRSLSLLVQWSPANHLEFVVPQALLCGGCSYPWEWNRSSVCNGTLSMGNLRLLCDELELEAAVSAWTEAELARKEASSAQEQAASQAEEVQQRRLGLGQVIRERDQPRSHAVEAVSRADVLGGQLAEATERPAEILPPVSPSEAGPDSTEGGNDAEGAAAPFVDV

SEQ ID NO: 45517 - protein, 24 aa, Zea mays
  Coding DNA Sequence Number=SeqID_2142
MERRRVPSLGPVWGGELKSTTFGD

SEQ ID NO: 45518 - protein, 83 aa, Zea mays
  Coding DNA Sequence Number=SeqID_2143
MDGGNHPCGGEPSISQHLQGLQKGLEILLSLARGPIAPVGAGGGHHSLRKRWEPPIVVPKGPGKGIPRKGSFFAKEAGLEPSY

SEQ ID NO: 45519 - protein, 118 aa, Zea mays
  Coding DNA Sequence Number=SeqID_2144
  Gene Ontology: Mol. function=structural constituent of ribosome; Cellular component=ribonucleoprotein complex; Biological process =translation
  Homolog annotation: Hit_ID=Q96S84; Match level="QueryCoverage=38%, HitCoverage=22%, E-value=1e-12, Identity=84%"; Hit description =Ribosomal protein L15
MGHHHISRSYFRQTDIKRSGNASIDIMSKFFKLMVLHIIQKYMDFATDECSLGVEAMELFGPRGDKNMMDCRKRPLPKCIVYGKPKHQGITQLKFQRYKRCVAERAIRKLGGLRVLML

SEQ ID NO: 45520 - protein, 210 aa, Zea mays
  Coding DNA Sequence Number=SeqID_2145
  Pfam annotation: Domain name=IQ; Domain location=122-142; Score=17.2; E_value=0.063; Accession=PF00612.18; Description=IQ calmodulin -binding motif
  Pfam annotation: Domain name=IQ; Domain location=80-100; Score=23.7; E_value=0.0007; Accession=PF00612.18; Description=IQ calmodulin -binding motif
  Pfam module annotation: Pfam domain module=IQ::IQ; Domain location =122-142::80-100
  Subcellular localization annotation: CTP_CleavageSite=32; ConfidenceScore=5.31e-01
MDRRSMTPGISSRLSSPPPAAHPSPPPAAAPSAAATPSHPPSPTPDAFTRLKESFGRFAEQWDQFVVMFHRYKEKTEKELQAAVRLQTAARGFLARRQVQSLRGEKHLAVASRATPWLSSHEQAVVRLQAAVHGFLVRRAVRKLHLLISSSLHQLAACAPNHQVSSILFEPPAEVEIWILGLVTIELVDVVHECDGTDLQGDLTVIKYCC

SEQ ID NO: 45521 - protein, 843 aa, Zea mays
  Coding DNA Sequence Number=SeqID_2146
MEVVELVPCARNKWGNWHEFWFYVAEGTVEDHLGLPVSEMCSHFYSAYPPFEVAEEDADEGALRCAAGLSSGRDLVEEFVAYGVWPLAHGWALGEVCPRRMPSHGGKLVRSPVFALDLQSRDPAAFVREAEDGAVRIVGRYVSRTEGQRSWDIRGSNDRLNRVFELNRLPYGGYPGQDGVDRRGKKPVVESGDDPALAAAPSSKKRKLGTAMGGLGVSDGFARELMRTCAASGGRMTSPELRESSARMLRVTEGWWPRNVPIPRAAGEDFFTSRMVREWKVFPYGRNIAVVVSAVMDKDRQGAAQKRQAVVRLHEARPKRQRGAAKAAAPGGGQPPLAAKSAVPASIRAPEAAAAAGGSKSGKTAPASSKVPEAAKAGRGLPPPGKRVADFATDISLEDYLVGSDEGQLVVVPPAAGTTAAAVVPKAKGGALSAGGEMPALTAVRDEAGAVSRRLEEMKEALSQASDFAGRAASGALTAVVSAEVERLRTQHADAVREKSAADSKCRKLADKVAALEGEKTDLRRQLAEERKEANEALAKAQAAQAEANLARMEGGLARERAEQLEERLRALQSRVERAEAATRTEAERTRKQLMDSYHELGARTAEFEVPDREPGLRCLEWVQEELQALPTIVEGFMSYASLVTCEGAMNALSREGCRHYEVFDQGDEDFERDIYKVEDSIVKESAGALYDQMWGPHGREVVRERAETARGQVMFDFCLVFVGCGLCMGLLNLCAVSHAARGERVDDFGALNSVLPDPESNPAEAVLEPLPETAGGAPDAPAAAAAGGGPPPETTEGVPDAPAAAAAGEGPPPTAAPRAEDPVTVAESTAEAPVTAGSSQVA

SEQ ID NO: 45522 - protein, 339 aa, Zea mays
  Coding DNA Sequence Number=SeqID_2147
  Subcellular localization annotation: CTP_CleavageSite=72; ConfidenceScore=5.09e-01
MQAACNRTKGAHPFDFDASSMEAKAHSSCGRKQQSRRQQAHAPSWDNERTLSHGVKTARPCFVPRTDRARTTAALRTTRLVALTLRQDRQHLSQAKQATLHLPHNDHVKKGTGKGDTLKGILLHEGSGPRAPLLIRGSKAGPSEGFNSRLRALGLRAHYWSEVRRLAPRKGSTVASGHSGSAPTTDQGFIGWPPKGSDSRLRARRARDDPGYVRYITKARATLSRVRLTAAKSGLGRHRKLRLARPQGSDSALAPEDDELRLARPQGSDSALALEDDELHLARPPGSDSASAPEDDELRLARPQGSDSVSVPEDDELRLARPQGSDSTSTSEEPPPRPT

SEQ ID NO: 45523 - protein, 180 aa, Zea mays
  Coding DNA Sequence Number=SeqID_2148
MPRKANCCCPARVQHSVLCPGDGGQPHRGISQHVVRREGGTRVLGRSHSHFRGEDGSEDLPVCFGAASARWCGVGGQVDAAAGAEVVAAGEGLAADEIVGAICAPGLRLFGFDSLSSPLEWGRGREPCRSSVCPEVIAAAVWPPGAEVVVAAAGVGGGEPPGILSSHRPSNVGGCSYLRE

SEQ ID NO: 45524 - protein, 676 aa, Zea mays
  Coding DNA Sequence Number=SeqID_2149
  Gene Ontology: Mol. function=oxidoreductase activity; Cellular component=chloroplast; Biological process=electron transport
  Homolog annotation: Hit_ID=O04129; Match level="QueryCoverage=71%, HitCoverage=100%, E-value=0.0, Identity=93%"; Hit description=Lethal leaf-spot 1
  Pfam annotation: Domain name=CKS; Domain location=1-72; Score=165.7; E_value=1.3e-46; Accession=PF01111.10; Description=Cyclin-dependent kinase regulatory subunit
  Pfam annotation: Domain name=PaO; Domain location=456-545; Score =118.8; E_value=1.6e-32; Accession=PF08417.3; Description =Pheophorbide a oxygenase
  Pfam annotation: Domain name=Rieske; Domain location=247-356; Score =96.5; E_value=8.5e-26; Accession=PF00355.17; Description=Rieske [2Fe- 2S] domain
  Pfam module annotation: Pfam domain module=CKS::PaO::Rieske; Domain location=1-72::456-545::247-356
MEQIQYSEKYYDDTYEYRHVVLPPEVAKLLPRNILLSEKQWRLVGVQQSRGWVHYAIHRPEPHIMLFRRPINYQQQQEEAAAAHVLPNPTSSSLAFTPQRGKIPEFSCLSTGFLAPKPGFSPLPWQNSVLAQSRRSAPFQPPTPAAKHIASAAKNSQRESQNLFTSLHVDTCGENMRATIPALSLLVTPRLPSLAVPLAGGRLRVGGRSRTRLRVAAPTSVPGEAAEQAEPSTSAPESGEKFSWRDHWYPVSLVEDLDPSRPTPFQLLNRDLVIWKEPKSGEWVALDDRCPHRLAPLSEGRIDETGCLQCSYHGWSFDGSGACTKIPQAMPEGPEARAVRSPKACAIKFPTLVSQGLLFVWPDENGWEKAAATKPPMLPKEFEDPAFSTVTIQRDLFYGYDTLMENVSDPSHIEFAHHKVTGRRDRARPLTFRMESSGAWGYSGANSGNPRITATFEAPCYALNKIEIDTKLPIFGDQKWVIWICSFNIPMAPGKTRSILVPRWYEHWTSNLVYDGDMIVLQGQEKIFLAATKESSTDINQQYTKITFTPTQADRFVLAFRTWLRKFGNSQPEWFGNPTQEALPSTVLSKREMLDRYEQHTLKCSSCKGAYNAFQNLQKVFMGATVVCCAAAGIPPDVQLRLLIGAAALVSAAIAYAFHELQKNFVFVDYVHADID

SEQ ID NO: 45525 - protein, 341 aa, Zea mays
  Coding DNA Sequence Number=SeqID_2150
  Subcellular localization annotation: CTP_CleavageSite=51; ConfidenceScore=5.36e-01
MALAHTATESRCRRAPCHLASSWPLTGATPHKRATSSTATPTPERRATTIAASHSRTPRPQMTNVVGPAPVDVAAIIRQQPQDVCPTISGVAPALRPPDLDGRPQNRCPCRRRGLRVDHNREHHPGSSPNAKATARTPLVGRSKEVVAPTTAAVKAVRGEVAKKRAPPHNTCTSPNQLPPPAQKLCLICRFDCVAVIRSEIPGDGIITLWVKLDLLDFRPKNAELMNVVGKKRRGAKSFGLCPLTQALPQKEILEPSPISMVVDAAKSSLSTSEQGISKLSQIFCDEVQLCQSHRARKARAKAPKSRTPKPPRDFGLATTFRPSVVQNQPKGIVFFWSLEG

SEQ ID NO: 45526 - protein, 107 aa, Zea mays
  Coding DNA Sequence Number=SeqID_2151
  Homolog annotation: Hit_ID=Q10RT4; Match level="QueryCoverage=60%, HitCoverage=28%, E-value=8e-24, Identity=84%"; Hit description =Expressed protein
MANRVFCSSKSQDSTLQQLTSDTTIEVAIDIPFPFRAIPVEAIESSGRQVLEQLLRVMLPRFLKQNYLSLYCKSDSDGISLEHLEDSLLLTVLCSPLASRGQLDCPL

SEQ ID NO: 45527 - protein, 147 aa, Zea mays
  Coding DNA Sequence Number=SeqID_2152
  Homolog annotation: Hit_ID=Q6QP51; Match level="QueryCoverage=45%, HitCoverage=31%, E-value=3e-08, Identity=48%"; Hit description =Putative growth-regulating factor 1
MGQIAFTNRPYRRRVQCEDCLTPYLDTRAAVGKVEVTAVTSPPSFTDLTGKQRRSPRSDCCANHPGKADNSQVQPRAQQEAPPHPTLGLGLGRRSRPRPTPRLDLSLGLGRNHTLARPRPRPREKSPPRPTLGSDRPRHRDTSLPYP

SEQ ID NO: 45528 - protein, 141 aa, Zea mays
  Coding DNA Sequence Number=SeqID_2153
MEINLSSEQLDGSVMSAVVADSTPPLARQGEQELMLRRILHMTHLMVYEVLKPMSNKGNSSAIFQGFFSQENYTINDRTEELRKCVRRLLVAGGDRDAPLFSGEKTAAEIWGSPSGVVLYVLCMRCGSTVAPPPPVEGLMH

SEQ ID NO: 45529 - protein, 52 aa, Zea mays
  Coding DNA Sequence Number=SeqID_2154
MARVACTLRGKRLDGGVSVLSVKKQRTFVASVQRWYPKKRTKAKAAGGKALR

SEQ ID NO: 45530 - protein, 570 aa, Zea mays
  Coding DNA Sequence Number=SeqID_2155
  Gene Ontology: Biological process=intracellular signaling cascade
  Homolog annotation: Hit_ID=Q2QYW3; Match level="QueryCoverage=75%, HitCoverage=88%, E-value=0.0, Identity=73%"; Hit description =Expressed protein
  Pfam annotation: Domain name=DUF231; Domain location=346-546; Score =162.3; E_value=1.3e-45; Accession=PF03005.6; Description=Arabidopsis proteins of unknown function
MALWHISLHVVHYQEPYPYDTGAMTDCTAGTQRTCNNCPYACYSGRGWRDGNVHILPVCPRLTTLGIAPPSRKLPPSAMVKPPPPPPTSTCTSDTPLPTPGGLLGSLSSSAHSLLAAARRSPVTTLVAAFFLLALFMYGEDVRTIAELSIDDYLYPDADFYNVSALPPLALPPATCDLSRGRWVFDNVSLPAYREKDCTFLTKQVTCLANGRPDDLWQYWKWQPNECSLPTFDARRFMEAMRGKRLMFVGDSLNRNQWESLVCLVQPILSKGRKKIVKRGSLTVFHAKEYRATLEFYWAPFLVESNSDNPKIHSIEHRIIRPERIEGHAKYWRGVDYLIFNTYIWWMNTADMKVRRPNSRYWSEHDEVPRIEAYGLVFKTWSDWLNDNIDPDRTLVFFMTISPLHIRRCVINMVYENRVPVSLTLVYVLFYENSPHNWGNPDGIRCVKETLPYQNYSQPLDLYHDMRMHDLVVKVASAMAKVPVTVINITRMSDYRKDAHTGLYSIRQGKLLTPEQKGDPEKFADCIHWCLPGVPDVWNQILYTRILSKPPSWGSSNVSPLSPSQSLPPR

SEQ ID NO: 45531 - protein, 19 aa, Zea mays
  Coding DNA Sequence Number=SeqID_2156
MGPPLLKVLLELIRVETKF

SEQ ID NO: 45532 - protein, 205 aa, Zea mays
  Coding DNA Sequence Number=SeqID_2157
MGITACCSLRNKTASRQRAEPSGLLHISSSTLHTLERSKGRGCPRKVGTGNLDATAADRAERGAVQGFGQRWKKGFDIQAVGAHGEGAEGGGHGEGSEEGDAGSSGLSHGSELLGADHGAGACPEDVRHGRSKELAGRNGDRKGSSAGVQLGGRSSPQGKAGGHGTPVRWWLLPWSREEEGRLLLLVGGSSQGEMKVAARGGSEK

SEQ ID NO: 45533 - protein, 373 aa, Zea mays
  Coding DNA Sequence Number=SeqID_2158
MASIWLRVRRSSVRVQPQVYVRALHYSVAEFLAATVIRKKSQESGEDGAISVGFTKCVTKARTSCATQVRFVKTALAGFFSAELVFYGAAPGSLQISVVLCFFSVAGVLYPIHGQSFLSDAQPKPPSRSLFPGRTPSPLSFLSVPCSARPDFHGARPASGALLSLYFSCREPGAQPQLPAECSLRASCSLLAQLSVRRRPLLTRPQLVRPLRVAELRFSGRRILSASCSTGLASSSPNSAVLQVSPSPVARLLCSSTRVPLSACRVRPNVPASRLLSSPRSLGSLCRALGGREISDEAIKKIANGSHDAQEEAKQAEEAAERARLIAELSPHNPEVDPVLKEALDIIKIANEAVDEAIKRLLNEAAEKVLKED

SEQ ID NO: 45534 - protein, 35 aa, Zea mays
  Coding DNA Sequence Number=SeqID_2159
  Homolog annotation: Hit_ID=Q7XBD4; Match level="QueryCoverage=97%, HitCoverage=3%, E-value=3e-07, Identity=82%"; Hit description =Cinful1 polyprotein
MSKDQLADSLAYNSLKGLILSKALKAQKEAEDESS

SEQ ID NO: 45535 - protein, 146 aa, Zea mays
  Coding DNA Sequence Number=SeqID_2160
MGKNNKRKREPTPPSEDFGDSEYSEEEFSSGSEGSPAPIPLRESSDDSDDSQGLAAEVWTYIRAVERSRLEGSDESEYSSDEEDSSEEDGDDDGEDDDDDDNDDEGGGGGDGDGGGGSGSKDGDGGSSRGGSGGGGSSKGSNKASG

SEQ ID NO: 45536 - protein, 200 aa, Zea mays
  Coding DNA Sequence Number=SeqID_2161
MSGDRWREVAVAPLAHRTVWCTPDSPVNYSGANSRGWRVPEPLFLGAPDTIQCTPDSPVNYSGAPLDFPEGDEFDLESPGAQDSPKSYDNRFDYHPYPKEQRYPNSQNFWMTTSDGPKAELIMVVDITSEEHCLSETRVHNSETTDQAKDGGKKSFEVSSAWEKVMKVEEPKAKGEEETCKVKVDRVEKRFGASRITTKE

SEQ ID NO: 45537 - protein, 83 aa, Zea mays
  Coding DNA Sequence Number=SeqID_2162
  Homolog annotation: Hit_ID=Q2QTV3; Match level="QueryCoverage=97%, HitCoverage=9%, E-value=3e-08, Identity=38%"; Hit description =Retrotransposon protein, putative, unclassified
MTICGVGGSDPILAKGVTSMELTIKNKTLFVSFFVMEVKGDDVEIVYTNSSSYVNMVDEINKFGQGFTLANPLEKDYIEDGSV

SEQ ID NO: 45538 - protein, 77 aa, Zea mays
  Coding DNA Sequence Number=SeqID_2163
MDHHLGVQCLTDPDCCRAVTALVPTITGMGDHVSGHVRGKVCCQVHSDNAFPWIVVHIPSSLRYKNGYNQFLTSREC

SEQ ID NO: 45539 - protein, 294 aa, Zea mays
  Coding DNA Sequence Number=SeqID_2164
MTSYKSSEGGNAHSHTDGLAREGFPRILWEVLQGAGYTTPPQYAVQLFEEHRVPRCRVRMTLEPHPLQPGWRSLDSESFGFRAENTIESTALHVLTTFCGFYPLELSTHPIGLFPAEKEDDPMWKDRVKHAKDVWALYPGQTAHLTVRCMKALYRLQAVRGEAMSQLMGIVESTKITLDNREDLVEDLSTELVEKDLQVEQMATQIQELLDQVEARENTIEVLEDQLQTTQQQLEEANQHLDLHHQEIQYMEVEGADEDVDIEGGEEPEPASSLDTAGSGRTPSPESIVASFAH

SEQ ID NO: 45540 - protein, 63 aa, Zea mays
  Coding DNA Sequence Number=SeqID_2165
MGRGSGGESSVYPPWQEAGRWCSCALGSTLVSISAKTESLMIEKPYLDSHITSIPLRVFSLVG

SEQ ID NO: 45541 - protein, 83 aa, Zea mays
  Coding DNA Sequence Number=SeqID_2166
MKGPCTPTCCTLLCASFVYFLLAGLELESPVFGNTNFIAEDVMVLVPCEVIVAVVEVSSPEVGANVGHLFSKTVNQEQGNTIV

SEQ ID NO: 45542 - protein, 628 aa, Zea mays
  Coding DNA Sequence Number=SeqID_2167
  Gene Ontology: Mol. function=nucleoside-triphosphatase activity; Cellular component=chloroplast; Biological process=protein metabolic process
  Homolog annotation: Hit_ID=A3ATJ7; Match level="QueryCoverage=24%, HitCoverage=17%, E-value=6e-64, Identity=78%"; Hit description =Putative uncharacterized protein
  Pfam annotation: Domain name=Ribosomal_S4e; Domain location=541-607; Score=65.9; E_value=1.3e-16; Accession=PF00900.11; Description =Ribosomal family S4e
MGKQSQCFHKWYFAMTTPISRRQSATHFMVRYEEHDFLEKSGVYAVEFSDVFHIYNDLALDISLHRSWMLCMRKIDKYRGIVGFLDLKMIILKRINEEADEVEAYIVKALLAQQDKECIFVVCQEGAFGAYVDKKVAITRILVAQLYGNIFRQYVMYHMLSFADNLSLDRDRYPQGHAGFATCPLLPDEIANVRERLLDFFMNEVIDIGGSCREDAVKILLGLHEKYETYHKCKYTLEGINAVVYLSARYIPDRHLPDKVIDLIDEAGSRAQMESFKRKKEEQCSILSKSPDEYWQEIRAVQSTHEVALANRLKHSLDENDKEDGVNIEVIGDNKIASPSMPPTSVDELILVGSEKIARVTSLWSGILLALLPLPGDAKSQPALTTTTQVAATQTAALAVDATTEATTESDPATPTPLSPYTNYPDLKPPSTPMPPLVESEVETKAGSTVTEEPAVVNSAPIADASTGSSPVTTRPRPQSPYPNVSVNLKLLSHLHKNTVCIRLCSSFFDLYAVSRFQATILAFAVSTLIWQEYKKPGLEDIKEVELFIWSRHLTRGFKLCKVRSVQFGQKGIPYLNTYDGRTIRYPDPLIKANDTIKIDLETNKIMDFFKFDVGNMVMVTAGGTPGV

SEQ ID NO: 45543 - protein, 29 aa, Zea mays
  Coding DNA Sequence Number=SeqID_2168
MESLACGRLERKPPKKLPCSFGGIGLGVL

SEQ ID NO: 45544 - protein, 174 aa, Zea mays
  Coding DNA Sequence Number=SeqID_2169
  Gene Ontology: Mol. function=carboxyl- or carbamoyltransferase activity; Cellular component=ornithine carbamoyltransferase complex; Biological process=amino acid metabolic process
  Homolog annotation: Hit_ID=Q8SA97; Match level="QueryCoverage=100%, HitCoverage=24%, E-value=5e-18, Identity=37%"; Hit description =Ornithine carbamoyltransferase
MAPPVDVAGLRPRLGNVEAPPKPRSSLSSVAEVESEPLGRARRRPSAEARAESEPWGRAKRSSSSSGAEPESEPWVGRSGVRRLPGLSPSPSPGSGEAELPMVGQWSGEVTAVTSALPAGGARQDKGGLGRAGDIFAVGGGPRARRKSSGLYADGGYQLRIRSLEGTPNYGPRQ

SEQ ID NO: 45545 - protein, 177 aa, Zea mays
  Coding DNA Sequence Number=SeqID_2170
  Homolog annotation: Hit_ID=Q6QP51; Match level="QueryCoverage=30%, HitCoverage=26%, E-value=8e-09, Identity=55%"; Hit description =Putative growth-regulating factor 1
MAERYQLPRSCAPPAMRRKDGGYPPSGGLEGGKTRCIREREDMVAFQGGRPPFKGDYPYLRPQPSRAESSPTRSKALPCGAGARSHMSCKPAQSRRSQTTVRGTGKGGYPEKDPSLLRNQAPSHPTDQRFEGWPPERVRQPPQIAWALHPLLVRGSKVSPSEGFHDRLRLLGLRAHY

SEQ ID NO: 45546 - protein, 885 aa, Zea mays
  Coding DNA Sequence Number=SeqID_2171
  Gene Ontology: Mol. function=protein binding
  Homolog annotation: Hit_ID=A3AC81; Match level="QueryCoverage=80%, HitCoverage=76%, E-value=1e-177, Identity=35%"; Hit description =Putative uncharacterized protein
  Pfam annotation: Domain name=DUF566; Domain location=518-765; Score= -148.4; E_value=0.1; Accession=PF04484.3; Description=Family of unknown function (DUF566)
  Subcellular localization annotation: CTP_CleavageSite=60; ConfidenceScore=5.20e-01
MDFGDYANRPSTSSAVSRGISPRLQLASDGVGTVSKGSDLADGLDRPSTSYATPRGMSPRCRVASDAINVTSERIKFTEKDSRTVSSSVAPRGVSTLRQLASDGVKTISKSMDLVEKDTRPTTSSAASRGLSPRRRLSSDGVNVIIKSMDLVENNNKLVTMSAAARGVSPRRRLASDVSNVISMSIDLIENSNKPLAMSAVARGVSPRRQLTSDGIECISKSTDITEKCIRPSTPSTSSRGFSPRRRLASDGINAALNKEFADKNCRPSSSSAALRGVSPRSRVASNAISTGMTFAEKDSRLSTASSASCQTLQSSRLESDGVNTLSKGVESPSTASGCISDSKLDDTGALVKNIYVTEKLIVSTEYGGDGYDPGRTDSSDIATSAVSSSLASQEPSLRPVTDDDKNASENVVVNQKGNRTLTVKVPSRGASPTRRLASDGTDTISKSMDFAEEDKKPMTVPSRGMSPRRTARSESANIMSKIMDFADECNGPVSSMVPSRVFSTRRVLGPDGVNAMSRSMDLTDKTRQQISLTVQPSRVSPRKTPLAYNRRKGPEILSGDVESPGSADGNEGQEENASSSPDGPSNNSEKSTPPKQLARGSSSPSRVLIRPSSPSNASSSPSFASRRLPSPSRTRPSTPVSPCSSARSDSGSSILSYIVDATRGKKSPAHMEYVHQLRLLHNRNLQWRFTNSYVDEMLSIQKLSAESQRRDGANDATEVETGVCSKKTIAPRCRGSRSRGGCDRETHNRSLIFGRGRRLSVNDRQGDTTKGHWQADLPASSIVHASRSPAREADSSARVCAGPGVHAHDKKKGKRQIRPGRPWQRQIQPRRRDPTKGTTDQSREGRSNEDPAATATDPAKAMKGEGDGASPAGQGAYTGPGRIG

SEQ ID NO: 45547 - protein, 529 aa, Zea mays
  Coding DNA Sequence Number=SeqID_2172
MPSEASLLRGDVPCDMEDEVDGLLSFPENTELLDIVSRPSEASLLLGETPRGGIDELTTLLSFSAKSIFFTISLTLSEVGLLLGETPLDEAGILSFSGKSTLFIKSAMPPEVVLLGESPLDEDRLETGPINLSDDFVLVCDAALNTLDNDALGAMLGDETGEESVLLSFSVKSTLSDRVMVPSDAAVVIGDTLLDEIAEDESLRSLRTTAFLDTSSASLEGDFLGVLVLSDAAVVIGDTLLDEIAKDESLRSLRTTAFLDASSASLEGDFLGVLVPSDAAVVVGDTLLDEIAKEESLRSLRTTAFLDASSASLEGDFLGDPPCDDIDEETSRSILSARSILLDKVFAAEYIVVRLGVALPLNGLLFLSAGAASLVLASPAEEVLEFLFPFDSTWKEEDRLRIEGHNPSGARQPDNLLGALCVSETASCTGVDELEDEEDGLEGADDGDAEAEILDGVVGREPPEDGLDGVACRRSVDWDLFACDPAGVGDDARPPALGDGDGCLLGIVDASAGIAATLRFTAASAWPLA

SEQ ID NO: 45548 - protein, 55 aa, Zea mays
  Coding DNA Sequence Number=SeqID_2173
MERERQEKLKKRLEQEKADSDKAKPADADKRGFRMGGFGSNSVAVCEWHNAVDPN

SEQ ID NO: 45549 - protein, 236 aa, Zea mays
  Coding DNA Sequence Number=SeqID_2174
  Homolog annotation: Hit_ID=Q6QP51; Match level="QueryCoverage=75%, HitCoverage=96%, E-value=3e-08, Identity=32%"; Hit description =Putative growth-regulating factor 1
MTASKKAPSLPTDQRFEGWPLGGVQQLPQSAWVLRPLLAGPRRVHSRLRHRARDDPGYVRYITEARATLPRARTRAQPRKTANSAPPDPGLGLELSPGRRQTPLRPTQGSDSGSAPEDDELRFARPQGSDSALASADGLRLARPRGSNSTSASEDRLDLDLGGASTSPNLGHGPTTSTGGAIITLPQADSGYGKQDQRPVWLAPPDKLQRSSDGHDTTRTGCQNLSGCHDGMYIGR

SEQ ID NO: 45550 - protein, 240 aa, Zea mays
  Coding DNA Sequence Number=SeqID_2175
  Homolog annotation: Hit_ID=A2YY36; Match level="QueryCoverage=67%, HitCoverage=71%, E-value=6e-58, Identity=70%"; Hit description =Putative uncharacterized protein
MARLGHAAQGRTTAITGVLIGFYQEFKWDDVKVDKHRENYLGHSVKAPVGRWQKGKDLYWYTRDKKSDTEDALKEEIRRVKEEEEQAMREALGLAPKRSNRTQGNRLDKHEYAELIKRGSTAEDLGAGHAEAAQVQGLGLYKAPRDEGGSSSLSLDPQMEPEQAEPLLAPKQEDDLEDNRKGKRPRERDEKRGEKERKRDRHGDGKERRRDKHERRHDLEDRSKRHRKDKQKRRHDSDSD

SEQ ID NO: 45551 - protein, 285 aa, Zea mays
  Coding DNA Sequence Number=SeqID_2176
MAPFEFAHSDGVPPSDPICCLQNLIWLLNVAPVGVLVLSRGPGLHEQGSDTFPWGSGPTVDILEYIVFYGHVATPEPSTWWRRVLFTTRLEVAVRELAPKEDDPWARVPASGTGPLVSAEMKRGTTVGGGWVALVRIEGDFLWRFGARAGESALKGIHPASSSYAFASLPLAAPFCLQALYTPLSSRSLICAAIVAMALLVHPECFQTKWALNMVRRLPGWSAPVFGGRIRAGTILLGDLATRESMLFVSCVLALPISPFFLLLLEDGLVACLHELVELQLRFSG

SEQ ID NO: 45552 - protein, 226 aa, Zea mays
  Coding DNA Sequence Number=SeqID_2177
  Homolog annotation: Hit_ID=A6C0X8; Match level="QueryCoverage=57%, HitCoverage=11%, E-value=8e-09, Identity=28%"; Hit description =Putative uncharacterized protein
MRGEAGAEVAPSDPRDPPVTIESTPSERAEFEQEREDFKEDIRNMSDREEEVTQKEKSLAKKEARLDQREEAITALHNKLKAYNTVLEKQQDKQAATKVKLQKLQQELADRASGIARAEESLKAKEASLAKWATDLTWQEEDLAFREEMWARQNRLLDELELEAEEKRKRLEGKVWALEEQVCQFQAALVAQAMQTASSPQAVEVMRKALNDLRAEQRAGAQRITA

SEQ ID NO: 45553 - protein, 39 aa, Zea mays
  Coding DNA Sequence Number=SeqID_2178
MMVINLISGISSWRECLWCLEGEGGNMEDFEEFQDYDEF

SEQ ID NO: 45554 - protein, 224 aa, Zea mays
  Coding DNA Sequence Number=SeqID_2179
MFKQLQQKLFLFVGPSATKHGPNSGVEQVLILPWRAAWISPWRRSRPRRESNPVGEWIAGNRTPWRFSARLGGGGAGDAREGTRRRGTEGLSGGEAGVTRQRPLGKQLGGGSGSWGRASPRPSLESSVDLVVEEIATPEGTTCFLHTIRHRGQERPSSVGLLAADDGGTVPFASSGAGTGSLKAHQPDGWPRWRIWLRPLRWTVASRQETTTGRGSAAAGSEST

SEQ ID NO: 45555 - protein, 144 aa, Zea mays
  Coding DNA Sequence Number=SeqID_2180
MARAGINRVDDVEVAKSAGSTRSEDHEQSREDASQKPSSPSPGAGSRRRRVPETCSPDRRCTSAVGMKRTRRRLSCEESFSAETVKLNFRLELQATLTHNLDNGLCLELQVLREWVSHEVMTSTWLLVVPFSGGAYTSYSKVSS

SEQ ID NO: 45556 - protein, 29 aa, Zea mays
  Coding DNA Sequence Number=SeqID_2181
MAGSTNPPIPAPKLRSKGFLLDDPSYFGL

SEQ ID NO: 45557 - protein, 239 aa, Zea mays
  Coding DNA Sequence Number=SeqID_2182
MEHLQVLDFLIQVVLRRRWAGGLPLLASCLPEGKDILIGIQRLQSGTPVAEAFFGGMTKACGGQISPRSTRRQEGLARGFGPVTSQGHPFVGRGRTTGEESRSKTTGDTASCASSEHYLLQATNRKFTCPKNFAAHLTHKGVDADYKKERGKRPEKRDGTSPSFLSGTFALKGGRKETRHRSSSILSRRLLDWGGDWSRLPSLTTSQPCKGKDLPSVKHDDEGTDTRMFGDITRLGSGT

SEQ ID NO: 45558 - protein, 122 aa, Zea mays
  Coding DNA Sequence Number=SeqID_2183
MMDRLRHTARKSVIPFLPSRLAERPLRRPVTAGDRVCEELLPVLPLEAPPAPPLSAPAAGVADGGDPDNGDGDSSSSHDTDLSADQEPEGWVARPITRDATRGCHFHDALDTLLRRALDRRT

SEQ ID NO: 45559 - protein, 135 aa, Zea mays
  Coding DNA Sequence Number=SeqID_2184
MVHSANEQDLSEVVRLRTPLVDRGRPCPNHIWHLRTIRPSKLDGPHYNSGTVPKAVFSGQDCGRSGPKARTVHSAKEQDLSEVVRLRTPLVDRGRSALKTRTVIKMDDEAIAKKLRLEVMTKTKYNDGREGTKTT

SEQ ID NO: 45560 - protein, 218 aa, Zea mays
  Coding DNA Sequence Number=SeqID_2185
  Homolog annotation: Hit_ID=Q7XEN8; Match level="QueryCoverage=91%, HitCoverage=51%, E-value=2e-11, Identity=24%"; Hit description =Transposon protein, putative, Pong sub-class, expressed
MNYDEIVGMGTNWNQVMAQYGSFLSHHEEQPVASEEFVLPADGHTSLATSTFAAIEKKSFHFLHCWAMLKDQPKWMDSHMGHQNQPANPAPTQSNAIDVDAEDSVPTSFTSKRPLGRGFIKEKAKRTRSVDTSSKDSEYLTQMGDLSLERLSVYKTIATTEEKKLESMNKNKRQKLIIERKKLNLEKLRMDRQKLKEYKEEEVMILSMDLSKCNLLLR

SEQ ID NO: 45561 - protein, 190 aa, Zea mays
  Coding DNA Sequence Number=SeqID_2186
MDESGMKKGDRLGCHSLDSESFGFWDDDTTEAIAMHVLTTFCGFHHWKCRPTPSACSPLRRGDDPMWKDWVDHAKDVCSLYPRHTTHLTVRCMSALYRLQALRGEAMSQLMGLVESTKITLYNREDLVADLSTKLVEKDLQVERMANHIRDLEEQVEAQDNTIEVLEDQLQTIQQGSRRQTSTWTCTIRR

SEQ ID NO: 45562 - protein, 447 aa, Zea mays
  Coding DNA Sequence Number=SeqID_2187
MPSSSSSAATTPPAAASSEETLSSLMVEELRAGDSVDFGVSRMTSARVEDMQRLGYFGGGVARAPGTEEVPEPEVAEEDADEGDLRCAAGQSSGRDLVEEFVAYGVWPLAHGWALGKVCPRQMPFHGGREVRSPAFALNLRNRDPDAFVRDAEDGAVRLVGRYVPRTEGQRSFDIRGSNDRLNRVFELNQLPYDGYPGQDEADRRGKKTAVETGDDPAPAAAPSSKKRKLGSDEGQLAMVAPGAEIATAAIVPKARGEALNAGGEVSALAVVRDEAGAATRRLKGVTEALSQATEALSQVADFASRTASGALTAAVSAEVERLRTQHADAVREKSASDSKCRKMTDRVAALEREKADLRRQLAAERREANEAIAKEQAAQAEAKLARAEGNLAKELAEHLQEWLTALESRAKGAEAAMRAEAERTRAQLMDTYRELGARTGDFEVPD

SEQ ID NO: 45563 - protein, 179 aa, Zea mays
  Coding DNA Sequence Number=SeqID_2188
GSDGAGLRGSKRDGGEGGLVLATMVAVGALQRGVVGGSALQRGCGAVVVRMEAGTRAGARVSGGVDDPDVCGLWFQESLPLCMASRIRPVTQRRPRRARYNGPDHTWASELNEAALRDGVAAGLRLVPNGAKGVPARFVSVRPATAAKASSEGWRLCLCPNICPPRDQFDKVTWCRRRR

SEQ ID NO: 45564 - protein, 64 aa, Zea mays
  Coding DNA Sequence Number=SeqID_2189
MASARVARAGGVELAGAKDGVGAAGTQMAGGGVGHGYVPIPLGRQSGKFERRNSSVSQVASSSE

SEQ ID NO: 45565 - protein, 371 aa, Zea mays
  Coding DNA Sequence Number=SeqID_2190
MRVTDQRLQAFLHFRPDQWAKGRTAMQAACNCTEGAHPFDFDASSMEAQAHASCNRRAGYYVRETAPPLAPVLRLLDCGTSAATRGDPPHGPTVPTEHIDHGSVSRGRRRDGRYGQKWADTNGGGRRAEAAVKSSASSRPLLGQRENPLPRRKDDAPVFRSSNGSRTHDGRPDSRHLWQAKQATLHLRHNDRVKKVRHVIRFRNLFHFLFLSLASGIGKGDTPKGILLREGSGPRAPLLIRGSKAGPSEGFNSRLRALGLRAHYWSEVRRLAPRKGSTAASGHSGSTPTTDQGFEGWPPKGSTAASDVERGMTPGSGADLANPAPPANPAPAKPLTASTYQPENLGLDCAPGLWPVRMREQPDRPRHYETR

SEQ ID NO: 45566 - protein, 677 aa, Zea mays
  Coding DNA Sequence Number=SeqID_2191
MGGLGVSNSFAMELMGTCAAPGGRMSSPELRESSARMLKVTGGWWPKNVPIPRAAGEDFFTSRMVRDLRVFPYGRNIAAVVSAVMDKDRQEAAQKRRAVIRLPEARPKRARGTAKAAAPSGRQPTLVAKSAAPGSSKVPEVVKAASAGGTKSASAGAAKVRELPSPGKRVADFGTNISVDDYLVGSGEGQLVVVPPAVATTVSATVPGVEGSALSAGGEISALTAKDEAGTMSSRLREASQRLSQAADFADRVASGALTTVVSAEVERLRAQHDDAVREKSAADSKCRKLVEKVAALEGERTDLRCQLVEERREANQALAKAQSAHAEANLARMEGSLASQLAEEWEARFNALQARMERAEASTLLEVERTRKQLTDSYRELGARTADFEVPDRESGLRCLEWLQEELLALPTIVEGFMSFASLVTCEGAMNALSREGCSHYEVFDRSDEDFEREIYKVEDPVVKDSAGALFDRMWGPHGREVVRERSDRARDQAARAENVEDFGPLNSARPEAEANPVAAEAEVDPAPPPETGEGSLAAPAATMSGGGSSPTAVPRAEDSPKTATEPAVEDPTMAGSSQVQDFGPAHATATANFVAASTVDAGNESDESASKFSDFGDSGSSVEWTEESSDEDLDYFAALDVAAAEASPRVTDAEVLPGPSARRRRRRAVAKRRVS

SEQ ID NO: 45567 - protein, 94 aa, Zea mays
  Coding DNA Sequence Number=SeqID_2192
  Homolog annotation: Hit_ID=Q7XBD4; Match level="QueryCoverage=36%, HitCoverage=3%, E-value=5e-09, Identity=85%"; Hit description =Cinful1 polyprotein
MTIGKRERGLTDEEGGNRASHGAGRTGGRDSSMEVRAGITPWFTELGVHGVLSGGCCEKGEKITKEILEGLSEDTDDSDSYDVESGDEDSEDRP

SEQ ID NO: 45568 - protein, 490 aa, Zea mays
  Coding DNA Sequence Number=SeqID_2193
  Gene Ontology: Mol. function=sugar:hydrogen symporter activity; Cellular component=integral to membrane; Biological process =carbohydrate transport
  Homolog annotation: Hit_ID=Q7XBT2; Match level="QueryCoverage=88%, HitCoverage=96%, E-value=0.0, Identity=77%"; Hit description=Sugar transporter family protein, expressed
  Pfam annotation: Domain name=MFS_1; Domain location=51-441; Score =24.1; E_value=0.00053; Accession=PF07690.7; Description=Major Facilitator Superfamily
  Pfam annotation: Domain name=Sugar_tr; Domain location=90-490; Score =231.7; E_value=1.7e-66; Accession=PF00083.15; Description=Sugar (and other) transporter
  Pfam module annotation: Pfam domain module=MFS_1::Sugar_tr; Domain location=51-441::90-490
MASHPPPAEPSSKSNKLLELFIFFLLIDPCPRRPRLCLRQQGQSEHEEIHVSSGGVLAYTDDDDCESRRPLLLRTPASAECYSVSAAVFPFLFPALGGLLYGYDIGATSGATISLKSSTFSGTTWYNLSSVQTGLVVSGSLYGALIGSVLAYTIADFLETAPSQIRGMLISLKEFFIVLGMLLGYIAGNLYVEVVSGWRYMYASSTPLCLIMGVGMCWLPSSPRWLLLCAIQGKGNLPETKENATRCLCRLRGQASPDLVSEQIDLILEELSYIDQEKQASFGEIFQGKCLKAMIIGCGLVFFQQVTGQPSVLYYAATIFQSAGFSGASDATRVSILLGLLKLIMTGVAVLVVDRLGRRPLLIGGVSGITVALFLLSSYYTLLKDASYVAVIALLLYVGCYQLSFGPIGWLMISEVFPLRLRGRGLGVAVLVNFASNALVTFAFSPLEDLIGTGALFSGFGVIAVASLAFIFWIVPETKGLTLEEIEASL

SEQ ID NO: 45569 - protein, 58 aa, Zea mays
  Coding DNA Sequence Number=SeqID_2194
  Homolog annotation: Hit_ID=Q53NG0; Match level="QueryCoverage=74%, HitCoverage=5%, E-value=8e-08, Identity=55%"; Hit description =Retrotransposon protein, putative, unclassified
MSFTGKSKNGVIFKIDFEKACDKDALDQYMEIFGCKAGEFPFNYLGIPIHFKKLRNVV

SEQ ID NO: 45570 - protein, 136 aa, Zea mays
  Coding DNA Sequence Number=SeqID_2195
  Subcellular localization annotation: CTP_CleavageSite=64; ConfidenceScore=5.19e-01
MVTSKTPAEPLRARAASPPSSDVFGTSRWSDRDKAGRDTLRRTRHFDEGLRRRPPTARPRSVPRPTAIAPVHVTLLSPLFTLVGLLAAESKFQQEVVVRREGTRDMWSLAARVCYAAGEARWWAGCARGWEMWAGM

SEQ ID NO: 45571 - protein, 902 aa, Zea mays
  Coding DNA Sequence Number=SeqID_2196
MPVVELVPCARNKWGNWNEFWFYVAEATVEGHEGLPMSEMCSHYYSAYPPFEVAEEDADEGALRCAAGQSSGRDLVEEFVAYGVWPLAHGWALGEVCPRQMPFHGGRVVRSPAFALNLRNRDPAAFVRDAEDLAVRLVGRYVPRTEGQRSFDIRGSNERLNRVFELNQLPYDGYPGQDEADRRGKKPAVETGGDPALVAAASSKKRKLGTAMGRLGVSDSFARELMRTCAAPGERMSSPELRESSARMLRVTGGCWPKDIPIPCAAEQDCFTSRMVHRWRVFPYGRNIGHVVWAVMDKDRQGAARKRQATVRVHEARPKRQRGTAKAEASGGGKPPLPAKVGASAPGKAPEVTVGAGGPKLTKVVPSVSGVAEAAKAARTLPPPGKRVADFGTEINVEDYLGGSDEGPLALVVPGAAIATAAPAPKAGEETLGAGGEVSALALVRDEAGVATRRLKGATEALSRATEALSQVADFTSRTASGALTAALSAEVERLRTQHVDAVREKSASDSKCRKLAEKVAALEKEKADLRRQLTGERREANEAIAKEQAAQAEARLARAEGNIAKELAGELQRRLTALESRAEGAEAAMRAEAERTRTQLMTAYRELGVRTGDFEVPEREAGLRCLEWVQEELQELPTVLAGLMSFTSLVTCEAAMNALSREGCRHFEALDQADEDFGRDIFEVEDPVVKESAGALYDRMWGSYGCEVVRARAEAARAQAERGERVDDFRALNSALPDPETTPAEAATGVAPGPTPETAEDAPGAPAPAAAGEDLPPKVAEGAPDAPAAAVPSAEDPAEVGAEAAAEASAEAPAAAGPSQVQDFGPAHATATTEFLAASTAEDGNEYGGSVSEFFDFTDSGSSVEWTEESSEEDLDYFAALDVAAAEAAPHAADAPRRARS

SEQ ID NO: 45572 - protein, 198 aa, Zea mays
  Coding DNA Sequence Number=SeqID_2197
  Gene Ontology: Mol. function=transferase activity; Cellular component= protein acetyltransferase complex; Biological process=positive regulation of transcription, DNA-dependent
  Homolog annotation: Hit_ID=A2WSM9; Match level="QueryCoverage=76%, HitCoverage=17%, E-value=2e-72, Identity=86%"; Hit description =Putative uncharacterized protein
MPPPYSCATNYAQAPATIVQRLCNAIAATPHARLGWKVGLVEKTVVLFTKDGDQHNNLHDMWCMWYELASGESYYCQGDLGQALNNFLAVEKHYADMTEDQFDFYSYCLRKMTLRAYVFMLKFQDCLHAHEYFHNAAAGAIRCYMKLHDSPTKSTTEENDEIPKLPPAQRKKLRQKQKEAKACAKHKLYMCLIHYQLF

SEQ ID NO: 45573 - protein, 178 aa, Zea mays
  Coding DNA Sequence Number=SeqID_2198
MGGGLLAAASALRSVLLLFGPPGAEVVVIAAAGAGDGTPFVGLLLLRRPTPIEWGCSYLQRGNRSSVCNGTLNASVFVHYGCRGLNIRGLGSGWRPWKMVGRGPRGDRPSRLLGPDSRRRPWRRWPGRGDDVVLRSGSLRTASPSEARSNLAEVVVDAEGAAAPFQHQDPSLQDQIVL

SEQ ID NO: 45574 - protein, 330 aa, Zea mays
  Coding DNA Sequence Number=SeqID_2199
  Pfam annotation: Domain name=zf-CCHC; Domain location=235-252; Score =8.5; E_value=0.078; Accession=PF00098.14; Description=Zinc knuckle
  Pfam annotation: Domain name=zf-CCHC; Domain location=31-48; Score =25.8; E_value=0.00016; Accession=PF00098.14; Description=Zinc knuckle
  Pfam module annotation: Pfam domain module=zf-CCHC::zf-CCHC; Domain location=235-252::31-48
MRMIRKINLMGVPLQVEDLLFNIDRKKQRKRGCFACGEKGHFRDNCPNMVEPTKRRSKGKALISVKTWDYSSSEDESPRMRTHRSSSRSSRSSRKCLMARGKMSIPSSSDDSSSDDEGKMEILSIHNNDLTTKLENIGSTLGVSLVEIPEIIKKDASTSCFDLVDNSNPCNQVLVKNVVIETCSDEIAMENEQLKQEVARLGKALYDKKGKAKQIQPPQDNTTARVNKHVEGEIVICRLCHKKGHKYYQCKAKTRDKQKPTSKISNTYINKMNKKVATPYLIKKKKNGKVIVIKANKQANEGKGGQMHLGAKVIISTMKSTKKVWIPRGK

SEQ ID NO: 45575 - protein, 284 aa, Zea mays
  Coding DNA Sequence Number=SeqID_2200
MTSHGSSEDGNALSHTDGLAREGFPRILWEVLQGAGYTTPPQYAVQQFEKHRVPRCRVRMTLEPHPLQPGWRSLDSESFGYRAEDTIEAIALHGLTTFCGFHPLELSTHPIGLFPTEKEDDPMWKDRVEHAKDIWAIYPGQTAHLTVRCMNALYRLQVMRGEAMSHLMALLEATKITLDNREELVVDLSQEMVEKDLQVEQLSTDIQELEELVGTRENTIEVLEDQLINTQQQLAEANEHLDMHHQEADEEADIEGGDEHASSLDTAGSGRPPSHESSVASFAH

SEQ ID NO: 45576 - protein, 77 aa, Zea mays
  Coding DNA Sequence Number=SeqID_2201
MTQLFEFYKAEDPEHMFGEGKNWGVVRFAVVPLMGLGVCGSLCQGGDEDDGFGYDYGAGEDEVVEEDFQEFQDYDEF

SEQ ID NO: 45577 - protein, 98 aa, Zea mays
  Coding DNA Sequence Number=SeqID_2202
  Homolog annotation: Hit_ID=A2Z9P4; Match level="QueryCoverage=57%, HitCoverage=15%, E-value=2e-09, Identity=57%"; Hit description =Putative uncharacterized protein
MGSEDVLVEIHLHELYFVDTKQHRLSRLHGEQPLRSLRVRPLYSLASRARLPSAQVNDEDEWSFGFCEIDNHVFNCPTRKNPMYTYWERIVLRETKAY

SEQ ID NO: 45578 - protein, 66 aa, Zea mays
  Coding DNA Sequence Number=SeqID_2203
MAGIAQSTRAGGCPCWRRVYRPNHGDLVQSKGTIRVNMWDLCSKVMKYTTTFTFGPSHDHKVYMTF

SEQ ID NO: 45579 - protein, 146 aa, Zea mays
  Coding DNA Sequence Number=SeqID_2204
MGPLGHGGTITSPCSEPTTWLSGESSRQHSEGITYQWASWTASSTSFWHSLREVVPCCSTPKLSMTCVRGLHHSSPGREEEEDLYGKAISTTSALQDCVRHSEQRTSAATGAMVIRPQQQQQAPNRSQPPAQRNINQQHPQQQQYR

SEQ ID NO: 45580 - protein, 26 aa, Zea mays
  Coding DNA Sequence Number=SeqID_2205
PKAARSVGTNLEGHLCLLSLAHRNVL

SEQ ID NO: 45581 - protein, 1115 aa, Zea mays
  Coding DNA Sequence Number=SeqID_2206
  Gene Ontology: Mol. function=protein binding; Cellular component =extracellular region; Biological process=cell adhesion
  Homolog annotation: Hit_ID=A2Q381; Match level="QueryCoverage=97%, HitCoverage=97%, E-value=1e-70, Identity=25%"; Hit description =Putative uncharacterized protein
  Pfam annotation: Domain name=DUF593; Domain location=758-851; Score =172.3; E_value=1.2e-48; Accession=PF04576.6; Description=Protein of unknown function, DUF593
MVSQAPVAGASLAASLCKKSNRVARVLAYALLEWILIALLLANGVFSYLISRFAAFFGLAPPCALCSRLGVDSLFETRPPHHRGAEPLRRLLCDAHAAELSRLGYCSAHRRLADAGDMCEDCAAAAAPGKALLSWMGRSELGERDLACACCGVALESGFYSPPFLLTTSAPRGSDCGLKQEEEAAMPNGDVVVVSKEGPVIELFDDKPFVEDDSIGVLAAEVVANVERPVALESIDSLVVTMGTVSSQSGGEGKEAVDHGVVRQNNVDMENTVSSNEEKIMPSDDKVDVVDRLIDEQIVAVVLVPACIEATLDGGINADKTVDAFADHQSLEDDSGLEVKDQKISFEDEVFEGEQAEQVTQQQELCAMPTDPSDHEFVERLDRSTELEHFPLAESKHKMNSMPVEASKHVAVTQIEGKQVQQAEVNQELDSIPKCSREHADEELQGERTAQAGLEQECDSVPIDYGEHGSLTSYAHTDDEQDEAMQKVTSVTRIEEKQVQQAEVNQELDSIPKCSREHADEELQGERTAQAGLEQECDSVPIDSGEHGCLTSYAHTDDEQDEAKQKVTSVTRIEEMQVQQAEVNQELDSIPKRSREHADQELEVERTAQAGLEQECDSVPIDSEEHGCLFSYAHTDDEQDEVKQKVTSETADVLHYAADTFNVNTNSWKEDIEEDSTEAALTAIHQICYEPLTSIVKFSLDHSVSEEDREPDTPTHIEGICDSQELLDSKAVVSDAKSVDSSVATLSTDLESTELVSVDQLKSALASTRKSLNTLYSELENERNAAAIAADETMAMINRLQEQKAAMQMEAIQYQRLMEEQSEYDQEALQRLNELVVKREKEKQDLERELELYRHKVHLYEVKVRKLSRHKADDQNGSSSTSSSAEDSDDLSQSFYEGDESSHGINGSNGSIPTDVVLQETARHLVTLDGSLADFEEERLSILEQLKVLEDKLFDLDDEESDNMKHFSEENHLSGASNGFSDDDSCFKLHDKRKNVTYRGKKLLPLFDDATVEAGNVPQGNDAQHSTEVTLDLAREQHKLAIANEIDQVHERLHALEADREYIKQCVRTLKKGGKGFDLLQEILQHLRDLRRIEQRASARNSGELSPHYLHHHTD

SEQ ID NO: 45582 - protein, 130 aa, Zea mays
  Coding DNA Sequence Number=SeqID_2207
  Homolog annotation: Hit_ID=Q7XBD4; Match level="QueryCoverage=71%, HitCoverage=9%, E-value=5e-07, Identity=37%"; Hit description =Cinful1 polyprotein
MADNIGFLKLEAMLPTMSFEDFSDYLAYTHLKGFFLSKALKNKRNVEGKAARKEIVKLRFEVSRLWFDCEEKERSFKILEKDFVERRTEVQALLEEKIKLRETMESKISDLEASATVKDKHIASLDVELQ

SEQ ID NO: 45583 - protein, 252 aa, Zea mays
  Coding DNA Sequence Number=SeqID_2208
MYVPSWLSERFWRPVHVMSWPSEERLSLVEVQLSGLSDPCFRKGLRAVVVMEHAGCHHYLFTGPEVGRGGGSSEVEAESRPGGRARRRPSSEVEAESEPWGRARWSPSSEVEAESEPWGRARRSPSSGIEVESEPWGRARRSPSSEVEAESGPGGQARRRPSSGVEAKSEPWGRVRRSPSSGVEVESEPWGRARRSFLWRLRLDLAVVSLTLSSGTTVRAGQAVLFSCQVGQWSGEVTAVTSALSTEERASG

SEQ ID NO: 45584 - protein, 130 aa, Zea mays
  Coding DNA Sequence Number=SeqID_2209
MGANRTPLCGVRVTHSRVPGLWDKEYPGLNQSQTGVRNRHVSGPYRTRFYSSLRRSPDAATWHGARDASQWAEPDVRPLGCAASAFIAEKACRLSIPLAGDVPPRQLMSHVHSTGSRCVAFAFNEPCPSR

SEQ ID NO: 45585 - protein, 177 aa, Zea mays
  Coding DNA Sequence Number=SeqID_2210
MTMHGRWSGSDGSKGRGVIGRRRIHYELYARSQLPLEAILEVQISQNTWGEGFTPSSFPTRTIARNLCGFYACEFMRVNGRYITNPDKQFQRGNPENLTEAALYGIVEDLCTFILKEAVLQWQEASTVGSSDGVFPDDEQRIDWRWLARAKRSDVGEARDSRDRPKEARRGIYSEGC

SEQ ID NO: 45586 - protein, 127 aa, Zea mays
  Coding DNA Sequence Number=SeqID_2211
MAYRLLPSCSWWKDHLLRLSSTLVAQETPLYAMNSWFPQQAQQQPFVFPQFQSPMPQWGLHAPPPPPPPQGSEVMGHNTPPPVIPAPGGAYAGEGAYVGEDPNPLHDFVNQFLVFGGSGHNSNDPNM

SEQ ID NO: 45587 - protein, 155 aa, Zea mays
  Coding DNA Sequence Number=SeqID_2212
MGHRTVRCANGSKSSTVGCANLGKQSAPDTEQCLSGGTPDCLVCHPTEGKNCLPGLLSTTPSCLGAIKGTPRRMEEDTKHTLNILRLPHSMFAHSIDILSDLSSVLVGERLQVVEIPRKRDIVKERKTSWYSSGSLDHLKGVECNPRPLGRHNVE

SEQ ID NO: 45588 - protein, 121 aa, Zea mays
  Coding DNA Sequence Number=SeqID_2213
MDPKGKGMVVDNNEKESIFNEPKNDNRGPWSPPISEFVETNTASRPDRAGLRAGFSGSLATLSSPIWTLSRSDSDLSFALGVELWGVVAMASAAGWGAAALSRRGWGRVLFTVGSVGDGSD

SEQ ID NO: 45589 - protein, 53 aa, Zea mays
  Coding DNA Sequence Number=SeqID_2214
MVKWHKSQARFVFASKDVDLRAIDLAMRIAERMFLKMKEDEAKNNIEEEENDR

SEQ ID NO: 45590 - protein, 259 aa, Zea mays
  Coding DNA Sequence Number=SeqID_2215
  Subcellular localization annotation: CTP_CleavageSite=14; ConfidenceScore=5.16e-01
MCEQRRRRTRREDRAASTEGASPTRQPRSPPLPRSRPLSGKRAPLVSTFLAPVTKLSTRSTPAVARSIASPLTRSPARFGALRHRALCPSCPFTPPARAIPSPPLCAIIAVVASSPVLATSPPFTAPGAYKKDRPSSLLPHTGLGHSLSPPLSRIELRATAPFLRSEGLSPHISTGLSSFTTCTHGKYNHSRLYGQSLNVNSYGPNPRVMMAGEHWEDKEGECFVRFGHGGGLTPSGITVKQLKTSFLLCSTRGGCVCT

SEQ ID NO: 45591 - protein, 187 aa, Zea mays
  Coding DNA Sequence Number=SeqID_2216
MSKNTRDTRFIPRFGHTTKVPYFLVEAPTKSLVSFNPNPPFADHKGQAHTIIFAQTSGGGKARAKVWDYGRGANLAGGCLGRPVHGEVVGPAAVGSPTRLPDAIGEGDGCVVIVPEAVKGGEVASTGELAMAAMMAHSGGDGMAQAGGVKGQLGHSARWRKAPNRAGERVNGKAMERAAAGGDRIDS

SEQ ID NO: 45592 - protein, 297 aa, Zea mays
  Coding DNA Sequence Number=SeqID_2217
  Gene Ontology: Mol. function=peptidase activity; Cellular component =cellular_component; Biological process=lipid transport
  Homolog annotation: Hit_ID=A2XBN5; Match level="QueryCoverage=22%, HitCoverage=69%, E-value=2e-24, Identity=70%"; Hit description=Non -specific lipid-transfer protein 2 precursor
  Pfam annotation: Domain name=Tryp_alpha_amyl; Domain location=33-98; Score=52.1; E_value=1.9e-12; Accession=PF00234.13; Description =Protease inhibitorseed storageLTP f
MAKQQQQGMAAVALVVLVVLATAAAETASAASCNAGQLAACAPAITAGARPSASCCSNLKAQQGCFCQFVKNPTYGRYINSPNARKVVASCGVSVPRCYRHPLSPLPSLCTRPTRSGLRSSTVRRWLLACSHAPSGSALSVIWRGGSAPPHLIAGLLTSTCPHRRHLLSAIALLASSANGPTNLGSSLCPSLPTPAIKVHSFAGPNVAMSTLRRHPRTPPRLRVASAAPPPGPPLPRRCVAPLRLPSGRPTLSSTSTNISGHCRGVGAVGAGVLDLGGDEELRFMYEQYTKHHPFIE

SEQ ID NO: 45593 - protein, 367 aa, Zea mays
  Coding DNA Sequence Number=SeqID_2218
  Gene Ontology: Mol. function=protein transporter activity; Cellular component=clathrin adaptor complex; Biological process=intracellular protein transport
  Homolog annotation: Hit_ID=Q10SS6; Match level="QueryCoverage=89%, HitCoverage=34%, E-value=1e-175, Identity=93%"; Hit description =Adaptin N terminal region family protein, expressed
  Pfam annotation: Domain name=Adaptin_N; Domain location=9-361; Score=- 26.8; E_value=4.7e-07; Accession=PF01602.11; Description=Adaptin N terminal region
MVTTFLVYEKNLDLQGGLSPYEKKKYVWKMLYIYMLGYDVDFGHMETVSLISAPKYPEKQVGYIVTSCLLNENNDFLRMVINTVRNDIIGRNETFQCLALTMVGNIGGKEFSESLAPDVQKLLISSSCRPVVRKKAALCLLRLYRKNPDVVNIDGWADRMAQLLDERDLGVLTSVTSLFVSLVSNNVEAYWNCLPKCVRILERLARNQDIPQEYTYYGIPSPWLQVKTMRALQYFPTIEDPNARRALFEVLQRILMGTDVVKNVNKNNASHAVLFEALALVMHLDAEKEMMSQCVALLGKFIAVREPNIRYLGLENMTRMLLVTDVQDIIKRHQAQIITSLKDPDIRFDSLPVCNFLYLSKGLNGIT

SEQ ID NO: 45594 - protein, 278 aa, Zea mays
  Coding DNA Sequence Number=SeqID_2219
  Subcellular localization annotation: CTP_CleavageSite=37; ConfidenceScore=5.49e-01
MQAACNRAKWVHPSDFQRTQHGGPGPRVMQPARRLLRASNCTATRTTTTPPRLRNQYRDSRQPCAGRSSGHIVSQAYVPSRGSERTLSHGVKTARPCSVPRTACARATAASRTTRPVALTPRRDRRRLRQEKQATLRLRHNDRVKKGSKVGPSEGFNSRLRALGFRAHYWLEVRRPAPRKGSTAASGHSGSASTTDQGGNDLVTESHHREASSPQTPSKGDRVRQITHSSPETPCSAPSEGNMALSPLLLTERRRRGRQHTSPRTWDLTVHPGYGQLA

SEQ ID NO: 45595 - protein, 609 aa, Zea mays
  Coding DNA Sequence Number=SeqID_2220
  Gene Ontology: Mol. function=methyltransferase activity; Biological process=DNA methylation
  Homolog annotation: Hit_ID=Q9M529; Match level="QueryCoverage=100%, HitCoverage=100%, E-value=0.0, Identity=83%"; Hit description =Putative DNA cytosine methyltransferase Zmet3
  Pfam annotation: Domain name=UBA; Domain location=166-200; Score=9.1; E_value=0.95; Accession=PF00627.22; Description=UBATS-N domain
  Pfam annotation: Domain name=UBA; Domain location=61-97; Score=12.6; E_value=0.39; Accession=PF00627.22; Description=UBATS-N domain
  Pfam module annotation: Pfam domain module=UBA::UBA; Domain location =166-200::61-97
MAHWVSDSDGSDNFEWDSDGNGEEPANFNAAGAGSSALRSTNTDAPGPSTRVANGNGKAGPSASLVQKYMDMGFTEEIVRKAMKDNGDNGADSLVELLLTYQELGNDLKVDNGFASGCAPQTVDDSDDDDILENWDDEDADGGRSTRVANSIDDSEDEDFLNEMSQKDKKVDSLVKMGFPEDEAALAITRCGQDASISVLVDSIYASQTAGDGYCGNLSDYEGNSNGGRNKGRFMDGNKKKRKRYGGQAQGNRGPLDGSCEEPMPLPNPMVGFNLPDHWTRPVDRSLPTQAIGPPYFYYENVALAPKGVWTTISRFLYDIQPEFVDSKYFCAAARKRGYIHNLPLERRSPLLPLPPKTIFEAFPRTKRWWPSWDPRRQFNCLQTCTSSAKLLERIRVTLANSSDPPPPLVQKFVLEECRKWNLAWVGLNKVAPLEPDEMEFLLGFPKDHTRGISRTERYRSLGNSFQVDTVAYHLSVLKDRYPQGMNVLSLFTGIGGAEVALHRLGIRMNTVVSVEKSEVNRTILKSWWDQTQTGTLIEINDVQTLTADRIEAYIRRIGGFDLVIGGSPCNNLAGSNRHHRDGLEGEHSSLFYHYFRILDSVKSIMERL

SEQ ID NO: 45596 - protein, 116 aa, Zea mays
  Coding DNA Sequence Number=SeqID_2221
MNRGESQVGDDIDDGGLDDRTESLVEVDARTLGEATKDLASFIPIQVVQQAAAQGLEAHWLWGSAHSRRLVEQMPEGCLVGLNGEAQLKASQGSDHVGHLGRLKWEVWGIDIPESA

SEQ ID NO: 45597 - protein, 376 aa, Zea mays
  Coding DNA Sequence Number=SeqID_2222
  Homolog annotation: Hit_ID=A9MN50; Match level="QueryCoverage=47%, HitCoverage=65%, E-value=4e-76, Identity=68%"; Hit description =Putative uncharacterized protein
MDCTGEVIGNRNASDVRYDLTQFFYVFTFFTDNDTRASSVNGYTDALSRTLDNDTRYGRFSQFLSQIVNVSAIVVFSVSNGRFQNFLDQYSRFLVGVGQNIQSLRHFLTANQQRGRDKYESVRIHPVCDQPFRRLQIPERADDHYGQRWSIKGPFLRERGMAYPLKLFATATYDEFISTLVAAGLLTFGLNAPRSYRVLTKVTTFTTTMWVVYRVHRGTANGRTNTTPACSTCFTQNAQHMLSIANFAQSCTAVCFYFTHFTRTQTQGDISTITSNDLNAFRGQDVTAFTVFVQNQRDVRGTVRIVLKTFNNCRDTVFVAFEVNNTQRSKSAANEVQILAFFQGDGVNDFDFDFKQFLHSSFDFCFGRVFSNFEYD

SEQ ID NO: 45598 - protein, 292 aa, Zea mays
  Coding DNA Sequence Number=SeqID_2223
MDHQRLRADLPLARPSGPHGRIVRPCPVPQMVLNICPSLLGKLSELKTDDNPIKGLTSVLSVEQVLNAKLTGFNTKTTDQAKDGGKKSFEVPSAREKVKDTKNPKPGVKKKTCKVKVDRVKKSYAKSGLGRHRKLRLARPQGPDSASAPDDDELRLARPQGPETASTPEDDELRLARPRARTRPWPRKTTNSASPDPGLGLGLGPGRQRTPPRPTPGSDSAMAPEDDELRLARPQGSALASADGLRLARPRGSDSTSTSEDRLDLDLGGASASPDPGLGPTTSQEGPSLPYP

SEQ ID NO: 45599 - protein, 204 aa, Zea mays
  Coding DNA Sequence Number=SeqID_2224
ISIVQYAVELLPVRCALSPVLHRRPPSHDPRIALPLAHQPFPSSMRSATSTLLAATSSAGRAPRQPPPTDCHGLKLCTVRLPRAQAVQCVLHGTALATAPLPLLFITAPNVASPGAPRACSLEHASQCTGVPWLQRWAPSNPSRPAPAPTPWANLSTHWRAIAWPQRRRVVSAEALAPMLDVLIDAAIVRVCILLRVDVGVQQL

SEQ ID NO: 45600 - protein, 183 aa, Zea mays
  Coding DNA Sequence Number=SeqID_2225
MSEDKVHTKDSCWSVGTICDPRELPGVSTAGSGVDRVLQLDECDGGGAGQRLGGGGQGGGSGSGWGGRGQGGGWGWWWVIHGGRKIRGSGYQMLWSLDRSTYVLQSKIQSMHNTRGPKNMRVLLLNYDASSSAIGSVVSDHLHNILCPNLIVKRLDAQRRWTAATQFVVALQTFTVRDSSPVA

SEQ ID NO: 45601 - protein, 160 aa, Zea mays
  Coding DNA Sequence Number=SeqID_2226
MARAYKAPRDFDRTPPHALDLTGAQNHRCLPVHGVPAAARFPLHRRPANRTLPDPVQPSEKTMHTSVKLHERGIEVCFTGEASPRSPDFARPPVSVDRTVTSLTENMSSCRSKELLRRNPIEMDTSSLEDMVAGVTWPSILPPGWTVEWDPASAEEEHDE

SEQ ID NO: 45602 - protein, 214 aa, Zea mays
  Coding DNA Sequence Number=SeqID_2227
  Gene Ontology: Mol. function=mRNA (2'-O-methyladenosine-N6-) -methyltransferase activity; Cellular component=nucleus; Biological process=nucleobase, nucleoside, nucleotide and nucleic acid metabolic process
  Homolog annotation: Hit_ID=A2X875; Match level="QueryCoverage=28%, HitCoverage=14%, E-value=1e-26, Identity=93%"; Hit description =Putative uncharacterized protein
  Pfam annotation: Domain name=MT-A70; Domain location=7-111; Score= -5.9; E_value=2.5e-05; Accession=PF05063.5; Description=MT-A70
MDILGQFGVIMADPPCDIHMELPYGTMADDEMRTLNVPTLQTDGLIFFWVTGRPMELGRECCSSSSDSLEVEVRDLLPNEETDRRPKLSRHCIRSLHIPLGPYGFSNIALLVHQIYVVCDARDPSDTKSSTKIVSSADNAKSVDIKPVSGSDKSNDTSDKSNDTVDANVKSISGIVANSDARNTDVQTNTRSVDSSDDYIIDSKPNIGRVAASI

SEQ ID NO: 45603 - protein, 65 aa, Zea mays
  Coding DNA Sequence Number=SeqID_2228
MAASRPRWLHALAAPRPGASCPGGRGDEDDGFGYDYGNGCLRCNHCSGEDEVMEDLQEFQEYDEF

SEQ ID NO: 45604 - protein, 136 aa, Zea mays
  Coding DNA Sequence Number=SeqID_2229
MGKNNKRKREPTPPLEEFGDSEYSEEEFSSEPEGSPAPVSPPASSDDSDDSQGIAAEVWTYIRAVERAGLEGSDESEYSSDEEDSDGGDEGEDDDDDDDGDDSGRGGGDGSRDSTKGDSSRGSTKGGGGGRGRASG

SEQ ID NO: 45605 - protein, 199 aa, Zea mays
  Coding DNA Sequence Number=SeqID_2230
MENHNKSLPLGLEGSPTFARPAGWSTLLIQRQPKPRPESAALPEDIESLIAPLRNLLEAEKQTHFEMPSSTDVAEMDVVLSLLAEDSSDSARTEPMTIATRKELDEDEEIQKPKGCDEAQAAGGVLDEEEEEEEEEISLIRKNSRHYRGSDIPVQALSALVSLQGLSISDFDQALEEVFCRMILSGKRYPGWFLVPRRL

SEQ ID NO: 45606 - protein, 95 aa, Zea mays
  Coding DNA Sequence Number=SeqID_2231
MQPRQVGAPLRLPTHPAWRPRPTCHATGAPVATCEQLHRHSHHYHASSTAEPVPRLEATLRMTQQCQPGATVPGKGGYPEKDPFSVKETGPEPPY

SEQ ID NO: 45607 - protein, 341 aa, Zea mays
  Coding DNA Sequence Number=SeqID_2232
  Gene Ontology: Mol. function=transferase activity; Cellular component= cytoplasm; Biological process=metabolic process
  Homolog annotation: Hit_ID=P49248; Match level="QueryCoverage=72%, HitCoverage=99%, E-value=1e-131, Identity=95%"; Hit description =Protein IN2-1
  Pfam annotation: Domain name=GST_C; Domain location=132-225; Score =3.1; E_value=0.052; Accession=PF00043.16; Description=Glutathione S -transferase, C-terminal domain
MAAAAGPSRWVIDRSVKETLPPALGSTSQPPPVFDGTTRLYICYFCPFAQRAWVTRNLKGLQDKMELVAIDLQDKPAWYKDKVYAQGTVPSLEHDSEVRGESLDLIRYIDSNFDGPALLPEDAAKRQFADELFASANAFTKALYSPLLSHAAVSDEVVAALDKLEADLSKFDDGPFFLGQFSLADVAYVTILERVQIYYSHLRNYDIAQGRSNLQEFIDEMNKIEAYAQTKNDPLFLLDLAKNHLKVRYYRTDSKSTIFLKNGKKCRRRFETTSNHGMEWLHTSDNDSGDLSTSQADARSSHAGDIMPSPKDEWWSGNILGQSTIPLDRSAIPWPPSHPSH

SEQ ID NO: 45608 - protein, 463 aa, Zea mays
  Coding DNA Sequence Number=SeqID_2233
  Gene Ontology: Mol. function=glutathione transferase activity; Cellular component=cytoplasm; Biological process=metabolic process
  Homolog annotation: Hit_ID=Q10N45; Match level="QueryCoverage=99%, HitCoverage=78%, E-value=1e-117, Identity=75%"; Hit description=IN2 -1 protein, putative, expressed
  Pfam annotation: Domain name=GST_C; Domain location=129-219; Score =9.1; E_value=0.012; Accession=PF00043.16; Description=Glutathione S -transferase, C-terminal domain
  Pfam annotation: Domain name=GST_N; Domain location=274-348; Score =11.1; E_value=0.062; Accession=PF02798.11; Description=Glutathione S- transferase, N-terminal domain
  Pfam annotation: Domain name=GST_N; Domain location=30-105; Score =9.1; E_value=0.099; Accession=PF02798.11; Description=Glutathione S -transferase, N-terminal domain
  Pfam module annotation: Pfam domain module=GST_C::GST_N::GST_N; Domain location=129-219::274-348::30-105
MAAAAPASSVKEVLPSPLTSASEPPPLFDGTTRLYVAYHCPYAQRAWIARNYKGLQDKIKIVAIDLADRPTWYKEKVYPENKVPSLEHNNQVKGESLDLVKYIDSNFEGPSLLPEDPSKKQFAEELLAYTDAFNKALYFCIVSKEDVSEEAVAALDKIEDALGKFNEGPFSLGQFSLVDIAYVPFIERFQIFYSNIKNYDITKGRPNLQKFIEEVDKIDAYTQTKQDPQFLLEQTKKRLGAKKANMVQQVDVVSRIGIGCKSNGPGDNIRYIYKSCRLYMSYVCPYAQRAWITRNYKGLQEKIKLVPMNMADKPGWYKEVYPNNQVPSLEHNKRVIGESLDLIKYIDSNFDGPKLTITDVADLVGRLRILKGKVAALDKIDSALLKFDDGPFFLGQLNLVDIAYAPFIEGFQIFFAGMKNCDITQGRVHIQKFIEEMNKIDACTQTKQDPQVLLALTKKKFGI

SEQ ID NO: 45609 - protein, 155 aa, Zea mays
  Coding DNA Sequence Number=SeqID_2234
  Homolog annotation: Hit_ID=Q10N48; Match level="QueryCoverage=89%, HitCoverage=62%, E-value=7e-40, Identity=59%"; Hit description =Expressed protein
MGNVKLIVRGENNRKAEPLTELPEKKCKRCGLYEEDTITPDDVFDEWEMCSSDFKGGKYTRFKEGQFNATFLCPNCTASTGHGNREPSEDLETKKTSVVVIIIVSVLASVLLTIALFGGYKYWQKKKREQDQARFLKLFEEGDDLEDELGLTNEL

SEQ ID NO: 45610 - protein, 85 aa, Zea mays
  Coding DNA Sequence Number=SeqID_2235
  Homolog annotation: Hit_ID=Q8H6I0; Match level="QueryCoverage=96%, HitCoverage=5%, E-value=8e-07, Identity=41%"; Hit description =Putative gag-pol polyprotein
MSGDHAKKEMMTGEKPATSHGKAPSGESANKVKGSPSHNKSGRSSDMKKKMRKDEPCEDVKDADDCTALLDAFVYIETSSAALRV

SEQ ID NO: 45611 - protein, 162 aa, Zea mays
  Coding DNA Sequence Number=SeqID_2236
  Subcellular localization annotation: CTP_CleavageSite=38; ConfidenceScore=5.07e-01
MPLGSPRRLTARPLHRPDPNAEGSPTDLHPRRRPGSPSSAPVPGSPAPLPFPDPAAAITARPLPGPRVAAPALPWPAAALARPCSLRRRPLAPARPAALPRTLPRARPARPPPCPPGLDRPWPVQPPPWPVQPPWPQLARPFPRPGLARPYLRSPALAVIIR

SEQ ID NO: 45612 - protein, 97 aa, Zea mays
  Coding DNA Sequence Number=SeqID_2237
  Homolog annotation: Hit_ID=A3B0Z6; Match level="QueryCoverage=52%, HitCoverage=17%, E-value=3e-07, Identity=50%"; Hit description =Putative uncharacterized protein
MSLAQLKGKCIAQPSQDNRDHMVKKLETGTTVACTKSLEENVKDLRIAKRKEQKKKINTSSKSLNHASIQGNIQGNKELILCRKVKAYIMEESQRMI

SEQ ID NO: 45613 - protein, 48 aa, Zea mays
  Coding DNA Sequence Number=SeqID_2238
MESHDLRAEWESRLVGGYEIDGFDYDYGTGEDEAMEGDFQEFQDYDEF

SEQ ID NO: 45614 - protein, 407 aa, Zea mays
  Coding DNA Sequence Number=SeqID_2239
MQPGCLMKILEAERWLKAGVDQVFFNTLQGPPPTTRGLGPTRHASWPRTEGAKTAARGARNCPAVTSIPPLSPNQRVKGRTAMQAACNRTKGAHPFDFDASSMEAQAHTSCNRRASYYVQETAPPLTPVPRLLDYGTGAATRGGRKQQSSRQQAHAPSWDSERTLSHGVKTTCPCSIPRTARARTTAAPRITRPITLTLRQDRRHLWQAKQATLHLRHNDRVKKGTGKGDTPKGILLREGSGPRAPLLIRGSKAGPWEGFNSRLRALGLRAHYWSEVRRLAPRKGSTAASGHSGSAPTTDQGFVGWPPKGSDSRLRARRARDDPGYVRYITKARATLPRARLPSRPRKTVSASPDPRARTQPRPRKTVSVSPDPGLGLDLDLGGASTSPYLGLEPTTSQGAPSLPYP

SEQ ID NO: 45615 - protein, 245 aa, Zea mays
  Coding DNA Sequence Number=SeqID_2240
  Subcellular localization annotation: CTP_CleavageSite=71; ConfidenceScore=5.24e-01
MEDDSWARAPVLETGLLVSAGVKRRTPAGGGVLLSRRFAFSAHGGQRPKSMTRGPGSPCQRLVRCFRRRVRLTAAKSGLGRHRKLRLARPQGSAPVSALDDEFHVARPQGSDSALAPEDDELRLARPQGSDSASAPKDDEFHLARPQGSDSASAPEDDELRLARPQGSDSASAPEDDELRLARPQGSDSASASDDGLRLARPGARTRPQPRKTDSTSTLEEPPPRPTQGSDRPRHKGGHHYPTPS

SEQ ID NO: 45616 - protein, 338 aa, Zea mays
  Coding DNA Sequence Number=SeqID_2241
MGSARVAFVLLEEERNLTEDGDHQFDGGEKQAGLRPLPRLQLQGSSSSLLGQGERALTGLAEGVDFDNAGPVGRKRRQLQHAWLAGSADSGAASGATSHRWGGVWLSARRTSGCCAVRTGGPSKTSHAARAAFVFLDCLVLTPARCLRAEVGACLVGAQVAAVVGAEVVVARGGFSADEIVSATCGRTFGSLALIACPRPSSGDVGEGLATAASALRSSLLLFSRPERRSLSLLLQWSAVSHLEFVVPQALRCGGCSYPREWNRSSVCNGTLSAEAAVSAWIEAESAREEASSARGHVASLAEEAQQRQLEPGQVIRERDQLRSHAAEAVSRADVLGG

SEQ ID NO: 45617 - protein, 53 aa, Zea mays
  Coding DNA Sequence Number=SeqID_2242
MGLGVCGSLCQGGNEIDGFGYDYGAGSQHCNHCSGEDEAVEGDFQEFQDYDEF

SEQ ID NO: 45618 - protein, 199 aa, Zea mays
  Coding DNA Sequence Number=SeqID_2243
MNDRMIERTDDRNFGSITAWEVVWACGGQAAQRPYVWLRPLAYVTGSGPRGGIGSPPERGVGVRAEPASKEDDSWARAPVPETGFGGGEEAHYRRRWRAPHAAVRLLRTRRPTPEEYDSWAQAPVLEIGPLLLAEVKRRTTAGSGVLLTRWFAFSTHGGQRPRSMTRGPGPPCQRLGHPGARRARSLAASQGVSGGIFL

SEQ ID NO: 45619 - protein, 342 aa, Zea mays
  Coding DNA Sequence Number=SeqID_2244
MPSSSSSAAATPSAGASSEETLSNVAAEELRAGDTVEFGVSRMSSVRVQDMQQLGYFGGGVARVPGTEEVHQLTPNAVVALSKYVWATTSYGGQPSVEVFAKYYCLHWQKRRIGNKIAQFGSCTVEDHPGLPVAEMCSHYYSAYPQFEVAEEDADEGTLRCAAGISSGRDLVEEFVAYGVWPLARGWALGEVCPRQMPSRGGMLVRSPAFALDLHGRDPAAFVREVEDGAVRIVGRYVPKTEAQRSWDIRGSNDRLNRVFELNRLPYGGYPGQDVVDRRGKKPAAETEDDSAPAAAPSTKKRKLGTGKGGLRTCCASPAAPLGDFCTDSLFEEDFDFSHLLC

SEQ ID NO: 45620 - protein, 130 aa, Zea mays
  Coding DNA Sequence Number=SeqID_2245
MNNTRPLHVGGFGAATWPEETIYSKVVTVGPDPHEKVPDPRMHSPDLRARFKTSTGHPAGGVPVCSGGRQYSHATTYTVLIIIHTRPGRLPMHANAAQITDIMAQGDCTGPALVAPRITSVMSLDPHVGA

SEQ ID NO: 45621 - protein, 237 aa, Zea mays
  Coding DNA Sequence Number=SeqID_2246
  Homolog annotation: Hit_ID=Q8S473; Match level="QueryCoverage=67%, HitCoverage=18%, E-value=2e-07, Identity=27%"; Hit description =Putative RIRE2 orf3
MEAGDTVSSMASPMVSDLLRAIPDTLEVVPSSGAGVAVEGDTYFILDNTKEQEMWEELRVVTQEVMTRSMAMSIFVHCERGVWTAIQHHRAMMLRSNEQLALRSSEVADLTSWCVGLKEEGANDRVKLCLLEDEVCRLKAEADLREEEMRQMKGNLHTMVVERDESQRQVAEASLCVDSLNKHLEAERFEGRALKARIGGPFIIAKVLSPRTYKLYNEEGEVYDNAWNIEQLHCFYP

SEQ ID NO: 45622 - protein, 16 aa, Zea mays
  Coding DNA Sequence Number=SeqID_2247
MEICTQVTVLMCLCVG

SEQ ID NO: 45623 - protein, 228 aa, Zea mays
  Coding DNA Sequence Number=SeqID_2248
  Homolog annotation: Hit_ID=Q8W0U4; Match level="QueryCoverage=45%, HitCoverage=11%, E-value=8e-07, Identity=39%"; Hit description =Putative RIRE2 orf3
MEVGDTVPGATSPTVSDLLCAIPDTPEVAPSSGAEGSGDLVHAAPDPCIWGGPTLMWMSTEGDPYFVLDDTEEREMWEELMPEVVMSAIGPCCFVPNEQLALRSAEVADLTSWCAGLKEEGTNDCAKTVERKVTELRELSDAVAEFLRDLDVRALAVVASHYEIDLKRVCEGYVFPDEPKIADTKMWRLTDTVKGPGSSLARHFETKVVLPPSPPTTVVPLAGPPPTA

SEQ ID NO: 45624 - protein, 45 aa, Zea mays
  Coding DNA Sequence Number=SeqID_2249
  Homolog annotation: Hit_ID=Q7XBD4; Match level="QueryCoverage=97%, HitCoverage=4%, E-value=8e-08, Identity=68%"; Hit description =Cinful1 polyprotein
MKDQLADSLAYNNLKGLILSKALKAQKDAKVESNQIATGNLRSKL

SEQ ID NO: 45625 - protein, 81 aa, Zea mays
  Coding DNA Sequence Number=SeqID_2250
MTPEKKLGELKRPLNAHSLLTIAELSPLLELYNPLADPEMKEALDVISIANSIIDEVVDKLLTKPQKTSLEKSRLCCNNTL

SEQ ID NO: 45626 - protein, 50 aa, Zea mays
  Coding DNA Sequence Number=SeqID_2251
MLDEAARWDDHVIGLRLATRGTKARLAKALSEGWRLRLRPNICPPRDQFD

SEQ ID NO: 45627 - protein, 201 aa, Zea mays
  Coding DNA Sequence Number=SeqID_2252
MAPRTRKTTRKSTGPIGVPRHQLASRHEDSSSGSNDPIEDLEAQVEQLRMELHRRNEVWVEDGQRINELRTDIRHLQDQLDERDLALDWAVNARSLAWAKEAKARAHVEELSTAVDNLQVYYNILHEEVHVLYSQLHPNVPADTVGMGARPSGAASEALGGELDLFRPPPSMNLVDEWSPTPDSEATKSDKKCWNLLSRAS

SEQ ID NO: 45628 - protein, 151 aa, Zea mays
  Coding DNA Sequence Number=SeqID_2253
  Subcellular localization annotation: CTP_CleavageSite=48; ConfidenceScore=5.21e-01
MATSVFLLPQRHNVLSSFILIVLRQSKECPLPMQRCCRRGRACPSTVVPSKGEYTSTYSTIVPFDYSGLALYGVKVKQLLLVGQMGQRTLAFTNPLLLRVSACNFLRLRKQTVIYASANIHSHPLVRKNSTPYKKANELNTHDIELAFTTV

SEQ ID NO: 45629 - protein, 219 aa, Zea mays
  Coding DNA Sequence Number=SeqID_2254
MCCNICVTGETLLGEEKGYKYRTCRVIMSVYKVVQDMARMRKTVCMSTGPIGVPRHELAPRHEGSSSGSNDPIGDLEAQVEQLRTELRHRNRVWAQDGQCIAELVADVRHLQDELAERDLAVDWTVNSRSVAWDRETKARARVTELSAVLNNLQVYCNTLHEEMPSWTRAHDGAGTSRGREDTPNPPPVPPTLAEVIAALVNATADNTRFLREMAGNQF

SEQ ID NO: 45630 - protein, 236 aa, Zea mays
  Coding DNA Sequence Number=SeqID_2255
  Gene Ontology: Mol. function=triacylglycerol lipase activity; Biological process=lipid metabolic process
  Homolog annotation: Hit_ID=Q2R051; Match level="QueryCoverage=16%, HitCoverage=5%, E-value=2e-09, Identity=68%"; Hit description=Lipase family protein
MSTSSNTHVWLTSTCRTQEHALQATDQKINLQDTKNMPYRPLKYLKQCMYFSKKPYSVFLDYGGYGQNDVLIKKSKARLGQWHIADEYDGQLGQWHIADEYDGQVRELNCKSICHQQRWARMGKYSPMCHQQRWARIVPAWKAEMQRRGLLLGRWLCLGVRWGQLQVLACRRLVFLFADGCVGVASRGGSAARWCWRGQLSVSSRGPLRVARRRRGRPAVERQRRGLLVERSAGRK

SEQ ID NO: 45631 - protein, 152 aa, Zea mays
  Coding DNA Sequence Number=SeqID_2256
MGKNNKRKREPTPPSEDFGDSEYSEEEFSSESEGSPAPASPPASSDDSDDSQGLAAEVWTYIRAVERSGLEGSDESEYSSDEEDSDDGGEDEDGDDDDDDDGDGSGGGRGSGGGKDDDGGRGGGDGSRGSTKGGSSRGSTKGGGGGRGRASG

SEQ ID NO: 45632 - protein, 109 aa, Zea mays
  Coding DNA Sequence Number=SeqID_2257
MGLVVWASKPPSATDGGFAEFGPQNSAAAVPEGTGGGTWHDRGGCVKAKQLREKDVAVGSIIQELVHFAPSGVDRLYVNRGFSALTSSSLDCSSLARDPQRFCTSTVFL

SEQ ID NO: 45633 - protein, 103 aa, Zea mays
  Coding DNA Sequence Number=SeqID_2258
MDEFYRFGPLRSPRKNDLTTYWALGPFVRSFTPLVDPGDIYPPQAPDLWVNLEIINPKIPEIGVKLFALCFGGQHYVINILLQRSAYILSLAAEFAIHPYLAR

SEQ ID NO: 45634 - protein, 75 aa, Zea mays
  Coding DNA Sequence Number=SeqID_2259
MEERPQELFSFGKSQRLVRYNSPDMSTSGLPILAHRTMNRSCPVRHRTSRLAHKSELQRSDSNGTDDVAGAPDMS

SEQ ID NO: 45635 - protein, 194 aa, Zea mays
  Coding DNA Sequence Number=SeqID_2260
MGHWSCSLRPESARGWATWRLLRSRGRVCLPWPRPSPSPWVGRGGGRSAKARAESEPWGRAKRSSSSSGAEPESEPWVGRSGVRRLLGLSPSPSPRVGRSGVRRLPGLSPSPSPGSGEAEFAVFRDLARVRALGRAERSFLWCLWQDLTACQSHSVKWHCSRSGAGGAVLLSGRSVERRSDGGHFGPAGGRASG

SEQ ID NO: 45636 - protein, 133 aa, Zea mays
  Coding DNA Sequence Number=SeqID_2261
MADNPGGYSPAVEMTTGQATMKGGIAVVPPLRREIAARPPKFRGGKVKTPLGHLYDPHKPSIEDGATLDFRCTDQNSSMEYNFVYIIYFIHLLEQMFQIFIRSDVIVDITPQLITLNQRSKSNKYHKNKHSRA

SEQ ID NO: 45637 - protein, 114 aa, Zea mays
  Coding DNA Sequence Number=SeqID_2262
MPSRTRRTARKYAGPIGVPCHQLAPRHEDSSSGSNDPIEDLEAQVNRLQTELRRRTDIWVADGDRINELRSDVCRLRDQLADRDLALDWVVQSRSLAWAKEAKAQARVEELKLE

SEQ ID NO: 45638 - protein, 92 aa, Zea mays
  Coding DNA Sequence Number=SeqID_2263
  Subcellular localization annotation: CTP_CleavageSite=49; ConfidenceScore=5.54e-01
MKDWQPRPSTSLSSSPTNATLASWPRRRRALVMLSHEIGRKSPYKSLCQLSEPSSPWYSALSGSDCQSRDLTADDPSTVICAITVPIRARSG

SEQ ID NO: 45639 - protein, 256 aa, Zea mays
  Coding DNA Sequence Number=SeqID_2264
  Homolog annotation: Hit_ID=Q67VL6; Match level="QueryCoverage=25%, HitCoverage=47%, E-value=5e-09, Identity=59%"; Hit description =Putative uncharacterized protein P0505A04.26
  Subcellular localization annotation: CTP_CleavageSite=52; ConfidenceScore=5.06e-01
MMVLIAVALVALMCARRKASSSSSSSANGGDEKPASVRVLVPLDREPPKVVVVMAGDALPSFIAVASARKPLAFAATPAAPAEGLERWLGFRPSLAVSPSSSESSNRVCYPAVPRKPKSQSLCYPSSGTTPQILEGETTENTNDKDGDYEANDDKDEDYEECEEVSPATTKGKRHVSVGQKDKGKKPSVGTCSSVQGDPMGVSECPASCVKDACALRHLGYPRNIPIKRAIMAKASSEGWRLRLRPNICPPRDQFD

SEQ ID NO: 45640 - protein, 70 aa, Zea mays
  Coding DNA Sequence Number=SeqID_2265
MSFQGGEEVGGFPRLDYDVIDVSLDRSTNVLAYGSALFCVESVQRLLHGSGSSSDIQRVLSDIPRYARHV

SEQ ID NO: 45641 - protein, 95 aa, Zea mays
  Coding DNA Sequence Number=SeqID_2266
MKPWKETSRRSKTTTSSRCGLAATPSWLPVKAAVIYVSFPHFDLLDRERGYSERDPSPRRKRAPSPPTDQRFEGWPLGRVRQPPQSTRAPSPPTD

SEQ ID NO: 45642 - protein, 199 aa, Zea mays
  Coding DNA Sequence Number=SeqID_2267
  Subcellular localization annotation: CTP_CleavageSite=41; ConfidenceScore=5.24e-01
MSSHSPHASCPSTFRAPEWGAPALLSFCRRWRNATSWKLVPFSHHSASRIFIRRPGCIPSPVVTQDGDHQFDGGVKQAGLRPLPRPQLQGCSSSVLRRGVRRVGAHFRAGSGPLLPSVIRGKGACRSWRWQLPRVWLSGLIGFGAASGATSHRGSRKRFLCRRDSRSHPRTDLRLYGLLLVLTPRVGTWARALAQQRLP

SEQ ID NO: 45643 - protein, 23 aa, Zea mays
  Coding DNA Sequence Number=SeqID_2268
MALSCRPAHHPPEAQPATIINGL

SEQ ID NO: 45644 - protein, 57 aa, Zea mays
  Coding DNA Sequence Number=SeqID_2269
MESHDLRAEWESRLVGGYEIDDSGYDYGAGCQHCNHCSGEDEAVEGDFQEFQDYDEF

SEQ ID NO: 45645 - protein, 91 aa, Zea mays
  Coding DNA Sequence Number=SeqID_2270
MTHFFSGLIDLLLKIGEMKHLLLFYLDMLMNGFEVPDLLVQLFLLSGCSAAPSPDEAFFGAMTKVTACRRWSDEFTGEGTNVGDLFSNAMS

SEQ ID NO: 45646 - protein, 174 aa, Zea mays
  Coding DNA Sequence Number=SeqID_2271
MSSEDGHTLWPGLPSRTGGLETKPEKGLCGGRFHAEQSQQPRLRQSDLCPSASKFRQAAPWLRPPLNKWGTPPSWACERLVASLIEGEGFVVILHGEPLEATSLDAVLERDIKVFHFPPPAKLQTSTTNKLMLPSSHTGSTVVKVPPESKVGEDSKKGLAQVYKNGNLKNGVKV

SEQ ID NO: 45647 - protein, 110 aa, Zea mays
  Coding DNA Sequence Number=SeqID_2272
MGPAAQTLRSLTALMHWRQVIARRRRSALHTVAGEPLALRDIPVTPSHLCSPAPSPNPSPGAAWRKNSTAAGSSPSLPRGRPSPIPQVGWPTVSDRTTRNHPYPFARPFC

SEQ ID NO: 45648 - protein, 79 aa, Zea mays
  Coding DNA Sequence Number=SeqID_2273
MGSLVMARRRGLSPGLPAFNQLGSFVPESLYNKETNPWSKESCSPSLGDLAVEEHVTEDPGEQQVEVAEQELIEGKLCP

SEQ ID NO: 45649 - protein, 142 aa, Zea mays
  Coding DNA Sequence Number=SeqID_2274
MGKSNKRKREPTPPSEDFGDSEYSEEEFSSESEGSPAPVSPPASSDDSDDSQGIAAEVWTYIRAVERSGLEGSDESEFSSDEEDSDGGEDEDDDDDDDGGDGDGDGSGSGGGSGGKGSTRGGSNKGSTRGGGGKGSSSKASG

SEQ ID NO: 45650 - protein, 204 aa, Zea mays
  Coding DNA Sequence Number=SeqID_2275
MPGIPRDVAEHLLNIRAGARPVRQPLRLSRQGRVGLASAEPDPPSGAKKGEPLCVEIGCTSPHQKSSIKKGLLRSPGYVRSRVPRKRTWVHKREYDFMQEKQSVQASAAAVRRTFNRNRSNKELGAALGRSRSFSSVPAVGKVHLGFRRRRRGKDLRLKGGRQRRPWTRGDRIEPLNFRQGSFVLVRKTIPLTDPFQIHDVVGS

SEQ ID NO: 45651 - protein, 114 aa, Zea mays
  Coding DNA Sequence Number=SeqID_2276
  Subcellular localization annotation: CTP_CleavageSite=52; ConfidenceScore=5.25e-01
MVNKVQIKDKGDIATSHPRPCPGGTSSHDSPVATLGRDKQTRLAQGQPRAVLAVMTRPRQPRAGKAIMIRSRETLGGRGSHDSLEAILGGRGSHDSPEATLRRETQSRLVQGQA

SEQ ID NO: 45652 - protein, 190 aa, Zea mays
  Coding DNA Sequence Number=SeqID_2277
MAAAEHLHAIELVPATCKSCRNPSPSPIGSGPDSPRAHRRVARPQQEEEEEEAAADVDTRWRTSRKWSSSQGSAMGPGAAGKPYSSSACRSSSRNDGWLRCATRTTNRLVEPDPAAAAAASTHTATCPAGTEVQGRGEEKEKEVVVEREASAARPRDRHRHRRTARHSHTRDGIVIATLHMLGGVVRRDG

SEQ ID NO: 45653 - protein, 156 aa, Zea mays
  Coding DNA Sequence Number=SeqID_2278
  Gene Ontology: Mol. function=kinase activity; Cellular component =ornithine carbamoyltransferase complex; Biological process=amino acid metabolic process
  Homolog annotation: Hit_ID=Q6QP54; Match level="QueryCoverage=68%, HitCoverage=31%, E-value=5e-18, Identity=54%"; Hit description =Putative kinase
MAPPVDVVGPSPGLGEVEAPPRSRSSLSSKAEVESEPLGRARRRPLAEARAESEPWGRAKRSSSSFGAEPKSEPWGRAKRSLSSFGAEPESEPWGRAKRSFLWRLGPVLAAVSLTLSSGMAVGAAQATLSSCQACQWSGEVTTVTSALSTGGRASG

SEQ ID NO: 45654 - protein, 263 aa, Zea mays
  Coding DNA Sequence Number=SeqID_2279
  Gene Ontology: Mol. function=kinase activity; Cellular component =ornithine carbamoyltransferase complex; Biological process=amino acid metabolic process
  Homolog annotation: Hit_ID=Q6QP54; Match level="QueryCoverage=43%, HitCoverage=36%, E-value=4e-11, Identity=39%"; Hit description =Putative kinase
MAPPVDVAGLRPRLGDVEAPPKPRSSLSSVAEVESEPLGRARRRPSAEARAESEPWGRAKRSSSSSGAEPKSEPWAGRSGPESEPWVGRSGVRRLPGLSPSPSPGSGRAEFAVFRGLARVRALGRAKRSFLWCLRPGLTACQPHSVKWRRSRSGAGGAVFLSGWSVERRSDGGHFGFVGWGARVRIKVSGHLCIKCSCDLVGRCGDLVRVASWRRQGLGRFGNMFAAGGGPRARRRSSGLYADGGYQLRIRSLEGTPNYGPRQ

SEQ ID NO: 45655 - protein, 167 aa, Zea mays
  Coding DNA Sequence Number=SeqID_2280
MGRGKPGCDLGPALSLEGVRHPRWGGERGEPGLYLPRGPAGHLFFQLLVVATILQLCGGDVLQPCRGRRTVAAQLGCNIPPSSSLSWRGRERGPAGALWSGPLFGFNSWFASLEREREREPSGGRVRPGTMVAAAEVAGGSPGARRLAGSPMWRLYIPAGTEPEFRL

SEQ ID NO: 45656 - protein, 142 aa, Zea mays
  Coding DNA Sequence Number=SeqID_2281
MGKNNKRKREPTPPSEDFGDSEYSEEEFSSESEGSPAPVSPPASSDDSDDSQGIAAEVWTYIWAVERSGLEGSDELEYSSDEEDSDGGDEDEDDDDDDDDDGDDDGSGSGRGGGDGSRGSTKGDSSKGSTKGGGGGRGRASG

SEQ ID NO: 45657 - protein, 101 aa, Zea mays
  Coding DNA Sequence Number=SeqID_2282
MKVRVAQTRHAGFRPLAYAARSTPRGSIGAPPEQGACGGQVCTRGGPGPTWRSELYIQGSGAFPWGSELTVDALEYITFSGHVAASELSTWWGQVLFAGPE

SEQ ID NO: 45658 - protein, 192 aa, Zea mays
  Coding DNA Sequence Number=SeqID_2283
MAGGRRTGDLPRQGSSAGSMRVGPERSKAGLDTCHLRTPAWVLSKGSGAFPWGSGLTVDALEYITFSGHVAASELFTWWGRVMFASPDSKGYPSFRVPTVASEPTSGEDSPDRFQSEAALNLVRGLLGWSSPAYIARIRAGAAPLGDLAFEEFVLFVSYISCGLALPISPFFLLLLEEFGLQLQHLTPHSIV

SEQ ID NO: 45659 - protein, 504 aa, Zea mays
  Coding DNA Sequence Number=SeqID_2284
MELLVKGITGESFIPESLILPQDIPVLCDDPGLRTAVLATLPTLDESGPAMAPSSLDKGKGPASSSSAPGGTRGSEEERRHRLCRTDGSLVSDPPEASEDCWWGRGGRLLGLGHAEARAPAAATATATAAAVRAVVISLPGSLESPRPQASARSGASDPPPAAAAETAPPGSHALAGGPAAAAPTSSSVAAAEEVPTALTATAASTTAMPSSPPSATAGEVPTTPTPAIEGDEGGASSSIPPPTPEETEVVFQRRLRRDLQKVYARELEASWREKKLARREEVVSQREALATKLRAKLSALDKILVKQRIQQTTAVKRLQKLQQELEGKASDVALAEEKLKARGESLDRRETDLAFREEMLTWRGELLVEHELEAEKKEKELEEQRIAAWAGEASMALVPLGMSPIPVSELPTSISNTLPVLDSTADRLRCLDQILGACLEAEGGRLYWAVIKYILTCFRSHDPVISLELVIAGPVADTEDVTPLVLLLLKLEHGIINIGIAYV

SEQ ID NO: 45660 - protein, 221 aa, Zea mays
  Coding DNA Sequence Number=SeqID_2285
MTSHGSSDDGNALSHTDGLAREGFPRILWEVLQGAGYTTPPQYAVQQFEKHRVPRCRSGWRSLDSESFGYRAEDTIEAIALHGLTTFCGFHPLELSTHPIGLFPAEREDDPMWKDRVEHAKDIWAIYPGQTAHLTIRCMNALYRLQVMRGEAMSHLMALLEATKITLDNRGELVVDFSTEMVEKDLQVEQLSNEIQELEELVGTKENTIEVLEDHLINTQQ

SEQ ID NO: 45661 - protein, 89 aa, Zea mays
  Coding DNA Sequence Number=SeqID_2286
MVSHSGYGGYKCGHCTTTVGVSEALYAKAVSPDLLTGNRWGRLMCVGTECLATSCSLEDMVAGVTWQSILPPGWTVEWDPASVEEEHEE

SEQ ID NO: 45662 - protein, 267 aa, Zea mays
  Coding DNA Sequence Number=SeqID_2287
MGCTCATLLSLPLEERGLVEGDDRRPCGGEERAWLWPTLHPQLQGCSSSALGERVRRGGACLRAGSGPLLPSVMGGVGRSPSVALSAAVCPALWLGRLWCRFRCRLPPLGRNVGRPRPGPPCAASRTGGSHNTSYAARAALVFWDGPVLVGEDGSEDLPVRFGAAAVCRRGIGGQVAAVVGTGVPSEAEVVVALLVLRSPASHLELVVPQALWSPLARSALLFETSLAQFRDLRPLFDELKPEVAVARTEAVSARIEASSAWEQVAS

SEQ ID NO: 45663 - protein, 68 aa, Zea mays
  Coding DNA Sequence Number=SeqID_2288
MESLQTVHRSHDDAIHVRGYEPPEEQVGTWNLKSQASCALDHFFLPTHVLINHNDLHRLIFMGPNRSP

SEQ ID NO: 45664 - protein, 185 aa, Zea mays
  Coding DNA Sequence Number=SeqID_2289
  Gene Ontology: Cellular component=anchored to membrane
  Homolog annotation: Hit_ID=Q06I96; Match level="QueryCoverage=30%, HitCoverage=21%, E-value=3e-16, Identity=76%"; Hit description =Fasciclin-like protein FLA10
MALGNLSSGRCSRTTRWAEFDRLSSHGRVATLAGSQYTLNLTYDMGTVRVKSGWSGPKISSSVYSTRPVAVYEACCAACSRNHNTGHDFNCLKLSLPESPMSSMEIFETGPAPSPASGKSASVKAKTQEKSSSYRVGGARCLPLVAVSSAGLTLLCDDLSFSACDCLASNLRHQFLPRQASGIRN

SEQ ID NO: 45665 - protein, 284 aa, Zea mays
  Coding DNA Sequence Number=SeqID_2290
  Gene Ontology: Mol. function=glutamate-5-semialdehyde dehydrogenase activity; Cellular component=cytoplasm; Biological process=amino acid biosynthetic process
  Homolog annotation: Hit_ID=Q0GH81; Match level="QueryCoverage=39%, HitCoverage=19%, E-value=2e-38, Identity=75%"; Hit description=P5cs
  Subcellular localization annotation: CTP_CleavageSite=30; ConfidenceScore=5.19e-01
MPKKGVSDLWSSLSATPKPRSVRGKERSVSCAERGGTFGGGAAVDVRSYNASYARLQPRPPTSRVQRARSVSAWTRPAPPPVQSQCLPTALHARPATSRSRSRSYFGSKNNLTQVAENLILEKTSCPLGVLLVIFESRPDALVQIASLAIRSGNGLLLKGGKEAMRSNKVLHKVITGAIPSNVGEKLIGLVTSREEIADLLKETLLVHKDLIKAPGLDDLLLSLKTEGVAIFGGLLHMKYCAFQKQIHSIIRLQHHLVEGVLDKESLYLKTGGYKKLEWLSEGF

SEQ ID NO: 45666 - protein, 228 aa, Zea mays
  Coding DNA Sequence Number=SeqID_2291
  Gene Ontology: Mol. function=protein binding; Cellular component =chromosome; Biological process=nucleosome assembly
  Homolog annotation: Hit_ID=A5AKG7; Match level="QueryCoverage=43%, HitCoverage=72%, E-value=2e-42, Identity=88%"; Hit description =Histone H2A
  Pfam annotation: Domain name=Histone; Domain location=123-197; Score =74.1; E_value=4.6e-19; Accession=PF00125.15; Description=Core histone H2AH2BH3H4
MPHSAAEGTLRRGGTGEDAGQGGEDEAVPNFPVRRDGRGEDRGDGRRLPLLDVVTDAPKATKFLGQIFARVILKDGISLTEGGGLLQEWNGREEPAGQHALEDSLASEDLGSMLESIRVERAKYSLMCFQFPVGRIHRQLKQMIQANGRVGATTTVYSAAILEYLTAEVLELAGNASKDLKLKRITPRHLQLAICGDEELDTLIKGTIAGGGVIPHIHKSLINKSSKE

SEQ ID NO: 45667 - protein, 82 aa, Zea mays
  Coding DNA Sequence Number=SeqID_2292
MSKPDKTFPLLILPVLPSLLNPGVGPHEFGLSDCPHILEWLYDKGVQKIYFRKFGLRPFFRSYGIRIFGPRFFWETSSKTIH

SEQ ID NO: 45668 - protein, 150 aa, Zea mays
  Coding DNA Sequence Number=SeqID_2293
MTDSPRTYVDERRSARGCDRVRGQQVSEEEQGEGQEDERGVQRRRKRWCVHDVKRPRGCAIATARVGVEAGIGRIRGGGTCSYALCQEWGGAERGRAMVTSVGATFRVEGVAFPSTVFHEQKAGPSRIGRDGIPDVTTFLMVSLLKLAFG

SEQ ID NO: 45669 - protein, 217 aa, Zea mays
  Coding DNA Sequence Number=SeqID_2294
MEPKHPITCFPRFTYDQQSSEEVKKYLNLSFSGSCSRLPSRRLTTSTEAAGGAGSAARYAEAHARAPPADARQPSRCSETATSDGNASSQLGQATAAAAAVPFASGQREEETRGVKGAKSERRWWRAVGAGGELESCRCDGFAAAARWLRGGGGASRGLQPCAASNRSQLTGASGVKWAEGFLRKRVAEKRREKLPVWLQLLLLSARSRPEAEPNRG

SEQ ID NO: 45670 - protein, 45 aa, Zea mays
  Coding DNA Sequence Number=SeqID_2295
MTIHMVKPVRCKWDFMKKLRPNGKEGEEGVEADLQEFQDFDEFED

SEQ ID NO: 45671 - protein, 785 aa, Zea mays
  Coding DNA Sequence Number=SeqID_2296
MRRTWRCGSWGVTCPRTEGQRSFDIRGSNERLNRVFELNQLPYDGYPGQDEADRRGKKPAVETGGDPALVAAASSKKRKLGTAMGRLGVSDSFARELMRTCAAPGERMSSPELRESSARMLRVTGGCWPKDIPIPCAAEEDCFTSRMVHRWRVFPYGRNIGHVVWAVMDKDRQGAARKRQATVRVHEARPKKQRGTAKAEASGGGKPPLPAKVGASAPGKAPEVTVGAGGPKLTKVVPSVSGVAEAAKAARTLPPPGKRVADFGTEINVEDYLGGSDEGPLTLVVPGAAIATAAPAPKAGGEALGAGGEVSALALVRDEAGVATRRLKGAMEALSRATEALSQVADFTSRTASGALTVALSAEVERLRTQHADAVREKSASDSKCRKLAEKVAALEKEKADLRRQLAGERREANEAIAKEQAAQAEARLARAEGNIAKELAGELQRRLTALESRAEGAEAAMRAEAERTRTQLMTAYRELGVRTGDFEVPEREAGLRCLEWVQEELQELPTVLAGLMSFTSLVTCEAAMNALSREGCRHFEALDQADEDFGRDIFEVEDPVVKESAGALYDRMWGSYGCEVVRARAEAARAQAERGERVDDFGALNSALPDPETTPAEAATRVAPGPTPEATEDAPGAPAPAAAGEDLPPKVAEGAPDAPAAAVPSAEDPAEVGAEAAAEASAEAPAAAGPSQILGLRTQPATTEFLAASTAEDGNEYGGSVSEFFDFTDSGSSVEWSEESSEGDLDYFAALDVAAAEAAPHAADAPDVPGPSTRAPTTKGGCEA

SEQ ID NO: 45672 - protein, 23 aa, Zea mays
  Coding DNA Sequence Number=SeqID_2297
MAAWIRRSRSALHDHLLRLLGFE

SEQ ID NO: 45673 - protein, 144 aa, Zea mays
  Coding DNA Sequence Number=SeqID_2298
MTVGGGCLSYGAPDSPVHTETRAVHQPRHQGRWIPTVGASVFWARLDVRCTPDMYCSMSAEQPLRFPEAGEFRRPLFLGAPDSPVNYSGVPLEIPEGGKFELESSGAPDTVRWCTGHCPVPQTRGAFGCPFAPLLNPIFDLFIG

SEQ ID NO: 45674 - protein, 50 aa, Zea mays
  Coding DNA Sequence Number=SeqID_2299
MGRRETEREGGRQPETGVREVKIPRPSCLSRAQVGRKERIQVYNGGVAEC

SEQ ID NO: 45675 - protein, 135 aa, Zea mays
  Coding DNA Sequence Number=SeqID_2300
MGKNNKRKREPTPPSEDFGDSEYSEEEFSSESEGSPAPGIAAEVWTYIRAVERSGLEGSDESEYSSDEEDSDGGDEGEDDDDDDDDGDGDGSGSGRGGGDGSRDSTKGDGSRDSTKGSSRGSTKGGGGGRGRASG

SEQ ID NO: 45676 - protein, 852 aa, Zea mays
  Coding DNA Sequence Number=SeqID_2301
MSSGRDLVEEFVEYGVWPLAHGWALGEVCPRKMPSRGGMLVQSPTFALDLHGRDPAAFVREAEDGAARIVGRYVPKTEGLRSWDIRGSNDRLNRVFELNRLPYGGYPEEDATDRRVKKPMGGTEEGPSQEAAPATKKRKLGTIMGGKGVSDNFAVELMGTCAAPGGRMSSPELRESSARMLEVTGGRWPKNLPIPWAEGEDMSTSRIARGLRIFPYGRNIHAVVSAVMNKDRHDAVQKRRAVIRLPDPRREAKRARGSAKAAAPGGSQPTPAVKPAALGSSKVSESAKAVIAGGTKPTPGEAAKVREMPSPGKRVADFGTNISVDDYFVGSGEGQIVVVPPAVATTASTVVVGVKGGAFCASGEISSAAAVKDEASSMSHRLREASQQLSQQLSQAADFADRVASGALTADVAAEVERLRAQHADAVREKSAAESKNRRLAEKVAALEADKTDLRRQLVEERREANQAIAEAQAAQAEAKLARAEGSLASQRAEKWEVRFNALRDRVDKVEASTCSEVERTLAQLVDSYRELGAWTADFEVPDQEAGLRFLEWLQEELLVLPSIIEGFMSYASLVTCEGAMNALSHQGCRHYKVFDQSDESFEREIFKAEDPVVKQSAGALFDRMWGAHGREAVRERPDRAREQMERAKDVKDVRGLVGAPPEAAEVKPVLPSNAGEGPSDALVPAVADEDPVSAPVPTVEGVQEVVAEPAVEGPTVAPVPSQMILCLSFFESDDSRSSVVWTEESSDEDLDYFAAFDVAAAEASPHVMDAEALPGPSAGRKRRRAVAKRRVSEVEGGRLRVDRAGKRELLSSLVGASVGEGELQSLFEGEELRIMLFNYREMGIIPKVEPM

SEQ ID NO: 45677 - protein, 247 aa, Zea mays
  Coding DNA Sequence Number=SeqID_2302
MGQVNMVEIKEAAEKGRDGKAEAAEKKRGATGCWGRLEESPQQMSSRSSSWVPSRFYQRAERKANGREDSEAEKQELGHGKQRRLKAQLLWDILEPDTVSKSAQSSPGGYFQNPSMPRGNPAVISRTPARHLITRPSSSNWLTRPAITRRCLQNADFVFSRPTLPLKVPTSPSSRSALPPKRRLHVQSLGITSKMLTSLSNHSALPPKRRFRIQSTGITSKNADVAFQSVGVASKTPTSRSVARHYL

SEQ ID NO: 45678 - protein, 125 aa, Zea mays
  Coding DNA Sequence Number=SeqID_2303
MGKNNKRKREPTPPSEEFGDSEYSEEEFSSESEGSPAPVPLRESSDDSDDSQGLTAEGSDESEYSSDEEDSDGGGEDEDDDDDDDDDGDGDSSGSGGGSRGSNRGGSSRGSTKGGSGGGSNRASG

SEQ ID NO: 45679 - protein, 101 aa, Zea mays
  Coding DNA Sequence Number=SeqID_2304
MDKGNTVLRWGPWRKFLSELQTVAAEEERGGGAYRRQDCSDEVVEGVGEVLRVTVMCGSSSGIVGVGRSTCAGGEARRQRGVQPNQGTIGQSNGSASFTRD

SEQ ID NO: 45680 - protein, 168 aa, Zea mays
  Coding DNA Sequence Number=SeqID_2305
MGWREMEHKGKTRLVLSRTRGVLVVGVTSVRERERMSMFVCSSLCATLPQEGPTPPFYRCKERVQVYNGGCSLCANVSGREVPKPCVHANVAVGEVLESCVRDNVAVGEVPKPCRSTAGGAAGILLTSPCFRRGAENHRRHGRTRGAIITCYRDEPDGTPVLFPRSLS

SEQ ID NO: 45681 - protein, 185 aa, Zea mays
  Coding DNA Sequence Number=SeqID_2306
  Subcellular localization annotation: CTP_CleavageSite=27; ConfidenceScore=5.26e-01
MMVLASVAATSFVILFLFSLPSCLRLRATYSRQRAWEQAPPPRIRPTPAPTLTRIVPIARPRGHFTAYAHHHFRSRRMSRSSSRPSTSSSSPTYCPHTHGLSHEPTDARRRGYKRYTTYVASRCSGLHRVLLRQRIGMPASSLPFLLYETLEVGEARDGVPDLLPMVPVRWLGIACLHGLSLTTV

SEQ ID NO: 45682 - protein, 69 aa, Zea mays
  Coding DNA Sequence Number=SeqID_2307
  Homolog annotation: Hit_ID=Q8W0Y3; Match level="QueryCoverage=95%, HitCoverage=5%, E-value=4e-07, Identity=48%"; Hit description =Putative gag protein
MGTSGHLNLNIGAKFIDQKYPKGSTFDLVGYFNIDCAGCKSKVTLLCDNESAIRIVENPIDHSRTKIQK

SEQ ID NO: 45683 - protein, 168 aa, Zea mays
  Coding DNA Sequence Number=SeqID_2308
  Homolog annotation: Hit_ID=Q6ZIQ0; Match level="QueryCoverage=22%, HitCoverage=10%, E-value=6e-07, Identity=73%"; Hit description=Arm repeat-containing protein-like protein
MGIWLPGRRRAPAPNRVARHEADGGDGVGRVSECGSDDLSFTPAAAAGIHHLLRSCAAVAGIAGIAPLLLMQIEMGFGFLYGAQSGCEREYVAHGERCSGGSANGVTEASCQICVDFERDARSACLKQGPQRRVAGHRLEKGLALAWLCDLMLAPQKSMAMQMTLLMQ

SEQ ID NO: 45684 - protein, 147 aa, Zea mays
  Coding DNA Sequence Number=SeqID_2309
MGKNNKRKREPTPPSEEFGDWEYSEEEFSSESEGSPAPIPMRESSDDSDDSQGLAAEVWTYIRAVERSGLEGSDESEYSSDEEDSDGGGEDEDGDDDDDDGGDGDGDGSGRGGGGSSKDGDGGSSRGSNQGGSTRGGSGGGSNRASG

SEQ ID NO: 45685 - protein, 44 aa, Zea mays
  Coding DNA Sequence Number=SeqID_2310
MYPPGPQYGYGQVLAAPTYHYHYDRLKQYHVPSNMPEYYHYDSS

SEQ ID NO: 45686 - protein, 418 aa, Zea mays
  Coding DNA Sequence Number=SeqID_2311
  Gene Ontology: Mol. function=protein methyltransferase activity; Cellular component=cytoplasm; Biological process=protein amino acid methylation
  Homolog annotation: Hit_ID=Q2QM99; Match level="QueryCoverage=85%, HitCoverage=83%, E-value=1e-95, Identity=56%"; Hit description =Modification methylase, HemK family protein, expressed
  Pfam annotation: Domain name=MTS; Domain location=170-405; Score= -93.4; E_value=0.092; Accession=PF05175.5; Description=Methyltransfera se small domain
  Pfam annotation: Domain name=Methyltransf_11; Domain location=189 -266; Score=2.7; E_value=0.047; Accession=PF08241.3; Description =Methyltransferase domain
  Pfam module annotation: Pfam domain module=MTS::Methyltransf_11; Domain location=170-405::189-266
  Subcellular localization annotation: CTP_CleavageSite=81; ConfidenceScore=5.33e-01
MAMLALSSRPLSSSSFLRSKPRALHLHRHLLPKPLGSASPLTPPTPRADPAPAPDADPTPLFLRPASHRVPRAALAAFRRRAAALVPPTAPHLHRHLRWLLADATGDPSAATTSSSEGPALLRAPLEDLEALWLRHVRERTPFQYVVGNEHWRDLVVAVREGVLIPRPETEAIIDMVRAVEDFADGWWADLGTGSGAIAVALARELAGQGRVFATDVSEVAIDVARLNVQRYGVQHRSAFGVPFIEESMPKDVPLAFKLAAQRCSADQIDAESMPKDAHIHLEVDVNLLRRAGDKVEIRHGSWFEPLEDLKGKLMGVISNPPYIPTDDLPGLQPEVGWHEPKLALDGGKDGLEHLLHLCEGLSSVLKPGGFFVFETNGNKQSELLVDLISTKWSCSFHNVKAVLDFADIKRFVTGYRR

SEQ ID NO: 45687 - protein, 145 aa, Zea mays
  Coding DNA Sequence Number=SeqID_2312
MGKNNKRKREPTPPSEDFGDSEYSKEEFSSESEGSPAPIPLRESSDDSDDSQGLAAMVWTYIRAVERSGLEGSDESEYSSDEEDSSEEDGVGDGEDDDDDEGGGGGDGDDGGRGGSSGGKGDDGGSSRGGSGGGGSSKGSNKASG

SEQ ID NO: 45688 - protein, 753 aa, Zea mays
  Coding DNA Sequence Number=SeqID_2313
  Gene Ontology: Mol. function=sequence-specific DNA binding; Cellular component=nucleus; Biological process=regulation of transcription, DNA-dependent
  Homolog annotation: Hit_ID=Q2QM96; Match level="QueryCoverage=98%, HitCoverage=98%, E-value=0.0, Identity=82%"; Hit description=Class III HD-Zip protein 4, putative, expressed
  Pfam annotation: Domain name=Homeobox; Domain location=21-81; Score =60.5; E_value=5.7e-15; Accession=PF00046.20; Description=Homeobox domain
  Pfam annotation: Domain name=MEKHLA; Domain location=605-753; Score =207.7; E_value=2.7e-59; Accession=PF08670.2; Description=MEKHLA domain
  Pfam annotation: Domain name=START; Domain location=172-391; Score =208.1; E_value=2.1e-59; Accession=PF01852.10; Description=START domain
  Pfam module annotation: Pfam domain module=Homeobox::MEKHLA::START; Domain location=21-81::605-753::172-391
MASSRGRLRLSPRAAAPQLDAGKYVRYTAEQVDALELAYGECPKPSSLRRQQLIRDCAVLTNVEPRQIKVWFQNRRCREKQRRESSRLQTVNRKLGAMNKLLMEENDRLQKQVSRLVFDNGYMKNRLHSPSVATTDTSCESVVTSGQHKQQQNPAVLHPPQRDANNPAGLLAIAEETLAEFMSKATGTAVNWVQMVGMKPGPDSVGIIAVSHNCSGVAARACGLVSLEPTKVAEILKDRASWYRDCRRVDILHVIPTGNGGTIELIYMQTYALTTLAEPRDFWTLRYTSGLDDGSLVICERSLTHSTGGPSGPKTPDFIRAEVLPSGYLIRPCDGGGSMIYIVDHVDLNACSVPEVLRPLYESPKILAQKMTAANVPPALLVRFLREHRSEWADPGVDAYSAASLRANPYNVPGLRAGGFMGNQVILPLARTVEHEECLEVIRLQGHGFSHDEVLMSPDMFLLQLCSGIDEDAPGACAQLVFAPIDESFADDAPLLPSGFRVIPLDAKTDVPSATRTLDLASALEVGSGGGLCALSDSGSGTRSTRSVLTIAFQFSFENHLRESVAAMARQYVRAVMAIVQRVAMAISPSRLGPHVELKHPPGSPEALALASWIGRSYRAHTGTEIRWSDTEDAAGSPLTLFWKHSDAIICCSLKPAFTLKFANSAGFDILETTVANVQDLQLEAVLDDGGQKALVAQLPKIMLQGLAYLPGGVCRSSMGRQASYEQAVAWKVVGDDGAPQCLALMFVNWTFI

SEQ ID NO: 45689 - protein, 289 aa, Zea mays
  Coding DNA Sequence Number=SeqID_2314
MAEASRKVLRPRRSQTTPPRPRGLHPAGALARTHRNEMQPRKVGPLAKKCDKSLQASTNTPFEAQGLLSGTLIRGTPKSPNLSCLDSGRRSPPRPTPGLGLNLDSGSRSPPRPTPGLGLNLDSGRRSLPRPTLGLGLNLDSGRRSLPRPTPGLGLNLDSGRRSPPRPTPRARTQPRPRTTVSASPDPPGSDSTSTSDDGLRLARPPGLGLNIDLGGAFASPDLGLGPTTSQGAIITLPLASSSYGEQDRRPIWLAPPLTEARRRQQGSDNPDSCTSTGLKRSSDSHDIT

SEQ ID NO: 45690 - protein, 524 aa, Zea mays
  Coding DNA Sequence Number=SeqID_2315
MLDAPKSKGCAPWCSCMLPAWLSALSPAGLGEDGGMLPCLRTSLMRRVLPPSEPPDRECPRRFRLAVVGGTQLRESWYLSAIARLQGFSSGSPVASSRRWSPKTVTTSSMVGRSKPGCDLCPALNFKDLHHPCWGGGRAEPELYLPHGFVGHPLLQHSGERALTGLAEGVDFDNVGLVGRERRQLQRVGLAGLAGSAPGAPSPRRAERGYLATVWGLAARTGGPPKTSRAVRVAFVFLGCLALAPVRRRRAEVGAEVVVAEEVLVTDEISTATRAPGLRLFGFDGLSSPLEWGRGRGPCRSSVCPEVITAAVWPPGAEVVVAAAGAGGGEPPGVLFPRRPSNESLGSVGLATRGFSCSVKGTLGRSAMSRSRRQRYQHGQRQSWLEKKLRRPEPGRAVHWRDRRRSRVAETMSRADVLGGQLAEATEWLVEPSARAGRGADIFLRGGDPSTVSPSEAGSDSIEGGVDAEGAAAPPIDDLFLGNRIVYPSKSYFSRKVMSEESLGSVGLAAYVYSVVFRIPLSKQ

SEQ ID NO: 45691 - protein, 39 aa, Zea mays
  Coding DNA Sequence Number=SeqID_2316
MAAAGRNWLVGVRRGLILVVDLDLRRNRSLRTYPSNREF

SEQ ID NO: 45692 - protein, 21 aa, Zea mays
  Coding DNA Sequence Number=SeqID_2317
MEIQQGLWSHKLTVKKCRISG

SEQ ID NO: 45693 - protein, 140 aa, Zea mays
  Coding DNA Sequence Number=SeqID_2318
MEEAASKVDDHAPKEDATPASVVEVDAVELEVAGILTNMKRLMRSRDRRDRRQERRERRERRRERKQASAAAEAAAAVPRVDTPLAYPRSGGDDAPTKDAADRPRDQASLGQHPAKMIVWRLKFPPGSKVIKGKLSSFIS

SEQ ID NO: 45694 - protein, 445 aa, Zea mays
  Coding DNA Sequence Number=SeqID_2319
  Subcellular localization annotation: CTP_CleavageSite=46; ConfidenceScore=5.34e-01
MALLMNDNKKTTQAVVLAVPQVLLLAPASAAMTCVQVGSALSLGIPCASATGRASALPSGCCSGVHSLSTWPPSSASLPITSTATKPTAAVPSKSPPPAQLRPGSPPAARPAPAGVPPSSLPPGARRRPEFPAARSSAELAAELAAARLAPANARPLRARDRRSPPRYGRPPPAPAPAAPAPTVARCSSDLTFSTVSWTRTRSQMDSLVTLYHGGRVEIDAYGSVTFDGSTDRDRRRSRTSRPTIVITLMNGNSRGDLNYENDQAHTNYNFRRCKLKGQWTAADYAEQESSDDEDTAFDIAARHGSQIEAAPILDRVRVSRRLRRAAARCGCRSLAGVDVQLPVPRMQQDVQPPICAVGPSTAGLSSSRSTRDTFEDVAHDDKDDDDAGAGAGAAGQVEIGPSQLQDAPTTQPSQLTPRRRRPREPYTPGTDALGAKGKGKTRRK

SEQ ID NO: 45695 - protein, 50 aa, Zea mays
  Coding DNA Sequence Number=SeqID_2320
MADKDKGKGIVISNPRISQKEIARKALDEKAKRRRRQSSAAPAHARTVRP

SEQ ID NO: 45696 - protein, 459 aa, Zea mays
  Coding DNA Sequence Number=SeqID_2321
  Subcellular localization annotation: CTP_CleavageSite=22; ConfidenceScore=5.01e-01
MQTACNRARRTRFSDSQHASIEAQAHASRNRRARCCMQATAPPLAPPPRLFGCGTNTATRGGPAHDPAAPAWRDGQYSRKAPVIRSSNGSRTRNGRPANNSPRRINSAAGQAALLAEEAGDASPSPDRERGIPRKGSFPVKEPGSEPPPTDQRFEGWPSEGFNSRLRSRGPYTHYWSEVRRPASRRAPRPPQATRAPRPLLIRGSKAGPRRVHSRLRRRARDDQGYVRYITKARAALPRARTRAQPQKTTNSASPDPRARTPPWPLPNDLRLARPRSSGSASAMEDRLDLGFGGASTSPDLGHRPATSTGSAIITLPRANSGRREQDRLRCSSDSHDITPAGCQDLSGCHIGMAFLEKVGRAGTRTGQALSWGHSLPSPAWTLVTPYCKRTRPGRGTNTKAAGFPPLSRPSPATSLPPFALAHALDPSGLGHAAHSLVGLGTPRSRNADKNVNVKGILH

SEQ ID NO: 45697 - protein, 332 aa, Zea mays
  Coding DNA Sequence Number=SeqID_2322
  Subcellular localization annotation: CTP_CleavageSite=68; ConfidenceScore=5.61e-01
MSSSSLVRRVFPPSKPPDGGYPPSFRLIVGGTQLRGSWYLSTIVRLQGFSSCSPTVSPRRWSPKMVTSSLMVGESEPGCDLGPTLSFKDVHHPRWGGGRAEPALYLPRGFAGHPLPRRSGEGALTGPAGGPDFDNAGPVDGGRCHLQRVGLVGLAPGGPSRRRAAAAPCAREGHPRCRAPLGRRSCSGVVLPLHRDGALARRPVPHSPVLRASGSSYLSSPLERRCGQGQDCSSAHPEACAAAARPSGAGVVVVVVRAGGGESLVSLLLLHRPTPMEWGCSYLRRGNQSSVCNGTLNVSVFVHCGCRGLNILVKETPWPLFDEPRLGVAISA

SEQ ID NO: 45698 - protein, 107 aa, Zea mays
  Coding DNA Sequence Number=SeqID_2323
MNAVCCRKEGESSGFLHQANDCSHPLNGGPQKPEVNPHGGITTRSKIVSFLDNELREDVFRTFGFLKPKRLFFTDQARYKKRSSTVKGLLLGPRFVAEGPAERNNFG

SEQ ID NO: 45699 - protein, 402 aa, Zea mays
  Coding DNA Sequence Number=SeqID_2324
  Subcellular localization annotation: CTP_CleavageSite=41; ConfidenceScore=5.07e-01
MGRNARGPLSWTRPHCGMTSSPVFVWCRSSEGCPYLLCPCRTSGYQRRLRARGGAFAFAPTRVFPPSEPPDGGYPPSFCLIVGGTQLRGSWYLSAIVRLQGFSSHSPVAPLRWWSPKTVTSSSWMGRGKPGCGPDPALSIEGVRHPRWGGERGEPGLYLLRGSAGHLFFQLLVVAIALQPCGGDVLQPCRGRRTVAAQLGCNIPPSPSHSRRGRQRGPAGALGSSPLFGFNSWFVSLEREREREPSGGRVHPGPWLLLQRSLAGPPTFVAPQARDSLVDCLNCFTKRESPRVKVTSEPGRPLAGLTPELTSRGLGSGWRPWKMVGRGPRGDRPSRLLGPDSRRRPWRRWPGRGDDVVLRSGDLRTASLSEARSNLAKGVIDAEGAAAPFQRQNPSLQDQIVL

SEQ ID NO: 45700 - protein, 960 aa, Zea mays
  Coding DNA Sequence Number=SeqID_2325
MCSHYYSAYPPFEVAEEDADEGALRCAAGQSSGRDLVEEFVAYGVWPLAHGWALGEVCPRQMPFHGGRVVRSPAFALNLRNRDPAAFVRDAEDGAVRLMGRYVPRTEGQRNFDIRGSNDRLNRVFELNQLPYDGYPGQDEADRRGKKPVVETGDDPAPTAAPSSKKRKLGTTMGGLGVSDSFARELMRTCAAPGERMSSPELRESSARMLRVTGGCWPRNVPIPCAVDEDCFTSRMVRQWRVFPYGRNIAAVVSAVMDKDRQGAAQKRQAAVRLHEARPKRQRGATKAAASGGGKPPLAAKSGASAPSKAPQATAGAGGSKSTKVVPPASGVAEASKAARALPLSGKRVADFGTDINVDDYLGGSDEGQLAIVAPAAAIATAAIMPKARGEALGAGGEVSALAVVRDEAGAATRRLKEVTEALSQVADFASRTASGALTAAVSAEVQRLWTQHADAFREKSASDSKCRKLTDKVAALEREKADLRRQLAGERREANEAIAKEQAAQAEAKLARAEGNLAKELAEHLQERLTALESRVKGAEVAMRAEAERTRTQLMDTYRELGARTGDFEVPDREPGLRCLEWVQEELQELPTVMGGFMSYASLVTCEGEMNALSREGCRHFKVFDQADEDFERDVYKVEDPVVKESVGALYDRMWGPHGREVVRERAETARAQAARGERVDDFGALNSALPDPEPTPAEAVSGVALEPTPETAAIATAAPTSAVAGEDLPSKVAKGAPDAPAAAVPSAEDPAAVAAETTAEAAAEPTAEAPAASGPSQVQDFGPAHATATTEFLAASTAEGGNEYGGSASAFFDFTDSGSSVEWTEESSEEDLDYFAALDVAAAEALPHAADAPDVPGPSTGRRRRRAVAKRRVSTEEGARLRVVDVPGVLQVLAVWRCEPVSAGGSFCLDYKGALSLGLQLAPGLRPSCSDEYEVPFAELPQDDRVVAPCFGLDLVFV

SEQ ID NO: 45701 - protein, 252 aa, Zea mays
  Coding DNA Sequence Number=SeqID_2326
  Gene Ontology: Mol. function=receptor activity; Cellular component =endoplasmic reticulum
  Homolog annotation: Hit_ID=A2YWP4; Match level="QueryCoverage=87%, HitCoverage=36%, E-value=9e-37, Identity=43%"; Hit description =Putative uncharacterized protein
MEVTIAEKKPRAADDGGGLVERLPEALLVEVLARVDVDGACSAAASCRSLYSAANVVLLALTSIDLSAFAPSNAILSRILAGNGAIHSLTVNCSLLDDSAASVIARGSLRDLLLLKCSFSMSFFVALGGACHDLRSLKLEMAVCPYTLYPCLAPVYVGCVHLELQGSSLCPSIPTPAIKVHSFAGPNVALSAQAATTMRIPAKEKVKLVHVIDVPGHARLKPKLDEVLPKVATVVFVVDAQDFLSSMQAAAE

SEQ ID NO: 45702 - protein, 48 aa, Zea mays
  Coding DNA Sequence Number=SeqID_2327
MGSSSLRAEWESRLVGGYEIDGFGYDYGAGEDEAVEGDFQEFQDYDEF

SEQ ID NO: 45703 - protein, 305 aa, Zea mays
  Coding DNA Sequence Number=SeqID_2328
MRSPPTRGGHNGNDLILEDLKNQRLTLMARGAYPCCDFEGVLLNIIHQPLPSHTSVRARNTPRKELQANRGRPNRRRRRYASIRRRPRIVCLRPADEQQWGSSTRIRRQASRTGDPADPCEDAGAAPLVSVRRHVSCGVEVKGRSSIRRQIYAQPICVIRASRSKPRRYWLRIRIKMSSHDAKVLQHLVLNLASSVETGAFNIRSFLEEAFRHLGDEHYLMNALLAIRKEVDLMEQDALESKARSDLEKERMEEQINLAEPVKPVPRQITFTPLPHQNCMRPVTMTRTTRTGPLGITFGTCNCGT

SEQ ID NO: 45704 - protein, 27 aa, Zea mays
  Coding DNA Sequence Number=SeqID_2329
MATNRLTALQNLDRHLKLNEIRRYRIA

SEQ ID NO: 45705 - protein, 84 aa, Zea mays
  Coding DNA Sequence Number=SeqID_2330
MANPIADSAAATVGTNGLRKQDQTYSTVDSKGIYLLHNAHATNDKVEAHSDEEDGELINNPMSFFAEKSWIKTYKAALVKHRTT

SEQ ID NO: 45706 - protein, 231 aa, Zea mays
  Coding DNA Sequence Number=SeqID_2331
  Gene Ontology: Mol. function=RNA-directed DNA polymerase activity; Biological process=RNA-dependent DNA replication
  Homolog annotation: Hit_ID=Q7XBD9; Match level="QueryCoverage=49%, HitCoverage=7%, E-value=3e-09, Identity=34%"; Hit description =Putative gag-pol
MVVIFKSKITFSPGAVFYCGTISCMADVEGTLHRIATPPEKRSSLRSPKEAAAKSRTAPATPLMARWGVITRQKKVSILNWGREAHRMTTLIPPPSKEDRKKHTTAPTPFFLDILSFRGDWSLRPSLTTNPPCWGKSLPSAMHDDKETGAETCNDTMRPENGTWLSPSLGTRLQRWGRPLMKEHIENDATPATVTVAMLRNVSGSKMNKMLGSNGRTRSSPKTCTPTSLER

SEQ ID NO: 45707 - protein, 241 aa, Zea mays
  Coding DNA Sequence Number=SeqID_2332
MELPLDAQSSGRRLDVDERVEQCRAVAGVLHVLARGEERVCSPGSACRKRTCRVGSLSVSIETKRRKRKLRHSSGLELEVDSAAPDLGGDRRVSISKMTLRASRRVSGEEEVEEEDEEDVPPLVCRNRRSKASNDVPIQALSGLVSLRGMTMSAIDHALKEIIPKGLLLELSEARGVDIRVEVPDGAPSASLLAGQEITQAVSHASSTFEGGLIGKDTLAPEVTHDGYLALEGMTEDNPTP

SEQ ID NO: 45708 - protein, 117 aa, Zea mays
  Coding DNA Sequence Number=SeqID_2333
MGLSTVERVYIRSIEHAGLGGSDDSEVEVSSEEEDSSDSEEGSDGEGDDDDDEGDDSSNEGGDGEGDSDGSSDGDNDKGGVSGAPGPYNLKQATLGVLPGALHYNSSECPVCHQTVR

SEQ ID NO: 45709 - protein, 273 aa, Zea mays
  Coding DNA Sequence Number=SeqID_2334
  Gene Ontology: Mol. function=protein transporter activity; Cellular component=nuclear pore; Biological process=protein import into nucleus, docking
  Homolog annotation: Hit_ID=A2Z8J6; Match level="QueryCoverage=80%, HitCoverage=27%, E-value=7e-89, Identity=75%"; Hit description =Putative uncharacterized protein
MGSKQQEVKRPWRTFAHCSCDLDALKKCPDHPASIDLAYGSCNNEQNPKWQPVEAALFCIQAIARSVSIEEREILPQVMSLLPCLPHHEQLLQTVCSTIGAFSKWIDAAPAELSILPPLVDILNKGMSTSEDTAAAASMAFKYICEERAGELRILYIREEMLLSKSPKNPHKPEDCRRKFSGSLDGLFQIYHIAISGVGGYKVSSEDSLHLVEALSNVKQPEVVAEAVYRYWPTLKSIFDQRAWDTRTMESICRSCKFACGNAIENALWNYYC

SEQ ID NO: 45710 - protein, 108 aa, Zea mays
  Coding DNA Sequence Number=SeqID_2335
MAETTMSSGGGGDQDRRWRRADGGRSLHVEGPRAITAGEGGPGGQILHRKNRGVKLNGTRVVDGEPTNITKIVGDVRGYENFVEMKRPKENQGTYGGDWKSGVVSNDD

SEQ ID NO: 45711 - protein, 286 aa, Zea mays
  Coding DNA Sequence Number=SeqID_2336
  Gene Ontology: Mol. function=ligase activity; Biological process =metabolic process
  Homolog annotation: Hit_ID=Q7FS85; Match level="QueryCoverage=67%, HitCoverage=68%, E-value=3e-39, Identity=50%"; Hit description =Putative 4-coumarate-CoA ligase-like protein
MAMATMEATTLTALLKEAVAAFPTRRVVVVPGRLELTHAALDALIDAAAAQLAADARFLPGHVVALSFPTPSRSRDLTRVRTRSVCTQLVVMFVAEEFEFYLPDSEPRLLVTNAEGNVAVQAGAAKLRLAHAATSLHDAADPVHLADLPVPALENGSHIGGAAGSLSPGAIALACSLYAPSAARPSARSLTPMTSPSSPIAPPPTSTWARSLPTIKEAKNRILSSTSYHRCRAKQWTCYNLLKEHRDIQVLYHDGVKDNPSTNGRLAAKSNREEGQRWIANGLGSL

SEQ ID NO: 45712 - protein, 155 aa, Zea mays
  Coding DNA Sequence Number=SeqID_2337
MEGVQLTLEQTGEGHRSTAGWQERRAMEKPTSSDVKEGRSRDGAPAEPVEGQVLEGVGQAPVGRRVDNRGPVVLRELRLSVNRRGVGLAVEHASPLQNVKSVLSLVEEETLRPMLGGDAEEVMNRDASDLASTKLRESKYEAKRLYQAYGACLRP

SEQ ID NO: 45713 - protein, 254 aa, Zea mays
  Coding DNA Sequence Number=SeqID_2338
MAHIRCIAHKSVIPFLPSRLAERPLCRTVTGQSSHLERLHSRLHEEQERQRQEQDSSPSPQQEVESRRQPSSMPQLEVPLHHHRAPQLLEETRMETTTTVTIRATTWSLRRSRSWKDGSLDPSLMTSLAIVISTTLSTPCCIGPSTDTLGPSKAYSEHYSIIERDTAKAAMQDATRRALSYMVNLVTVLNTELDHDLDESNKARAEIAELDKFLQLSRYAPEDVNNDTKRKYRSIMTERKRQEMEDQKRKIGGP

SEQ ID NO: 45714 - protein, 201 aa, Zea mays
  Coding DNA Sequence Number=SeqID_2339
MTSVALNPLRKQGNVSRIHAAPPAMLLQGSRNFSDSHEARYHTPPHYIVQLFKEHGVPRCKVWITLEPHPLQPGWRSLDSETLGFLTHDTTEAIAMLALTTFCGYHSLEMATHPIGLFPTEKGDDPMWRDQVDHAKNVWEIYPGATTRLTVRCMSALYRLQVLQRKAMSHMIGLAQDAKVTIIDREDLVVDLSTELVEKDL

SEQ ID NO: 45715 - protein, 159 aa, Zea mays
  Coding DNA Sequence Number=SeqID_2340
MWPETGSPMLAMVGTSAVTARRQPGSVEHCIVQEMVDGVTWPTTLPPGWTVEWDAAPMNSPTPASGGDTRFSSDFLSCDGFPSILWEVLNSADYPTPPLYTVQLYEEHRLGWRSLDSETIGLRTDDTVEAAAMKTLTTFCGYHLKGKCALGPFLSINGD

SEQ ID NO: 45716 - protein, 69 aa, Zea mays
  Coding DNA Sequence Number=SeqID_2341
MQAACNHTKGVHPFDSDASSLEAQAHTSCNQRAGYYVRETAPPLAPGPGKGILQKGSFSAKEAGPEPPY

SEQ ID NO: 45717 - protein, 140 aa, Zea mays
  Coding DNA Sequence Number=SeqID_2342
  Gene Ontology: Mol. function=nucleic acid binding
  Homolog annotation: Hit_ID=Q2QUK2; Match level="QueryCoverage=99%, HitCoverage=34%, E-value=3e-32, Identity=40%"; Hit description =Putative uncharacterized protein
MPILTRWKDYKDDHKYYKSFVSQLNDKARKEACTNILRSAVKNQRYRLKHKYFNGVPANEIRTTSHVFYMTDEQWRALVAKWSDPKNMEISEKNKQNRSKVKFHQATGSRCYVAHLHAYSDMQALRAEPIAEGEMPASSV

SEQ ID NO: 45718 - protein, 100 aa, Zea mays
  Coding DNA Sequence Number=SeqID_2343
MAGAGQEEEKVEHEGEEMVAGRQQGSSRGAVEQCGGQAQPAVTAPCSSKNPPDARKPYATPEGCSVHPGPPRDQRPNASPNHRVSLENDVRTSRTPPRRL

SEQ ID NO: 45719 - protein, 85 aa, Zea mays
  Coding DNA Sequence Number=SeqID_2344
  Homolog annotation: Hit_ID=Q5NKP3; Match level="QueryCoverage=100%, HitCoverage=45%, E-value=6e-21, Identity=51%"; Hit description =Putative uncharacterized protein 9C20.7
MAACTAVFDKLRRSHRLDAAPHPMTAPSRRPAHYPPEAQPATQESSVLAMSCAFNDYYIKDCGVILVPEVTQRRIDNNDHSPSSG

SEQ ID NO: 45720 - protein, 374 aa, Zea mays
  Coding DNA Sequence Number=SeqID_2345
RYFGTGGYEIDGFGYDYDAGKWYSFRLERAKMKLWKETSRSSKTTTSSRCGLAATPSWLPVKAAMARLRHTARKSVIPFLPSRLAERPLRRPVAGQSSHLERLHHRLHEEQERRRQEQQGSSFSLHQEIESVRSCSPVLPLEAPPAPSLGAPASGVAAGGDPDDGGGDDSSSHDTDLSANHEPEGWVARPITRDAARGCHFHDALDTLLRRALNRHTWSIEYRCVVYQHSRGVYPDRWEATCLVRRPENSLQGAEACSEHYSISERDSAEAAMQDAARRALSHYCSVFGGVADGLDLNTVNLTAVLNTELDHALDELSRARAEIALLRAERAERRHLDGGSPAPVGTQHPYCSPRRGHQSYGNPDCKTKITLEP

SEQ ID NO: 45721 - protein, 160 aa, Zea mays
  Coding DNA Sequence Number=SeqID_2346
MAPKRANSKAAPFIDEAAKAALLAEKKGKALADNTHQGAGEDEAHSKRQRNDQHTPEGTLRTCSSEGQPQVPPPGFTPPVGEDAAEDSEVLGVSAEEQLQLRALRLRNRNLQKQKEILEAKRQRVTVQAKLRQMIRDEEQRAQELEQEIALLQREGQHDL

SEQ ID NO: 45722 - protein, 218 aa, Zea mays
  Coding DNA Sequence Number=SeqID_2347
  Subcellular localization annotation: CTP_CleavageSite=42; ConfidenceScore=5.12e-01
MSVALSSPDTALRRRRPQNTAGVRRSKPNLQLGCYLLPNKVLHDAKSTRNRMVWFLPVGSVPMQVDRGGLRCGDVMAEQRVTAEVPVVDEQSRAPTPPPALDEVPSNPKRARVESLGSSSRRDQYVATEEDWGNQSYQVNVQRCGIENKGISYFSYLELKFILGARKLTGKRHLDQVESLGVRRLLFDNLFFSCGGCETARVSSHTIIAQQVMGNNVA

SEQ ID NO: 45723 - protein, 162 aa, Zea mays
  Coding DNA Sequence Number=SeqID_2348
  Subcellular localization annotation: CTP_CleavageSite=2; ConfidenceScore=5.22e-01
MSAALSSPDTALRRRRPQNTAGVPRSKPNLQLGCYLLSNKALHDAKSTRNRMVWFLPAGSVPMQVDRGGLRRGDVMAEQRVTAEVPVVDEQSRVPTPPPALDEVPSNPKRAWVESLGSSSRRDQYVATEEDFGPYMLVEEFVKILHEKGFILCSKVEDLQAS

SEQ ID NO: 45724 - protein, 77 aa, Zea mays
  Coding DNA Sequence Number=SeqID_2349
MGDRCDWMYEGFKKGGCHTSEWFAKTQMFLDHAVALSQIAEVEVDDGEDDVDRMDQMLEDLQPELAPVHHDSPTPEV

SEQ ID NO: 45725 - protein, 262 aa, Zea mays
  Coding DNA Sequence Number=SeqID_2350
MVTFMMMINNGDYNPDLWYFLLQGVPLGGEAGNMDDFEEFQDYDEFYSTLTLVLTMSFVDGPYQEQDQEQEDSSPLPQQEVESERHPSPAPQPEMPPVPRQGILAAGGDLDGDGDDDDAGGSSSHDIELSEEPEPEGWIARPITRDTAHGVVADGLDLKYYPCRSTGSAGGVIVSPVGEGNPRLSSMVNLVAVLNTELDHALDELGKVRAEVAELRAECAARHYLDGGSPTPVGIQHPYRSPPCGRFNCGTPDCRTRIDLDP

SEQ ID NO: 45726 - protein, 295 aa, Zea mays
  Coding DNA Sequence Number=SeqID_2351
MVSPVSCKRVIRVDVRAPFVGGRLGDQRHAQKYLRHLARRLRDAWAWAPMLACWESEKRVHLARLHAACMAAHSFHPLVWAKPGRSPPLAVTQDGDLQLDGGGKRVGLRPLPLPQPQGSSSQGLGRGVCRVEVGPRVGGGPLLHSVIGGKGSRRPWRWQLHRAWLSGASSFRAARGTGVRHGSLKRFFCRRDCQGRPRTDLQFYDLQFYGLQFGGLLAAASALRSVLPLFGPPEQKSSSSPLLEQVTARRSSVFRCSAGPPPWSGVVRTCGGGTGVPFVMAPWMPVCLFIVAVEA

SEQ ID NO: 45727 - protein, 95 aa, Zea mays
  Coding DNA Sequence Number=SeqID_2352
  Homolog annotation: Hit_ID=A0EVJ2; Match level="QueryCoverage=44%, HitCoverage=3%, E-value=3e-07, Identity=59%"; Hit description=CACTA TnpD transposase
MEENRRWMYEGWKKRGALSSEWVAKTDAFLDHAFARSETGTDVRMSKKMKSLARSLLGSRSSSRSSSRGEDSVFQGTGSTMSRRRALAEHLPPQD

SEQ ID NO: 45728 - protein, 973 aa, Zea mays
  Coding DNA Sequence Number=SeqID_2353
  Gene Ontology: Mol. function=sugar binding; Cellular component =integral to membrane; Biological process=response to stress
  Homolog annotation: Hit_ID=Q7XBE1; Match level="QueryCoverage=14%, HitCoverage=16%, E-value=5e-24, Identity=49%"; Hit description =Putative uncharacterized protein Z013I05_4
MSLDTKLILGAIAKLFDDFDARWERRLPKLLTAQEASPVISVLTPTMAVGAAVIADNWGGGFNGGEYSFELYCKAPSIVADKWGGFFGGEDTAANVEFAIDPPDDPERFVLPNVSTDEPSIDPALDRTNSGAADNSVNALVTSTDAIPADTLASFTRPEEGRAPFFHNEISGVVPALARLTYFAHRDLAALQEFEFTRSGSVVGHRSPTIRDAASRAPALDDWLLKPLAHHRLLGRAYCAEDEVFHTLPTKCSTTVLNYDAYSVPNPATSLTTSTFTRPVFNDYSSMERNSTNNGTVLVAQFVGVLRGLRATDDEDLLRMLHLNPRLRSDWSDRPMLEMNTCFQLAKGSISRWFSEPLVPSEMKLWPCKVIPGPGDKPMIVVNFKGEEKQLAAEEISFMVLLKMEDAANNFARGYYTVGKGIMLVKYCWTQWEIPWSLATLVCWCGDRLSVFIYLQKFPLSRMVAQISINREHAVLIALQSSVLLVTRMATGSEAAKPVEVVDTVFKVFNNCKSASFTAESISNHEISSFVIPVHDSASEHQVVNKRTGPEISVLAFPYNAEPMLLSSLASIALGPPTANFNTSIPASCVTVSLGAHHIFDEMTKGSWCLPQLRHQHYRPGNVWKFLHSYSSCIIDYHGTKHNNVFRRALVWCCKFSVHELLGHFEYLLLDITKEHTISCINSGGLERTFILWLSWPTPVKIFHASGELRPRSWPSLYCHQSIVAFGFDESTYTRVCQYYIYLLKSPWPPPLKQNFKYMYAKLSKIMLAMAMSLKCAHTPVVAGQMYIQRSRCMVDCFHRDQISKCWKHQFELAESAFQLNLWFEFELHGTQQKPPWLSIVYSLLFLLKLLCIQLNSPIDTLVKIKDSGSPEIPVPGLSFIWSGKALITSVLTEWVVLKHLDLLHKNYHMDYIFIFTDYTLNRAATIFRSKRRNEAIFSAIQTQLKNNHLEVQTFSIDLRASRVLRRGECQVC

SEQ ID NO: 45729 - protein, 50 aa, Zea mays
  Coding DNA Sequence Number=SeqID_2354
MAMFAALNMVCPDSWPPTVVCCALLTEATQRGKAMVTDSEGMAKDDEGPR

SEQ ID NO: 45730 - protein, 139 aa, Zea mays
  Coding DNA Sequence Number=SeqID_2355
AEYHQSVLREQLEYQRQQSEYQRQQAEYQKKRDEYYASLQAQNQALLSQLAQQAGVPMPTYGMPPPDFALPMPMLAPPPPPPPTSQFPMGFQTPPASVAAPGDGSGQDDTTHSWVNNLFNTQSPAGGGGYSNHPDDGYD

SEQ ID NO: 45731 - protein, 215 aa, Zea mays
  Coding DNA Sequence Number=SeqID_2356
MRHLWQAKQAMLHLRHDDRVKKGAPHRSISYPFPLPLSLSCHRDRERGYSERDPSPRRKRAPSPLLMRGSKVGPSEGFKSRLRALGLRAHYWSEVRRLAPWKGSTAASGHSGSAPTTDQGFVGRLPKGSIAASDAERGMTLVKAQSTQGTRSRLARAQPRARAANPGGFTSRPRAPSSNGHTFGSPEDQSSPRSNLGQIATPTDRIAGAFNARIA

SEQ ID NO: 45732 - protein, 89 aa, Zea mays
  Coding DNA Sequence Number=SeqID_2357
MGQNLVTGYASERTYMTITIDALVKKRSLRNSHRGKRKVDGETQNVSPVLQTLQNIGDKEMRKRLHNLHLFKKVSRKVIKFKEGNAGII

SEQ ID NO: 45733 - protein, 129 aa, Zea mays
  Coding DNA Sequence Number=SeqID_2358
MVRERRTQTTTMSKNTRDTRFIPRFGHTTKVPYFLVEAPPKSRVSFNPNPPFADHKGQAHTLIFAQTSGVWEVYIKVPTKAGGRWGKLAKNRLNRFVNRLNRVSTRKNSGSLTTQRRVTGTQTILRKQK

SEQ ID NO: 45734 - protein, 199 aa, Zea mays
  Coding DNA Sequence Number=SeqID_2359
MAWLRTVGGGARFASLEPERRRAKGAAEEKEQQGGGRLGFYGARKAEFKQRRPRPPFIGRARLLGNPQPDRPRRFGKPAIQQYAVHQRSHQKPPRNHFERGQRLRHLATSSAPGDFVELVPRRANVGAKAKTPPFAPGLRCSRWSDGGKAGRDTLRRTRHFDEDLRRRPHTARPHSAPRPTCDLAHCNGPRVAASVLRA

SEQ ID NO: 45735 - protein, 421 aa, Zea mays
  Coding DNA Sequence Number=SeqID_2360
  Gene Ontology: Mol. function=nucleic acid binding
  Homolog annotation: Hit_ID=Q6UU68; Match level="QueryCoverage=50%, HitCoverage=51%, E-value=1e-08, Identity=21%"; Hit description =Putative DNA-binding protein
  Pfam annotation: Domain name=zf-CCHC; Domain location=281-298; Score =22.0; E_value=0.0007; Accession=PF00098.14; Description=Zinc knuckle
  Pfam annotation: Domain name=zf-CCHC; Domain location=306-323; Score =13.9; E_value=0.012; Accession=PF00098.14; Description=Zinc knuckle
  Pfam module annotation: Pfam domain module=zf-CCHC::zf-CCHC; Domain location=281-298::306-323
MSSDSDLFVDVHDLWTRIKIKYSESNCTTSTPYVACGTNLSKGEEKRWQPNDESTSPIGLSSTSYKCLIANNDSGDKSDDEEEYEDDSEDESSSPQGTFSCIASTDNNDRENETDDVEEEEIHQFYTHLNKEDKVLLVKLLRRNKKQGETLLRLEETLIKTNDNLEKMTKEHEELKCSHDNLVQRDQLVKISSCADLYCPKKGQFLIEQQVVGSKRKLLRNKKQRLLRSRRHARLPQDIYKHVVNKLEEGGTAARVKLRDKEAPKTINMNKEKEQKEKRKRRCFKCNELGHLIASCPYKDKDEGMRRCFGCNDKDHMITACPLMKNQTRAPSRMTLTKKKDKQQASCQVEQRFSYMCGEHGHLPKVHEHKEPSIGDNRCSHSTLPKNNESHGIQGENLCIKAYLDLRGKLILSVKRVKIKD

SEQ ID NO: 45736 - protein, 376 aa, Zea mays
  Coding DNA Sequence Number=SeqID_2361
  Gene Ontology: Mol. function=ATP-dependent helicase activity; Cellular component=nucleus; Biological process=mRNA processing
  Homolog annotation: Hit_ID=A3A5W2; Match level="QueryCoverage=27%, HitCoverage=8%, E-value=1e-33, Identity=73%"; Hit description =Putative uncharacterized protein
MKLSPSKKARRRTSPCCELETHIGVGDKVLAEFITELGRDSKTVPEFDAKLKEKGADFPDYFVRTLLTIIHAILQPTASNPSSATVAEGSTGAESAKFPGLARPDDPDHARNLRLELERDADAAPPAPMRDDRDRRWDGRVLFSLSEVHHNVSVAFYYCYVVIDVSNLLFKFFDMCTVILFDSEVEGGSGSKRLKGLGIGSPDGPVSLDDVRRLEKSNVDLREQLEAHVVTIETLRAEIKTAQVQHGKRLQEVGKYITLDKFDKTARPFAILAEDFPPTAPQPLHVRFCKDIELQGGKLPGRGGGDGEQPLSRIAMERVVDDAAHQGPIPLPISHSCFYSTPRCPNDPSLPLRPSGQLRLLTERQQPPTVVFSSQQ

SEQ ID NO: 45737 - protein, 277 aa, Zea mays
  Coding DNA Sequence Number=SeqID_2362
  Gene Ontology: Mol. function=carboxyl- or carbamoyltransferase activity; Cellular component=ornithine carbamoyltransferase complex; Biological process=amino acid metabolic process
  Homolog annotation: Hit_ID=Q8SA97; Match level="QueryCoverage=37%, HitCoverage=21%, E-value=2e-09, Identity=41%"; Hit description =Ornithine carbamoyltransferase
MALPVDVAGLCPRQGDVGAPPKPRLSLSSVAEAESEPWGRARQRSFGRGQGGVRALGSGEAEFRRLPGGAEFAVFRVLARVRALGSGGAEFAVFRVLARVRALGSGGAEFAVFRVLARVRALGSGGAEFAVFRVLARVRALGSGRAEFAVAPLARPDCLSDSLCRVAPQSEWRRRRCPSVRLLYADGGYQLRIRRLDDQMTQRASDSRAATAFYSQTNPIQNESQKNNKTEASHTSFHSYSEKALGRREQPRATNLLDTKMSGLFGLWAQTVRVSRD

SEQ ID NO: 45738 - protein, 260 aa, Zea mays
  Coding DNA Sequence Number=SeqID_2363
MAATDGRGAPLSSSRVAVARGLVHAAQVAAGLAVLLCAFADLPWAAAAAAACILRVAASFLAPPRLCFLAAHVILIALATLFRRDAASSSPPSADPPGSSGDAQAQHPFLALLGPPLPPVTEAAEPSGEEEAPPDEALDGKEAAHHARTVCAQPPRRAMSEKTGGSGGAAGGTARAASAELRRAKSESGRRRQRRSAAAAAAAPVELGMDDAEAFRLAVEAFIAKQQTWFHREESLIARTADDAGGEDGTAIAGAAVAVK

SEQ ID NO: 45739 - protein, 54 aa, Zea mays
  Coding DNA Sequence Number=SeqID_2364
MPPPTCLPSPQPTCRTHARRARQPSPPIGVDIEPARLVLTRLVTVTSQIYKPLL

SEQ ID NO: 45740 - protein, 57 aa, Zea mays
  Coding DNA Sequence Number=SeqID_2365
MSENPYYASRTVRCPGADGRLAQATGHQRDLAYPPRYGRLSGYKSRIICTGRGPSDP

SEQ ID NO: 45741 - protein, 230 aa, Zea mays
  Coding DNA Sequence Number=SeqID_2366
MSGVHRTVWCNGGATATSGANSYLQGIKLAAARAEVRDAHAGAPDTLQFMSVSPYSPPSRRLSPVSCAAPSILPAPRAAPSTPPAPRATLSTTPAPHVASSTTPAPRAAPSILPTPRVAPSTPTAPRAAPSTPARFANTTLVYHRHGHATTSSPPDSGPSTSATRFAEPTVIYHRREPATPAALDVPAVHSEPSVYHPVAIHHDPGHVHPMVTRRAAGVLRPRRPADPGS

SEQ ID NO: 45742 - protein, 150 aa, Zea mays
  Coding DNA Sequence Number=SeqID_2367
  Gene Ontology: Mol. function=inositol-1,3,4-trisphosphate 5/6-kinase activity; Cellular component=intracellular; Biological process =inositol trisphosphate metabolic process
  Homolog annotation: Hit_ID=Q6J9W0; Match level="QueryCoverage=100%, HitCoverage=31%, E-value=5e-46, Identity=68%"; Hit description =Putative RNA-binding protein
MAKVTDKKKIKKKSLGTIYEEESPEPANGDDDGALALPEIGLGLSLNTNGVLKAWCGRGSAFADGNGPDLPLSPAHVVGLRLFNIDMIREHETRDQFYVIDMNYFPGKGAPSPRRAPWPLPTLVVVTEGATTSQRMSVAIPLEQSITPVL

SEQ ID NO: 45743 - protein, 126 aa, Zea mays
  Coding DNA Sequence Number=SeqID_2368
  Subcellular localization annotation: CTP_CleavageSite=61; ConfidenceScore=5.70e-01
MRAPAPAAPIPALLSRCSSPPSSAPRRLLSSSRTPAACCPPPAVVRSVSVDLLAVAGEPAVAGAPSATPCRRLILLRHGDSATGGRFTRGVQSPFFLLAIKAVLSSTNCALLLGIARPLTESVDPI

SEQ ID NO: 45744 - protein, 46 aa, Zea mays
  Coding DNA Sequence Number=SeqID_2369
MAMMGSTSEKMYLCQVRKQQIFVAFVPRWCLRKKSKTESSGGSVLL

SEQ ID NO: 45745 - protein, 104 aa, Zea mays
  Coding DNA Sequence Number=SeqID_2370
MESHDLRAERGSRLVGGNENDGFGIDSGDGKWYSFRLERVVSIATTAQEKMKRWKETSRSSKITTSSRRGLAATPSRLPVKAACIYVSFTHFDYCKDYVDVTDI

SEQ ID NO: 45746 - protein, 159 aa, Zea mays
  Coding DNA Sequence Number=SeqID_2371
MPPAPPQGITTAGGDPDGDGDNDDAGGSSSHGTELSEEPEPEGWIARPITRDAARGCHFHDVLDTLLRQAFDQHTWSIEYRCVVYQHRRGLYPDQWEATCLPVGEGNPRLNNMVNLAAVLNTELEHTLDELGKHPYHSPPRGRFDYGTQDCRTRIDLDP

SEQ ID NO: 45747 - protein, 127 aa, Zea mays
  Coding DNA Sequence Number=SeqID_2372
MEPLAKVELELSSRSSIALTLRKPFAELDPTERLRLTSVFQRMTSLPEIGKCLLQVSNMILLLRALYYDVININQHIPAYLRVKDLGCHSAEASSSILEPLRHPKVAISTTGSMKLVFGSSSFFIQI

SEQ ID NO: 45748 - protein, 169 aa, Zea mays
  Coding DNA Sequence Number=SeqID_2373
MRPSVGAQRDGGARPPERFAMGQGDTASSAEEKRGAPDLNAREVDAAIGVQGHPLPRVYGFGSVATGGPFSPWSADGGKVVGEEGDSATGIYGGDHWLISGFSCAYDPILMPRWENELRKGRRSCYRSRSWWGLLRQTARIAAEERRPAELVPHEEEEIPPWHPGPAHR

SEQ ID NO: 45749 - protein, 51 aa, Zea mays
  Coding DNA Sequence Number=SeqID_2374
MVKLESFLPTSFPACARDFKFKLGNYPNQINTEKNKNTSILDLRKFGEILT

SEQ ID NO: 45750 - protein, 158 aa, Zea mays
  Coding DNA Sequence Number=SeqID_2375
MGKSKKGSGSSPRSGDKRKCEPTPPSKDFGNSEYSEEEFSSVSEGSPAPISPPASSDDSDDSQGIVAEVWTYIRAVECSGLEGSDESEYSSDEEDSSDEEDSSDSSEEGSNDDGGDDDDDGGDGDGGGNSGRGGDGGSKGGNGGGRKGSSKGSNKASG

SEQ ID NO: 45751 - protein, 182 aa, Zea mays
  Coding DNA Sequence Number=SeqID_2376
MVHRHGPHFDWRHEPVDPSVVYASGGGKRMDVITIFESLIDMHSSTDLLTRRRSCSRRLNKQELEIMRMHEEMRQQQGFMEACNAHNQAMYQLMQQQGMTPNIPPPQQWSQFASTPAPGLGTQQFNTHPTHIPAPGDRVTPEAGGSGSDPTAGTGFVDSLFTFPPPCGGSGQSSNHPSGGYL

SEQ ID NO: 45752 - protein, 96 aa, Zea mays
  Coding DNA Sequence Number=SeqID_2377
MQGLRTSWRSALCAREPRREPGTRTGSGQRQRESGGGEMEWAAAVGVAEWERTEEERMRDGGRLAERGLRWIAGSLENACGVVGCGDVARGSMGRV

SEQ ID NO: 45753 - protein, 158 aa, Zea mays
  Coding DNA Sequence Number=SeqID_2378
MGRTEEVDISCIEDSGGVGVGLDAEAVEVAALAFLGVEGVVAVERGWGFAARGNRGVRFGIDAGCIVGADSLWMDVSSLRRGTGNRIFSVVEVSDPCLCLWSCCHRGLVMEGNLDIEGGSLLVAAGLQYCVPGAGHSLAGLSPAVKALSMFCWIAGSP

SEQ ID NO: 45754 - protein, 161 aa, Zea mays
  Coding DNA Sequence Number=SeqID_2379
  Gene Ontology: Mol. function=kinase activity; Cellular component =ornithine carbamoyltransferase complex; Biological process=amino acid metabolic process
  Homolog annotation: Hit_ID=Q6QP54; Match level="QueryCoverage=73%, HitCoverage=36%, E-value=3e-12, Identity=44%"; Hit description =Putative kinase
MALPVDVAGPRPRSGDVGAPPKSGLSLSSVAEAEPGPLAEFAVFWGLARVRALGRAERSSSSAGAEPESEPWVGRSGVHGLPGTYPESEPWVGRSGVRRLPGLSPSPSPGSGGAEFAVFRDLARIRALGRAERSSPSSGAEPESEPWVGRSGASYGAFGRA

SEQ ID NO: 45755 - protein, 233 aa, Zea mays
  Coding DNA Sequence Number=SeqID_2380
MAAAPSRSHEEPPSKPSTLLGQRPHVSVIEPVQYPICDNLPAFNIMNRGERRALNACTERVSPPSVEADSDAQMRVFRGTSGSVAVGNEETPSESVSAVLWPPRRVVGWTNEMERALDDLRHAVVIRIVSDRQEVSTTEVASAITSKLLVEVLSLVLRKLSKSSFLLVLPNAARVDDLVGRWVIIRSGAMSPFSKGWSKLVNSSGSSLPFLVDFEFKGVACPCLGSVFRGAPA

SEQ ID NO: 45756 - protein, 355 aa, Zea mays
  Coding DNA Sequence Number=SeqID_2381
MSKEGARGIVVELVAIITLEGTDQATELGGDPSEEVGEDVTKNRVHGRIECHESVANKLVVVKKDTHSECRGTERSLEGGSANGQGKREGPPGGGRRHATKSPRGRARPHEGVPEPSDEESHIRRGVRGEKAGMSATATVEKVAMAVASGSVWRPRSTRTHPSDGIPSLLGNPILRKRKLHLGRDCSDEGIQHPSILVVVDAIVPKCFPHVANLEAYPHHHDPLDLFGLGEDRPPTAGTDVPDSSLDPAVTMPDRRGRLGGITQPATTDHDYDLRSRGPAHLGITALDTIRGGRVAPPIEATISVDPGAATESTVGASVSVWLAATESIIAASVPVWAAAVCVLAWSTVDASAPI

SEQ ID NO: 45757 - protein, 262 aa, Zea mays
  Coding DNA Sequence Number=SeqID_2382
  Subcellular localization annotation: CTP_CleavageSite=30; ConfidenceScore=5.28e-01
MSSRSLMHRVFPPSKPPDGGYPPSFRLIVGGKQLRGSWYLSAIVRLQGFSSCSPAVPLRRRSPKMGWGGECAELGSAPAWGGGPLLHSVIGGKGRSSSVVPGSCTVPGSRTRVASEPLAAPASTTAAGRGSSADEIARAAHGPTSNSTAFCPSLPHEFGHGRGPLGSSIRPEVSAAVVRPPGAEVVVVAAAGAGDGAPFVGLLLLRRPSPIEWGCSYLRRWNRSSVCNGTLNASVFVHCGCRGLNMYVTLARSRVFFLIFEH

SEQ ID NO: 45758 - protein, 223 aa, Zea mays
  Coding DNA Sequence Number=SeqID_2383
  Homolog annotation: Hit_ID=Q6J9V9; Match level="QueryCoverage=42%, HitCoverage=31%, E-value=1e-11, Identity=48%"; Hit description =Putative uncharacterized protein
MQVACNRTTETHPFDFDASSMEAQAHTSSAGGGVTVDMAKSGPAVMAAAGERKQQSNRLEAHVPSRSSRGALSHGAKTTHPCSVSRTARTTAAPRTTRPVSLTSRQGKRHLWQAKRATFHLRHDDRVKKGTEKGDISKGILLREGSGPRALLLIRGSKAGPSEGLAPRKGSTAASEHSGSAPTTDQGFEGWPLEGFDSRPRARRARDDSGYVRYMAEARATLS

SEQ ID NO: 45759 - protein, 103 aa, Zea mays
  Coding DNA Sequence Number=SeqID_2384
MVTTSSMVGRSKPGCGLCPALSFKDLHHPCCGGGRAELGFHLPHGPAGHLLLQHSGERALTGLAEGANFGNAGPFGRKRRQLQRAWLAGSAGSSAASGATSHR

SEQ ID NO: 45760 - protein, 146 aa, Zea mays
  Coding DNA Sequence Number=SeqID_2385
DAGLAAARHGWGTAAEGWPWLEHDHHAPRRCRARKMASQGGMQSGHVGHNGWEPGRNAGCRAIKKTKKGCARLLTSRHSLTERARGCLLVKLRHAVLNDGLADDNFAVGTNTGRAAFRWCYNADEGRRKGKRDPRPDVERGRLLCG

SEQ ID NO: 45761 - protein, 127 aa, Zea mays
  Coding DNA Sequence Number=SeqID_2386
MGFGDTMKCTRVPELVSREMHADMKRNLKVVVLDADGEGGEQGGQQDVEGPESSSGTKYKQAKRKVVQAAMTSFVVSAPLKPSTQKASKSVSAMFCKTPEEVSERHKNKISQSILEHCTKKGSKANC

SEQ ID NO: 45762 - protein, 188 aa, Zea mays
  Coding DNA Sequence Number=SeqID_2387
  Gene Ontology: Mol. function=phosphoric diester hydrolase activity; Cellular component=nucleus; Biological process=DNA repair
  Homolog annotation: Hit_ID=Q7XHY3; Match level="QueryCoverage=50%, HitCoverage=14%, E-value=2e-31, Identity=73%"; Hit description =Putative tyrosyl-DNA phosphodiesterase
MTDRGTEQEGPKESFAADDAAVSGMPSGQKISSHDSAGSSERNNDRTHSVGPLKDMLPLTFRLMHVQGLPSWTNTSSVTIQDVIQGEVLLAVLSNYMVDIDWLLTGVKKQQIPIWKNKRQNQLEVKKDSWIVELGTCPCPYLGSGQLQMWQDDNRGKSSTVTVVLDNEDSKLARKRVARKSVTSTGCQ

SEQ ID NO: 45763 - protein, 94 aa, Zea mays
  Coding DNA Sequence Number=SeqID_2388
MACKRKRRGMSKGQIGNHHSQIEVKERGFLRSRNKDEYQGKIDGLQGTFGLISKRENLKRYEGWHSAEAVKQESFGMFAEKGTDLKMKRPFRPR

SEQ ID NO: 45764 - protein, 68 aa, Zea mays
  Coding DNA Sequence Number=SeqID_2389
MTRIADAGSMLFARRRDSVISRKRCLRPMDAILEDLLDLWVRTHTRFRCATSILSVDVDRIVVIGVIG

SEQ ID NO: 45765 - protein, 237 aa, Zea mays
  Coding DNA Sequence Number=SeqID_2390
MRQTILSKRLIAMSHRDASEQCDSKYPSETTLRHARRSTRTAHTATREHVINDAREQRATTREPYAWRERTKATELRKGSHGLRSQKILQGEGRGKKWERGGWILRGHCEREVGAFPVAGRARLGRVACRDAGLAAARHGWGTAAEGWPWLEHDHPCSASLPRKEDGIARRDAVGACGAQRLGARPQRRLPRHKENEEGCARLLTSRHSLTERARGCLLVKLRHAVLNDGLADDNLR

SEQ ID NO: 45766 - protein, 516 aa, Zea mays
  Coding DNA Sequence Number=SeqID_2391
  Gene Ontology: Mol. function=phosphoric diester hydrolase activity; Cellular component=nucleus; Biological process=DNA repair
  Homolog annotation: Hit_ID=Q7XHY3; Match level="QueryCoverage=72%, HitCoverage=60%, E-value=1e-178, Identity=75%"; Hit description =Putative tyrosyl-DNA phosphodiesterase
  Pfam annotation: Domain name=Tyr-DNA_phospho; Domain location=97-490; Score=485.7; E_value=5.6e-143; Accession=PF06087.3; Description =Tyrosyl-DNA phosphodiesterase
MKHNEFTTRTELKSLTRSIKCAETECRRLRMLKVCLGGSSMRLGVPFIAPRQLGAVGGILGSLILPSVGWRTGQSGVPPDSHCSCPVRDFLPFLAQPTVATSGCCPASIMGNKPNEKADDTLEQERSRGDQELQMLVLEIGASICIQGNRGGSIKLKPANWILHRPPLPISFGTHHSKAMLLVYPQGIRIVVHTANLIHVDWNYKSQGLWMQDFPWKDTVDMNKKTAFENDLVDYLSALKWPEFRVNLPGVGDVNINAAFFRKFDYSNSMVRLIGSVPGYHVGSNIRKWGHMKLRNVLDEIMFNKQFCKSPLIYQFSSLGSLDEKWMSEFACSLSAGKSDDGSQLGIGKPLIVWPTVEDVRCSIEGYAAGSCIPSPQKNVERDFLKKYWSRWKADHVGRCRAMPHIKTFTRYSGQNIAWFLLTSANLSKAAWGALQKNNTQLMIRSYEDGVALGKTIKTKLVTLCWKGDEEDPSIVRLPVPYQLPPQPYGTQDVPWSWDRRYTKKDVYGSVWPRYG

SEQ ID NO: 45767 - protein, 314 aa, Zea mays
  Coding DNA Sequence Number=SeqID_2392
  Homolog annotation: Hit_ID=A2XFR6; Match level="QueryCoverage=39%, HitCoverage=36%, E-value=2e-22, Identity=45%"; Hit description =Putative uncharacterized protein
MDPGTHMMVRTLQTTRINTSYAPQPRQIPVYLVVVEEAPANLPSVRVENVINLEDSSEEQLPTPTPLAESLAFAAGSSTSASSAPAFQAPAPGGDDPDDSRDGDDEDDDDEDDGEDVHINEEADYAQQDHFMGIGPVVEHYTSMFETGHFPNLLQEVLHALGAYVRPLYETRRVSEPPRACYYITRIHVRRCSRRTLWSLSHTYRQQLQNTRFRHLPQRLRGESQTNIVPGEPGEDRLNTLAGVVAGLNTDLDSATLDLYRVHLELENAHARIAALEAQLQGLDPPEAQVPVVALSPPRKRLRYGEPGSVTRLL

SEQ ID NO: 45768 - protein, 48 aa, Zea mays
  Coding DNA Sequence Number=SeqID_2393
MRLRSVLWFRILVCLIFSVLLQHGYVGSDSAASAPPIGSSSFFASSRC

SEQ ID NO: 45769 - protein, 148 aa, Zea mays
  Coding DNA Sequence Number=SeqID_2394
MAPTKVTQRKATRPQGVPRHQLAPRHEGSSRGSNDPIGDLEAIVERLTMELFHGSRERARDSRLIAELSAEVDCLQREIVERDRTIDWALHLNVPPEVAAMGAGASEAAGGGPYGELDLFGAPPSMNIADDRSPKAGSGAGAAKDADN

SEQ ID NO: 45770 - protein, 341 aa, Zea mays
  Coding DNA Sequence Number=SeqID_2395
  Homolog annotation: Hit_ID=A2YGC2; Match level="QueryCoverage=55%, HitCoverage=80%, E-value=9e-07, Identity=24%"; Hit description =Putative uncharacterized protein
MARPVAWLDASPGLERFLECLFIRTGSLDDHPGKQYNHEGDDDEDNAGFYCDYDYDYDYDYGFCLPSKTGCDISGIKTVLNAPPAPPLGVPTAGVAVGGDPDNGGDDDSSSSDSTDLLEEQEPEEWVARPITHDAARGCHFHDALDTLLRQALDRRTCSIEYRCVVFQHRRGAYPDRWEATCLVRRPEDSLQGAEVSSKHYSISKRDSAEAAMQDVARRALSHYCSVLIGVADGLDLRYYPHHPPGSTGGVIASPIGEDNPRWSSTVNLVVVLNTELDHALDELSRAHAEIAQLRAERVELRHLADGSPAPVGTEHPYLSPQHGHHAYGNPDCKTKINLGP

SEQ ID NO: 45771 - protein, 40 aa, Zea mays
  Coding DNA Sequence Number=SeqID_2396
MAGKKELAGAKEGRLAGEGFELGIKVNTLDLWPKVWNSEF

SEQ ID NO: 45772 - protein, 127 aa, Zea mays
  Coding DNA Sequence Number=SeqID_2397
MAEERAEGLTGGKTAPAEELVGGEESGLSRAQLINQTGQRASPGIKEGGRPKSGEGDLGLPVKFCRVRGLGKLHKLMAKLTERLARLGSDWSGLATVAEALAAMVGGKELAGAKEGRLADEGEHGVR

SEQ ID NO: 45773 - protein, 41 aa, Zea mays
  Coding DNA Sequence Number=SeqID_2398
MAPPRLPSAPPCGIEEPVPEDPGEQHIEVAEQELIEGKLCP

SEQ ID NO: 45774 - protein, 237 aa, Zea mays
  Coding DNA Sequence Number=SeqID_2399
MNALSREGCRHFEVFDQADEDFERDIYKVEDSIVIESAGALYDRMWGPYGREVVRERAETTRGQVQDFWPAHATATTNFLAASTVDDGNKSDGSASKFSDFGDSGSSIEWTEESSDEDLDYFAALDVAATEASPHAADAEVVPGPSTGRRRRRAVAKRRLCALAHSAMLAKALRTWSGVFVMLDWCACSRSLRGQFGVVVFAFVTLRPAAPLGNCCTDSLCGGLRFFALVALARLHP

SEQ ID NO: 45775 - protein, 108 aa, Zea mays
  Coding DNA Sequence Number=SeqID_2400
  Subcellular localization annotation: CTP_CleavageSite=43; ConfidenceScore=5.10e-01
MPIASLRTASPSLALCPRRRPVSTFPAIQLAGDRSKPPRAPPRDNEQSEVPKCVVGDLPEQPPGEGGSGLFLEYLSVPSDIDQNHSVKMRKEYDGWRRAEAMRRGASA

SEQ ID NO: 45776 - protein, 230 aa, Zea mays
  Coding DNA Sequence Number=SeqID_2401
MNVCELTLAVSHPPQVKNRYHRMRRVEDAAITTYEWGPRVDPFRGALDVLADRWDPRLGASSPQISPTEASPSNLGRHDFRVSGYITHPRHAQFSVESGHHRLIQITISALVGMKVTTAGILVGAPSFELRVRPGGSVYPGGSVRGFTAFAGPMAAAVSLVPRSLSSLRGMGKLGSMPTVQRRSTSLRIHCAPWPSHPNVPNHWMLRTVAWGRKDEDNACTVESLTSGHD

SEQ ID NO: 45777 - protein, 107 aa, Zea mays
  Coding DNA Sequence Number=SeqID_2402
  Subcellular localization annotation: CTP_CleavageSite=63; ConfidenceScore=5.03e-01
MASIHSRENADALRYNSPDCPENSAARPAPTAMPPARVRLATAKFSLRRNRKLCLAQPQGSASASASEGGLRLARPQGSASISTSGGIACSPDPGLGLRRSLRLARP

SEQ ID NO: 45778 - protein, 168 aa, Zea mays
  Coding DNA Sequence Number=SeqID_2403
  Subcellular localization annotation: CTP_CleavageSite=44; ConfidenceScore=5.16e-01
MALRILCDDGGSQPPYGSKRTSARTQQLRQLSLRQAPALLRRPRHHTSWVPKSLRLPQRHGPLREGWPRGDEDETGARLEPLAPSPAWTIVTPYCKRTRPRRETNTKAAGFPPLSRLLPATSLPPFALDLASTHLGWGTRRHSLVGLGTPRSRNADSYKIITFTYDIG

SEQ ID NO: 45779 - protein, 219 aa, Zea mays
  Coding DNA Sequence Number=SeqID_2404
  Subcellular localization annotation: CTP_CleavageSite=51; ConfidenceScore=5.27e-01
MSSRSLMHRVFPPSEPPDGGHPQSFRLVVGGTQLCGSWYLSAIVRLQGFSSVSPVASPRRWSPKTVTTSPWVGRSKPGCDLGPTLIFKDVHHPRWGGGRVEPELYLPHGFVGQPLLQHSRERALTGPARGAVFDNVGLVDGGRRQLQRVGLAGLAPGAPSCRKGGCRAARTGGPPKTSRAARAAFVFWGCPAFAPVRRLRVEVGTPLVREDLSGDLPEG

SEQ ID NO: 45780 - protein, 139 aa, Zea mays
  Coding DNA Sequence Number=SeqID_2405
MTVADAREQRARRQPSSHPIRGQRESPLSRCEDNAPVIRSSNGSRTPNGCPANYSPRRINSAAGQGPGKGDTPKGILPLEGTRLRASLLIRGSKASPPKGSTAASDRVGPTPTTGQRFEGRPPEGSHGRLRLLGLRAHY

SEQ ID NO: 45781 - protein, 265 aa, Zea mays
  Coding DNA Sequence Number=SeqID_2406
MGETAVFSPHRWRNATPWELVPFSHRSASRIFISQPGRTPPPAVTQDGDLRLDGGGKRTGLRPLPLPQPQGFSSPGLGRGVCRVEVGPRVGGSPLLHSVTGGRSGCRPRRWHLQRAWLSDASGFGATRGAGVCHGNWKRAWGGGLSSIRPEVITAAVRPPGAEVFIVAAAGAGDDEPLVGLLSLRRPTPMEWGCSYPRRREPEFRFVMALRMPGRFTKHESPRVKVTSEEFLGSVGLAVRGSSSSVKGTPRPLFDEPRPGVAISV

SEQ ID NO: 45782 - protein, 605 aa, Zea mays
  Coding DNA Sequence Number=SeqID_2407
  Gene Ontology: Mol. function=DNA binding
  Homolog annotation: Hit_ID=Q6ZK15; Match level="QueryCoverage=89%, HitCoverage=98%, E-value=1e-113, Identity=45%"; Hit description=DNA -binding protein-like
  Subcellular localization annotation: CTP_CleavageSite=46; ConfidenceScore=5.13e-01
MEVAVGRAGSLSGRNCGPAARDWRRLAGGLLVSSRDASVVLLVRVCSMGNWPVSLCSFRPMGIVKIGSREPAARSGYSCGGEDLTREDRMLLQSFPDPESLGSDQAEVDCELASSRGQMCNIPYGIYDLHGGLAEVLSLETWNSCLTEDDRLRLAAYLPDMEQQDFVTTMKELFSGDAMFFGSPVKSFFHGLSGGLYSPQVSQARELLMMFQRRRHYHFLKWYHDDMVAKFASMSNLLRSSDTSATLGEKLPISRRHVYEKRFPCVSLSSTIPPVTIKDETATVSSPMECAKLAGGPLSTHCSTRHDERAHAAKSVEMNSLESQILRPLSDPMQNCSKLPKGVLKIRTGCASVADGSEGTRHRPGPVLADQPGAQSSRICTPPLVFRHGVHGFSENPSSHTNRINSTSDSSHRTPLQREGTLEPYAPMGKIPPRVQMTVPQEHSAVYPSMTGFYQPAANHSLAYSSEAYGTRERAHMEDLLKNFGCGQNIVAHQISPDPYARAMDGLQTNGYSSSKNAESISDMLSLGTRTYPLHSSASELLETVCNHREGAPSANAVAEAEESRQFTYTYARRKPHKRSTMAERTVPPSAVDGMAIMKAKAIRL

SEQ ID NO: 45783 - protein, 57 aa, Zea mays
  Coding DNA Sequence Number=SeqID_2408
MESYDLRAERESRLMGGNEIDGLGIDSGDGCLHCNHCSREDEAMEGDFQEFQDYDEF

SEQ ID NO: 45784 - protein, 474 aa, Zea mays
  Coding DNA Sequence Number=SeqID_2409
  Gene Ontology: Mol. function=receptor activity; Cellular component =peroxisomal membrane; Biological process=protein transport
  Homolog annotation: Hit_ID=Q32Y71; Match level="QueryCoverage=97%, HitCoverage=60%, E-value=0.0, Identity=78%"; Hit description =Peroxisomal targeting signal 1 receptor long form
  Pfam annotation: Domain name=TPR_1; Domain location=243-276; Score =21.8; E_value=0.0026; Accession=PF00515.19; Description =Tetratricopeptide repeat
  Pfam annotation: Domain name=TPR_1; Domain location=277-310; Score =0.2; E_value=5; Accession=PF00515.19; Description=Tetratricopeptide repeat
  Pfam annotation: Domain name=TPR_1; Domain location=342-375; Score =31.2; E_value=3.9e-06; Accession=PF00515.19; Description =Tetratricopeptide repeat
  Pfam annotation: Domain name=TPR_1; Domain location=418-451; Score =32.4; E_value=1.7e-06; Accession=PF00515.19; Description =Tetratricopeptide repeat
  Pfam annotation: Domain name=TPR_2; Domain location=243-276; Score =28.0; E_value=3.4e-05; Accession=PF07719.8; Description =Tetratricopeptide repeat
  Pfam annotation: Domain name=TPR_2; Domain location=277-310; Score =0.0; E_value=30; Accession=PF07719.8; Description=Tetratricopeptide repeat
  Pfam annotation: Domain name=TPR_2; Domain location=342-375; Score =23.9; E_value=0.00058; Accession=PF07719.8; Description =Tetratricopeptide repeat
  Pfam annotation: Domain name=TPR_2; Domain location=418-451; Score =28.3; E_value=2.9e-05; Accession=PF07719.8; Description =Tetratricopeptide repeat
  Pfam module annotation: Pfam domain module=TPR_1::TPR_1::TPR_1::TPR _1::TPR_2::TPR_2::TPR_2::TPR_2; Domain location=243-276::277-310::342- 375::418-451::243-276::277-310::342-375::418-451
MGQAQYTEGEMHQSQMAMGQMGGVNMANLAAMEQSRMLAQTLASNNDPKFQLVYCVISEPFIVSNSKFFQFVSKMSRGELIIEDNQVKEGLASQSSGWADEFQTQYKANANSWADQFAREELSQGADKWVSEFSSQHNQGALNESWVDEFSKLNVTDEWAEEFSGGGFGESSADPWVDEFQEHLSSFKQSSGASRGVYVYSENNPYVGHPNPMQEGQELFRKGLLSEAVLALEAEVLKNPDNAEGWRLLGITHAENDDDQQAIAAMMRALEANPTNLEVLLALGVSHTNELEQGEALRYLYRWLQNHPKYGGLVPPQSTDSPYGPDVVRLFNDAAQMSPEDADVHVVLGVLYNLSREYDKAITSFKTAVQLKPQDYSLWNKLGATQANSIQSADAILAYQQMPYMAADLALDLKPNYVRAWANMGISYANQGLYEDSIRYYVRAVTMNPKADNAWQYLRISLGYALLACDLPTM

SEQ ID NO: 45785 - protein, 129 aa, Zea mays
  Coding DNA Sequence Number=SeqID_2410
MQDAARCPLSQYCLLFSGVADGLDLKYYPRRSADSAGGVIVSPVGEGNPRLSSMVNLAAVLNTEMDHTLDELGKAWAEIAELRAERTARHYQGGGSPAPIGIQHPYRSPPRGRYDYVTPDCRTQIDLEP

SEQ ID NO: 45786 - protein, 99 aa, Zea mays
  Coding DNA Sequence Number=SeqID_2411
MAGTQGGLGLMVNELRLHGEKAEKGSVPGGVAGKCASTAESAGERLGKGVVADKCAEERYWARGVSEWVRAQKEVGRVGGVAENHETWARPRRGARAGG

SEQ ID NO: 45787 - protein, 94 aa, Zea mays
  Coding DNA Sequence Number=SeqID_2412
MEANEAGSEGEEAPEELGPAPGANVTTSVMAPSPAFNDLCKYTGYHADSDEKERDRFRRGLNTKLREHLNTVRADSFNELVNLAISQEDCIVAH

SEQ ID NO: 45788 - protein, 142 aa, Zea mays
  Coding DNA Sequence Number=SeqID_2413
MNKNRNLQNGIGIQMGQIQAIEIKETAEERRNGKSKSADKKRNVNDGFVGVFCRNIDPTGDPPRIELLRRKNSDRNEMKKVGFRDNRHMVTCERQLTVGVDGGNDCDERTRSFPLGRHLNLAGRRGGSNTTREQRRPRCRKA

SEQ ID NO: 45789 - protein, 155 aa, Zea mays
  Coding DNA Sequence Number=SeqID_2414
MGKSKKGGGSSHHSGDKRKRESTPPSEDFGDLEYSEEEFSSESEGSPAPASPPASSDDSDDSQGIAAEVWTYIRAVERAGLEGPDESEYSSNEEDSSDPSEEGGGSDGGDGDDDGGDGDGGGDSGKGGDGSGMGGSGDGGGGSKGSSKGSNKASG

SEQ ID NO: 45790 - protein, 33 aa, Zea mays
  Coding DNA Sequence Number=SeqID_2415
MEQRRRAMASLERPLATAGHGAGEDKPGGEGRR

SEQ ID NO: 45791 - protein, 48 aa, Zea mays
  Coding DNA Sequence Number=SeqID_2416
MNKDVGSQNQVYRKSSPSRSHPGTEVTMPSYDFVELVNLPLNVFEGFW

SEQ ID NO: 45792 - protein, 78 aa, Zea mays
  Coding DNA Sequence Number=SeqID_2417
  Subcellular localization annotation: CTP_CleavageSite=30; ConfidenceScore=5.08e-01
MAARRLRPAPAPPSLRLGRARPSPARLPCPDAAPSPGVPALAHPRGLERFLECLSVRTCSLDDRPGKQCNHEGGMGCP

SEQ ID NO: 45793 - protein, 84 aa, Zea mays
  Coding DNA Sequence Number=SeqID_2418
MSRAFDDYYIEDCGVILAPEVTQRRIDNSDQFVILATVRGYVVCHDDGRQRDSRGVQRGACNAWHEHCRVGEEQGGARFVVDDV

SEQ ID NO: 45794 - protein, 343 aa, Zea mays
  Coding DNA Sequence Number=SeqID_2419
MEVRCQTSLCQNEDGFPKLLRACTVRLGIRSQPEYDGREFVEHGTEKYVVAIYIGSSPHHVEWSVTAAGHRFKDTCQVVARKALRALCQIYEKEVADTPLRFFPLFQRDRPVWMARMRALEGKQVLEDDPTVVYLTAYLLTLDAQYNFLAWHHRQMIARAEDAEKLNRKLHVDLTTAQARVAALESREAIAVEALKQAKDEHVQKLMEAYLVTHNQPEDPQILEGHPVSIRGEKKAWELPEGAIVLEGIPVSPKAMDKQEYPESSQDPLLEMFEPLTMKKIPAPSLEVKEEAASTPPASPPSEELQEPIPLEEEFDPVLPSQSPQEEVINISSLLTHPGDVSD

SEQ ID NO: 45795 - protein, 209 aa, Zea mays
  Coding DNA Sequence Number=SeqID_2420
  Subcellular localization annotation: CTP_CleavageSite=91; ConfidenceScore=5.19e-01
MDQRSMAARVIQTKGYDLLIAAVRYRIDGRGHSYARSNPRRSSTNGRTTNVFPTTVEQSGRARATVTATPLPARWNLNKGALTSNKTVLPVAELKANMGKGLIPRIELAGVQFTAKRGPRRRCNNGEKSTPLRSFHRPITPLYTIHTCFRTLGIASRALGEDTGDERRRRISQLEVGLDGSDPDVIVDITPQPITLNQRSKSDMYHKNK

SEQ ID NO: 45796 - protein, 226 aa, Zea mays
  Coding DNA Sequence Number=SeqID_2421
MSIILQYLVLTCGVCETARRWYPLPTSHVTHLPRDRDFPYTSTEEARQGNTTRPLQSSTSFRKPATVYRKLQRRNPLQDRHHSKILPRASPGIPCRTAITAKSSRGPSQESLAGPPSQQNPPEGLPTLTTPLLPLPLSEHEWVKEVIKGTTCLALEIPVGWTGRQLLEKSGLLAQDVQDTGNMERDGGLVSTFYRGLSVKLTGRRGILQSRPHDPKRTVWIRSRPR

SEQ ID NO: 45797 - protein, 288 aa, Zea mays
  Coding DNA Sequence Number=SeqID_2422
MVSPVSCKRVIRVDVHAPFVGGRLGAQRHTQKYLQHLARRLRDAWAWASMLARWESEKRVRLARLHAACMTARPFRPLVWAKVGGRFPAAPLHRRSPKMVTSGLMVEESEPGCGLCPSLSLKDFHHQGWGEDCSVPGFRTRVALEPLAAPASATAAGRGSSAGVIAKAGHGPTSNSTAFCPSLLHEFWHGRGPPGSSIRPEVSAAAVRPPGAEVVVVAAAGAGDGAPFVGLPLLRRPSPMEWDSPVDYLNRFTKHESPRVKVTKTPWLLFDEPKPGVAISARTEAELA

SEQ ID NO: 45798 - protein, 102 aa, Zea mays
  Coding DNA Sequence Number=SeqID_2423
MAQWFTRSTHSGRVESSGDRGLASPAKQASIPRSGSFTEDRAPADRWRDAGRTRACSGKLRARRTRGAYNLPVFHSSPKSQTYGLGREISGRQIGCVTLPTS

SEQ ID NO: 45799 - protein, 310 aa, Zea mays
  Coding DNA Sequence Number=SeqID_2424
MALPVDVAGLCPRQGDVGAPPKPRLSLSSVAEAESEPWGRARRRSFGRGQGGVRALGSGEAEFRRLPGLSPSPSPGVGRSGVRRLPGLSPSPSPGVGRSGVRRLPGLSPSPSPGVGRSGVRRLPGLSPSPSPGVGRSGVRHLPGLSPRVRALGSGGAEFAVFRVLARVRALGSGGAEFAVAPLARPDCLSDSLCRVAPQSEWRRRRCPSVRLLYADGGYQLRIRRLEGTPNYGPRQRGCTVEAGVGFIVAGAGMTRRSVARAGPSAGACSGVARARQTRGRVILPKFLRLLSTQMCKSCHKTCVRFLPCT

SEQ ID NO: 45800 - protein, 150 aa, Zea mays
  Coding DNA Sequence Number=SeqID_2425
MEAQAHTSCNRRAGCFVRATALPLAPLPRLLDCGTNTVTRGDPAHDPAAPAWRDGTGKGDTPERILPREGTRLRASLLIRGSKADPSEGFNSRLRARGLHTHYWSEVRRPAPRKGSTTASGYSGSAPTTDQGFEGWPSKGSQLPQTQSEG

SEQ ID NO: 45801 - protein, 190 aa, Zea mays
  Coding DNA Sequence Number=SeqID_2426
MGGPAEQQKTDERRAVTRSSSGDDDDFCSGGPNSGNDDLRADAAVRRPPPMPKLVRQGRAEGRRVGGRSVGGPSYLVGGRTSSSCRGRSWRRERLRSHSGPRARHAAAASATDSNRPSPRSLREGAGHRPRRGRPQLGTLPSPALVMKILEAEGGQRPQPGLLSPTIELEVTVLGDRRRRGAAGLHDENP

SEQ ID NO: 45802 - protein, 146 aa, Zea mays
  Coding DNA Sequence Number=SeqID_2427
MAGMAGIARSTRAGGCSRRRRVYRPNHGDLRVGWGWGKLDWLVYDGSGSGGRGHAAHGQTAVNWAPVRFERARKSVTDAWEGFIGAGAGQGAGWPLARRGARAGVLWQAQGASNTWSLQSARVPQLTQVANVRILAKIRRESFPGT

SEQ ID NO: 45803 - protein, 131 aa, Zea mays
  Coding DNA Sequence Number=SeqID_2428
  Subcellular localization annotation: CTP_CleavageSite=35; ConfidenceScore=5.41e-01
MTSNKMYNAQMGSQMGPQFTRPSQSGQTPNTNETQGSETGQGNSQMDMQWSMPPRGQILPPPQPDMRYWPPAPWGYPTHPMGPWGCPPWPTQPLPSPADSGSHQVTPPPHTDFADRCLNSSGAVTNNNPMS

SEQ ID NO: 45804 - protein, 367 aa, Zea mays
  Coding DNA Sequence Number=SeqID_2429
MEECLIFIILAGEEGEASQGLPSRGLASRFPLRHLGVETILQLYGGGVLQPCGGRRTAAAWPGCSIPSSAWATVAGRTGGVSQHVVRREGGTRVLGRSRSRFRGEDGSEDLPVRFGAAGARRCGVGGQVDAAVGAELVAAGEGFSADEIVSVTCAPGLWLFGFNGWFSSPVRGHEREPSSGSVRPGAIAAAAEVAGEPPGVCRLAGPPMWRSPSARSALPLKASLAQLRNPQLLCDEPEPEAAVSAWTEAESARKGASSAQEQVASQAEEVQQRRPEPGWVIRERDHLRSYAAEAVSRADVLRGQLAEATERPVEVFAWVGTLEETLAVMAQAWCRHLPSRWRSFHPCRRPRPGQIPLRADLVIRDP

SEQ ID NO: 45805 - protein, 48 aa, Zea mays
  Coding DNA Sequence Number=SeqID_2430
MESHDLRAERESRLVGGDEDDGFGCDSGNGDDEAVEGDFQEFQDYDEF

SEQ ID NO: 45806 - protein, 84 aa, Zea mays
  Coding DNA Sequence Number=SeqID_2431
  Homolog annotation: Hit_ID=Q6QP51; Match level="QueryCoverage=65%, HitCoverage=25%, E-value=3e-07, Identity=50%"; Hit description =Putative growth-regulating factor 1
  Subcellular localization annotation: CTP_CleavageSite=54; ConfidenceScore=5.58e-01
MAAMSQAPHTILGLTPDPRAQPQPRPRRMVSASPDPRARPQPRPRKESRPHPTPASASGGVSASPDLGLGPTMPQGVHHYPTPS

SEQ ID NO: 45807 - protein, 167 aa, Zea mays
  Coding DNA Sequence Number=SeqID_2432
MNVSCIVGQAQKQELARQVDLSARQVEVWFRNTHIQITHIFMLMLTHTGSWAAQTPAHRRAPRGLPPALLWHGDCSAKDDGVQDPMAEIVRLTSCNVNELEYLRAEDMKEQPYEAKRELTKDPELYCTDSVSPLLGLVPTNFCRLTTMKIALLTITIIPPDQQCAES

SEQ ID NO: 45808 - protein, 213 aa, Zea mays
  Coding DNA Sequence Number=SeqID_2433
MAESGCHLRGGPLGVELLPQPPHGVLCVLLLPTQPRRRWLLGREVEERLRARVAARGGWISRSAVGNVPMHEGILRRMRRQLPQRGGGMGITSGLCQGSMRAHGCGRVRRKKETNPGLSSQTELSRSACSLMEPWQSPSALPTASSLAPAAAPGIVCAKDPMVARWQGWRLGEGIARWDNEQSEVLECVAGDLLEQQPDEGKCPLNYYVLYTL

SEQ ID NO: 45809 - protein, 168 aa, Zea mays
  Coding DNA Sequence Number=SeqID_2434
MPPAPPQGIPAAGGDPDGDGDYDDAGGSSSHVTELSEEPESEGWIARPITRDATRGGVADGLDLKYYPRRSTGSAGGVIVSPVGEGNPRLNSMVNLAVVLNTELDHALDELGKVRAEVAELRAECAARHYLDGGSPIPIGIQHPYRSPPRGRFDYGTPDNRTRIDLDP

SEQ ID NO: 45810 - protein, 161 aa, Zea mays
  Coding DNA Sequence Number=SeqID_2435
MQSQKNALLQHQITHLQNGTRLKTYLVPLLESPGLCQPPSDSPFHTRHEAAHGCCLLAALHSALLGHWELVATELLSLDNDSPSGHVPHSGNMHDFLLALALLGCSGWLLGQEDEVPGCSDADIDFLPAGYSDGTAVATEETASGTAAASSNTGAGAGGPA

SEQ ID NO: 45811 - protein, 257 aa, Zea mays
  Coding DNA Sequence Number=SeqID_2436
  Gene Ontology: Mol. function=transferase activity
  Homolog annotation: Hit_ID=Q5N724; Match level="QueryCoverage=43%, HitCoverage=21%, E-value=3e-47, Identity=81%"; Hit description =Putative ceramide glucosyltransferase
MTLEFALDFVPEFDLHWIMYSIQILKICVDTTLIITEQMHERKGTMKRQAMMGKDTGNLLRPWYFLLGMEMGCMIYLVLALGWEVASIVRKGVIKNMRRNIVDGNSFAFLCDNIDELEHSVQENLPRVSVVMPLKGFGEHNLQNWRTQITSLYGGPLEFLFIVESKYDPAYHVVSRLITEYKMWHFNGRVAYSLTNNNILHIHYRADVPSFHTKFSERRYEQALEVIRTLKLEVIRTLKLGIRGLNSLAVLLLTALM

SEQ ID NO: 45812 - protein, 230 aa, Zea mays
  Coding DNA Sequence Number=SeqID_2437
  Gene Ontology: Mol. function=metal ion binding
  Homolog annotation: Hit_ID=Q8LR65; Match level="QueryCoverage=27%, HitCoverage=20%, E-value=2e-24, Identity=85%"; Hit description=RING zinc finger protein-like
MAHVLPRAHPHPAAAINARGPLTLLPTVAICQTTAPPPPPHPLQISPWRRARTPGRSPVTFLPHPELRPRRRSRHRQHTSHSHLARAVGFSRASGRRVRRRCLVEAIDNTPLIRINSLSDATGCETAAWTYTQPPPPPPTYTVEIVVILASAYPPCSASSSAAAGRGDLEMHSTNDAPENRSYLMNKARAFLELFFAMWFVMGNVWVFDARLGSFQRAPRLYALCVSLLA

SEQ ID NO: 45813 - protein, 93 aa, Zea mays
  Coding DNA Sequence Number=SeqID_2438
MKVHFHAVITWICFPCSWTVPLCVCVYCAATGKEIGSVTEEDGELCEYFPSPFCYIQVFRRNLAFDTRNVVFLFANSKCKRYFHNYLKPTKLA

SEQ ID NO: 45814 - protein, 152 aa, Zea mays
  Coding DNA Sequence Number=SeqID_2439
MYSKFTEICASENVYGPLPTVDLFLSVYGDMMQWKDIAESVASAELSATEYWVSGGDRPVVHKLRFAKRTEDKEHDEGDGGSGCQGLVRRDAKMVPGFCGGRTACGWQVEAQYQHTDACLTVEQDQRLVGGGRARDCGGGMDEEDRGLEAVS

SEQ ID NO: 45815 - protein, 111 aa, Zea mays
  Coding DNA Sequence Number=SeqID_2440
MQKCKRREEYGENAGASGVYQSECKNALSGAVLTDSKFIEKHGFGQDVSKLSMGINVSQIDVTFLIMITKKVKANLNVLGPRMQHRILGNTYGTRAIAKQRHMMKIQAKTP

SEQ ID NO: 45816 - protein, 46 aa, Zea mays
  Coding DNA Sequence Number=SeqID_2441
SSDPDTTHAPPAAQATTPDPPRRRPWPEFAINAHQASKRDPDGLYA

SEQ ID NO: 45817 - protein, 117 aa, Zea mays
  Coding DNA Sequence Number=SeqID_2442
MSGREVPEPCVHANVAVGEVLEPCVRDNVAIGEVPDPCRSTAGIRAQGRVRWRLLLRPRPGSGEDAIPPEAEAEAESWGRPYPGGWHSSRSGASGAVFLSGRSVKGRSDRGHFDLAD

SEQ ID NO: 45818 - protein, 72 aa, Zea mays
  Coding DNA Sequence Number=SeqID_2443
MSSMPSDDAHMYQSCNLLIPVGTFFSFLKGGRGNLDFFDGCGSLDGCGEGGSLAGGVDNGLQEDEEEKVVEP

SEQ ID NO: 45819 - protein, 155 aa, Zea mays
  Coding DNA Sequence Number=SeqID_2444
MGIYPRGTGTGKKCPPQAFVGIPVGNFFHRGDGRDPDELLNLLTSRSSPPVVVGVIDEKCLSPVYMPTWLSEKCLSPVYAITWLLEKCLSPVEAQLAGNDVSPVAQSVRAQGRARRRLLLRPRPGSGKDAIPPEAEAEAESWGRARRRPPPEAEA

SEQ ID NO: 45820 - protein, 545 aa, Zea mays
  Coding DNA Sequence Number=SeqID_2445
  Gene Ontology: Mol. function=cysteine-type peptidase activity; Biological process=proteolysis
  Homolog annotation: Hit_ID=A2X4U2; Match level="QueryCoverage=60%, HitCoverage=39%, E-value=2e-34, Identity=30%"; Hit description =Putative uncharacterized protein
  Pfam annotation: Domain name=Peptidase_C48; Domain location=34-217; Score=-13.3; E_value=0.0018; Accession=PF02902.10; Description=Ulp1 protease family, C-terminal catalytic domain
MESLFVGLSHNKPKKSVATAIVREVLSHDWLLLDYICTQGDLALIDFIKEIPCEPRVEVVLIDDAFVERKWMECLFQPSAYLGDEVFILINIRETHWYLAVIHARNMEIQVLDSLGTSQDRKDLTDSIKGLQRQIDMISQHKELKDHRWPDLQVASWPLREIDMGYAKQTDSSSCGLFLLNYIEYWTGDELSDSFTQEKMAAILLSSDLNKRRGCLLYKNEKEVDSGSPSDVEILENPTDSNKRKLLHVLDDSKVVYEDEEGPITQADLQRWFVDDWDKRAPVKVSNDGCTNDFLMVGLSTKDMPVTKADSIDVLCDYIMAIEDDTTLERTWVRNFNPFKIEISVKDLQNILTTTQDMILRCFDMAVRLLANKESRRPKEEIINNRKHYMDMRFWVLMPWKFNGCHALFVIDHVKKHATFIDFTPTQDWCKHMPYKRFAEANIMASKKYKIAYSKKRSGWAEDIFKWEHTIQTGVPIDLRGFNTSYLVLQAMAIWGNDRRLKFVGDAKTLRRNFVIDLLSYEDNSCRYAIPANIQQRLIDIAKKD

SEQ ID NO: 45821 - protein, 22 aa, Zea mays
  Coding DNA Sequence Number=SeqID_2446
MAPKRKTANSSAAERIKLISSE

SEQ ID NO: 45822 - protein, 206 aa, Zea mays
  Coding DNA Sequence Number=SeqID_2447
MMTTSLVVGRSKSGCSLCPALSFKDLHHPCWGGGRGESGPASVWAGDPLLPPSFGGERHPQALQRRRPPAMRGKANYCCRARVQLSVLHPSYGRAARGPATSRSSLRHRLHNTSYAARVVLVFWDGPVLVLVARMGVRTCRCALGQPPLAGAVLVDRWPLSSVLRWWLPLERLPTAAVVASAGETVSATCAPGLRLFGFNGWFSSP

SEQ ID NO: 45823 - protein, 77 aa, Zea mays
  Coding DNA Sequence Number=SeqID_2448
MQVACNRTAVAHPFGFVASGMEAQSHTSWTGKGDILKGILLREGSGPRALLLIRGSKAGPSEGFDSRPRAPGLRAHY

SEQ ID NO: 45824 - protein, 110 aa, Zea mays
  Coding DNA Sequence Number=SeqID_2449
MAEAIMDKVVDQLLNEAAEVVLREDYMLFLVGVEYADSLLAAGLVALVVEVDAVAKMPEIDLPKQQKLQGGYPHTLGYKASGMKHFCYFFLFLDRDMAHPGCVALVLTTE

SEQ ID NO: 45825 - protein, 98 aa, Zea mays
  Coding DNA Sequence Number=SeqID_2450
MDLDPSAEEEERRLEDHNEAKDTVCFIIRGTPPDVDAAACGRCWNWGLRLKLATFGNFRGDSAIIHRTVRCTPDSVRCAKEGRPQELVSLGFARQPLR

SEQ ID NO: 45826 - protein, 589 aa, Zea mays
  Coding DNA Sequence Number=SeqID_2451
  Gene Ontology: Mol. function=protein kinase activity; Cellular component=plastoglobule; Biological process=protein amino acid phosphorylation
  Homolog annotation: Hit_ID=Q6K6A6; Match level="QueryCoverage=99%, HitCoverage=99%, E-value=0.0, Identity=79%"; Hit description=ABC1 -like
  Subcellular localization annotation: CTP_CleavageSite=77; ConfidenceScore=5.52e-01
MEAAAAAPHLLHCGGFGRVAHLPALHRRGQFPRVRAVATEPKLSTSTSSSSRGRTRSRNDLSDTRFGEVSKEIQRVRKQMEQDEQLATLMRGLRGQNLRDEQFADDNVRLRLVEVESADNNEGLPLVYSPEIISAYWGKRPRAVATRVVQLLSVAGGFISHLVSDLINKKLKEEISTDEWAARFFEELDYVNEGENGTYFADVMKEDLPQLLDTGFFHADPHPGNMIRTPDGKLAILDFGLVTKLTDDQKYGMIEAIAHLIHRDYDAIVKDFVKLGFIPEGVNLDPILPVLAKVFDQALEGGGAKNINFQELAADLAQITFDYPFRIPPYFALIIRAIGVLEGIALVGDPEFAIVDEAYPYIAQRLLTDESPRLRSALRYTIYGKTGVFDAERFIDVMQAFENFIRAAKSGGGENLKGNMAELAELGGQPSTSLVPVFAMAVAQPEQPVKARAALAFLLSERGNFFREFILDEIVKAIDAISREQLIQIAASFGIGNAAPVFSMVPVRARALLPTITEEDRVILNNVEKVVKFLTSGTATPTVGGDVNVVSVVQELLPVLPGISSKILPDVLSRLSSRVFARIIRETFL

SEQ ID NO: 45827 - protein, 139 aa, Zea mays
  Coding DNA Sequence Number=SeqID_2452
MGKNNKHKREPTPPSEDFGDSEYSEEEFSSESEGSPAPIPLRESSDDSDDSQGLAAEVWTYIRAVERSGLEGSDESEYSSDEEDSDGGGDGEDGGGDDDDEGSGGGDGDGSGRGGSKDGGDGSRGGSGKGGGGSNRASG

SEQ ID NO: 45828 - protein, 152 aa, Zea mays
  Coding DNA Sequence Number=SeqID_2453
MRVHISGKADRAEGLLRLQDTDTSLITFREKFRQRQGEQRHPRRRFHPRRNLARPQTATQAEGSPPRRMTPAPRLGSHGQVLRKGSGPSGRLGWPLRSLSQLSPEDISPAHGLGSVTPRDSYASGIQIPHSSPSAQGNSHSVKWFRYLTGKS

SEQ ID NO: 45829 - protein, 306 aa, Zea mays
  Coding DNA Sequence Number=SeqID_2454
MKPKGCTTVVRLHASCMEWFGFFRFWSARMTCGTQPPRRRVGTLELVGGDFARVAWGYERGEPPLKRDRSPGQWTCLCTPLMHCALPPSEPPDGPGCSPSPMVIRRDDHQPCGGEKQAGLRPLPALSFKDVHHPGWGGGAPSWGLPPRGLVTRFFLWHSREKGILQLCGGGVLQPCGGRRTAAATTGGSEDLPVRFGVAATRWCGVGGQVAAVVGAEVVVAIGEAASAEAVASTDETVSATCAPDLRLFGSNGWFSSPVRGRERGPFSSSVCPEAIAAAVLPPKTEVVAALLVQRPSASHLEFVVP

SEQ ID NO: 45830 - protein, 241 aa, Zea mays
  Coding DNA Sequence Number=SeqID_2455
MAYLSKYEIRLLRLDNLLNKYEVVKSLAKDLPYTKSTRMDNMNQPTNLKRLTRTHKNTQYNPRFDNHHKGVLLLVEEPTKGRVFSNPNPPQADHKGDAIAGVKGEMNALVGSLVSQDFVGEAEVNERESVRGYTKDPPKAGSRWEKRSKNRLNRFSDRLNRFLPERSRFTNLLSRRLDRIQNRLSRGKIRLNRFSQKICNDFFDSSDCQTGQSRDGRGAVPKPVEPVLGPVEPVSRAETKF

SEQ ID NO: 45831 - protein, 273 aa, Zea mays
  Coding DNA Sequence Number=SeqID_2456
  Homolog annotation: Hit_ID=Q6J9V9; Match level="QueryCoverage=33%, HitCoverage=35%, E-value=1e-30, Identity=72%"; Hit description =Putative uncharacterized protein
MENRCTRSMQLPRGFVATGGPTWRPGPTCHVTDAPGSPFPRHKDDAPVFRSSNDLRTRNRCPANRPSHRINSLAGQATPLAVKGSGKGIFRKRILLSEENGPRALLLIRGSEVAPYGVRQPPQSTRAPSPLLIRGSKAGPSEGFDSCPRARRVRDDLGTFVTWPRLGLRSRGTLGHFRDQRERFVMESHRREAPSPRTLSNGSGKTALFAPLRLLCQPPGLGLGGSSPPRPTSASGGATSTPDLSLSLGRSRRLARPRPRTDYATGDTSLPYL

SEQ ID NO: 45832 - protein, 144 aa, Zea mays
  Coding DNA Sequence Number=SeqID_2457
MAANETLAWGFVPTPSIAAGTSISIVASDPTSDEDVPYPSLSSALEEEDHQLSLGILAPWEDRTLPFSHIDVVHVFTSQLFLQGFIESLDPWAWDTKSVDNRFEEGNDSTLGNANHRGSLWPLCEFVDGDEEETVPADGPGEGS

SEQ ID NO: 45833 - protein, 300 aa, Zea mays
  Coding DNA Sequence Number=SeqID_2458
  Subcellular localization annotation: CTP_CleavageSite=26; ConfidenceScore=5.46e-01
MACLASLVHENGSNFLNSLKKGSTLSASLKMKRLRASNYPVSFWTSLMRARGLIASIAMIFSRFTSMPRCQTRNPSNFPNETPKTHFSGFSFVRIACSLSKTRVTEGLTHGRPNVGKAFFRPLTLAMTGAVTSGSMLAPAMLSWQLDASKEMLDEQGATQCSHLLAWGLATCIPASSRSCGDRSTGEQLLATMIFLLFLATILSSGTQVARLSNPGLLCQVSCSVLGGLGTLVGQSEERADTFYIMWLFQHLLITYPLLETSGNGSIENTRYGSSYLGEVGDEGPEGFLGFLPHCMELGL

SEQ ID NO: 45834 - protein, 143 aa, Zea mays
  Coding DNA Sequence Number=SeqID_2459
MARKMSEPLQHILTKNNGQVRCYDVLYCPGGLGDGSYRWPTSRLDLSGLGSSEVGQQKLGKEWVFASELGIMLRLFPLALLGKQAKQDPIPLPHGYAACYGACSNVSVPQSAGILPLYSGLVVGDGSILNSSLDKEDIQEERA

SEQ ID NO: 45835 - protein, 97 aa, Zea mays
  Coding DNA Sequence Number=SeqID_2460
MTKQEAHQAEEFGQRTIVTDRWGLQVSRRAAGVLLDRTGDAVLGRNVGFGPDKLLVGPGAAPNSSAALQGKAGRRFYSCCCSANAAFQMGVVPADSE

SEQ ID NO: 45836 - protein, 84 aa, Zea mays
  Coding DNA Sequence Number=SeqID_2461
MSDVTNSSGVAAVMRGFIAGAPDHAKREIVTGDKAIGSGRTPSRESGDKYKEESSSSIKSHRKGDKKKKKMKKVVVGVSRQGGP

SEQ ID NO: 45837 - protein, 209 aa, Zea mays
  Coding DNA Sequence Number=SeqID_2462
  Gene Ontology: Cellular component=integral to membrane
  Homolog annotation: Hit_ID=A2WWJ1; Match level="QueryCoverage=51%, HitCoverage=22%, E-value=4e-10, Identity=41%"; Hit description =Putative uncharacterized protein
MRVLGVVPTALLIAAVAALADVGAGIMSILAASIVDASIMSIPAAMRVLGVVPAALLIAAVAALADVSVEFMLRYTGWAAGGGKEAATSYAGTMGNAFGRADAALLNVFVVLTTTGTLVVYLIIIGDVMSRSVSGGDEQPGCCRSCLVRGGGRGGSLCCSSPPSSFCCRSCSAAMSKSKVNGSCDTGCSLMSFELLYARVHISHCANAS

SEQ ID NO: 45838 - protein, 81 aa, Zea mays
  Coding DNA Sequence Number=SeqID_2463
MGSSIITRSSNQAKKRQSDHGGHLPHGEVCVIHHVRKKEEPFKPTSIHGTFNNTCNMVVKKKMAITYNHWKLVLEHLKDFV

SEQ ID NO: 45839 - protein, 96 aa, Zea mays
  Coding DNA Sequence Number=SeqID_2464
MASRGQWGIVRQGETQLVLLATKPPQPNSCMSRGRGVDSSHRVLLEGEWLLGINLGRPHLPTRVGLFEVGPPPSAEGGGMKEVMGQASPSLCFIYR

SEQ ID NO: 45840 - protein, 221 aa, Zea mays
  Coding DNA Sequence Number=SeqID_2465
  Subcellular localization annotation: CTP_CleavageSite=78; ConfidenceScore=5.05e-01
MELFSIIIQILSWLHMRSFSGLPNNQAKPWSNVVIWFSDTRSRTPGGGSQAHACGSGPLRLAQRRIPRDGTKILQRLSNTKLWALKKAKLLYMLFGPKMVRIRTTAKVITLTSSEVRQGTLPISKSMRDPSSSKPAPKMPKDKPSKPSYIEIGHSTLREKDLQSMKRLGYFTSKVNVGLPRDEETPMPGKDEVVRDRRDADAFCMVHDLHYQTKAKGQKIK

SEQ ID NO: 45841 - protein, 157 aa, Zea mays
  Coding DNA Sequence Number=SeqID_2466
NRGGRKGGGAYRRRDCSCEVVEDVGEVSGITTRGSRDAREDMGARNWSETHWRGRSTRGGGRPKSGEVDLGPLVKSGRVRGLGKLHGLLAELAEALARLEDGWSGLATVAEALATMAGGIKLAGAKGKWPAGEEIWSQEIRSVSLPKPEANPRFCRV

SEQ ID NO: 45842 - protein, 48 aa, Zea mays
  Coding DNA Sequence Number=SeqID_2467
MTWQGAPDCPVCTGLSGINRNIIELQVYLQLEGDDSTSVTQKANAKSA

SEQ ID NO: 45843 - protein, 261 aa, Zea mays
  Coding DNA Sequence Number=SeqID_2468
GARRAARARAADRRGQAGSAGRRADRWGPNGRKAGRGGNGSGLLDLRRTARVGLGLIETGPCDLGWTAGIGWPALSSPTASRGGGARSRGGEFAGDEGRGGSAGPRGDLSGRGGWGRARGTVRWGLGRGRGTGGGRSTAKRLGGGAKGLRRAIKRDRGQYKGQEGVGEVPYLKANSGDPSMATEMRRQPESTVADLGGCAENGGERGQSDSGRGRGNWSASRVADVGAELTVAEGTAGLQRRRKNGLGRRRFNGGGALACA

SEQ ID NO: 45844 - protein, 141 aa, Zea mays
  Coding DNA Sequence Number=SeqID_2469
MRASDSARASALLTHSTSHSCACRYVDPMVMTPIGARHLELEVGVVGDGHELGVAWSPQHCVVGSSEPNHLELEGFLSEVGGSPEADGQIELSKGLDALPGDDPVKGRRTGRDRGQIDLQEPEGLGVDDVEAACNTLNLGV

SEQ ID NO: 45845 - protein, 156 aa, Zea mays
  Coding DNA Sequence Number=SeqID_2470
MTPPRRGRCLPVREDLSGDLPVGRWLPSSGAEAVAAGEGFSVDETVSATRGPTSGSLALIACPHPSSGDAGEGLVTAASALRSSLLLFSRPERRSLSLLMEWAAASHLEFVVPRALRCGGYSYPQEWNRSSVCNGTLSAGVCSLRLSGPEHMCIWA

SEQ ID NO: 45846 - protein, 61 aa, Zea mays
  Coding DNA Sequence Number=SeqID_2471
MGLDVCGSLYRGWFAPWGGVRYDDDDDDNDVSSMRKWFTGKDEEGVEADLQKFHDVNEFED

SEQ ID NO: 45847 - protein, 229 aa, Zea mays
  Coding DNA Sequence Number=SeqID_2472
  Gene Ontology: Mol. function=heat shock protein binding; Cellular component=chloroplast; Biological process=protein folding
  Homolog annotation: Hit_ID=A2WJM2; Match level="QueryCoverage=35%, HitCoverage=42%, E-value=4e-31, Identity=82%"; Hit description =Putative uncharacterized protein
  Pfam annotation: Domain name=DnaJ; Domain location=72-136; Score =97.7; E_value=3.7e-26; Accession=PF00226.22; Description=DnaJ domain
  Subcellular localization annotation: CTP_CleavageSite=11; ConfidenceScore=5.13e-01
MPHLAAAAAVPAARPTEAGRVAFRRHWSTPLPEPPRLRLRLRTRARGVRREDGGGVRTEEQEQSQTQTAPRTFYELLGISSRGSPDDVRAAYRRMALMYHPDVSPPGAAAENTRRFIEVQEAYETLSDPSRRASYDRALARGVCRIGFSGRRSQSHRAYCHHQVWITDLLTCCLVGAGRQILLEKVLGRPGRRAAEEEHGRGFGREPVVGRSYAEKKGGGIISSRVAIP

SEQ ID NO: 45848 - protein, 728 aa, Zea mays
  Coding DNA Sequence Number=SeqID_2473
MPGHPTPADALLGGGTSRHHAELLLHSGDDGVSVKDLRLRRVVPPAAGSLDTFPECAAPVKPGFVEITPLEAVSAATAAAAGDFDRKLAPPRSKLVRDPRSFGYRRLLPFLNELTKNGNILSVSTRFVVWSGLYFMFLRYLSARPCLGGSDSSIGKEVFPQDTAAHSKDVLGGSDSRLADEAIGVSHCEPEAMVVNTGGDTDVKDACNNVSEEIKIAPHDLTNKPLLAGCTRSRFVHHPSSFSYKRMLPFLMENDISAQECNRVKIRKIAEERQLASNENDVSASGQHCLAASDDSSQECNRGQVETMEEEKPAKADENNVLGGRQLQPPVLEAPPPDFSVVEMQNVMQHEASASSQVPLTSFEGELTSAGDSVQAVGEHQLVASEESLDEHKRDEVKRSIHDAVKSDGGYALDSREFQLAASEVSPENSMAEVQGAAQEESLPLDGVEERSDKGDFVSTEQAQLCVTNESLAAQLQGNVEFAEVPQCQNLDPGCHDVGFGSRTKRVIPLLHRHCAQQPQDSVVSLDDQLLDDDIQMICRPDSRAVDRYLSVEEMSGCIMLTESASNKAGISRPRGAHSMEKGSLSPKKPSPKKGILKRNTRGCKGICMCLDCCTFRLHADRAFEFSRKQMKEADDIITNLLKEVASLRSLLEKPAGQYDEFYTDLWRSSNLNTQGQDQESAGINASSLQTCFSGGGGGQKQLPADVRGSKFPLQNPCRQIIADAHGS

SEQ ID NO: 45849 - protein, 139 aa, Zea mays
  Coding DNA Sequence Number=SeqID_2474
MSEEERARGVVIKLAAIVTLQSADRATKLSGYPGEEVCEGGEMAETTMPGGGGGGGDQDRGWRHAGGGGLERVERPRAITAGEKGPGGQILHRKTRGVKLNGIGVVSGESTNGKKIVSDVGSYENIVEVKRPRENRGTY

SEQ ID NO: 45850 - protein, 447 aa, Zea mays
  Coding DNA Sequence Number=SeqID_2475
  Gene Ontology: Mol. function=N-acetyltransferase activity; Biological process=metabolic process
  Homolog annotation: Hit_ID=A2X8Z2; Match level="QueryCoverage=34%, HitCoverage=95%, E-value=7e-48, Identity=63%"; Hit description =Putative uncharacterized protein
  Pfam annotation: Domain name=Acetyltransf_1; Domain location=71-153; Score=56.2; E_value=1.1e-13; Accession=PF00583.15; Description =Acetyltransferase (GNAT) family
  Pfam annotation: Domain name=Extensin_2; Domain location=114-421; Score=-137.0; E_value=0.062; Accession=PF04554.4; Description =Extensin-like region
  Pfam module annotation: Pfam domain module=Acetyltransf_1::Extensin _2; Domain location=71-153::114-421
MASTSPEPAAADETIDTIHIRRLECSDHERGFVALLSQLSPCPDLTTSVFATRFAELAAQGDDHIILVAEDPSASDRRILATGCLFVERKFLRGCGKVGHVEDVVVDAAARGRGLGLRIVRRLVEISRDAGCYKVILDCTPELRAYYAKCGFVEKATAARGFSQPCSRRRPPCPAAGAPLRRRPAPQPSASPPPPSLLPTSSRPRPPPSPACTSRRIRARPASASRRRPSFPRARPPQARAPTQLRAVSLCSHRTAHLRRLLQPPVPRAACLLPRQRRRIRPGSLLPLLRRPASSRLSSPAGRAPACAPFATAACSSLLPAAAPAALCCPPPRPLPMADLPPDAHTAGLAHPPLTAGLGAATASLAAGVASLGLPAVGQTHPMGPGRSVTDAEAPYIVDLRPLRDVSSPAHRRGSPPGFPALAAPPGTDSTLGDTLATIQAAVMASP

SEQ ID NO: 45851 - protein, 53 aa, Zea mays
  Coding DNA Sequence Number=SeqID_2476
MVGTSAVTARRQPGSVEHCTMQDLVDGVIWPTTLPPGWTVEWDVALAGEEHEE

SEQ ID NO: 45852 - protein, 237 aa, Zea mays
  Coding DNA Sequence Number=SeqID_2477
MGCTCVAFLLLLLEKRDLVGVGALQSSLGFKDFHHAARLQSPAGASRMFIIHAGEEASRVGSRLRVGSGPLLPLVFGGEGRSLSVALSVAACLAPRPKRLWCCFRCRLLPLGRSVAARPPHECRSRRARAGHVQDGSEDLPVRTGAAAVRWCGAGGQVAAVVGAGVVVAIEGVPSSSRPKATAWAGTLVEGLVVDVESGWSAQAMTSQQRARAEGFETALNESVKNCKTLAKAAEQK

SEQ ID NO: 45853 - protein, 24 aa, Zea mays
  Coding DNA Sequence Number=SeqID_2478
MAGGIKLAGAKGKGLAGEENTDEL

SEQ ID NO: 45854 - protein, 114 aa, Zea mays
  Coding DNA Sequence Number=SeqID_2479
MATTAMQAVLLYKCARKPSDPLGISPTRDARLLRRVELSSVKNAYGYLARQIFRRPLFLVTNAPVQDIGPWSAESCSNPNSCNSVGLQPAEHAHRSQRPPGTGTQPHTPHHRYF

SEQ ID NO: 45855 - protein, 162 aa, Zea mays
  Coding DNA Sequence Number=SeqID_2480
  Subcellular localization annotation: CTP_CleavageSite=56; ConfidenceScore=5.42e-01
MVAAARIALRPPPLSPFLLATPPPFVHQVTTRLGDGSRGAQQSGQDTLNESFKIAREMEAPPSARNRCITSSDSSPFRSFAFVVDEKKAAKGASEKRAWRRRHTILPLAHGVLKLSPHLAGIPGTWSYSTGYLLWDLTKTHIYLACGELFGGKRLMKPCFHV

SEQ ID NO: 45856 - protein, 105 aa, Zea mays
  Coding DNA Sequence Number=SeqID_2481
MQNVLSIRNPKPPNREACSSVSPGHENLHNSIDEAIMLKVLIKIISLYHALWRMLSGSTVGIFPSTYDLWDSLFEKWSPIAYGLLEKFMNTPATEFKVIFQNNHI

SEQ ID NO: 45857 - protein, 93 aa, Zea mays
  Coding DNA Sequence Number=SeqID_2482
MVHRTVSGAPCPYNSKPDTLGNSRVRSAIIHRIVRCATGLSATDLANHVAFITAVIPVVVLLLLGLIRAIKDDPIDASEGARGRRRSPLIGEL

SEQ ID NO: 45858 - protein, 24 aa, Zea mays
  Coding DNA Sequence Number=SeqID_2483
MTARTSTTEGGSSTLGINYTFGGV

SEQ ID NO: 45859 - protein, 58 aa, Zea mays
  Coding DNA Sequence Number=SeqID_2484
  Homolog annotation: Hit_ID=A2WKH4; Match level="QueryCoverage=91%, HitCoverage=25%, E-value=1e-07, Identity=42%"; Hit description =Putative uncharacterized protein
MAEDHAWMYHGWSRNGRHSDDWVAKTKDFVDNVFSLPLTGTVRCPCRRHENSIFLNKE

SEQ ID NO: 45860 - protein, 170 aa, Zea mays
  Coding DNA Sequence Number=SeqID_2485
MVEKGHGSRGGHPVGYPRAEEVAAEELGVGKGDTPKGILLREGSGPQAPLLIRGSKAGPSEGFNSHLIALRLHAHNWSEVRRPAPRKGSTAASGHSGSAPTTDQGFEGWPPKGSTAASDAERGMTLDPAPAKPLTASTYQPENLRLDCSPGLRPVRMREQLDRPKHYETY

SEQ ID NO: 45861 - protein, 354 aa, Zea mays
  Coding DNA Sequence Number=SeqID_2486
  Gene Ontology: Mol. function=zinc ion binding; Cellular component =nucleus; Biological process=ubiquitin-dependent protein catabolic process
  Homolog annotation: Hit_ID=Q60EU0; Match level="QueryCoverage=99%, HitCoverage=100%, E-value=1e-149, Identity=70%"; Hit description =Putative ubiquitin ligase SINAT5
  Pfam annotation: Domain name=Sina; Domain location=156-334; Score =349.2; E_value=7e-102; Accession=PF03145.7; Description=Seven in absentia protein family
MDMDRDSVECLSLPDAAMDVDNVDGHPHHGHLGLPLHPAHLPSSGAGRAFPKVNAGGGGAGPAVAGAAGAAGAGGGPPATSVHELLECPVCTNSMFPPIHQLSPLSPVVKKYAELMKGLSCENLKKKCQNGHTLCSTCKARVHNRCPTCRQELGDIRCLALEKVAESLELPSQCSFRPYNCPYAGSECAVAGDIPFLVAHLRDDHKVDMHSGCTFNHRYVKSNPREVENATWMLTVFHCFGQYFCLHFEAFQLGMAPVYMAFLRFMGDENEARNYTYSLEVGGNGRKMVWEGTPRSIRDSHRKVRDSHDGLIIQRNMALFFSGGDRKELKLRVTGRIWKEQTNPDGACIPNLCS

SEQ ID NO: 45862 - protein, 69 aa, Zea mays
  Coding DNA Sequence Number=SeqID_2487
MGTIQAKAPLKGHDPASPEPDLGQRQPTPEDSRLARGHFAAPLTDLTGIQRRLPCSDCRATRQSEVDSG

SEQ ID NO: 45863 - protein, 115 aa, Zea mays
  Coding DNA Sequence Number=SeqID_2488
  Subcellular localization annotation: CTP_CleavageSite=57; ConfidenceScore=5.12e-01
MATQAAVASPRMVAGSSAWPAHKHGVVQNHADPMAKQQGRVLPRCRWWKGSTTALLRPEERSEERGATEGLGRWRELALGNRESWSCSPGREPPPWMNDARPAMGEAVGGSSGIM

SEQ ID NO: 45864 - protein, 418 aa, Zea mays
  Coding DNA Sequence Number=SeqID_2489
MPVLPPCAGKGGDVGASRIRPCLEVVGGRRWPPGGWSGGEVLKLEAELQQHQEARRDWQRQPTGDVGGEQNELPGEEVAEGDGTSADPPGERWRTPSKQVVHHIERRLGLEAVGLAKRSHGVGGGTGVEQESTNAKRHRKLERRKGVARKRECERVTAACGENPFSRKTLPLAPISPRVHQSDPASDTGTQGHKSYSWCAGLRVLRRRTATREANCRPRYCASPSSPEATTQSLTRGAGPTSHTPWASVSEYRKSEPSLAPVLRLLGAVAEDGEGNFFQTNAAVSRRLAHGPARPSCVGATGQSAAGTDVAVGVSEGGLAVSTSANARKRCANRQSSFGPTCRLISSPEAVLGATVSTLEQGVRATHSKVPGFRDKEYPGLDQGQAGSGADTCPDHTAAGAFHHPARDFLSDKLIVKL

SEQ ID NO: 45865 - protein, 117 aa, Zea mays
  Coding DNA Sequence Number=SeqID_2490
  Homolog annotation: Hit_ID=Q6QP51; Match level="QueryCoverage=41%, HitCoverage=22%, E-value=9e-14, Identity=73%"; Hit description =Putative growth-regulating factor 1
MTVEKGHGSRGETTVTRSAITKQKRWRRGGQGARFSFSGYSLRDRERGYSERDPSPRRKRAPSPPTDQRFEGWPLGRVQQPPQSTRAPCPLLVRGSKAGPSEGFNGRLRPFGLRAHY

SEQ ID NO: 45866 - protein, 847 aa, Zea mays
  Coding DNA Sequence Number=SeqID_2491
  Gene Ontology: Mol. function=DNA-dependent ATPase activity; Cellular component=nucleus; Biological process=DNA replication initiation
  Homolog annotation: Hit_ID=Q5I285; Match level="QueryCoverage=100%, HitCoverage=100%, E-value=0.0, Identity=96%"; Hit description =Minichromosome maintenance protein
  Pfam annotation: Domain name=AAA_3; Domain location=394-535; Score= -9.5; E_value=0.0037; Accession=PF07726.2; Description=ATPase family associated with various
  Pfam annotation: Domain name=AAA_5; Domain location=394-541; Score= -5.8; E_value=0.008; Accession=PF07728.5; Description=ATPase family associated with various
  Pfam annotation: Domain name=MCM; Domain location=336-660; Score =678.1; E_value=7e-201; Accession=PF00493.14; Description=MCM235 family
  Pfam annotation: Domain name=Mg_chelatase; Domain location=361-547; Score=-138.8; E_value=0.0041; Accession=PF01078.12; Description =Magnesium chelatase, subunit ChlI
  Pfam module annotation: Pfam domain module=AAA_3::AAA_5::MCM::Mg _chelatase; Domain location=394-535::394-541::336-660::361-547
MEAFGGFFVDEKAARVENIFLEFLKRFKESDGAGEPFYEAEMEVMRSRESTTMYVDFAHVMRFNDVLQKAISEEYLRFEPYLRNACKRFALEHRAGENRAPLISDDSPNKDINIAFYNIPMLKKLRELGTAEIGKLTSVMGVVTRTSEVRPELLQGTFKCLDCGNVVKNVEQQFKYTEPIICVNATCQNRTKWALLRQESKFTDWQRVRMQETSKEIPAGSLPRSLDVILRHEIVEKARAGDTVIFTGTVVAVPDVMALTSPGERAECRREAPQRKNGGVQEGVKGLKSLGVRDLSYRLAFVANSVQVADGRREVDIRERDTDGDDSERQKFTEEEEDEVVRMRNTPDFFNKIVDSICPTVFGHQEIKRAVLLMLLGGVHKITHEGINLRGDINVCIVGDPSCAKSQFLKYTAGIVPRSVYTSGKSSSAAGLTATVAKEPETGEFCIEAGALMLADNGVCCIDEFDKMDIKDQVAIHEAMEQQTISITKAGIQATLNARTSILAAANPTGGRYDKSKPLKYNVALPPAILSRFDLVYIMIDEPDENTDYHIAHHIVRVHQKREEALAPAFSTAQLKRYISFAKSLKPQLSSEAKKVLVESYVTLRRGDSTPGTRVAYRMTVRQLEALIRLSEAIARSHLERVVLPAHVRLAVKLLKTSIISVESSEVDLSDFQDAEDGTNVPSESDAGQPAEEDAAPQQQGAENDQAADNGKKKLVITEEHFQRVTQALVMRLRQHEESVKKDVIRHLSLLLIGPRGDAGDGLAGMKQGDLIIWYVEQQNAKGAYSSTAEVKEEVKCIKAIIERLIQREGHLIVIDEGTAAAAEDGSGARRTSESRILAVNPNYVID

SEQ ID NO: 45867 - protein, 401 aa, Zea mays
  Coding DNA Sequence Number=SeqID_2492
  Gene Ontology: Mol. function=aspartic-type endopeptidase activity; Biological process=DNA integration
  Homolog annotation: Hit_ID=Q10L75; Match level="QueryCoverage=55%, HitCoverage=14%, E-value=2e-15, Identity=28%"; Hit description =Retrotransposon protein, putative, unclassified
MARTVWPPGADSPVPDRKFHFLSLCCGIINYSPVAISHIYCCGLGDLRKKLVSRFKSKRPCADDADYNPATDSEAQSSAGGIISMDTEDVPHAHPDYPIDITGWTYPKRRFSMDEYCSRRTVNQYDLPSDTNIQFFHTQLQFDVFWGTLMDTNFHKHQSWSDGFQNLRHVVSITLWARGQTSVRWVKPFLATAEIDIDEQSITWMTGIKRNSATFAEFATANSLDYDTISAGIDLYTEDNFEEFVQFYEPARLGIPRRFGETPGLRHDPAIINKIARVTVLPRSGDKSKIRDKFWNIIHHIMNGENLAYAPYIMALIKAKTIFEGRCEIAHTPFRPFKNAIGYLIMPLTPFPDDEEEASDDEGVAPEADAAEQMPPPPPPPQPQQFWQPGLGYFDPYFQNL

SEQ ID NO: 45868 - protein, 233 aa, Zea mays
  Coding DNA Sequence Number=SeqID_2493
MKLIKTRKMIRVKDRHTQESTKRYNEITPVEDALRDSDLLAMQEEINNFTRNEEKNNWKCLGSSSQDSAQSGCTGLSGGAPDSVRCARLARANWALSGIHRRRTAIIHRTVWCAPDCPVSQRSAGPTVGCAICARHVAEPTVRKEHRTVRCAPDSVRCANGSQAPTVGFARKGNKSAPDSVWCAPDCPVRQAIEGKICLPGMLSMAPSCLGAIKGTPRRMEEYTKHPLSIPKH

SEQ ID NO: 45869 - protein, 24 aa, Zea mays
  Coding DNA Sequence Number=SeqID_2494
MAAPRLLPRRRALVDVVGENITHN

SEQ ID NO: 45870 - protein, 41 aa, Zea mays
  Coding DNA Sequence Number=SeqID_2495
  Subcellular localization annotation: CTP_CleavageSite=18; ConfidenceScore=5.12e-01
MPTVSNSIFATVSFTHPRAVRRSRSEPASPPSPTGFRNITL

SEQ ID NO: 45871 - protein, 196 aa, Zea mays
  Coding DNA Sequence Number=SeqID_2496
  Homolog annotation: Hit_ID=Q6J9V9; Match level="QueryCoverage=66%, HitCoverage=45%, E-value=2e-57, Identity=84%"; Hit description =Putative uncharacterized protein
MQEAYNRTTVVHPFGFVASDGPPWRPGPTCHVTGAPGKRHLRQEKRAPFHLRHDGRVKKGNGKGDIPKRILPSEGNGPRALLLIRGSKVAPSGVRQPPQSTQAPSPLLIRGSKAGPSEGFNSHPRARRVRDDPGYVRYMAEARATLPRYPRTFPRPAGTILYGIPPEGGIEPWDPIEWVRVRQITCRYFWSAPLGH

SEQ ID NO: 45872 - protein, 287 aa, Zea mays
  Coding DNA Sequence Number=SeqID_2497
MSLFLASVDGRDLGNRGGASTGHGEAIPTDNLMNGRSELGQCLTEAVASIASCVPSWAFVSAPESVENRAPGVLAVGGAAVRNVGRRHGRCVPLSVAVGGRRQGTYRWILDEGWSTPGDYVHARVLVPLKPGCDRSEHDEGLPNAMVQRPAESIAHMAAQGPQMTLGELPEGTPSRPKAWQKVEMASDMATCSASFCPTAWASALQFLTASSRAVSNPADSRTTFFRRKKKNGDKNKVTERAKHTFGPVTLLNEQSPHQKACGITNSRWLAGDHYTSSSTTTSVSGG

SEQ ID NO: 45873 - protein, 44 aa, Zea mays
  Coding DNA Sequence Number=SeqID_2498
MDLFGPIAYISIGGRKLTNPRDFKDILKMGSKRVRIENQKDKKR

SEQ ID NO: 45874 - protein, 118 aa, Zea mays
  Coding DNA Sequence Number=SeqID_2499
  Subcellular localization annotation: CTP_CleavageSite=32; ConfidenceScore=5.24e-01
MPNDISLSDFVLNRPPTRGVPAPGGATPWPPCARPLGPAVPAPVRGLCLRQHGPSARFLRASQRGSRGLGAACAASRPHSPNAFPRGDKDDGYDYAYGNGEDEVVEEDFQEFQEYDEF

SEQ ID NO: 45875 - protein, 312 aa, Zea mays
  Coding DNA Sequence Number=SeqID_2500
  Gene Ontology: Mol. function=kinase activity; Cellular component =ornithine carbamoyltransferase complex; Biological process=amino acid metabolic process
  Homolog annotation: Hit_ID=Q6QP54; Match level="QueryCoverage=43%, HitCoverage=47%, E-value=8e-26, Identity=51%"; Hit description =Putative kinase
MEPGGGTAVGAVESLLTSSCFRKGAESRRRHRVCGAPSSPIWRSEPDGTPVLSPWPESARGRVMMVPPVDVAGLRPRLGDVEAPPKPRSSLSSVAEVESEPPGRARRRPSAEVRALGRAERSSSSSGAEPKSEPWVGRSGVRRLPGLSPSPSPGSGGAEFAIFRGLARVRALGQAERSFLWCLRPGLTACQPHSIKWHHSRSSAGGAVSQSGRSVERRSDGGHFGSVGWGVRVRIKALGHLCIKRSCDLVGRCGDLVRVASWRRQGLGRAGNTFAAGGGPRARRRSSGLYADGGYQLRIRSLEGTPNYGPRQ

SEQ ID NO: 45876 - protein, 137 aa, Zea mays
  Coding DNA Sequence Number=SeqID_2501
MTVFGERRWSFLVACAERERGREGLAEGASERGKVGERSAGLKRGEDVRRWPENARSWARPRRGTWGGEVGDGLTGGLRGTERESGHVGAKKGVDRTGPRGNRRERGSARADADRRDPPMRHQGRAGARLGLLGRLG

SEQ ID NO: 45877 - protein, 84 aa, Zea mays
  Coding DNA Sequence Number=SeqID_2502
MVVQGASLAEVQGKAASQTPPPAEARGKSPTAAAPAPSIGAPAPRAGDDAVSPGDCTDLAPCDAVDAPSGEKAKRGSLTYVQCA

SEQ ID NO: 45878 - protein, 83 aa, Zea mays
  Coding DNA Sequence Number=SeqID_2503
MVLAVVVLLGVVAVLVVVLLLQPRAPYVAVRAASLYALVYGQTGALDNVLVTVLPVLRARQGRPPAGLLTAANITDTNVDERL

SEQ ID NO: 45879 - protein, 195 aa, Zea mays
  Coding DNA Sequence Number=SeqID_2504
MVALHRELARLAARSVARLPAGAGLGGSGTAEEAEMTAALMDVAAASAAASAAVFSAVASVRPTVALHQERATVALHRELARLAARSIARLPAGAGLGGSGTAEEAEMAAALMDVAAASAAASAAVFLAVASVSAAASSCSNKKAPTTFVAAAFAKKPETPMTADVAQEKHEELERCIDECESGSEVVFRSIVRK

SEQ ID NO: 45880 - protein, 307 aa, Zea mays
  Coding DNA Sequence Number=SeqID_2505
  Gene Ontology: Mol. function=oxidoreductase activity; Cellular component=cytosol; Biological process=metabolic process
  Homolog annotation: Hit_ID=Q6H7C9; Match level="QueryCoverage=92%, HitCoverage=92%, E-value=2e-76, Identity=49%"; Hit description=Short- chain dehydrogenase/reductase protein-like
  Pfam annotation: Domain name=KR; Domain location=12-159; Score=-72.6; E_value=0.004; Accession=PF08659.1; Description=KR domain
  Pfam annotation: Domain name=adh_short; Domain location=11-161; Score= 35.5; E_value=5.7e-08; Accession=PF00106.16; Description=short chain dehydrogenase
  Pfam module annotation: Pfam domain module=KR::adh_short; Domain location=12-159::11-161
MTIVTQPYMFRVAVVTGGNKGIGLEVCRQLASRGVAVILTARDEKKGTEAVATLRGSGLPDVQFHRLDVSNPTGTARLAEFIKEKFGRLDILLVGKNAMERLQWLVQHSTESYEEARECLKINYFGTKYVTEALLPILISSSDGRLINVSSNYGLLQALILRWNGTTIFVIQFFVFVFQHFSGEDLKQELNDIDNLTVERLDEMPELFLKDYRSGQLKSHGWPADSEYLAYKVSKALTNGYTRILAKAHPELRINCVHPGFCKTDINFDTGEYTAEDGASCIVAVALLPEGGPTGVFFFRREEVPFV

SEQ ID NO: 45881 - protein, 187 aa, Zea mays
  Coding DNA Sequence Number=SeqID_2506
  Subcellular localization annotation: CTP_CleavageSite=33; ConfidenceScore=5.10e-01
MQDAAWRALSHYCSVLSGVADGLNLKYYPRRPSGSTGGVIVSPVGEDNPRLSSTVNLATVLNTELDHALDELSRARAEIALLRAERAERHHLDHGSPAPVGTQHPCQKTGRGGRRAQQAAQQDEVPQQQQLPPPPPMSIEQMFLMQTQAVQAIGKTLAAIQQQQQQQPPPYPQMPQMPRDKRAEFMR

SEQ ID NO: 45882 - protein, 245 aa, Zea mays
  Coding DNA Sequence Number=SeqID_2507
PPSGSVSHGYNVAESGCLLQAETHSALLGHWGLTAAGLPSSDIASPSGIAIHIGNMLYFQPELVLPDCSASLRGQEDEVPTDSASGTDLLLTDCSGDSNIGAEDTAFGTAAAEVDAGSARTTETCGNMVLTKATSEFFLGDGVGVGMGGEIRLPPRLSCSSQQTGKILDFLPVITLSESYRWLELPESASGTSARWTSGAGAAVAVAEVPHPAELPAEHAFLLCLFSDICRMQPHIRTDLANLAA

SEQ ID NO: 45883 - protein, 125 aa, Zea mays
  Coding DNA Sequence Number=SeqID_2508
MVGGGTRTRRGRGRGRRSTRRTEEEVQQDNAVQQQVEQQAAIDAAQQDDDDVAQQDDDDDAAQQDISGSGSSGLDGFGECRGSRPQPQWAFSGLLCKEHFPGTCRVRRSDEPSLHFDHYTVAPMQ

SEQ ID NO: 45884 - protein, 75 aa, Zea mays
  Coding DNA Sequence Number=SeqID_2509
MGAILAKAPLKGHDPASPEPDLGQRQPTPEDSRLVQGSPQATDAPSTRPRLGSGKQRRLPRSDCRATRQIKVDSG

SEQ ID NO: 45885 - protein, 151 aa, Zea mays
  Coding DNA Sequence Number=SeqID_2510
MAPKRATSKVAASIDDAAKAALLAEKKGKALADNNPQEAFEDDTINSKRQRQDNPTPDGTARTCSSKVDDHIVIHYAINGLWASVLYSHCIKDPPKHLRELYQVFEKYARSEELPPRKVESHRKPKDPPQSSRIWVRSAQSDFGRDNRNQQ

SEQ ID NO: 45886 - protein, 235 aa, Zea mays
  Coding DNA Sequence Number=SeqID_2511
MLRQGARFGPTCRLASSPEVGPGAIVGTLKLGYPLLLYKSTVPHAATLSRVVKELYVGPGHDSPQPRATTLGQQQRLTPPNGRVRGRHASKFGPGPPRARTGPLEWGPDPPYGVRAAHSGVQGFQDRTRRPDAATRPIARGVSQRAEPDIKPLGYTSAPPTAASAVRGGVGGLSSCVGTAGGGMLALGEAGFALAHTIFASRLGSANLANAWRFRGASWRSFSITIDTTAATFPP

SEQ ID NO: 45887 - protein, 115 aa, Zea mays
  Coding DNA Sequence Number=SeqID_2512
  Homolog annotation: Hit_ID=A2XKA5; Match level="QueryCoverage=52%, HitCoverage=54%, E-value=2e-13, Identity=60%"; Hit description =Putative uncharacterized protein
  Pfam annotation: Domain name=Auxin_inducible; Domain location=1-68; Score=8.6; E_value=4.9e-06; Accession=PF02519.5; Description=Auxin responsive protein
MPRGYVPMRLVGGSKEQQRILVPVALLKEPRMVELLEMAERLYGYGQPGVLRIPCDARRFQHYSKTIIFRRSYYVRRPYRQPSDIRLIIVYRSVNKRNLGVTRFGPTLLSSDACE

SEQ ID NO: 45888 - protein, 51 aa, Zea mays
  Coding DNA Sequence Number=SeqID_2513
MDDDDNNSRYLRTINDELVELGQLPNDVDNMGDAAAALFGVDSTRNVGSHW

SEQ ID NO: 45889 - protein, 347 aa, Zea mays
  Coding DNA Sequence Number=SeqID_2514
  Homolog annotation: Hit_ID=Q6BTJ4; Match level="QueryCoverage=55%, HitCoverage=32%, E-value=3e-09, Identity=29%"; Hit description =Similar to CA1621|CaIFF6 Candida albicans CaIFF6 unknown function
MVASRTACPVALTPRRDRRRLWQEKRATLRLRHNDRIRKGTEKGDTPKRIRLREGNRLRASLLIRGSKAGPSKGFNSRLRALGFCAHYWSEVRRPAPQKGSTAASGHSGSAPTTDQGGNDLVTESHQREASSPRTPSKGDRVRQITRSSLETPCSAPSEGNMALSPPPPCGKATQGRSAPEDGELRSARPQGSDSGSVPEDDELRSARPQGSDSGLAQEDGELRSARPQGSDSGSAPEDDKLRSARPQGSDSGSGPKNDELRFARPQGSDSALASADGLRLARPGGSDLTSASEDRLDHDLGEASTSPNPGHGPTTSTGGAIIILPQADSGYGEQDRRPIWLAPPDK

SEQ ID NO: 45890 - protein, 62 aa, Zea mays
  Coding DNA Sequence Number=SeqID_2515
  Subcellular localization annotation: CTP_CleavageSite=33; ConfidenceScore=5.51e-01
MTLGQNQCKNQSLHYGPSGGKASTVRDHARTVRSVKNRKTRRGGPSGPEARTVRVWQNWNNG

SEQ ID NO: 45891 - protein, 168 aa, Zea mays
  Coding DNA Sequence Number=SeqID_2516
  Subcellular localization annotation: CTP_CleavageSite=37; ConfidenceScore=5.09e-01
VGQPEPRHHLGSLLPDGVPPGSEIQAPSAIFRRPCVRADRPAPGRGPSGRQAGNPSSSTRPRTVRPLAADSPPLRREYHRASHQAADRPAPRADRPPLCRGHRHATPRLLLSFTDTAAPALDELYRRSGDQPETEQQADEEDEEVEVVENATVSSVVVHPDLTLMLEA

SEQ ID NO: 45892 - protein, 189 aa, Zea mays
  Coding DNA Sequence Number=SeqID_2517
MCTLEIGKDVCDDFGKENAEAKVDPQSEEDENLDSWGEGEGNDNLKLTPSYFRYHIREACCSRLLLALAAVHGHGTDSVGDHRAAAPLVAAVRRAGTARARAAATTSAGEGGGGPARGPAQGVPAAAGAAQVEPTTMEISTTHGFLRRRRRPQPRRAGPVARDRPEATRRARPGRLQATAQLIILNSYS

SEQ ID NO: 45893 - protein, 298 aa, Zea mays
  Coding DNA Sequence Number=SeqID_2518
MHVVGDFLKRRVMPLQNRSRLCYWFTGPNDIDRIQCGPGTDLSWEELELLVKGITGLRTVVLAMLPTLDDSGVAVRQTGGRDPLRGIQIPGVSAGRPQLAGLAPYAGPIVAPSSLDKSKGAASSASTPGSSRGSEEERRRRLRRADGSLVSDPLEASKDCWWGHGVGIYWEQSQLKRDRKEYKKDLQKVYARELEVHQREKKVAKREEALSQREALTIELRAKLNALDQTLEVQRVQQVKAVERLQQWQEELEGKASDAALTEENLKAKGESLDRQETDLARWETDLAFREEMLTRRG

SEQ ID NO: 45894 - protein, 243 aa, Zea mays
  Coding DNA Sequence Number=SeqID_2519
MTTSLVVGRSKPGCGLCPALSFKDLHHLGWEGGQGELGPTSAWVDDPPLPPAFGGEGHPPAVRRRRTPAMRGKANCCCRDRVQLSVLHPGDGRAARGPATSRSSLRRRLHNTSHATRANLRPLCDELEPEAAVLAWTEAESARKEASSAQEQVASQAEEVQQRWLELGQVIRERDQPRSHAAEAVSRAEVLGGQLAVATERPAEVSARAGTLPGTLAMRAQARCWRPPSRWRSFRPCRRPRLG

SEQ ID NO: 45895 - protein, 118 aa, Zea mays
  Coding DNA Sequence Number=SeqID_2520
MSTMSNVTCSLHALGATPNDRDSSILPTRNILACYPVVDYHGVYVWSTVQVDIPGVEGGAEAVAVEPAPLDGAALWVGAGFARYGRVVGGVFTVKQAIESSRLLGPSSAPPLVPLMWP

SEQ ID NO: 45896 - protein, 519 aa, Zea mays
  Coding DNA Sequence Number=SeqID_2521
  Homolog annotation: Hit_ID=Q8SA86; Match level="QueryCoverage=42%, HitCoverage=26%, E-value=2e-10, Identity=26%"; Hit description =Putative retrotransposon protein
  Pfam annotation: Domain name=Transposase_28; Domain location=189-344; Score=-56.8; E_value=0.02; Accession=PF04195.3; Description=Putative gypsy type transposon
MGGKEFVMLTRGVKATIISLCALAQYGEVLWSSAGPSSRLAEAKGAEQASVWAAPLVYPVGPADAVFVRAARSRNHRAKGGVFAFAPTFALRGTSLTKSAGVEDHREMVKTLPRSKWSRRVFSSVTVDERVTVGLQLLACPPCSFCAGNLAYIKQTARRRRWYVAMSSSSSAASASPVVPSSEETLSDLAVFELQLGHTVEFGTSRIFSGRVMEMQRLGYFGNGVGRAPGAEQVPEPEGELIVFDAFFAVGLRLPTHRFMVEVLRRFEPSVEDFAKNYCLHWQKRKIGNKIAQFGPCTFTPRTGKTSAEVVEIVPCARNKWGNWWDFWFYVAPGDVEGLPSLPPAILCSHCYVAFPRFKVVEEDEDEGALRHASRLSSGRDLVEEFIAYGVWPLAHGWVLGEVTPRRMPTLGGQMVRSPPFVVDLRGRDAAAFVREVEAEAVKSVGKYVPKTETLRSWDIRSSNVRLSHVFELNRLPYGGYPGDDYAYFAVRRGKQAMSTADEGPHWIRLRAQPPRKGN

SEQ ID NO: 45897 - protein, 593 aa, Zea mays
  Coding DNA Sequence Number=SeqID_2522
MAGAEVSMELSVDDYLVGGVAIFSTHTGLAPAGAESGQLAVVPTTVLADPVAAAIVVRGDVGSSEDPWSKFCADGEIASAAAAKCVAASEFSAERRRLEGRIECLRTQHTEAVRDKSAAENRSRNLLEKLTTAEAEKEDLSRRLAEESEGAEKARADAKAARAEASLALKHASDVESGLKSLRSYTERMEASTSAGVEQAHTLFVDVYHELGARIAPFHKFGEEVGLRFLRWLQEELESLPSITTGLMSYASLITCEGAANALSREGCRHFEVFDWVTEDFDHGIFQVGDEVLKRSAGALYDRMWGPHSRDTVRERAGRALAHMMNDEEVEDFGGLESSMTRTEGAETGVEGHSAPQAGPGEDPTTTAAPAGEDSAAAVAPSQVSTSGPAQATPANVDTSFLAATNAIAFNGNASGSETESWSSNGNDFGSPLSWTEESSEEDLDYFVALDLVAAESSSQPEAREESAPLARAIAEDHRRLSRFVIVLAWHFGGMGTSLPAVGVVRFLRVPGFTLRRLLLGRVLWKRLRTLWVMSRTYCACSAAPLGGFLLGCLIVKTSYPVGDVAHLLCMSGCTLRRLFARVSYSKDFAPCG

SEQ ID NO: 45898 - protein, 105 aa, Zea mays
  Coding DNA Sequence Number=SeqID_2523
MYSSSSAERIAGRAIVKETLSDLAMVELQPGHTVEFRTSRIFSGHMLEMQRLGYFSNGVGQALGAEEVPEPEGAFDSALKQLQPRQSCDIQSQASTIVSLVRAKF

SEQ ID NO: 45899 - protein, 105 aa, Zea mays
  Coding DNA Sequence Number=SeqID_2524
  Subcellular localization annotation: CTP_CleavageSite=18; ConfidenceScore=5.36e-01
MKLWKETSRSSKTTTSSRCGLAATPSRLPVKVAFIYVSFPHFDLFLRHETSNRIVTAAGSVLCPFLLRCCCGLEGVFLMACGRFGWVLIGYGVHLLLVAIVPAGV

SEQ ID NO: 45900 - protein, 90 aa, Zea mays
  Coding DNA Sequence Number=SeqID_2525
MEHKNRSSQAHSKIPLQRFEMGEARDCWSEVRGVRDQLNCPLGPVQLVLTREFRRENPSSTARRQVQLVYGQRGSQLKLSSAEVEKAQLS

SEQ ID NO: 45901 - protein, 50 aa, Zea mays
  Coding DNA Sequence Number=SeqID_2526
MMNEVQINKKPRLSTVWHTELSGGAPDSVRCTRLVSGELATLEKTSAVYD

SEQ ID NO: 45902 - protein, 227 aa, Zea mays
  Coding DNA Sequence Number=SeqID_2527
MANDTNAHGENLRHGCGQRPGSARGASAFARRGVAAALGELAGEDRAQRNYGEDSGRGETRHGSLLDGEKAKVPAMASARAHHASRPGLRSTRRATARDEVLGTAGEERERGRRERVGRAHLDGEKQAPCTATAALRSAVRRGGERDRGEAVVGENCAGIASGSFFFLEASWAVVSLKNRTVGLEKMHSGRPSVWGRLTAAAAGAPCAVAVACAQRALATGPRRWTQ

SEQ ID NO: 45903 - protein, 237 aa, Zea mays
  Coding DNA Sequence Number=SeqID_2528
  Subcellular localization annotation: CTP_CleavageSite=47; ConfidenceScore=5.19e-01
MGSGEAEVVWLRPGRSPSPGVGRSGVRCLPGLSPSPSPGVGRGGGRSAEARAESEPWGRARRSFVVFRVLARVRALGSGGAEFAVFRVLARVRALGSGGAEFAVFRVLARVRALGSGGAEFAVAPLARPDCLSDSLCRVAPQSEWRRRRYPSVRLLYADGGYQLRIRRLEAPEPLHRARGRSGTDSTFYIRPYVAFPQGGGGECAMLPSMGTEHGVSGELQAEEEWLFSSANASIIE

SEQ ID NO: 45904 - protein, 161 aa, Zea mays
  Coding DNA Sequence Number=SeqID_2529
  Subcellular localization annotation: CTP_CleavageSite=47; ConfidenceScore=5.13e-01
MGSGEAEVVWLRQGRSPNPGVGRSGVRRLPGLSPSPSPGVGRGGGRSAEARAESEPWGQARRSFIVFRVLARVRALGSGGAEFAVFRVLARVRALGSGGAEFAVFRVLARVRALGSGGAEFAVAPLARPDCLSDSLCRVAPQSEWRRRRCPSVRLVSGAVE

SEQ ID NO: 45905 - protein, 183 aa, Zea mays
  Coding DNA Sequence Number=SeqID_2530
MENKTGVPSGQLRRMGNDGAPQALLRRTSDSHDITPARCQDLSGCHIGMAFLERVGRAGPRTGQALSWGRSLPSPAWTLVTPLLQAHPTWARDEHEGRGTSTSLTLGSGHLASPPFALAHALDPSGLGHAAHSLVGLGTPCLETPTADHLFTPPLGSLTLAAKAPLRNLPNSSPTPGCFSDGG

SEQ ID NO: 45906 - protein, 361 aa, Zea mays
  Coding DNA Sequence Number=SeqID_2531
MELSVDDYLVGGVAMFDAQTGLAPAEFGQLAVVPAEVSAGPMAATTMAKGDVGAPEDPWSKFCAGGEIASASAAKGVATSASAFAERIASGALTLEFSAERQRLEGRIERLRTQHTEEVRDKSTTENKSRNLLEKLAATETEKEDLSRRLAEEREGAEKARAKAQAVRAETDAANVEASLALKHAADAESGLKSLRSYTERTEASTRTGVERAHTLFVDAYRELGGAGVAPVYHDGPHVLCLTRYLRGAANALSREGCRHFEVFDRVTEDFDCGIFQVGDEVLKWSTGALYDRMWGPHARDTVRERADRALVQMMNDEEVEDFGGLESLMTQTEGVETGVEGHSVPQAGPDENSIAAAARA

SEQ ID NO: 45907 - protein, 187 aa, Zea mays
  Coding DNA Sequence Number=SeqID_2532
MSSSSSDASASPAAPSSKETLSDLAVVELQPGHTVEFRTSRIFLGHMLEMQRLGYFGNSVGRALGAEEVPEPEGELIVFEAFFAAGLCLPTHRFVVEVLKKRKIGDKIAQFGSCTFTSMIGKTSAEVVEIVPCARNKWGNWWDFWFYVAPKDDEGLSSLPPAILCSHCYVAFPRFKVAEEDEDEGPP

SEQ ID NO: 45908 - protein, 73 aa, Zea mays
  Coding DNA Sequence Number=SeqID_2533
  Homolog annotation: Hit_ID=A3A3S5; Match level="QueryCoverage=45%, HitCoverage=9%, E-value=6e-07, Identity=75%"; Hit description =Putative uncharacterized protein
MRVWILKKQFMQLKTNNYAHMKKRYELDLRQRAGRMGYKVQTSVKNFQVSSDSNRYHSGRSPKNTKVDTAPKL

SEQ ID NO: 45909 - protein, 168 aa, Zea mays
  Coding DNA Sequence Number=SeqID_2534
MPPAPPQGIPAAGGDPNGDGDDDDAGGSSSHGTELSKEPEPEGWIARPITRDAARGGVADGLDLKYYPRRSTGSARVVIVSPVGEGNPRLNSMVNLATVLNTELDHALDELGKVWAEVAELRVECAARHYLDGGSPAPIGIQHPYHSSPRGRFDYGTSDCRTQIDLDP

SEQ ID NO: 45910 - protein, 88 aa, Zea mays
  Coding DNA Sequence Number=SeqID_2535
MAEVESEPLGRARRRPTAEARAESEPRGSGEAEFAVFQGLARVRALGRAERIGAAQAALSFRQAGQWSGEVTALYADGGYQLRIRSLE

SEQ ID NO: 45911 - protein, 114 aa, Zea mays
  Coding DNA Sequence Number=SeqID_2536
MTKYNHSRLYGQSLNLNSYSPNPRVMMAGEHGEDKEGEGLLWTWRWPDSLKKTIKKRRSLIRRLLGNIVRSGKEVCGHDDVGGGGHGWGTMWEKGEDATTIDWRGRGNDATMEA

SEQ ID NO: 45912 - protein, 157 aa, Zea mays
  Coding DNA Sequence Number=SeqID_2537
MKAKSHHQQEQGGTCKNYATSKAEYTNTQLDLPVTSFPLITQCSTMDQAVSLAARSRRFESSFILARPHRLGIQCSTDPDRRRAVAALVPTISRMRDPVSGRVRDKVRARLHSDNASPWIRVHRPSSYRYQKWIQPIPDLARVLEKSLDFYRDPDLA

SEQ ID NO: 45913 - protein, 67 aa, Zea mays
  Coding DNA Sequence Number=SeqID_2538
MGGTGLPTGQSTRRPLPLCLKCEQGARARAQPYDLGTIWGIIQQPLWIAQPIAAPVQPPTSLRYYLC

SEQ ID NO: 45914 - protein, 116 aa, Zea mays
  Coding DNA Sequence Number=SeqID_2539
MAHRSCSGPLETLSPPFSPLCPWIHGLFPAIEFSVAPSSPLPNSGDPGATLARACLNSGDFTTVERSGAASRTQLERLHRRLHEEQERRRQEQEQQDSSPLPQQEVESKRPPSPAP

SEQ ID NO: 45915 - protein, 182 aa, Zea mays
  Coding DNA Sequence Number=SeqID_2540
MSKKGSQRLNRRKAGAGGDGWAAALDTEVEEEAVVAWASWWPRRQEPEEPSSEESEEDGDGGESTADGGDEGALLLAAELRVQRGLPSAREHSAKKSGRYGDGVTETASLLSVKGSLSSAPGTLGKEPAREGPYARFFAECSARHLAKRASLSSVRDITLGKVPKPVPRSLLFAECYDTDTR

SEQ ID NO: 45916 - protein, 243 aa, Zea mays
  Coding DNA Sequence Number=SeqID_2541
  Homolog annotation: Hit_ID=Q6J9V9; Match level="QueryCoverage=53%, HitCoverage=32%, E-value=2e-11, Identity=39%"; Hit description =Putative uncharacterized protein
MAAPRTTRPVALTPRQGRRHLWQAKRATLLLRHDDRVKKGTRKGDTPKGILPHEGSGPRALLLIRGSKAGSSEGGSKAGPSEGFDNRLRALGLHAHYWSEVRRLAPRKGSTAASGHSGSAPTTDQGFEGWPPEGFDSRLRTRRARDDSGYVRYMAEARATLPRNSRPRQIHASPEGLLKQWAHLRLVRGPARAGFAVKQPWPDRHANRPYRRSIQCKDHLTPYPDVRYSVDRAEVTAVISPLH

SEQ ID NO: 45917 - protein, 227 aa, Zea mays
  Coding DNA Sequence Number=SeqID_2542
MTGLMSYASIVTCVGAANALSREGCRHFEAFNQSTEDFNRKVFQLEDVTLKRLAGALYDRIWGHTVVLSSGRGQDVGVETGTEEQSSRAEVSHADLDAAGTSQPSTAEQVLAFRIIENGGKRDLTEMFWHQRLKGFKEQDLDRGKCLIFHELTIAAVVPLAHQIVRCGLVTIGSGHAWSIDCALIPLPTIGADVVGSPDSPVNFSRSVLGDSREQQVRRHASLGTRQ

SEQ ID NO: 45918 - protein, 151 aa, Zea mays
  Coding DNA Sequence Number=SeqID_2543
MEKGVLDVQLVDRPRPRDKTMQTVVDLIIANARTLSEPPKDPLSLVSVKGVVNVPLVSEHPLANHNVATAGVHNQVPDKTINKPKDLNGVVSHHRMDVTRILTERRVASESTTQSVMAAGGVKVIVLNELARDCWSHALARDIQDVWGDNG

SEQ ID NO: 45919 - protein, 59 aa, Zea mays
  Coding DNA Sequence Number=SeqID_2544
  Subcellular localization annotation: CTP_CleavageSite=26; ConfidenceScore=5.55e-01
MGRITRGPPFWTRSQDETTSSQVFVRRRMRRRRVRRRPRAKGWRLRLRPNICPPRDQFD

SEQ ID NO: 45920 - protein, 242 aa, Zea mays
  Coding DNA Sequence Number=SeqID_2545
  Subcellular localization annotation: CTP_CleavageSite=22; ConfidenceScore=5.09e-01
MPTPLNAKRRAAPRAPVRTLARAPAVPPNSREQARRSSGDGGALKSLGGGGLGTGSGGGSGEPNSREEVEEGAEEKGNEWNKSTAEAFMHPQRGPRGPVLAGEIRRVRQVVAPNSARKTEPSCSGPPAGDRTTRKGTRPSDERAQTSRDRSVRVTDARGPRVGAMARRDVGAACVAPTAVPLDRVRLTAAKSGLGCHRKLRLARPQGSAPVSASDDELRLVRPQGSDSASALEDDELRLARP

SEQ ID NO: 45921 - protein, 160 aa, Zea mays
  Coding DNA Sequence Number=SeqID_2546
MAIDWAVNSRSFSWDCEAKALARVAELSTSLESLQAYCNTLHEEVHVLYDRLHPNVPPDVAAMGAGPSGTTRAHDGAGTSRGREDTPNLPHVPPTLAEAIAALVNAIADNTRFLREMAGNQFQQHEGRVPPQGPRDTTYLEFSETRPPLFVKAEEPLEDD

SEQ ID NO: 45922 - protein, 120 aa, Zea mays
  Coding DNA Sequence Number=SeqID_2547
MDRTERRGELEGRVATREEAAHGDGSSGATSKGTPSRTRTRREIPAGRHGCRRLRMGKLDGWASKGELRAAMEPSWLSREGGEGAAEQERRTEGLRPGTRREVDAEGKSLGKQNILETQR

SEQ ID NO: 45923 - protein, 369 aa, Zea mays
  Coding DNA Sequence Number=SeqID_2548
MAGGKELAGAKEGWQTSDGGMRLMVFGIDSGNANPPPHPQVVSIATPAQERMKPWKETTRSSKITMSFRCGLAATPNRLPMACLRHTARKSVIPFLPSRLVERPFHRPVTGQSSHLERLHHRLHEEQKRQRQELEQQGSSFSLQQEIESELEGWVARPVTRDAARGCHFHDALDTLLRRALDRRTWSIEYRCVVFKHSRGVYPDRWEATCLVRRPENNLWGAEVCSEHYSISERDSAEAAMQDAARRALSHYCSVLGGVADGLNLKYYPCRPSGSTRGVIVSPVGEDNPRLSSTVNLAAVLNTELDHALDELSRARAEIAHLRVERAERRHLDDGSPAPIGTQHSYRSPRRGHQSYGNPDCKTKINLEP

SEQ ID NO: 45924 - protein, 518 aa, Zea mays
  Coding DNA Sequence Number=SeqID_2549
  Homolog annotation: Hit_ID=A2XFR6; Match level="QueryCoverage=25%, HitCoverage=37%, E-value=5e-16, Identity=37%"; Hit description =Putative uncharacterized protein
MNVCELTLAVSHPPTGQEQVPQDEAHGGCCDEFVREPLLYSKDVTFVSVPLFIICVRLGPSTPGDYFAPEFWTLKTRGSDVGSQRVQNILQQVREVPVSNIESRLGRRLREQGLGLLVLAMMKNDSVLHPNVRETHTDFLDYHWVDRNLPWRRDEVGVDPSGLNVVVEVPMDLPRIRVEIRVILEDSSEEFLPTPIPLAESLAFAAGSSSSAPPTPAVQAPAPRGNDPDDSRDDDEDNESEEEEEEDENIKEEANGKQQDHFVGIWPVTEHYTSMFEMGHFPNLLQDVLHALGTYSDPCDRGFRTLSAHESLTPLFTYAPSVSDAARRTLWSLIHTYWQQLHNMKYRHLPLRLRGESQTNIVLGGAEEDRLNTLVGVVVGINTDLDSATLDLSRVHLELEDAHTRIAALEAQLEGRDLSEAQDPTMALSLPARGSAMKNQDPSLGCYRFLVTLIEGAASDWWDAFTAAHANADAISGQEFQLSRYALEEVDTDEKRQERFLVPLRKSEWEQQLPSTML

SEQ ID NO: 45925 - protein, 19 aa, Zea mays
  Coding DNA Sequence Number=SeqID_2550
MASRLPLMASINGERGNDI

SEQ ID NO: 45926 - protein, 108 aa, Zea mays
  Coding DNA Sequence Number=SeqID_2551
MASPPQSFRVLEALPEPVKLPKPSDPAEPRRRPRITRRTSFAHRRTWTGYIVVQAYFKKHKWKKGKERINKDCNLADGEYVLIPEQGAVQEEVQERARSLPPRISPQP

SEQ ID NO: 45927 - protein, 332 aa, Zea mays
  Coding DNA Sequence Number=SeqID_2552
MGMAFSNQIVEQIRNCWVQIAEPGMRSYPTWMGHADEIVSAGHAGCRLQFRMRARADGNRVKKICQSAREGAYPYQREGRRRRVVRVAPSRAEGRAVARGRGTCGSRCRPREKNVRPRAWVSFQRQLVGPQVVGPQSCLDAGRGTYLRQNQFSARGELDSMFNDHRVLVAREAFQALGPGRTSPEARDRPHRTSVARLHAWTELSDCNLVDGVYVLIPEQGTIQEEDQEQASEAAIEDLPAAPAIEGKPRYGGYKCGHCTAAAGVSGALYAKAVRPGHEQRIDGDGCHVRVRSTLTCRALQEMVDGVTWPTTLPPGWTVEWDAAPAGEEHDE

SEQ ID NO: 45928 - protein, 457 aa, Zea mays
  Coding DNA Sequence Number=SeqID_2553
  Homolog annotation: Hit_ID=Q6JAD6; Match level="QueryCoverage=95%, HitCoverage=64%, E-value=1e-65, Identity=87%"; Hit description =Putative uncharacterized protein
MPRTKNPSASGGGDDEDPRRPFRQVKGKTVFLEQQEGRKKRRSDREARAAAAAAAAAAQAALGDQPDVPSDQIAFRARRLASRSRSSTHTSASTPPPTLPTPVTPIAPSTSTAIPTTSTTPASTATPAPAPASAPPVPPPRFRERDETEVRPLVSDPRLFDLQRATVARVRRFRYVPVESWLPAQRDPAAGVLFSTRIQESFFRAQMSAQIALRVHRLLDLPAFLLAAGAESEAHLTYLPGLLTLLTISGRYVEEWVRVFYASVWIDPDHHWMRFRFEREDVTITATSTTALLILLVALTAVWLQGQLTSRLCSARLSQMGRDVLQQTLLQQRSTYMSSSDGHSYRGWDTGRLPHIFSFGFLIEDTVLDGIRARRQLPYAHYLCHIFAQLIQPPRFQSTLEASRLVFGSYRPAPEIPVPASASVFDTQAEDAALRQFDTQGTAADDDDDDDFGVPPP

SEQ ID NO: 45929 - protein, 218 aa, Zea mays
  Coding DNA Sequence Number=SeqID_2554
  Subcellular localization annotation: CTP_CleavageSite=29; ConfidenceScore=5.02e-01
MAHRTVRWPTGAPTVRHRCANGHFQRLVLTASRWTHGAPDSEQSTVRCTPDSPVRCPVKTLPRTSLAPPGRGCTGQSGAHRTVRCPKARNRGGGGGASGRGRGSRANAGGGSESVSDPGSAVEAGAGTDSDGGRAAGATGTEAVTDTATTVVVTADAGGTGGCGQTELRTGEVNAKVTGQSGEVATGGPDKSKAPLEREAEEAELTEPEVLRYQNAEA

SEQ ID NO: 45930 - protein, 293 aa, Zea mays
  Coding DNA Sequence Number=SeqID_2555
MQHPVRWLRDAWAWASKLACQKSEKRVHLARLHAACMAARPLPPVGLGKSGGSLPGCTPPPAVTQDGDLQLDGGGKRAGLQPLPLPQPQGFSSPRLGRGECRVGVGPCAGGGPLLHSGAGSCSVPGLQTRVASEPLAAPASATAAGRGSSAGAIAGAGHGLTSNSSAFCPSLSHKFWHGRGPPGSSICPEVSAAAVQPPGAEVVVVVTAGAAGPTPESISRGLGSGWRPWKMVGRGPRGNRSSRLLGPDSRRSPWTASPSEAGSDLAEGIVDAEGAIAPFQREDPILQDQITL

SEQ ID NO: 45931 - protein, 122 aa, Zea mays
  Coding DNA Sequence Number=SeqID_2556
  Gene Ontology: Mol. function=kinase activity
  Homolog annotation: Hit_ID=Q6QP54; Match level="QueryCoverage=31%, HitCoverage=13%, E-value=2e-09, Identity=84%"; Hit description =Putative kinase
MALPVDVAGLCPRSGDVEAPPKPRSSLSSMAEAEPEPLGRARRRLFGRGQGGVRALGSGGAEFAVFRGLARVRALGRAERIRVAQAALSFCQTGQWSGEVTAVTSALPGGARQDKGVRLPLR

SEQ ID NO: 45932 - protein, 404 aa, Zea mays
  Coding DNA Sequence Number=SeqID_2557
MAENVEAVGSAESEGAEPSRGEGRVFAGRRMQRREYWSDDWGNRGRAAQMPLATGSTASGEGLEESSERGAESPGWKNRRRFLESCGGWGFAVMETEPGAKELIAGSRRYLYGNRKRISIGHGDTLRCSLDDLLADRGRQPRTGEPATGVVPCRPRKRERRSDPITLEAKANRAEQLSGTCGRGQPDETCRPRPGPHPTAKPNHRSSSVHSMSRSVQSPAGTRARPRLDPFFLGSGRPFHPRPRKSALPGPYRHMTPPPSAAPRRDALAASAGRPAYLFPPGRDSPSPRPPRRNSSLASRLAGAAASSFVSAMEERRRPRGSASGWRRPSSRAAGAALRRKVRELRRLVPGGEEAPAGALLVRTADYIVGLRARVDLLRALAAVYGVGVGAVVADAADADACAS

SEQ ID NO: 45933 - protein, 36 aa, Zea mays
  Coding DNA Sequence Number=SeqID_2558
MAVGSVLSHGAPDSPCSGGEAGNMDDFEEFQEYDEF

SEQ ID NO: 45934 - protein, 133 aa, Zea mays
  Coding DNA Sequence Number=SeqID_2559
MISGVQRPSHSTILSLRGILPRQPYKMQHDEHFPSIARCSAGAGGVIVSPVGEGNPRLSSMVNLVTMLNTELDHTLDELGEMSKNRRRGARRAQPEQQAPQEEAAPQQLLPPPPPMTIEQMFLMQTQAVQAIG

SEQ ID NO: 45935 - protein, 299 aa, Zea mays
  Coding DNA Sequence Number=SeqID_2560
MAALRYGVGVEVMQLHPVVVRERPHEAARWHPKPPLMEGDETDHVPRRRSRVGLAPGGHPLRLRPAGERTEQTIGDKGLQLLHSNGGERPRVARRNDGRLIGHRRAEAVEAEGMRDREKGDISKGSFSAKETGPEPFTDQGFEGCALRGSATAPEHSGSEPFTDQGFEGPANHLQILLERASGPLADPYRTGLGRPLGSPDSNSLETPCSAPTEGNMALSPPSSLRKGDEGAYNKKPRQSSIVLSLRAEARRLLSHQATAKLSTTSTSQLKNSEPNHAPGLRPGRMREQQGRPRHHKKN

SEQ ID NO: 45936 - protein, 375 aa, Zea mays
  Coding DNA Sequence Number=SeqID_2561
MEEGCEGCGGWEWNNELVVGVVWKEALESTTQSVGEGDSGEAVGGGRERGLNGQGGDHYTGEDKGSGHVMAGLGVEFDAVTKDRAHGGIEVHEGASDKLAIVEKDAHNHSDGNDPLRQGRRARRGSRLLRRGQPTCGTAWEERARRRGQRSGIGARRRPTVDDEDPTGRDRCRRAATLLGTGRGQPVQGGAAWTAAEARIAALQQEGHGRVRGVGRSTAQARQGRGPPGGCSWRRLGSASAESARRRVGGKEAGSAACSGAARALSEQGRRNSGGASGRRPGAGGRGRGRRPAGWRGWGRGRERGLQGAAQGKSVGGVAAQGAAIGGGGATCSGAARALSEQGHRNSGGWEEGGRERQPAAGRKKNCRLGGSGTM

SEQ ID NO: 45937 - protein, 659 aa, Zea mays
  Coding DNA Sequence Number=SeqID_2562
  Gene Ontology: Mol. function=helicase activity; Biological process =viral genome replication
  Homolog annotation: Hit_ID=Q10GM7; Match level="QueryCoverage=99%, HitCoverage=48%, E-value=0.0, Identity=59%"; Hit description =Expressed protein
  Pfam annotation: Domain name=DUF889; Domain location=409-560; Score= -82.0; E_value=6.5e-06; Accession=PF05970.5; Description=Eukaryotic protein of unknown function (DUF889)
MDSPVRGCELDNRWVVPYNPYLLRLFNYHINVEACGSFKAVKYLFKYIYKGHDRASAVMGDASKADDDVDEIKQYRDARWVTPLEALWRIYDFELSQISPPVMQLQLHLPNMHMVAFHERQMVERVVNRPGVDRSMLTAYFEANKLHEEARGILYCDFPEWYTWQSGKDKVWQWRKRDTGGQVGRIVSAHPAEGERYYLRVLLNHVTGTASYVDLRTIDGVTLLTFREATERRGLLELDNTLDECLTERALFQMPSALRWLFATILVYCEPNDVAVLWQKHKDSMSEDYQHRSQNKTHVEQMVLIDIRKMLQSMGKDIKTFPLPPIIDAYDDAIGTAREVYEEESIQPTAGDVALKDSLNEEQRAVYDKIMSAVDTDQGGLFFVDGPGGTGKTYLYRVLLTTLHNQGKIAVETTTSGVAASIMPGGRTAHSRFKIPLTIDDGAASMTKRQVVEALDNSMRDIMGRPALPFWCGSDSDLDNLIDFAFPNLNKNMSGSTYITSRAILSTRNDRVDMINVKMIDCFQGEHMRNSIDTEIVLGQHVGKRIFLPHIPLCPFDEEMFPFQFKRKQFPVRLSFAMTVNKAQGQTIPNVGVYLLEPVFSHDQLYVALSRATARSNIKILVIPAVDGMKMSRKGVKKNPTIDCGTYTKNIVYKEVLTN

SEQ ID NO: 45938 - protein, 221 aa, Zea mays
  Coding DNA Sequence Number=SeqID_2563
  Homolog annotation: Hit_ID=Q3MV21; Match level="QueryCoverage=34%, HitCoverage=12%, E-value=1e-07, Identity=40%"; Hit description =Fructan exohydrolase
MSALQKVVAAVVHDVNAEGWDRGLEGSSRDNGGPAFETDFADQLKNFSKMGHGVSSGGVLLKSSGWHTPVVPQIRTNASIGTVVDNNICHPTEFDFFLCIHAGAKDRLQERLRKSKCLGLEEAAKNKGFDLGNVDAMQTDMEVVFEVLKSLEDVEELDPEWLHDPHKLHTCVEKDTSLSDSCGVDPFGLVVMAPEGMQSRSRSPYSSGSDQDLSFSIYASL

SEQ ID NO: 45939 - protein, 163 aa, Zea mays
  Coding DNA Sequence Number=SeqID_2564
  Subcellular localization annotation: CTP_CleavageSite=18; ConfidenceScore=5.15e-01
MKLWKETSRSSKITTSSRCGLAATPSRLPVKAALSTFLFRTLIYYGSTYTHCTKAPPAPPLGVPASGVAAGGDPDDGDGDDSSSHDTDFSANLEPEGWVARPITRDAARGCHFHDALDTLLRRAFDRHTWSVEYRCVVYQHSRGVYPDRWEATCLVRCPENSL

SEQ ID NO: 45940 - protein, 105 aa, Zea mays
  Coding DNA Sequence Number=SeqID_2565
MGNSAYSPPSRRLSIGIVAWYFISLTARSDVGRSRLEGDRDRREARHKPWKDSIGRVRQQDEGIPFTQQIASEQRKEKEDEEGGLLRDRFFVAINIRLRRVVRHF

SEQ ID NO: 45941 - protein, 178 aa, Zea mays
  Coding DNA Sequence Number=SeqID_2566
  Gene Ontology: Mol. function=electron carrier activity; Cellular component=chloroplast thylakoid membrane; Biological process =electron transport
  Homolog annotation: Hit_ID=A2YU61; Match level="QueryCoverage=98%, HitCoverage=88%, E-value=2e-46, Identity=54%"; Hit description =Putative uncharacterized protein
  Pfam annotation: Domain name=Rubredoxin; Domain location=107-152; Score=61.1; E_value=3.7e-15; Accession=PF00301.11; Description =Rubredoxin
MALAYAPARLVHPCIGMGMVSKQHPRTLPPSSCCLHLHHILYLRPIASSHHLARHSVDVTKDDKPLEPPPPAAAETESTQQQEDEDGGPKLDPRRFEEKFVMLNTGVHECRSCGYRYDQEAGDPSYLVPPGLPFAQLPDDWLCPTCGTAQSFESKSVEIAGFAQNQQFGLGDNSLTSG

SEQ ID NO: 45942 - protein, 227 aa, Zea mays
  Coding DNA Sequence Number=SeqID_2567
  Gene Ontology: Mol. function=cysteine-type peptidase activity; Biological process=proteolysis
  Homolog annotation: Hit_ID=A2X4U2; Match level="QueryCoverage=33%, HitCoverage=10%, E-value=1e-12, Identity=37%"; Hit description =Putative uncharacterized protein
MVFISINIRETYWYLAMIHARNMEIQVLDSLGTSQDRKDVTDSIKGLQRQIDMISQRKELKDHRWPDLQVASWPLREIDMGYAKQTDRMTCHTLEQKMAAILLSSDLNKRRGCLLYKNEKEVDSRSPSDVEILENPTDSKKRKLLHVLDDSEVVYEDEKGPITQADLQMWFVDDWDKSALVKVSTDGCTNDFLMVGLSTKDMPVTKADSIDVLCDYIMTIEDDTTLE

SEQ ID NO: 45943 - protein, 442 aa, Zea mays
  Coding DNA Sequence Number=SeqID_2568
MDDELDDMMAPSLDVHACRTAWSLPVSGVDRAHLMLRWHITCQQGGQGSFNAEAGSGTFPWGSGPIVDTLEYIASSGHVVTPELPTWWGRALFTARLKIAAWTSCPHTVVRGTPDSWYLQWPPSLPQGRKRACRWDQSLIGSWHAASVCLLTNRHPWRMTHGPGPPCSDWVVGFSGGEEVHYRRRWRAPHAAVRLLRTRRPTPKEYDSWAQAPVSETGPLLVSAEVKRRTTAGGGVLFTRWFAFSAHGGRSPRSMTRGPRGPAPEAGSPWHVSGEIFCGISGRQWGNLSLKRDSLERVAMALLDLPECFQSEVALDLVRNLLGWGAPAFAGRIRVGASPHGDLAAREFVLFVSNLSCRLALSIPSFFVLLLEELGLQPQHFTPCFILQAAIIAYLCRMSVGATLLPASSSSIRREGYAAWEVVQDVAEMVAACYQHDPTDVE

SEQ ID NO: 45944 - protein, 128 aa, Zea mays
  Coding DNA Sequence Number=SeqID_2569
  Gene Ontology: Mol. function=catalytic activity
  Homolog annotation: Hit_ID=A7PRZ8; Match level="QueryCoverage=60%, HitCoverage=21%, E-value=1e-10, Identity=48%"; Hit description =Chromosome chr14 scaffold_27, whole genome shotgun sequence
MGPDPHGKVPDPWIHRPDLRARFKTSTATRPSCRHAATYTMLIITRALPGKLPLHANTTKTADIKVYYLAEEPEVHFVWQPSQESSILDMSRAFDDNYIMDCGVISASEVTQRRTDNNDQFVILPTVG

SEQ ID NO: 45945 - protein, 203 aa, Zea mays
  Coding DNA Sequence Number=SeqID_2570
  Gene Ontology: Mol. function=electron carrier activity; Cellular component=chloroplast thylakoid membrane; Biological process =electron transport
  Homolog annotation: Hit_ID=A2YU61; Match level="QueryCoverage=100%, HitCoverage=100%, E-value=4e-60, Identity=56%"; Hit description =Putative uncharacterized protein
  Pfam annotation: Domain name=Rubredoxin; Domain location=107-153; Score=68.2; E_value=2.7e-17; Accession=PF00301.11; Description =Rubredoxin
MALAVAAARLVHPCIGMGMVSKQHPRTPLPSSCCLHLHHIVYLRLVASSHHLARHSVDVTKDDKPLEPPPPAAAETESTQQQEDEDGGLKLDPRRFEEKFAVLNTGVHECRSCGYRYDQAAGDPSYPVLPGIPFAQLPDDWRCPNCGVAQCFFERKSVEIAGFAQNQQFGMGGNSLTSGQKGLLIYGSLLIGFLFFISGYFLQ

SEQ ID NO: 45946 - protein, 203 aa, Zea mays
  Coding DNA Sequence Number=SeqID_2571
  Gene Ontology: Mol. function=electron carrier activity; Cellular component=chloroplast thylakoid membrane; Biological process =electron transport
  Homolog annotation: Hit_ID=A2YU61; Match level="QueryCoverage=100%, HitCoverage=100%, E-value=6e-61, Identity=58%"; Hit description =Putative uncharacterized protein
  Pfam annotation: Domain name=Rubredoxin; Domain location=107-153; Score=74.6; E_value=3.2e-19; Accession=PF00301.11; Description =Rubredoxin
MALAYAAARLVHPCIGMGMVSKQHPRTPPSSSCCLHLHHILYLRPVVSSHHLARHSVDVTKNDKPLEPPPPPAAGTESTHQQEDEDGGPKLDLMRFEEKFAVLNTGVHECRSCGYRYDQAAGDPSYPVPPGLPFAQLPDDWWCPTCGATQSSFESKSVEIVGFAQNQQFGLGDNSLTFGQKGLLIYDNLLIGFLFFISRYFLQ

SEQ ID NO: 45947 - protein, 171 aa, Zea mays
  Coding DNA Sequence Number=SeqID_2572
  Gene Ontology: Mol. function=electron carrier activity; Cellular component=chloroplast thylakoid membrane; Biological process =electron transport
  Homolog annotation: Hit_ID=A2YU61; Match level="QueryCoverage=100%, HitCoverage=85%, E-value=1e-44, Identity=53%"; Hit description =Putative uncharacterized protein
  Pfam annotation: Domain name=Rubredoxin; Domain location=107-153; Score=70.3; E_value=6.3e-18; Accession=PF00301.11; Description =Rubredoxin
MALACAAARLVHLCIGMGMVSKQHPRTPLSSSCCLHLHHILYLRPVASSHHMARHSVYVTKDDKPLESPPAAAAEIESTQQEEDEDGGPKLDPRRFEEKFAVLNTGVHECRSCGYRYDQAAGDSSYPVLPGLPFAQLPDDWRCPTCGAAQSFFESKSVEIVGFAQSHQKSL

SEQ ID NO: 45948 - protein, 1248 aa, Zea mays
  Coding DNA Sequence Number=SeqID_2573
  Gene Ontology: Mol. function=histone-lysine N-methyltransferase activity; Cellular component=intracellular; Biological process =chromatin modification
  Homolog annotation: Hit_ID=Q84XG3; Match level="QueryCoverage=79%, HitCoverage=93%, E-value=0.0, Identity=95%"; Hit description=SET domain protein SDG117
  Pfam annotation: Domain name=SET; Domain location=1091-1239; Score =61.8; E_value=2.3e-15; Accession=PF00856.19; Description=SET domain
  Pfam annotation: Domain name=zf-C2H2; Domain location=686-709; Score =11.2; E_value=0.69; Accession=PF00096.17; Description=Zinc finger, C2H2 type
  Pfam annotation: Domain name=zf-C2H2; Domain location=720-743; Score =15.2; E_value=0.25; Accession=PF00096.17; Description=Zinc finger, C2H2 type
  Pfam annotation: Domain name=zf-C2H2; Domain location=754-777; Score =4.1; E_value=4.1; Accession=PF00096.17; Description=Zinc finger, C2H2 type
  Pfam annotation: Domain name=zf-C2H2; Domain location=821-844; Score =16.6; E_value=0.094; Accession=PF00096.17; Description=Zinc finger, C2H2 type
  Pfam module annotation: Pfam domain module=SET::zf-C2H2::zf-C2H2::zf -C2H2::zf-C2H2; Domain location=1091-1239::686-709::720-743::754 -777::821-844
MLMDPPVMQMDCKLKNAMDKTPQIAYDRKLTVSHDDYGWAGSDVHLKDDTIGTELREKNSDSSYSDVKLQLNLSAGNYNGLQTDDYSFNKQSFGKKDMHHPQEEIHSSPNTMSLPSPCRLNGDVTPCEAEKIAEDRGKVDGIVDAVSKEVKTDLVGCHARQEELQCTLQDLSEIACSIDLVRNKSSPQEEKKSVSPLNDMGHNVDNNSCNGDTNYKGQELNMGNVGDEDHAVALWVKELRQSILGNKLKELRDASVQPELVPEWKTWKQELLKQYFSLHPAGNVGNFEKTNCYDDPALDQQGSRKRPKLEVRRGEIQILHMGEADYRTPTEDPNQNKLPSNSVMHENIGALGATSQKNAVMFPGSSGTNENTISGSSNAALQNARLDLDSFKSSRQCSAYIEAKGRQCGRWANDGDIYCCVHQSMHFLDHSSREDKTLTIEAPLCSGNLLDPSEVLHMGEEPPNKWVEGISKSQALYSIDLETDKNVQAVVQVKLMPTVAIENSGEKGCAMEKTDMCAASTSMTNTDDTSLCIGIRSHDSIVECQDYAKRHTLYCEKHLPKFLKRARNGKSRLVSKDVFVNLLKGCSSRKDKICLHQACEFLYWFLRNNLSHQRTGLASEHMPQILAEVSKNPDFGEFLLKLISTEREKLANIWGFGTDRSKQIYSENKEGSVALQEEKTNLSSGPKCKICGHQFSDDQALGLHWTTVHKKEARWLFRGYSCAACMESFTNKKVLERHVQDVHGAQYLQYSILIRCMSCNSNFLNTDLLYPHIVSDHAQQFRLLDVPQRPSGQSAQQTEGMSGLPLYDSHNVEDENGSQKFVCRLCGLKFDLLPDLGRHHKVAHMVSGAVGHIPLGRGKYQLNRGRHYYSAFKKSLRPTSTLKKSSSSGIDKNLKFQISGLTSQIVESETSSLGKLQDFQCLDVAQTLFSKIQKTRPHPSNFDVLSVARSVCCKTSLLAALEVKYGPLPENIFVKAAKLCSDNGIQIDWHQEGFICPKGCKSRYNSNALLPMQLTAVDFLEAPVDSRNDDEMWGMEEYHYVLDSKHFGWKPKNESVVLCEDISFGREKVPIVCVIDVDAKDSLGMKPEELLPHGSSLPWEGFHYITNRVMDSSLIDSEGWAIRAAEPILQGTFVCEYIGEVVKADKAMKNAESVSSKGGCSYLFSIASQIDRERVRTVGAIEYFIDATRSGNVSRYISHSCSPNLSTRLVLVESKDCQLAHIGLFANQDEYTNCSMLGCRTPEISTVV

SEQ ID NO: 45949 - protein, 332 aa, Zea mays
  Coding DNA Sequence Number=SeqID_2574
  Homolog annotation: Hit_ID=A3AAK9; Match level="QueryCoverage=82%, HitCoverage=79%, E-value=4e-73, Identity=52%"; Hit description =Putative uncharacterized protein
  Pfam annotation: Domain name=MMR_HSR1; Domain location=67-212; Score=- 13.9; E_value=0.02; Accession=PF01926.14; Description=GTPase of unknown function
MPRLPLLLKVAAAAAAGALALIVAARLRREDAVASLRREIREALTALVADDEDSDDAEENSSSPPPPSVLITGFRAHGKSSLVNTACRALAAEDGPLLLRAEASPPGGGSEGLRKLRMVKAVVAGSDVDGAGAGEGDVVELLDAPPLAETGKLTREDIDAAISSGDPECVVFILRCNAPTKERNAAIKRLPEISAAVRNKGLNLIIVLTFKKAMRSIRQAEELLREVSFRARTDCVYFIENYTWSNNGPNLHHPPVIRNDFETHFTVLTIIRQCLEFIKLNRSQSKSKKKTNGEQEKAPEPKLKNNPPAETNKQRQKLNESIVKPFLSSSET

SEQ ID NO: 45950 - protein, 191 aa, Zea mays
  Coding DNA Sequence Number=SeqID_2575
MAARRAGRAVLSSLARSLGLRKPKGQAGSGAKNRHRTLSGVYKDQGEDGSNVPPGSDAGFKNAKRNGRSSNGSRTRNGRPANYSPRRINSAAGQAALLAGAAGDASPSPKQPRQKEKGPGKGDTPKGILPREGTRLRASLLIRGSKASPPKGSTAASDRVGPTPTTGQRFEGRPPEGFHGRLRLLGLRAHY

SEQ ID NO: 45951 - protein, 620 aa, Zea mays
  Coding DNA Sequence Number=SeqID_2576
MALPVDVAGLCPRQGDVGAPPKPRLSLSSVAEAESEPWGRARRRSFGRGQGGVRALGSGEAEFRRLPGLSPSPSPGVGRSGVRRLPGLSPSPSPGVGRGGGRSAEARAESEPWGRARRSFVVFRVLARVRALGSGGAEFAVFRVLARVRALGSGGAEFAVFRVLARVRALGSGGAEFAVFRVLARVRALGSGGAEFAVFRVLARVRALGSGGAEFAVAPLARPDCLSDSLYRVAPQSEWRRRRYPSVRLQLARRLLDAWAWASKLACQKSEKRVHLARLHAVCMAARPFRPLVWAKVGGRLGGPWSVLEKTQPAASGGAHGGYPPPFRLLVGGTQPHGSWYLSAIVRLQGFSSAGPAAPLRRRSPRMVTTSFWVGKSKPGCDLGPTLSFKDVHHPRWGGGHAEPALCLPRGSAGWSCFCTGTAPSRRGRCPTRLGGFEWGSAGGLVSPAIGAEAEAAREVLVADGITATTRAPGHRAGVLVLAPRASAGARARSQQRRPTVAVVRTGGGEPLVSLLLLRNPSPWSGVVRTRGGGTGVPYVMALRMPVSPVDYLNRFTKHELPRVKVTSEYEQRQSWLENGNLVGRSLAVLSVSGADAKVDPPRPRVGLAPLEAGWPRPQG

SEQ ID NO: 45952 - protein, 755 aa, Zea mays
  Coding DNA Sequence Number=SeqID_2577
MCSHCYSAFPQFEVAEEDADEGALQCAAGLSSGRDLVEEFVAYGVWPLARGWALSEVCPRQMPSRGGMLVQSPAFALDLHSRDPAAFVREAKDGAVRIVGRYVPRTEGQRSWDIRGSNDRLNRVFELNRLSYGGYPGQDDVDRRGKKPAAGTGDDPAPAAAPSSKKRKLGTAMGGLGVSDSFAMELMGTCAAPGGRMSSPELRESSARMLKVTGGWWPKNVPIPRAAAEDFFTSRMVRDFRVFPYGRNIAAVVSAVMDKDRQEAVQKRRAVVRLPEARPKRARGTAKAAAPDGSQPTLAAKSAGPGSSKVPDVVKAAGAGGAKSTSAEAAKARELPPPGKRIADFGTDISVDDYLTGSGEGQLVVVPPAAATTVSATVPVAKGGALSVGSEISTLAAVKDEAGAVPRRLKEASQRLSQAADFADRVASGALTAVVSAEVERLRAQYAEAVREKSAADSKCRKLAEKVAMLEGKRTELRRQLAEERREANQALAKAQSAQAEANVARVEGSLARQRAEELEERFNALQARVERAEASTRSEAERTRKQLMDSYHELGARTAHFEVPDRESGLRCLEWLQEELLALPTIVEGFMSYASLVTCEGAMNALSREGCRHYEVFDRSDEDFEREIYKVEDPVVKESAGALFDRMWGPHGREVVRERSDTARGQAARDEKVDDFGALNSMRPEAESNPVAAGPEVAPAPPLETVEGSLDAPAATATGGGSSPTAAPTVEDPPKTAAEPAAEDPATAGSSQVA

SEQ ID NO: 45953 - protein, 129 aa, Zea mays
  Coding DNA Sequence Number=SeqID_2578
  Subcellular localization annotation: CTP_CleavageSite=40; ConfidenceScore=5.47e-01
MQPRQVDALLRLLTRQLGSPGPRVKQPARQLLHASNRTATCATVTPLRLRSLCRDLRRPNSASLARRSKRPKGPGKGDTPKGILLCEGTGLRAPPTDQGFEDWPSEGFNSRLRSRGPDTHYSGSAPITD

SEQ ID NO: 45954 - protein, 833 aa, Zea mays
  Coding DNA Sequence Number=SeqID_2579
  Gene Ontology: Mol. function=nucleoside-triphosphatase activity; Cellular component=myosin complex; Biological process=regulation of transcription
  Homolog annotation: Hit_ID=Q948A2; Match level="QueryCoverage=81%, HitCoverage=40%, E-value=0.0, Identity=84%"; Hit description =Putative myosin heavy chain
  Pfam annotation: Domain name=Myosin_N; Domain location=6-47; Score =18.9; E_value=0.0048; Accession=PF02736.10; Description=Myosin N -terminal SH3-like domain
  Pfam annotation: Domain name=Myosin_head; Domain location=62-710; Score=982.4; E_value=1.8e-292; Accession=PF00063.12; Description =Myosin head (motor domain)
  Pfam module annotation: Pfam domain module=Myosin_N::Myosin_head; Domain location=6-47::62-710
MSYRKGLKVWVEEKGEGWVEAEVVEAKERAVVVFSSQRKKITVSPEKLLPRDTDEDLGGGHVDDMTKLTYLNEPGVLYNLKKRYALNEIYTYTGSILIAVNPFTRLPHLYNEYMMEQYKGIRLGELSPHVFAVADASYRAMVNDSRSQSILVSGESGAGKTETTKLIMQYLTFVGGRAALDDRTVEQQVLESNPLLEAFGNAKTVRNDNSSRFGKFVEIQFDSSGRISGAAIRTYLLERSRVVQITDPERNFHCFYQLCASGKDAELYKLGHISSFHYLNQSNTHDLEGTNNEDEYWKTKRAMDIVGISREDQDAIFRTLAAILHLGNIEFVPGKDADSSKIKDSTSNFHLQTAAKLFMCDSDLLVSTLCSRSIHTREGIIVKALDCAAAAANRDALAKTVYARLFDWLVENINKSIGQDVDSKLQIGVLDIYGFESFKNNSFEQFCINFANEKLQQHFNEHVFKMEQEEYKSEEINWSYIEFIDNQDVLDLIEKKPIGIIALLDEACMFPKSTHETFATKMFRNFSSHLRLERTKFSETDFTISHYAGKVTYQTDSFLEKNRDYIVAEHCNLLSSSRCPFVSGLFTSLPEESIRSSYKFSSVASRFKLQLQALMETLNSTEPHYVRCVKPNSANRPQLFENQSVLHQLRCGGVLEAVRISLAGYPTRRTYAEFVDRFAVLVPELMIGSYDEKMMTKGILEKMKLENFQTSRSPAREADGSARVCACHGVRARDRIEGEMTDPAGKATTATDPAGKTRSSQRDGGSSRKGRSNVDPAGKAATATDPMKAMKGWAARRVQSGRGLRRTWQGVLTALGTGEARSGRRCWGVSASN

SEQ ID NO: 45955 - protein, 223 aa, Zea mays
  Coding DNA Sequence Number=SeqID_2580
  Homolog annotation: Hit_ID=Q6J9V9; Match level="QueryCoverage=56%, HitCoverage=34%, E-value=3e-21, Identity=52%"; Hit description =Putative uncharacterized protein
MQAACNCTTGMHPFDFDASSMKAQAHMSCDRRVGYYVRKTAPPLTPMLRLLDCGTGAATRGNPAHGPTVPTKHIDHRSVSRGRRRDGRYGQKWAGRTGKGDTPKGILLCEGSGPRALLLIRGSKVGPSEGFDSSLRALGLRAHYWSEVQRLAPRKGSIAASGHSDSAPTTDQGFEGWPPEGFDSHLRTRRARDDSRYVRYMAEARATLPRYPRTFPRPAGAIL

SEQ ID NO: 45956 - protein, 130 aa, Zea mays
  Coding DNA Sequence Number=SeqID_2581
  Subcellular localization annotation: CTP_CleavageSite=37; ConfidenceScore=5.11e-01
MSDVPEDSNSNSSPLGNSRGNSAIIHRTVRCTPDSVRCSKEERPQELASFKNSLQLLRYNSPDCPVHLRSNGYFGANGYLQRIYCAPARAEVRHAHAGAPDTPQYMSGAPPDIQAGPEVRAPTVRTQRLW

SEQ ID NO: 45957 - protein, 179 aa, Zea mays
  Coding DNA Sequence Number=SeqID_2582
  Gene Ontology: Cellular component=membrane
  Homolog annotation: Hit_ID=Q9M585; Match level="QueryCoverage=48%, HitCoverage=24%, E-value=2e-16, Identity=55%"; Hit description =Stomatin-like protein
  Subcellular localization annotation: CTP_CleavageSite=49; ConfidenceScore=5.48e-01
MPAIPTAPAPCPVRFLLARRHSLHVSYPSPCSNHQRLPPRLLRLPARPRAAPMSTVARAPASPVAPPAHPTYDLRAVIALALTEDAGDRGDITPPTGIRQAMEMQAEVERRKCAQVLESEGKKQAQILELEGKKTAQIFESEDEDIILYCQSVGSGPTIDLASQLPDLRAVVLQLFYLD

SEQ ID NO: 45958 - protein, 84 aa, Zea mays
  Coding DNA Sequence Number=SeqID_2583
  Homolog annotation: Hit_ID=Q8S472; Match level="QueryCoverage=82%, HitCoverage=6%, E-value=8e-07, Identity=45%"; Hit description =Putative gypsy-type retrotransposon RIRE2
MYVDLPFPSGCIDSEEEDGPSPDLDFSRLRGPKAMLQFLFACDELLFDGSNDYNTNEEGYISTRECFHVGHEDHDEGDQLGMLR

SEQ ID NO: 45959 - protein, 29 aa, Zea mays
  Coding DNA Sequence Number=SeqID_2584
MAQKPRSRTSRPVTGGTQSKMRLDVDWRG

SEQ ID NO: 45960 - protein, 808 aa, Zea mays
  Coding DNA Sequence Number=SeqID_2585
  Gene Ontology: Mol. function=hydrolase activity, hydrolyzing O -glycosyl compounds; Cellular component=cellulose and pectin -containing cell wall; Biological process=carbohydrate metabolic process
  Homolog annotation: Hit_ID=Q6Z8I7; Match level="QueryCoverage=96%, HitCoverage=95%, E-value=0.0, Identity=79%"; Hit description =Putative beta-D-xylosidase
  Pfam annotation: Domain name=Glyco_hydro_3; Domain location=78-334; Score=215.7; E_value=1.1e-61; Accession=PF00933.12; Description =Glycosyl hydrolase family 3 N terminal domain
  Pfam annotation: Domain name=Glyco_hydro_3_C; Domain location=406 -667; Score=256.5; E_value=5.5e-74; Accession=PF01915.13; Description= Glycosyl hydrolase family 3 C terminal domain
  Pfam module annotation: Pfam domain module=Glyco_hydro_3::Glyco_hydro_ 3_C; Domain location=78-334::406-667
MEGRARLSLVHAAAALVVLLQLHGGAVVVASEPPYTCGAGAPPNIPFCDAGLPIDRRVDDLVSRMTVAEKISQLGDQSPAIPRLGVPAYKWWSEALHGISNQGRGIHLDGPLRAATSFPQVILTAASFNPHLWYRIGQVIGVEARAVYNNGQAEGLTFWAPNINVFRDPRWGRGQETPGEDPTMTGKYAAVFVRGVQGYGLAGPVNSTGLEASACCKHFTAYDLENWKGVTRYVFDAKVTAQDLADTYNPPFKSCVEDGHASGIMCSYNRVNGVPTCADYNLLSTTARQDWGFYGYITSDCDAVAIIHDAQGYAKTAEDAVADVLKAGMDVNCGSYVQDHGASALQQGKITEQDINRALHNLFAVRMRLGLFNGDPRRNLYGDIGPDQVCTQEHQDLALEAAQDGIVLLKNDGGAGALPLSKPNVASLAVIGFNANDAIRLRGNYFGPPCVTVTPLQVLQGYVKDTSFVAGCNSAACNVTTIPEAVQAASSADSVVLFMGLDQDQEREEVDRLDLTLPGQQQTLIESVANAAKKPVILVLLCGGPVDVSFAKTNPKIGAILWAGYPGEAGGIAIAQVLFGEHNPGEVSSIHSERTTLAWQTQIILISSSASAGGRLPVTWYPQDFTRVPMTDMRMRADPATGYPGRTYRFYRGPTVFNFGYGLSYSKYSHRFATKPPPTSNVAGLKAVEATAGGMASYDVEAIGSETCDRLKFPAVVRVQNHGPMDGKHSVLVFMRWPNATDGSGRPASQLIGFQSLHLRATQTAHVEFEVSPCKHFSRATEDGRKVIDQGSHFVMVGEDEFEMSFMA

SEQ ID NO: 45961 - protein, 287 aa, Zea mays
  Coding DNA Sequence Number=SeqID_2586
MPAAAAARGCDQREDVKQRRDGTNLGHGEDMEAARGEEDDLDGFWVSYGRRCPRRRLPPLIPSLVARGALRRTCTDDGRLVIRIVPIVHEDDSSVPPPPPLRELPAAARDASARRTNVARPDDDRTNLGHGEDVEAVVKQEEKDEEDDNMKAKQTQEEDDLLDGFWVSYGRRCPRRWLPPLISSLVARGTLRRTRTDDGRLVIRILTGTMRERDPSYVAVQPEIQTSIGMKAFGRPLDDQRGRFYRPPYLGAKIYGAELRGRVGATRQCQVSPRRREPLVPRHNSAL

SEQ ID NO: 45962 - protein, 543 aa, Zea mays
  Coding DNA Sequence Number=SeqID_2587
  Gene Ontology: Mol. function=inositol or phosphatidylinositol phosphatase activity; Cellular component=integral to membrane; Biological process=abscisic acid mediated signaling
  Homolog annotation: Hit_ID=Q6Z8I9; Match level="QueryCoverage=100%, HitCoverage=100%, E-value=0.0, Identity=66%"; Hit description =Putative inositol polyphosphate 5-phosphatase I
  Pfam annotation: Domain name=Exo_endo_phos; Domain location=71-503; Score=87.6; E_value=3.9e-23; Accession=PF03372.14; Description =EndonucleaseExonucleasephosphatase family
MSNHNAPCDIPKPASVDEFLAKNGKKKKSFMSGLFRKKGRGADKKLLSRRDIVFGEFGRQKRRQDGPLGDVRRCPQELLRSALHDADREPDAELPGFSQETQCRYPGVPEIVPLNAGNVLVVEDNEPAGKWMDLIYQALNRPPPHQDGQSSGDELSPPPSTSSSHYRSRPQGAARDPSNAAAIPKTSSGGMLCAQKPPPPLKMVSKCYRVDNALVKTCTCMSDPSTMQLRAREMREFLCRVEAAAASPGRGAGADDDALASIEGGDQRGGGGMNYCLVARKQMVGIFLSVWVRRELVQYVGHLRVDCVGRGIMGRLGNKGCIAMSMTLHHTSICFVCCHLASGEKEGDEVRRNSDVAEILKNAQFPRICKVPGQRVPEKIIDHDRIIWLGDLNYRVSLSYEETKTLLEDNEWDILLEKDQLAMERQAGRVFKGWKEGKIYFAPTYKYKQNSDSYLWETAKSKKKRRTPAWCDRILWHGQGIEQLQYIRGEFRLSDHRPVCSVFVIEADVDSGSKIRKGYSTLDARIHCESPEIPKRHSFYDDF

SEQ ID NO: 45963 - protein, 525 aa, Zea mays
  Coding DNA Sequence Number=SeqID_2588
  Gene Ontology: Mol. function=methyltransferase activity; Cellular component=ribonucleoprotein complex; Biological process=metabolic process
  Homolog annotation: Hit_ID=Q6Z8K5; Match level="QueryCoverage=58%, HitCoverage=83%, E-value=1e-133, Identity=77%"; Hit description =Methyltransferase-like
  Pfam annotation: Domain name=Methyltransf_11; Domain location=312 -402; Score=88.7; E_value=1.8e-23; Accession=PF08241.3; Description =Methyltransferase domain
  Pfam annotation: Domain name=Methyltransf_12; Domain location=312 -400; Score=38.3; E_value=2.7e-08; Accession=PF08242.3; Description =Methyltransferase domain
  Pfam module annotation: Pfam domain module=Methyltransf _11::Methyltransf_12; Domain location=312-402::312-400
MAGGKEPIEVRFRLFDGTDIGPTKYDPSTTVSSLKEFILARWPQVNLNKDPDPVKLGTTLNRTHTFLCPNSEGTLPDSRRRFFLFIFLAAPAFHLPLPPRLALGTQATAAALRFGLSATAGQPQTRCRRQRLFLPPLANRLAPSPPVLVPPAYRPATLHARLPLPFRLRWTVDSARPRRLHCAPRAAGGQWEPAAAAPARRPCRFGSACPKRSVTCPLTFQRELSASFWNPGNHLSTNNPMRPNDSLEAQDMVPAEGNHSCFSSVQSTPEIEKKYVHRVYDAIAPHFSATRFAKWPKVAGFLNSLRPGSVVLDAGCGNGKYLGFNPDCLFIGCDISPPLIEICAGRGHEVLVADAVNLPYRNDFGDAAISIAVLHHLSTDDRRRRAIEELIRVVRRGGLVLITVWAREQEDKSLLNKWTPLCEKYTEEWVEQSSPPVRSKSGTLLESIAETDEDAGFTKQTDDRLKSCHGEVEDKTIDCSNSKTDENEKNQQEYFVPWHLPFHRAEIGGASAALENGFAKKDEKK

SEQ ID NO: 45964 - protein, 212 aa, Zea mays
  Coding DNA Sequence Number=SeqID_2589
  Gene Ontology: Mol. function=peptidyl-prolyl cis-trans isomerase activity; Cellular component=chloroplast thylakoid membrane; Biological process=protein folding
  Homolog annotation: Hit_ID=A7PL54; Match level="QueryCoverage=58%, HitCoverage=66%, E-value=1e-42, Identity=63%"; Hit description =Peptidyl-prolyl cis-trans isomerase
  Pfam annotation: Domain name=FKBP_C; Domain location=111-208; Score =103.7; E_value=5.5e-28; Accession=PF00254.19; Description=FKBP-type peptidyl-prolyl cis-trans isome
  Subcellular localization annotation: CTP_CleavageSite=54; ConfidenceScore=5.95e-01
MAPPITSLSSLMASSPIPTPPPPLPKTSGRALSVAPCGSASSSSPSTSSTPHPVAASASAGRRGLLALGAGFLASAALLSPAGDAGATRIEYYATVGDKMCDLSLVKSGLAYCDVEVHYTARFPDGTLFDSSYKRGRPLTMRIGAGKILRGLEQGISGGGGVPPMLVGGKRKLMIPASLAYGPEPAGCFSGDCNIPGNSTLLYDLFLVGIYK

SEQ ID NO: 45965 - protein, 493 aa, Zea mays
  Coding DNA Sequence Number=SeqID_2590
  Gene Ontology: Mol. function=aspartic-type endopeptidase activity; Cellular component=anchored to membrane; Biological process =proteolysis
  Homolog annotation: Hit_ID=Q6Z8K1; Match level="QueryCoverage=94%, HitCoverage=95%, E-value=1e-176, Identity=66%"; Hit description =Aspartyl protease-like
  Pfam annotation: Domain name=Asp; Domain location=99-418; Score= -90.1; E_value=2.9e-08; Accession=PF00026.14; Description=Eukaryotic aspartyl protease
MRLPVLFALQLVALAAAASAAEAAATFSSRMVHRLSDEARLEAGPRMGLWPQRGSGGYYRALLRSDLQRQKRRLAGKNQLLSLSKGGSTFSPGNDLGWLYYAWVDVGTPTTSFLVALDTGSDLFWVPCDCIQCAPLSSYRGNLCKLNKHNYNSLPILAITCVTGLQVSYSYWLVFDLGVQVASTSGGVIVPFWNSCGRKQSGDYLDGIAPDGLLGLGMADISVPSFLARAGLVRNSFSMCFKEDSSGRIFFGDQGVSSQQSTPFVPLYGKLQTYAVNVDKSCIGHKCLEGSSFQALVDSGTSFTSLPPDVYKAFTTEFDKQINASRVPYEDSTWKYCYSASPLEMPDVPTIILAFAANKSFQAVNPILPFNDEQGALARFCLAVLPSTEPIGIIGQNFLVGYHVVFDRESMKLGWYRSECRDVDNSTTVPLGPSQHGSSEDPLPSNEQQTSPPVTPATTGTAPPSSATTNRQMLFASSYPLLFLTMSTVFFIS

SEQ ID NO: 45966 - protein, 278 aa, Zea mays
  Coding DNA Sequence Number=SeqID_2591
  Gene Ontology: Mol. function=transferase activity, transferring hexosyl groups; Biological process=metabolic process
  Homolog annotation: Hit_ID=A3C3A0; Match level="QueryCoverage=55%, HitCoverage=57%, E-value=2e-30, Identity=67%"; Hit description =Putative uncharacterized protein
MEVLMVRGRPRNQRYGGWQDRLEVDAGFGRGAAALGAQPETSGSVVISNSASAPLLSAAGVPDGGARRAAAGPAVLERKPNAIVADTFLAWGIGVGFARGIPVCSLWTQPATFFLALWHLDRWPPVDGQAVRLATIPNVIPSERVRGTDFAGFFEAVHIKMVAPVERLLDWLSLEQKPDAIVADTFLAWGIGVGSARGIPVCSLWTQPATFFLALWHLDRWPTVDGQDVDQVHHALGEAPWRLGQASAGVACSSLFIMDTEATPMDSRRSSTGNQWRR

SEQ ID NO: 45967 - protein, 19 aa, Zea mays
  Coding DNA Sequence Number=SeqID_2592
MAAASSNCKAEMMRLAAAW

SEQ ID NO: 45968 - protein, 142 aa, Zea mays
  Coding DNA Sequence Number=SeqID_2593
MVHATVSARLPSRFPESKEGPSIGEITRHPQVETWVVPLNRKSGSQPPSAGHCCCARCTAADNCADISDSVEGGSGSIVSSQGVAASPSKLHGLTGAMKQWRDDVDRLLGMAHSTSTRSRPRSSRHQHEVSVSVRSPSVRGA

SEQ ID NO: 45969 - protein, 287 aa, Zea mays
  Coding DNA Sequence Number=SeqID_2594
MEAKVARAESSLAIQRAKELEARYNALRSRVDKAEASMRLEVERTHTQFVDTYREMGARTADFEVPGQEAGLRFLEWLQEELLVLPTIVTGFMSFASLVTCEGVMNALSREGCRHYEVFDQADENFEREIFKAEDPVVKQSAGALFDRMWGPHGRESVRERSDRAIEQMAHAEDVKDLVGLDGALPEAAEVLGSGPAHATATDNDIFVAASTMAADDDSFGSVSKCFESDDSGSSIAWTEESSDEDLNYFAVLDVAAVELSPHAEGSEDLPGVSTAYKRWRAVAKQR

SEQ ID NO: 45970 - protein, 191 aa, Zea mays
  Coding DNA Sequence Number=SeqID_2595
MHHAMDRHQDETPPKAVEVPPWGSEYCLNDKRYSRAGFPRRKSRMNMRPKWEPETRSTSPRDWEDIERAIAGRLKRRTGRDRGSDEDVDDSLHAKRRRGRQQRADSSVTTVMELPQDAQGSGRRLDVDERVEQCRVVASILHVLAWFILVLQMQHLQAHRAPLLDHRGKRGSAPLPSSLQKGCVRESKTKR

SEQ ID NO: 45971 - protein, 33 aa, Zea mays
  Coding DNA Sequence Number=SeqID_2596
MAFGGRRAKRGKAPMARGGRGREVRDYMNAQPE

SEQ ID NO: 45972 - protein, 70 aa, Zea mays
  Coding DNA Sequence Number=SeqID_2597
MAALGPLTEARGRQKGLDSPDSCPSAKLQRSSDRHDTTRTGCQNLSGCHYGMALLERVGRAGKRTGQALA

SEQ ID NO: 45973 - protein, 159 aa, Zea mays
  Coding DNA Sequence Number=SeqID_2598
  Subcellular localization annotation: CTP_CleavageSite=39; ConfidenceScore=5.76e-01
MAAASTLRSSLLLFGPPGQKSSSSPLLEQATASRSSVFRCSAGPSIEWGCSYLRRWNRSSVCNGTLNASVFVHCGCRGLNIWPRPQGDQPSRLLEPDSWSRPWRRWPGRDDDVVLQSGDPRTASPSEARSDLAEGVVDAEGAAAPFSRQDPSLQDQIIL

SEQ ID NO: 45974 - protein, 70 aa, Zea mays
  Coding DNA Sequence Number=SeqID_2599
RCETVTPSDIDPSRVARRFRGLTVGPADRWLTGQSGSLEDMVVGVTWPSILPPGWTVEWDPASAEEEHEE

SEQ ID NO: 45975 - protein, 91 aa, Zea mays
  Coding DNA Sequence Number=SeqID_2600
  Subcellular localization annotation: CTP_CleavageSite=84; ConfidenceScore=5.06e-01
MNKNTRDTRFIPRFGHTTKVPYFLVEAPTKSRVSFNPNPPFADHKGQAHTLIFAQTSGRENPSSTARRQVQLVYGQRGSQLKLSSAEVQPS

SEQ ID NO: 45976 - protein, 300 aa, Zea mays
  Coding DNA Sequence Number=SeqID_2601
  Subcellular localization annotation: CTP_CleavageSite=96; ConfidenceScore=5.13e-01
MQAACNRAKWVRFSDSQHAQHGGPGPQPIPRLEATQRTTQQRQPGAAVSAAKNGPAVMTVAGGREQRSRRQPSSRPIRGQRENPLSRREDNVPMFRSSSGSRMRNGRPANHSPRRINSAAGQAAPLAGEAGDASPSPLRATLLIRGSKAAPPEGFDSRLRSRGHYTHYWSKAGPRRVHNRLRRRARDDHGYVRYITKARATLPSSPETPCSVPIEGSMALSPLLLAERRRRGVCKKAESVPDRPLALSRGSGAALANPAPVEPLTASTYQPENLGPDRTPGVRPARMREQPDQPKHYARH

SEQ ID NO: 45977 - protein, 154 aa, Zea mays
  Coding DNA Sequence Number=SeqID_2602
  Gene Ontology: Mol. function=carboxyl- or carbamoyltransferase activity; Cellular component=ornithine carbamoyltransferase complex; Biological process=amino acid metabolic process
  Homolog annotation: Hit_ID=Q8SA97; Match level="QueryCoverage=60%, HitCoverage=21%, E-value=2e-16, Identity=50%"; Hit description =Ornithine carbamoyltransferase
MEPGGGTAVGAVESLLTSSCFRKGAESRRRHRVCGAPSLPIWRSEPDGTPVLFLAARVSSGLGDVEAPPRPRSSLSSMAEVESEPLGRARQSSSSSRAEPKSEPWVGWSGVRRLLGPSPSPSPGSGGVEFAVFRDLARVRALGRAERSSSSSGT

SEQ ID NO: 45978 - protein, 179 aa, Zea mays
  Coding DNA Sequence Number=SeqID_2603
MNENRNLQNGIGIQVGQIQVIEIKETAEKGGNRKSKTAEKKRNINNGFVGVLCWNSDPVANPPRTKLLRRKNPDGYEMKEVRLGYNRHMVTCERQLAVRIDGGNDSDGRTRGFPLGCHLNLAGERSGSRITKGKRGPGCRKARTSARNVETRNNAVHVGFFLGQIPFPKSAQSSLSCYF

SEQ ID NO: 45979 - protein, 133 aa, Zea mays
  Coding DNA Sequence Number=SeqID_2604
MGKSKKGSGSSPRSGDKRKREPTPPSEDFGNSEYSEEEFSSESEGSPAPVWTYIQAVERSRLEGSDESEYSSDEEDSSDSSEEGSGGDGGDDDDDGGDDDSGDDSGRGGDSGSKSGNGGGSKGSSKGSNKASG

SEQ ID NO: 45980 - protein, 245 aa, Zea mays
  Coding DNA Sequence Number=SeqID_2605
MAFCPSLPHKFWHGRGPPGSGIEPEVGVAAAWFLGAEGLVVAAAGAGDGAPFVGLPLLRRPSPSEWGCSYLRRGNRSSVCNGTSNASVLRSLRLSRPERPVDRGPRGNRLSRLLGPDSRRSPWTAAPPEAGSGLAEDVVDAEGATAPFSVKTRACRIRSSCSVCFLRPPRPEKHTLAALAKLRLFSSCFEHLDSVGNRDVCVSESCFSRKGRVRYPYPGGVGIPRLGRPCSLRVLSLVHEALSPT

SEQ ID NO: 45981 - protein, 314 aa, Zea mays
  Coding DNA Sequence Number=SeqID_2606
MCSEGVPPRPYIFDRGAIHAEVSLILISPYALERSAHISVFEVEYAICPYLARSCNLFDLQLIGRSIDVLSAFRDRGVPKPTSECAACPNPDGSSAWASAKGGEARWPESGVREVPSQGVGRGGSRSVEARAESEPWGRARRSFVVFRVLSRVRALGSGGAEFAVFRVLARVRALGSGGAEFAVFRVLARVRALGSGGAEFVVFRVLSRVRALGSGGAEFAVFRVLARVRALGSGGAEFAVFRVLARVRALGSGGAEFAVFRVLARVQALGSGGAEFAVARPDCLSDSLCRVALQSEWRRRRCPSVRLASGAVE

SEQ ID NO: 45982 - protein, 115 aa, Zea mays
  Coding DNA Sequence Number=SeqID_2607
  Homolog annotation: Hit_ID=Q6J9V9; Match level="QueryCoverage=53%, HitCoverage=21%, E-value=3e-07, Identity=54%"; Hit description =Putative uncharacterized protein
MEAQAHASCNRRAECFVHATAPPLAPPPRLLDCGTNTATRGTGKGDTPKRILPREGTRLRASLLIRGSKAGPPEGFDSRLRSRGPYTPLLVRGSKAGPSKGSHGRLRLLGLRAHY

SEQ ID NO: 45983 - protein, 629 aa, Zea mays
  Coding DNA Sequence Number=SeqID_2608
  Homolog annotation: Hit_ID=Q6JAD6; Match level="QueryCoverage=73%, HitCoverage=71%, E-value=1e-101, Identity=46%"; Hit description =Putative uncharacterized protein
  Subcellular localization annotation: CTP_CleavageSite=55; ConfidenceScore=5.56e-01
TLIARVPSPVLPGSSPLVSGCRARRMCRRQGEAMMRILVAPSGRSRARQYTWSSRKTARSGVLTEQPVQRQQQQPLRRPSLEISHRLRQIRLHTVFVVSPPGPRSSTHTTASTPPPTLPTPVTPVAPSTTTAIPATSTTPASTAPPPAPASAPPIPPPRFRERDETERDPAAIDLFSTRIQESFFRAQMSAQIALRVHRLLDLPAFLLTAGADSEVHLRYLPGLLTLLTTSSSQIRKLFGFPESSTRLHSLCYGSSDPPRRPHGGVAPGTAHVASLFRPPFSDGSRRSPSDFTTAAKYLFELSDGLFCRGWDTGRLPHTFNSGSFGALVSHSEFDVVDFLICEIEDTVLDADSASTVQGTLEASLLVFGSYRPAPEAPVPASAPVFDSQAEDAALHQFEAQDAAVVDDDDDDDDFGIPPPPPPMPPRSHDHEAGSSSAAPAAPPAIDPTIASILQTLTQQQAHLAAEQSRQAAAHQQLSERMLSMFQTIQDRQDSLQQQLLQDRAESRAFMALMLQHSGVSVPLVQSAPPPSLQAPVLPAIQTGPSLPSVGPSSSPLRPVTLAFMSPVLSSVCPQLSVPPASAVTTPAVAVSVTTSVPTAFAARPQSESVPAPASTADPRSETDSDPPS

SEQ ID NO: 45984 - protein, 178 aa, Zea mays
  Coding DNA Sequence Number=SeqID_2609
MSSPEALTPVKTTRRTPEGPRVPRSTELKHAFLRKPFWIPHGSRLPTGTFGSGHSQRRGLLCQMQMGTQGRDLALWRVPNQEGLCNSPPAGKDPPSFSDNTFYLTHPYGFNLFWHNDIRIEQPGLQFRAPDTKVGRSDSLGGSRERDPVPWGGPEPMWPLSLVPYPKACTLHHSVTGT

SEQ ID NO: 45985 - protein, 65 aa, Zea mays
  Coding DNA Sequence Number=SeqID_2610
MAAVGALERGVGGGASAHGGGHACEGHRGRIEFFQSTNYSDSGAKHNYYCLAPELRTMLNATYEH

SEQ ID NO: 45986 - protein, 466 aa, Zea mays
  Coding DNA Sequence Number=SeqID_2611
MSPRELQTRTHRGPVFLYGGPDPTRLHTVEEGTPDSGYRQWPPGLPQGRMRACSRHTSLFLRPLRPSAFRASRWGASVFSGGIHVKVVPSGDLTAEELALVVVPPILPSSCCCWRNATPWGLALFHHHSASRIFITQLGRNLRPVHSGEKGVHQPCGGGELRLRGAGRLRRRQLPRVWLLGLDGFGAASGAASCCLVGAWLSIHRTGDGCAVHRSATSMGFSCATGYTGGSYKTSYAVGATAAFLDGLVLTSAVRTGARTSSHVLGAATIRRYGTGAQVAAIVGAEVVAAAGEAPHCRGGCLCWRDRQCHLSPGLRLFGFNGLIVAPRRKTGEVAVAVGAEVVASAGEPLGASYPTALTGVEAKRPHRLRTTPWNGVPFSRAPQAVGPPNFRIGGPKLQAWLLNSDVVMPEQVEATNRSGLWGQTPPGCRARAPVFGCGHFRMYLSATWTRGESRRVSGGRHASAP

SEQ ID NO: 45987 - protein, 95 aa, Zea mays
  Coding DNA Sequence Number=SeqID_2612
MKVCAEGCFGQNVTKIKSEKKERCHAFGSEQELGTLIRSTFEDTFSHYGGEASCRRDDEYCAPLGAGALFANRLVRRAVCWVTLTPSVGGLDRTH

SEQ ID NO: 45988 - protein, 143 aa, Zea mays
  Coding DNA Sequence Number=SeqID_2613
MAMMGSTSEKMYLCQVPNFGFEMIKLRPGIGRSLSKITSMLLTFTVIQEVGFILHRRPCAKSKLLQPQLQSWFTLLPDHAFHIMHTFILKPKLPVTVYYTGKHVSRVIEDLRKIKAPNTVAFRYFSSHSVVTNVLSSFSYMGF

SEQ ID NO: 45989 - protein, 311 aa, Zea mays
  Coding DNA Sequence Number=SeqID_2614
MPSRGGQRVRSPAFTLDLRGRDPAAFVREAEDGAARIVGCYVPKTEGLRSWDIHGSNDRLNRVFELNRLPYGGYPGEDATDRRGKKPMGMTEEGPSQEAAPATKKRKLALGGRMSSPELRESSARMLEVTGGRWPKNALIPRAAGEDFYTSRMACDLKVFPYGRNIVAIVSAVMNKDRQDAAQKYRAIVRMADPTREAKRARGSAKAAAFGSSKPVPPAKAAAPRPSKASASAKAAASGGGRPPLGGPTKGQELPSPGRRVADFNTNISVEDYLVGSGEGQLVVVPPLVATTSPSAVVSVGDRYPPGPLKK

SEQ ID NO: 45990 - protein, 503 aa, Zea mays
  Coding DNA Sequence Number=SeqID_2615
MSQRLREAADFVDRVASGVLTADVAAEIESLRAQHADAVREKSAAESKNRRLAEKVAALEAEKTDLRRRLAEERREANEAIAEVQAARAEAKVARAENSLASQLAEEWEARFNTLCGRVDKVEALARSEVGRTHAQFVDAYRDLGARTADFEVPDQEAGLRFLEWLQEELLVLSTIVQGFMSFASLVTCEGTLNALSREGCRHYEVFDQSDENFEREIFKVEDPMVKQSAGALFDRMWGPHGREAVKERSDRAIEQMARAKDVEDLGDLVGASPEAEVDPVPPSSAGEGSSAAPVPTVAGEGPLPAPASTAEDPPKVAAEPVAEDPMAAVGPSQVQDFGPAHAIATVNDNFVAASTVVAEDDSDDSVSKCFESDDSGSSIVWTEESSDEDLDYFAALDVAAAEASPRVMGDEDLPGASVGHRRRRAVAKRRVSELPRGDRRPRGEVGGGRLRVDGAGKRELLSSPAGATMGEGELRSLFAGEELRIMLFNYREMGIIPKVEPM

SEQ ID NO: 45991 - protein, 26 aa, Zea mays
  Coding DNA Sequence Number=SeqID_2616
MALSPALERPPGREAVRWVTYNPSVR

SEQ ID NO: 45992 - protein, 526 aa, Zea mays
  Coding DNA Sequence Number=SeqID_2617
  Homolog annotation: Hit_ID=Q8SA97; Match level="QueryCoverage=9%, HitCoverage=10%, E-value=6e-07, Identity=60%"; Hit description =Ornithine carbamoyltransferase
MRRLLLRPRPGSGKDAIPSEVEVESEPWGRARRRPPSEVEIEAEPWGWARRRPPSEVEVEAESWGRARRRPPSEVEVEAEPWGRARRRPPSEAEAGAEPWGRARRSFLWRLRPDSAAVSLTLAGGTAVGAGQATLFSCQTILALNAPAIQSVGEAIWPRLLHCEACPSWASGESRTKFFFDHLYGPAMGMSFSRVEHMDEVLHTEVEHMEHKEVLHTEVEHMEEGRMEVSRKKLDFHPQQVGEGHTDVPGMRLEFRLGKLEVDHMKTVDIDTNDRDKSMVVDAQPEIVHGGYTRQYGRTVCQRNGQARRLRDGLVAAHQRSGQGSLNAEATHHLPAEWTRLIKCRGGTSPASGMDRRCALSAINAEAAWPRGLTSCSARWLTSRAVGHVVASGLRLSGERKQSWDPAVSGPDLTQRGPGPVPGVRFAPVEVLDLTRRSILYIQGSGTFPWGSGPTVDTLEYIVFSGHVAAPEPSTWWGQALFTTRLEIVVWVSRLHTVVRDWAIVFGGDEEAHYRGRRFAFSALGD

SEQ ID NO: 45993 - protein, 304 aa, Zea mays
  Coding DNA Sequence Number=SeqID_2618
MGVVRRLRDGLVAACQRSGQGLSNAEAAHHLPAEWTWLIKCRGGTSPASGMDRRRVLFAINAEAARPRGLTSCSAHWLTSRAGSDTFPCGSGPTVDTLEYIVFSGHVTAPEPSTWWGAVGDLPPSLRTRGPSGPRARTVRPSGRSPSRAPGPGPSGPRPRTVRPCAESTTAPRTRLRTVRPHARTVRPCAEGTATVLVECLTLRKGVNILLATPLETAYLDLSNRPSMAGLRDNSDISPSNIIEPTWDTLPADEQLQFEEHKERMIQEAKAKFLANFKVDRNNKVVRHRATDPASLHPRQISPM

SEQ ID NO: 45994 - protein, 106 aa, Zea mays
  Coding DNA Sequence Number=SeqID_2619
MKKTLEDLQAEQRVGVQRIATWASEASTTLVPLGILVARLEAEGSRLCRAVIKYNLTCFRSHDPAISLEPVIAGPVADTEDAAREAVRDVVELVAERFQRDPADDE

SEQ ID NO: 45995 - protein, 22 aa, Zea mays
  Coding DNA Sequence Number=SeqID_2620
MKRSKRKRIEEAPPKESAREKK

SEQ ID NO: 45996 - protein, 79 aa, Zea mays
  Coding DNA Sequence Number=SeqID_2621
MQAVCNRTTGTHPSDFDASSMEAQTHTSSASEHSGSAPTTDQGFEGWPLEGFDSRPRARRARDDSRYVRYMAEAWATLP

SEQ ID NO: 45997 - protein, 841 aa, Zea mays
  Coding DNA Sequence Number=SeqID_2622
MPSSSSSSDTTPPAAASSEETLSSVMVEELRTGDSVDFGVSRMTSARVEDMQRLGYFGGGVARAPGTEEVPEPEVAEEDADEGALRCAAGQSSGRDLVEEFVAYGVWPLAHGWVLGEVCPRQMPFHGGRVVRSPAFALNLRNRDPAAFVRDAEDGAVRLVGRYVPRTEGQRSFDIRGSNDRLNRVFELNQLPYDGYPSQDEADRRGKKPAVETGDDPAPAAAPPSKKRKLGTAMGGIGVSDSFARDLMRTCAAPGERMSSPELRESSARMLRVTGGCWPRNVPIPCAAEEDCFTSRMVHRWRVFPYGQNIGAVVWTVMDKDRQGAAQKRQATVRIHEARPKRPRGTAKAVASGGGKPPLAAKAGASAPSKAPEATAGAGGSKSAKVVPPASGVAEASKAARALPLAGKRVADFGTDITVDDYLGGSDEGQLAIVAPAAAIATAAQAPKARGEILGAGGEVPALALVRDEAGAATRRLKGMTEALSQATEALSQVADFTSRTASGALTAALSAEVERLRTQHADAVREKSASDSKCRNLTDKVAALEREKVDLRRQLAAERREANEAIAKEQAAQADAKLARAEGNLAKELVEQLQGRLTALESRAKEAEAAMRAEAERTRTQLMDTYRELGARTGDFEVPDREPGLRCLQWAQEELLELPTVVGGLMSYASLVTCEGAMNALSREGCRHFEAFDQVDEDFERDIYKVEDPVVKESAGALYDRMWGLYGREVARERAEAARAQAERGERVDDFGALDSVLPDLGSTLAEAVTGVDLEPTPETAAIATAAPPSAATGEGDPDAPAAAVPSAEGSAAVAAEAAAEPLAEPTAEAPAAPGPSQVA

SEQ ID NO: 45998 - protein, 138 aa, Zea mays
  Coding DNA Sequence Number=SeqID_2623
  Subcellular localization annotation: CTP_CleavageSite=43; ConfidenceScore=5.51e-01
MPSHPPTGNRTSHNPPSDTVSAPRNRSHNHAACSRLRGFDAPVCDSGQGFVYSRDAISPRPSPASGENSSSRRIHASPEGLLSNGRTLDSPEAQLGQASLRSNLGQIASPTDRIASAFNARIAWRLILTRVPQSARSK

SEQ ID NO: 45999 - protein, 365 aa, Zea mays
  Coding DNA Sequence Number=SeqID_2624
  Subcellular localization annotation: CTP_CleavageSite=22; ConfidenceScore=5.05e-01
MQAACNRAKWAHFSDFQHAHASCNRRASRYVQATAPPLAPLPRLLDCGTSTATRGDPAHDPAAPAWCDGGASGRRSKRRFAFAIMTASKKRPAPRKGSTAASGHSGSVPTTDQGFEGWPSKDQRERSCNGIPSEGGIEPSDPVDRGSGPADHPQRLRGCSRKPDSGQTVDSVNMLARELGTRPCTRATASSHEGTTRPAEALREALRPRRSQTTPPRPRGLHPASALALTHRNKTQPRKAGPLAKKCDKSLQASVNTPFEARGLLSGTIIRGTLKAPNSQLPRTRAADPGGSPSRPRPPSSDEHTSGSPEAQSSPRSNPGQIATPTDQIAGAFNAKKGSAACAAPTAVPLDRVRLTGSQAWPQAP

SEQ ID NO: 46000 - protein, 125 aa, Zea mays
  Coding DNA Sequence Number=SeqID_2625
  Gene Ontology: Mol. function=kinase activity; Cellular component =ornithine carbamoyltransferase complex; Biological process=amino acid metabolic process
  Homolog annotation: Hit_ID=Q6QP54; Match level="QueryCoverage=78%, HitCoverage=36%, E-value=2e-19, Identity=54%"; Hit description =Putative kinase
MAPPADEAGPRPRLGDVEAPPRSRSSPSFVAEVESQPLGLARRRPSAEARAESEPWGRAKRRAEPESEPWVGWSGVRRLPGLSPSPSPGSGGEEFAVFRGLARVRALGRAERSSPSSGAEPESEP

SEQ ID NO: 46001 - protein, 174 aa, Zea mays
  Coding DNA Sequence Number=SeqID_2626
MERKDMLIKDNISRDIHPTRFMIKIFIPFMQGAIAKKNTSFGTKRNLGLVLPVCGPTLCVRDPPQLIALSRTPASPPKYYTRTHSRAGSSGTWAPRHQLLLPRNDPRVACNGAMSTAPRPLRTSFPLKTKSMSCGVLWSDSAGAPELIWVTARWGLLARCFFLTVTCARGSEST

SEQ ID NO: 46002 - protein, 340 aa, Zea mays
  Coding DNA Sequence Number=SeqID_2627
  Homolog annotation: Hit_ID=Q6QP51; Match level="QueryCoverage=37%, HitCoverage=63%, E-value=3e-08, Identity=33%"; Hit description =Putative growth-regulating factor 1
MTASKKGPGKGILRKGSFSAKEAGLEPPTDQKKGSTAASGHSGSTPTTDQGFVGWPPDGFDNRPRARRVRDDSGNDSVMESHQREASSPRTLSNRTGSGKSPAGFTEKQPWPDRLARRLDHRSIQCKDRLTPDPDARFPVDKAEQPRLASGTIGISASPDPRARTRPQLGRRSLPRPTPGLGLDLASDDDLRLARPQGSDSTSPRTTIFASPDPRARTRPRLGRRSPPRPTPGLGLSLNSGRRSPPRPTPGLGLNLDSGRRSPPRPTPGLGLDLDLGGVTTSLGPTTPQGEAIITLPLASPGYGEQDRRPIWLAPGTEVTMPYYYFVKRLNFAFNMFKGA

SEQ ID NO: 46003 - protein, 31 aa, Zea mays
  Coding DNA Sequence Number=SeqID_2628
MDPLIGASKSFYGFRADLAVDMAHHFDQTNV

SEQ ID NO: 46004 - protein, 55 aa, Zea mays
  Coding DNA Sequence Number=SeqID_2629
MAGIARSTCAGGCPRRRRVCRPNHGDLVQSNGTVMKYITTFIFGPSHDHEVYMTF

SEQ ID NO: 46005 - protein, 350 aa, Zea mays
  Coding DNA Sequence Number=SeqID_2630
MAESYGRVRVHVSGKADQAEGLLRLRDTDTSLITFRENSTLGVNYTFGRVRPSLGRQRGRRISTPKDDVGTTPGPSPPGSSPGIRPEKTARPATPKPQSAVLRGHQPGSWPRQLDSGVGSASGRPGQAPADEQEKPRAARPTEPRNSYAFGIRTPHSSPSHEATHTWLSGPDNHNEQTPTLKVPLQTELRFRLRRYEQPPMIGGPVEQQKADGWLAAARSSSGDDDFCSKRPNSSSDDLRVDAAAIKPSPTSPLKGRGRVEGRRVGGQSAGGTDYLVGGETSSGCRGGRWHREQRRSRSDRRAGHAAAASATNGERPSPRSLRERSGPLPTRRPTPTRHTPLPSTDDEHP

SEQ ID NO: 46006 - protein, 132 aa, Zea mays
  Coding DNA Sequence Number=SeqID_2631
  Subcellular localization annotation: CTP_CleavageSite=58; ConfidenceScore=5.59e-01
MTSLGLPTPRAIGGCSLKQQITFYPSLTRRTICGTPSTVAGTRGAPSTPRKNDDTKTRSVTEKSTIGTMASQHGVRLPGPSRPWLQLEAPPGDGRGTTTITPLPGTGNIIDDRRTHVEYRHLLRASGPFNAP

SEQ ID NO: 46007 - protein, 113 aa, Zea mays
  Coding DNA Sequence Number=SeqID_2632
MARPARVDRLVSPAASLRFIVRNRLAVVALAAATRWRFFFIGDEISSSVQWAPRERDALHPSWKWNSVPNGEAGTVVTDTEPEPEEEEPGGCVSVRAVEEQCSCTAWCQMETI

SEQ ID NO: 46008 - protein, 59 aa, Zea mays
  Coding DNA Sequence Number=SeqID_2633
MGLGVCGSLCQVWVRPLGRSARHCDTGGYEIDGFGYDYGAGEDEAVEGDFQEFQDYDEF

SEQ ID NO: 46009 - protein, 273 aa, Zea mays
  Coding DNA Sequence Number=SeqID_2634
MTSHVSTEGGNAHSHTDGLAREGFPRILWEVLQGAGYATPPQYAVQLFEEHQVPRCRVRMTLEPHPLQPGWRSLDSESFGFRTEDTIESTALHVLTTFCDFHPLELSTHPIGLFPAEKEDDPMWKDRVEHAKDVWALYPGHTAHLTVRCMNAMYRLLALRGDLVVDLSTELVEKDLQVEHMGTQIQELDDQVEARENTIEVLEDQLQITQQQLEEANQHLDLHHQEIQDMEAVGADEDLDIEGGEEPEPASSLDTAGSGRPPSPEYSVASFAH

SEQ ID NO: 46010 - protein, 160 aa, Zea mays
  Coding DNA Sequence Number=SeqID_2635
MGKNKKGRGSSHHSGDKRKCEPSPPSEDFSDSEYSEEEFSSESERSPVYASPPVSSDDSDDSQGIPAEVWMYIWAIQRSGLEGSDESEVSSDEENSSNSSKEESGSDGDDEGDGGDDSDDDGKGGEGDGGKGDGGSGGKGGGNGKGSGGSSKANGKAPLA

SEQ ID NO: 46011 - protein, 196 aa, Zea mays
  Coding DNA Sequence Number=SeqID_2636
MARSGSGVAVAARLLAWARHRVESLLGPGAGGSALVARRVGLGVARGLSSAATRGGAAGARRVTIIKDEEGFRGARVQNGSACPRRSLGSRRAGMISPLPRTGRGSAPPSSKASGPPVVDASGTSSAKEAGFRSSTSSSGASAISTSAGTGGSTGRTATASAEAGAGAGNPSGGLKATAAPAFSPGTTATSTEGSA

SEQ ID NO: 46012 - protein, 401 aa, Zea mays
  Coding DNA Sequence Number=SeqID_2637
  Homolog annotation: Hit_ID=Q6QP51; Match level="QueryCoverage=19%, HitCoverage=24%, E-value=8e-16, Identity=61%"; Hit description =Putative growth-regulating factor 1
MDGSDHPRGGKPSVSQLLQGLQKGLEILLFLARGPIAPVAVGGSHHSLRKRREPPIVIPEVKPPALPPLVRRHKDGGDVLLHACLPQLEDAATSPHRHADPLFPRRQGKRLRGKEMGPQIPVGVNPQKSFANRREDGRLHDGVRVEIVQLHPIIMQERLHETACWHFEPPLMEGDETQHIPRRRGRGGPTRRDHPLRLRVTREGMEQAIGDKGLQIIHRDSGERPRVARQNDGYPVGHHQAKGVAAERTRDRERGYSERDPSPRRKRASSPPTDQGFEGWPLGRVRQPPQSTQAPRLLLIRGSKAGPRKGSTAASEHSGSAPTTDQGFEGWPHEGFDSRPRTRRARDDSGGSGDALANPAPAKPLTASTYQPENLEPDHAPGLRSDRMREQPDRPRRHERH

SEQ ID NO: 46013 - protein, 488 aa, Zea mays
  Coding DNA Sequence Number=SeqID_2638
  Pfam annotation: Domain name=DUF1110; Domain location=296-476; Score=- 59.6; E_value=0.097; Accession=PF06533.3; Description=Protein of unknown function (DUF1110)
MDKDRQDATRKRRAFTRVRDPSREVKKAWGIAKSAAPGSTKPPPAAKPAVPGPSKPSSGARVVAPGSSKPPSAEPTQERGPPSPLHTAEAAAGGADLSMDICVDDYHVGGVMMFDARTRRGLVGSDAGQLAVVPAPVAVAPAAAAADAKGASQDPWSKFCASSEITSAAAAKEVAGSVAPQLKHATQQLKHAAAFADHVASGALTSEFAAERQRLKGRIEHLRTQHTEVVRDKSAVENKSRRLMEKLAAAEAEKEDLSRQLAAEKKDANRACAEAQAARAEAKLARAEANLARQRAEEAEASHNSLRDYLDKAEASTRTEVDRTHAQLADAYQQLGARIAPFEASGKEASLRFLGWLQEELEVLPTIVTGLMSFASLITCEGAVNALSREGCRHFKVFDQSDEDFERGIFQVEDLVLKRSARALYDRMWGPHGRDTVQERTDRAMEQMAHDEEVKDLGDLESILPESLGAKEGTGGSWRRRLMLAKAP

SEQ ID NO: 46014 - protein, 267 aa, Zea mays
  Coding DNA Sequence Number=SeqID_2639
  Pfam annotation: Domain name=CCT; Domain location=213-259; Score =44.4; E_value=4.1e-10; Accession=PF06203.5; Description=CCT motif
MASAGGRRRSKAKPRARAGGKAKKRTKYLSLTELLVKAHAQVGASPRSPWEDEEAVAAEVKPEDDACGDDDDDHHHHHHEASTLFEAVPAPSLSDILGPSPPESPAGSGSGALPGAEEEDLPRRALRGRARERWVYCTGGPSPPPPATATGTATATASPCSSAASTGASPRSLLLKLDYDEILAAWAGCGPLYIGAAVSPRPVLADAEVAVGRAERVRRYREKRRRRRLFFARRVRYEVRRLNAVKRPRFKGRFIKEEERELRPAPA

SEQ ID NO: 46015 - protein, 18 aa, Zea mays
  Coding DNA Sequence Number=SeqID_2640
MAWRTFFDVVIMAKVFAT

SEQ ID NO: 46016 - protein, 760 aa, Zea mays
  Coding DNA Sequence Number=SeqID_2641
  Gene Ontology: Mol. function=isomerase activity; Cellular component =cytoplasm; Biological process=negative regulation of transcription
  Homolog annotation: Hit_ID=A2YQR1; Match level="QueryCoverage=94%, HitCoverage=100%, E-value=0.0, Identity=81%"; Hit description =Putative uncharacterized protein
  Pfam annotation: Domain name=K_channel_TID; Domain location=59-133; Score=7.6; E_value=0.068; Accession=PF06203.5; Description=Potassium channel Kv1.4 tandem inacti
  Pfam annotation: Domain name=MA3; Domain location=181-292; Score =152.9; E_value=9e-43; Accession=PF02847.8; Description=MA3 domain
  Pfam annotation: Domain name=MA3; Domain location=345-456; Score =152.2; E_value=1.4e-42; Accession=PF02847.8; Description=MA3 domain
  Pfam annotation: Domain name=MA3; Domain location=479-590; Score =143.8; E_value=4.8e-40; Accession=PF02847.8; Description=MA3 domain
  Pfam annotation: Domain name=MA3; Domain location=642-751; Score =160.4; E_value=4.8e-45; Accession=PF02847.8; Description=MA3 domain
  Pfam module annotation: Pfam domain module=K_channel_TID::MA3::MA3::MA 3::MA3; Domain location=59-133::181-292::345-456::479-590::642-751
MARWLSRGSAKTNACLLHVVVVTTVVLRGGAGGRGGGLGAMTSPRKDAGFLTQDQREKLRIAVQNAETQSLASPRSPTGGTTSALLQQYELQMLEQKRAAAAAAAARGGGGGGGGPRHVRRSHSGKAIKVKKDGAGGKGTWGKLIETDAEACLDRNDPNYDSGEEPYELVEAPVSTPLEDYKKSVVPLIEEYFSNGDVKLAASDLKELGHDGFHCYFVKKLVSTAMDRHDKEKEMASVLLSYLYGNVVSSTQIRLGFVLLLEAVDDLAVDIPDVVDVLALFIARAVVDDILPPAFLSNAKVSLSGSSKGMQVVQIAEKSYLSAPHHAELIERRWGGSTHITVEEVKRRIADLLKEYIRNGDTAEACRCIRELAVPFFHHEVVKRALTLGMESPAAEALIVKLLKEASEECLVSSSQMMKGFHRVAESLDDLILDIPSAKSEFQLLVSKAISEGWLDSSYVNSGVNGSVEDDEHEKLARYKREAVSIIHEYFFSDDTTEVIRSVKELGYPEYNPIFVKKLITIAMDRKNREKEMASVLLPSLSMELFSSEDIAKGFVMLLESAEDTALDILDASDELGLFLARAVIDDVLAPLNLDEISSKLPPNCSGAETLNMARSLASARHAGERLLRCWGGGTGWAVEDAKDKITKLLEEYESGGDVGEACNCIRELGMSFFNHEVVKKALVMAMEKKNERTLNLLQECFGEGIITINQMTKGFSRVRDGLDDLALDIPDAREKFLSYVQRAKKSGWLLPGFGVASSA

SEQ ID NO: 46017 - protein, 192 aa, Zea mays
  Coding DNA Sequence Number=SeqID_2642
MGVHQRRLLLAVVGGARPHGDQCPSAIARLQGFLSCSPAAFPHQWSVWWGEASRAATSAPPSASRIFVILAEAEGKLSRGSTSRMGRQVVSSFSIQGRGRSPALRRGRTSTTRDRSAASVISSSVASSLAQLALPRPPTLPPAAWSLWGPALAGPRGFEWGSAGEPLRVRYPAVPLVWRLFVPAGAEPESRL

SEQ ID NO: 46018 - protein, 142 aa, Zea mays
  Coding DNA Sequence Number=SeqID_2643
MGTAAHSALGLGGARARGRGRRRLASGTGTEALGLGDGDGDARARRWRLRRSSSEMGTGTAELGSGTAAAWRAPSSETVALGLGLGDGVAGAHGSETGTGTAVQYQPGGVVSAPGRKLNPKPPYRGFYIVNTSQAVFLKIRL

SEQ ID NO: 46019 - protein, 194 aa, Zea mays
  Coding DNA Sequence Number=SeqID_2644
MAPKRASSKAAPSIDEAAKAALLTKKKGKALTDNTPKKPLKTKLFGGLPQAPPPGFAPPEGEDAIEDGEVIGISAEEQLQLRALRIKNHNLQKQKDILEAKRQRVTAQAKVCQMIRDEEQRARELEQEIALMQSEGQHDLQHGPPLQQRVTAGDLFIPQCGPFIPHVIVSKGSTALMSEAPWLRNSKRHLGPPT

SEQ ID NO: 46020 - protein, 172 aa, Zea mays
  Coding DNA Sequence Number=SeqID_2645
MWATTVRSILPTEISLARFKLASVDRPTAAVHGALAPVDHTPGPTYWAPLSLLQMACSARSRVLSSTPRAAARLLELIRRRRFPISFAVVTSVPTWEASETQSGTNRDHDKGWERSRVPGISRRGSSSAASPPRAVGGSPGSVIGEEPVAEDPGEQQVEVAEQELIEGKLCP

SEQ ID NO: 46021 - protein, 152 aa, Zea mays
  Coding DNA Sequence Number=SeqID_2646
  Homolog annotation: Hit_ID=A2ZQV2; Match level="QueryCoverage=63%, HitCoverage=16%, E-value=2e-19, Identity=61%"; Hit description =Putative uncharacterized protein
  Subcellular localization annotation: CTP_CleavageSite=58; ConfidenceScore=5.19e-01
MACYPLANQHPPLLCQRNLYYLLRRTCTRRSPPPPLDLSPHSGSGGRKAGRRPKRVAVAATGMVADVIGKEYTRSTANSVVSMPNAWKGRDRESDGDGSGGRKDSVEETEQFLCSMLGDNSELGMGVVRDVPAGVNDIGCMVLDEQAIPGGS

SEQ ID NO: 46022 - protein, 469 aa, Zea mays
  Coding DNA Sequence Number=SeqID_2647
  Gene Ontology: Mol. function=unfolded protein binding; Cellular component=chromatin assembly complex; Biological process=DNA replication-dependent nucleosome assembly
  Homolog annotation: Hit_ID=Q6ZD63; Match level="QueryCoverage=91%, HitCoverage=92%, E-value=0.0, Identity=68%"; Hit description =Putative FAS2
  Pfam annotation: Domain name=WD40; Domain location=103-141; Score =36.0; E_value=1.4e-07; Accession=PF00400.23; Description=WD domain, G-beta repeat
  Pfam annotation: Domain name=WD40; Domain location=145-183; Score =36.8; E_value=8e-08; Accession=PF00400.23; Description=WD domain, G -beta repeat
  Pfam annotation: Domain name=WD40; Domain location=234-288; Score =3.1; E_value=13; Accession=PF00400.23; Description=WD domain, G-beta repeat
  Pfam annotation: Domain name=WD40; Domain location=293-331; Score =19.9; E_value=0.0092; Accession=PF00400.23; Description=WD domain, G- beta repeat
  Pfam annotation: Domain name=WD40; Domain location=3-41; Score=30.9; E_value=4.8e-06; Accession=PF00400.23; Description=WD domain, G-beta repeat
  Pfam annotation: Domain name=WD40; Domain location=55-93; Score=30.1; E_value=7.8e-06; Accession=PF00400.23; Description=WD domain, G-beta repeat
  Pfam module annotation: Pfam domain module=WD40::WD40::WD40::WD40::WD4 0::WD40; Domain location=103-141::145-183::234-288::293-331::3-41::55- 93
MRGGTLQINWHDQQPVLSLDFHPVSRRLATAGADHDVKIWEVASDGKLPTATFKTGLVPNTTAHSSAVNVLRFSPSGEYLASGADGGGITLWKLHPADDGEAWKIHKTLLFHHKDVLDLQWSHDSTFLVSASVDNTCIIWEASKGTVQQKLEGHLHYVQGVAWDPLGQYIASLSSDRTCKIYAKKPQGKSKNAERLNFVCQHTLVKVEYQNHDESKPPTKSHLFHDETLPSFFRRPSIQLPGASKAIVAVRFCPVLFKPRGSNSDGFFKLPYRVVFAVATLNSLYVYDTESVPPILVHAGLHYAAITDIAWSSDAKYLAVSSRDGYCTIIEFENEELGQPHILPGSKEVANGNLTPETKKPVCADSMKVDNSANKLKMEASPVAVGVRAPLLPTENIKRTGELAEGNVTCENKEPVTIDSMEVDADDTKGKEATIPVAAEVTPPPAVPAAKNSASSKPAKRRITPIAID

SEQ ID NO: 46023 - protein, 86 aa, Zea mays
  Coding DNA Sequence Number=SeqID_2648
MPPPPQITPTLPRPRQPASINEVVCFAITMWSSLIIIVHGSAGDNSSAQESAVQGGLELYAEVNNRGLCAIAQAESSTIRFSVDSP

SEQ ID NO: 46024 - protein, 338 aa, Zea mays
  Coding DNA Sequence Number=SeqID_2649
  Subcellular localization annotation: CTP_CleavageSite=2; ConfidenceScore=5.51e-01
MSSSSLMRRVFPPSKPPDGGYPPSFRLIVGGTQLRGSWYLSAIVRLQGFSSCSPTVSPRRWSPKTVTTSSWVGRSKPGCDLGPTLSFKDVHHPRWGGGRVEPALYLLRGFVGHPLPRRSGERALTGPAGGPDFDNAGPVDGGHRHLQRVGLVGLAPSGPSRRRAAAVPCTREGHPRRRAPLGRRSCSGVVLPLHRDGALARCPTRPGGFEWGSAGGLMAPAISVEAEAAREVPVTDGVTATIRASGLRFFVLVLAPQALHEQRRSWLENENLVGRSLAGLSVSGTDAGVDQPRPRTGLAPLEDGWPRPLGKPAEPPARAGFPEKSLDRVAVRGWVGPR

SEQ ID NO: 46025 - protein, 80 aa, Zea mays
  Coding DNA Sequence Number=SeqID_2650
MGAIKPRIGPFKGHDRASSEPSLGQGKPTPENLRLARGPPPSSNGHTIGSPEAQSSPRSNLGHIAAPTDQIAGAFNAKVA

SEQ ID NO: 46026 - protein, 195 aa, Zea mays
  Coding DNA Sequence Number=SeqID_2651
MGSGWTSVHEEVFAPVLTTRVRTRPSKSAVAAPAAYDVLYDLPVRPEAREKPWMWPTRAWRDRRPYDGRAATLRPSGRSSAGGGTRATQAGEPDTGQLTAPQMAGPAYPEFASSAKPTNTLLPRILEEEADRQPTRKAKLPLGSPSTPARMMNILKAEGRGRPQPVSLLSTTRLVVILVDDHRPEIATGLRDENP

SEQ ID NO: 46027 - protein, 124 aa, Zea mays
  Coding DNA Sequence Number=SeqID_2652
MRMKLKMMMEKIKELSHLKRRALIKGEMQMIKTRRMKNQDRHTQKSTKQSNEITPSTPSSATFIRGVDEALQDSYWVVAMQEELNNFTRNEDAKPIKTPMGTNGHLDLDMEDSKPTLRKLTLRP

SEQ ID NO: 46028 - protein, 349 aa, Zea mays
  Coding DNA Sequence Number=SeqID_2653
  Gene Ontology: Mol. function=nucleic acid binding
  Homolog annotation: Hit_ID=Q60EK4; Match level="QueryCoverage=76%, HitCoverage=54%, E-value=4e-17, Identity=27%"; Hit description =Putative uncharacterized protein OSJNBa0032D15.11
MARRRSQKNKKTPPTNATQKEVTLEILFDDCSNYDSWSTSVINAFRTIHPQLEQIIDKSIFPSSFNGKINSEEDQRCYRLNYLAFDILNNSLSKEDYRAFISNYDESIPDAHDIWTRIKIKFDESKHNSSFNASTSFSFCDTNPCKEEGENERWRPNDESTSPKANENDSGSTNEDEEEERSFVHLYARLSQEDKAVMLKLLERAREQSEARQRLEDILSIKMQHFDELTKEHEELKCSHVDLVQSKSSFELEFAGTNDDSYQKLKEENERLKKSLTQLKGKCIAQPSQDNRDHMVKKLETGTTVACTTSLEENVKDLRIAMRRKQKMKFNTSSKSLNHASTKGNIQVT

SEQ ID NO: 46029 - protein, 147 aa, Zea mays
  Coding DNA Sequence Number=SeqID_2654
MGLKSLSQRIECARMESWCLEMIKECLGDSSMRLGVPFIAPRQLGAVGGNLGRQFLPSIGWRTGQSGAPPDMTIHGPVQITFLKWHSRPLQSCSRWRTGHCPMYTGQSGASCRPLERATLRPRIWRSTVALAVVGSPDSPVHHRTVR

SEQ ID NO: 46030 - protein, 520 aa, Zea mays
  Coding DNA Sequence Number=SeqID_2655
MGVAPSTSLFRHLFVLVKSGKAKDHLGAYYFKTRSDSVVAYIPSLGGARWENWRDDWQRAHLCCWFTGSNDIGLVQRGPGTDLSWDELEVLVKGITGESFIPESLILPQGIFALCDDPELRTAILATLPTLDESGVAVRRTGGRDPHRGIQISDAPAGGPQSAGVAPSAPARASRASATAPCPLDKGKGAASSSSAPGGTRVSEEERRRRLRRADGLFVSEPPPPVGAEEAGSKKRQRTAGGAEETGSQAQGAQRRQQQQQQQKQRSPRFQGRWKVQGPKASSPSAPKVVPPPPLAATTETAPPVLQAPAGGPAAAAPTSSGATAVEGVPTAPTATTASTKAMPSSTPSVAKEAPTAPALAIEVDVGGASSSILPPTPEETEVIFGRCLRSGVEPEAVTIPLPQVLSRAHQALHETKAAILREWEALEAEHQRLSDWRTQLEARTKAVSRQFAFERSELERDRKDYKKDLQKVYARELERELDDKANSIALAEENLKEKDASLDKRATDLAWREKDLAFR

SEQ ID NO: 46031 - protein, 133 aa, Zea mays
  Coding DNA Sequence Number=SeqID_2656
MEAMKKTLEDLLAEQRVGVQRIATWVGEASTALVSLGVSPIPVSEMPMSISDALPVLYSAVDRLRRLDQILGACLEAEGGRLCRAVIEYVLTCFRSHDPPISLDPVIAGPVADTEDAAREAVQDDVELVAERF

SEQ ID NO: 46032 - protein, 182 aa, Zea mays
  Coding DNA Sequence Number=SeqID_2657
MDESMMDLENEAVLRNDCEKEAVLRNEFCQIRNKEAKGYRHKVVKFWDLLSLVYNKDQANGEGAKTTAESSKEMAKENNTRGKDAPYSVSSSSSLKRQRSDDSFNSIWCDKFDMLTSALKDDGPKLPSSVEVLTALQEVEGFDEDTELELYDILTSNARKFESMMALPMERRKRWLMMQLRK

SEQ ID NO: 46033 - protein, 221 aa, Zea mays
  Coding DNA Sequence Number=SeqID_2658
MISHRGDQLWIRSRPNATANAREMARGEDAGHDNRGLDLARNSTAATQTRSAHGEMGRTERDAGGWSPSTNDEESAHGQTKMFLCPPPWSAGRSRTRAEKSGTESRETSSGRKEEDADELESGTERVGITGEARSFGEGGTSREKLKQSQWRAMGEEGAARRSEKETELGVEDWDELEHRQRRSRRPGRERAGHGGARAERHGRTQEEAADAVERSKRCRG

SEQ ID NO: 46034 - protein, 196 aa, Zea mays
  Coding DNA Sequence Number=SeqID_2659
MAERYQLPRSCVPPTTRRKDGGYPPSGGLEGGKTQCIGEHENMVAFQEGHPPFKGDSPYLRPQRSWAESSPTRSKVLPYGAGAGSHTSCKPAQSRRSQTAGPGKGDTPKRILPREGTRLRASLLIRGSKAGPSEGFNSRIRARGLHTHYWSEVRRPAPRKGSTAASGYSGSAPTTDQGFEGWPPKGSQPPQTQSEG

SEQ ID NO: 46035 - protein, 124 aa, Zea mays
  Coding DNA Sequence Number=SeqID_2660
  Gene Ontology: Mol. function=carboxyl- or carbamoyltransferase activity; Cellular component=ornithine carbamoyltransferase complex; Biological process=amino acid metabolic process
  Homolog annotation: Hit_ID=Q8SA97; Match level="QueryCoverage=91%, HitCoverage=21%, E-value=2e-14, Identity=44%"; Hit description =Ornithine carbamoyltransferase
  Subcellular localization annotation: CTP_CleavageSite=46; ConfidenceScore=5.15e-01
MAPPVDVAGPRPRLGDAKAPPRSRSSPSSMTEVEFEPLGRVRRRPLAEARAEFESWGRAKRSSSSSGAEPKSEPWVGRSRIRRLLGLSPSPSPWSGGAEFAVFRGLARVRALGRVERSSPSSGA

SEQ ID NO: 46036 - protein, 230 aa, Zea mays
  Coding DNA Sequence Number=SeqID_2661
MVTTSPWVGRSKPGCDLGPTLSFKDVHHPRWGGGRAEPKLYLPRGFVGWPLLRRSRERALTGPAGGSDFDNAGPVDGGRRQPQRVGLVGLALGAPSCRKAAAAPCAWEDRPRYRALPGRRSCSGAVLPLHQYGASARRSESLGSVSLVVRGFPCLVRGTPRPLFDEPRTGVAVSARTEAELAQKEDLSGDPWTASLSEARSDLAEGVVDTEGATAPFSRQDPSLQDRIIL

SEQ ID NO: 46037 - protein, 144 aa, Zea mays
  Coding DNA Sequence Number=SeqID_2662
MAVIGSTSEKMYLCQTNTRKANTQWEWRDGESSVYPPWQEAGRWCICALGWREPGLVLRTPVVKRSWARERIQIPNLSSDYVHLQGCPRIRNIEIRPSHGADWGFATNTTRTHRSPGTPQSPPCCLHLLLSTDCSGDNLGLGGF

SEQ ID NO: 46038 - protein, 93 aa, Zea mays
  Coding DNA Sequence Number=SeqID_2663
MAPRARLGCYQPHSVEWRSSQSGAGGAVLLSDRSAERRSDYGHFGSVDWRACVRIKVSGHLCIKCPCDLVGWRGDLAKLCADGGYQLTFRSLE

SEQ ID NO: 46039 - protein, 192 aa, Zea mays
  Coding DNA Sequence Number=SeqID_2664
MADMVSKVTGQGARPALREDPVVEDGEIDGEGGVDGDVAGLESAHGVLRPTEERRGTVGQELGAEESVDPRPWTSMTSKSQGAGRGRPGGQRESHRRRGRDVPGRLTASSMAAINGLDGEGKGELEMADRKGSVTCTQESGRGGPDPVAEVSAANKESLNGPADPCSSLKSDLANGPHTQRHKHPAVHGPRR

SEQ ID NO: 46040 - protein, 76 aa, Zea mays
  Coding DNA Sequence Number=SeqID_2665
MKLWKETSRSSKTMTSSRRGLAATPSRLPVKAAFIYVSFPHFDLLFPIRVDYEKPVISLPVSPIEYLLRLLGVRGL

SEQ ID NO: 46041 - protein, 376 aa, Zea mays
  Coding DNA Sequence Number=SeqID_2666
MNKRPAFKVPLQTELRFHPRGYERPPHRGACGATSSGRLASDLYSSSYGPRTDATTGRLSFASPLMGHEPDIKAKERAAPKRTGSNSSPSLAWLEDASSAELGDGFHHQKLEEEVASRPVREVEPRLTSLSAPARMPGRVMKILEAERWLKGTNSHGVAFLQRQGGRIAGVPHPGARKPSWAESSPTRSKTNASSSAVQSPASFTSSHGSPKCSRCSTSEAGRSSGHVVSQAHVPSRGSERTLSRREDGAPAFRSSNGSRTRNGRPTNHSPRRINSAAGQAAPLGPGKGDTAKRILPREGNRLRASLLIRGSKAGPSEGFNSRLRARGLHTHYWSEVRRPAPRKGSTAASGYSGSVPTTDQGFVGWPSKGSQPPQT

SEQ ID NO: 46042 - protein, 78 aa, Zea mays
  Coding DNA Sequence Number=SeqID_2667
MAPPLYLARGPWLTAAACSGGSLTPRAVYCWVLVPLRVGPIRQHAMGGFKPGDVPIYASLAVDFTVLDHWIFPVPTST

SEQ ID NO: 46043 - protein, 111 aa, Zea mays
  Coding DNA Sequence Number=SeqID_2668
  Subcellular localization annotation: CTP_CleavageSite=54; ConfidenceScore=5.23e-01
MALAPPPVLPPAAWSGRGCPSTARATVALCAGLPHPWRLPRRRPYCSDVARGVVQDVVRREGWWPRSWMVLSSLSWEDGSEDLFTRAEAVAVAGFSPSGQVACPDLLGSQH

SEQ ID NO: 46044 - protein, 328 aa, Zea mays
  Coding DNA Sequence Number=SeqID_2669
MAEERQPPRGRAPPTTARRRQDRQHHCAENEERELSGGETTGGGGPDADSSSEHRGAPSRGPEGRKVQEERGMATARGMDPFLKADFPTHAPKRHGQGLLRCAPGFPPYDTGARPHVSYRLTRSAKKKTATQGACNRPAVMCPFIFAATSGQEDEPPHEERATALRLYAPSSSLKPAVKKENHHAGSVQPPRGCAPPQLHCNRRSNMGPRPTCHATGAPVTRCEKSHRRSRQCHVSLGPARKTEKISFQNQCSDSRHPAHGPSMTLSTKVTGQSTVETGVAVSVTIGGPTVIASTGAQEKQANHQSDSSPTCRLASSPEAGPGATAVP

SEQ ID NO: 46045 - protein, 36 aa, Zea mays
  Coding DNA Sequence Number=SeqID_2670
MGSRHSACSAEAGCRGKEEVVEADLQEFQDFDESED

SEQ ID NO: 46046 - protein, 158 aa, Zea mays
  Coding DNA Sequence Number=SeqID_2671
  Homolog annotation: Hit_ID=Q7XBD4; Match level="QueryCoverage=46%, HitCoverage=8%, E-value=3e-08, Identity=40%"; Hit description =Cinful1 polyprotein
MTKDISMPSIAAVALGNTEVPMHPPTATLSTTRVAETRVESGGPAHADEMGKGAAEIKEAKKAIEGDMSMGKGPFDQEFGGRYYRVYHSARKAMGGQALEFAEQLGYPLGSIIFEVGPDNYLYYCPDSRETDVCRYMVDNIGFPKLEVVLSTMSFKDF

SEQ ID NO: 46047 - protein, 81 aa, Zea mays
  Coding DNA Sequence Number=SeqID_2672
MAREHQRVQNTAKRSRGGTNLLRSLELQGPPLPTALLALSSISSAGTHGTHRAQLTDSLVVLTGMKWAAFVKRSTTTQMES

SEQ ID NO: 46048 - protein, 30 aa, Zea mays
  Coding DNA Sequence Number=SeqID_2673
MASGRCAGEADRLNMMQHFMTHIGFAILDK

SEQ ID NO: 46049 - protein, 253 aa, Zea mays
  Coding DNA Sequence Number=SeqID_2674
MAASHQFASERSELERDRKVYKKDLQKERELEDKASNIALAKENLKEKDVSLDRREADLAWREKDLAFREEMFERRDKLLVEHELEAEEKEKKLEKRIRQFLAAQTALGPQAMEATKKALEDLQAEHHARVQRIAAWAGEASMALVPLGMSPILVSELPMSISDTLPVLDSAADRLRRLDQILGARLEAEGGRLCRAVIEYILTCFRSHDLAISLESVIAGPVVDTEDAAREGVQDVVELVAERFQRDPADDE

SEQ ID NO: 46050 - protein, 27 aa, Zea mays
  Coding DNA Sequence Number=SeqID_2675
MGGSRAATCPEKVMYSKASTAMYRLRI

SEQ ID NO: 46051 - protein, 122 aa, Zea mays
  Coding DNA Sequence Number=SeqID_2676
MAFAGRNWLAGVRRGLFLVVDLENEEEIEVTEEKTPPPSESQAGNCFYFDICGSEPDSPTNEGKPRRADRGPFNWSHASSWHTLESLFLSRVRKRQIFVAFAPRWCQMKKNKSEDAGGRGPP

SEQ ID NO: 46052 - protein, 129 aa, Zea mays
  Coding DNA Sequence Number=SeqID_2677
MGGKMSLRPPPPGGLTAAIVAVMRQRKEYHVVATVEGHELETPETEQRPGLKRLLETTHLELDRKLFVNTQQAPTWRANCRRFDPGGSLARRVNCRCVSQPRWVGAIWNTRGKRTAARVILRPGQMRLQ

SEQ ID NO: 46053 - protein, 71 aa, Zea mays
  Coding DNA Sequence Number=SeqID_2678
MSELFICYILRYSSETNSVIYTSALAKVDSRMMQPQLLESVNSKGILFTIYRHRTQPVKNYNYAPHKSLQH

SEQ ID NO: 46054 - protein, 92 aa, Zea mays
  Coding DNA Sequence Number=SeqID_2679
  Subcellular localization annotation: CTP_CleavageSite=45; ConfidenceScore=5.17e-01
MARVACTLRGKRLDGGVSVLSVGVNPVLRTRTSVGGPNTLGGSVTAGIGAKPIFSDITGLFGKAPAPASLALDPDPREELILLILLENQNHF

SEQ ID NO: 46055 - protein, 349 aa, Zea mays
  Coding DNA Sequence Number=SeqID_2680
MEDLSTMTPTIMIGKIAAFEMSRKMGQQEEPTSSRSYAFTCDEKNKGKKKAPTPSCSSQEEEGEESDDDEDNQPSTSSSEDEETIRRVGKSGCFTCGVNDDFRDNCLNMAKPTKRRSKGKALTNIKTWDDSSSEEEPPRTRSHRSSSLSSLSSRKCLMARGKMSIPSSSDDISSDDGEGEGKPYLELAEVVQCFEDVCTKQKDQLKTLKNKLISSHNDYKCLLEKFETFANLNCYATRKATSLTNARRRLEISKSSSKSQQAKSPTPTSTRWTKGCYTIFDQEEKEWKGDSNQGQQASQQRKMGQTHLGAKGDYLNHEQHQEGLDPKREVRSLKDVGEFGDLEKLGCIS

SEQ ID NO: 46056 - protein, 87 aa, Zea mays
  Coding DNA Sequence Number=SeqID_2681
MAPKRKIASSSAVVIPPIDPNSQLPFAGLSWRAAAFWIVETPVSLSPWDGRGTHQLVGGAILEMRGDETEYLEIPLKTALGMRLDGL

SEQ ID NO: 46057 - protein, 129 aa, Zea mays
  Coding DNA Sequence Number=SeqID_2682
  Pfam annotation: Domain name=SlyX; Domain location=39-106; Score= -8.1; E_value=0.056; Accession=PF04102.3; Description=SlyX
MKTLTTFYGYHPLEMVMHPLGLFPAEKKDDPMWCNHVERLSQRITTLEQQVEIRDNTIDVLENQLHDVQRELEEANDHLDMHHLEMEANEAGSEGEEAPEELGPAPGANGTTSAMPPSLASSVASTAQG

SEQ ID NO: 46058 - protein, 42 aa, Zea mays
  Coding DNA Sequence Number=SeqID_2683
MSGEDDLGSPVKFCQVQGLGKLHKLLAKLTEWLARLGIYFNA

SEQ ID NO: 46059 - protein, 189 aa, Zea mays
  Coding DNA Sequence Number=SeqID_2684
  Subcellular localization annotation: CTP_CleavageSite=50; ConfidenceScore=5.02e-01
MESGTLAQACAVARRVQQQPQTQGGRGLHDFTSGSARWLMSWAISNGSPPEREVKSKAWTHVSTGPLLTPGSSSFRDLAEVRTLFGGSGLIRIGVRCPFVEVQIPRFILGCVVFSCHVAPFGLPMRWGQAPSSAWPGEVAWVRRLHAVEEAELLQLQLSFPAELNFSCVELLQLQLSFSAELDFSCGPL

SEQ ID NO: 46060 - protein, 239 aa, Zea mays
  Coding DNA Sequence Number=SeqID_2685
MTTSLVVGRSKAGCGLSPTLSFKDVHHPCWGGRRAESGSCLSRGLAARFFLQHSGEKGVRQPCEGGELRLRGVGHLRHRQLPRVWLLGLGALVPPLALPPAAWTERGYPSTARATVAPCVGRPHPRLLPRRRPPRGVVQDVVRRGGGGGVLGWSCAHSRSEDGSEDLFACALGRPPFAGTTLVRRWPLSSVLRWSPPLVRLPTAEVVASAGETVNATCHRTSGSLVLMASLSPPVGRQG

SEQ ID NO: 46061 - protein, 641 aa, Zea mays
  Coding DNA Sequence Number=SeqID_2686
MTNALNTGGEIGITARFASPHPGAGDQRAKEAGSHAGGMPLRQVDALLRLPTRQHGGPGPRVAQTGAPDAACKQLHRHLRHHRVSSIAEPIPRLEATQRATQQRQPDAAVNAAKSGPAVMTEAGAREQRSRRQPSSRPIRGQQENPLSRREDNAPVIRSSSGSRTLNGRPANYSPRRINSAAGQAALLAGAAGNASPSPKQPHQKRYAVSFGFAPSLPTDQRFEGWPLEGFNSRLRSRGPYTHYWSEVRRPALRRVPRPPQATRAPRPLLIRGSKAGPRRVHSRLRRRARDDQGYVRYITKARAALPRYFWACLWAPSRPLTNGARTSTRITRLQLTGDTMFGAHRGLGGCSRKPGSGQTVDSVNIPARELGPRPYTRATASSHEGTTRPAEALRKAIRPRRSETTPPRPRGLHPAGALTRTHRNKMQPRKAGPLAKKCDESLQASANTPFEARGLLSGTIIRGTLKTPNSQLVTPISIKLQRPDGARTRAKTRKTANSAPPDPGLGLGLRPGRRRTPLRPTQGSDSGSAPEDDELRFARPQGSDTVPASADDLRLARPRGSDSASAMEDRLDLGFGGASTSPNLGRRPATSIGSAIITLPRADSGRREQDRLRHSSDGHDITLVGFQDLSGCHIGMYSGH

SEQ ID NO: 46062 - protein, 404 aa, Zea mays
  Coding DNA Sequence Number=SeqID_2687
  Homolog annotation: Hit_ID=Q6J9V9; Match level="QueryCoverage=45%, HitCoverage=45%, E-value=5e-16, Identity=38%"; Hit description =Putative uncharacterized protein
  Subcellular localization annotation: CTP_CleavageSite=44; ConfidenceScore=5.53e-01
MAAAGGRKQQSSHLQAHVPSWDSERALSHGVKTTRPCSVPRTARARTTAAPRTTRPVALTLRQDRQHLWQAKRATLHLRHNDRVKKGIGKGDTPKGILLREGSGPQALLLIRGSKAGPSEEFNNRLRALGPRALLLIRGSKAGPSEGFDSRLRALGLRAHYWSEVRRLAPRRGSTAASDHSGPALTTDQGFVGWPPKGSTAASEHAERGMTLGTFDTWPRLGLRSRGTLGHFRDQQERFCNGIPSEGGIEPSDPIKRDRVRQITCRVRLTEAKSSLGRHRKLRLARPQGPGSTSTPDDRLRLARPQGSDSASTSEDGLRLARPQGSDSASTSEDGLCLARPQGSDSASTSDDGLRLARPLGSDSASTSDDGLCLARPPGPNLASTSEEPQATRNKTGVPSVSPQ

SEQ ID NO: 46063 - protein, 141 aa, Zea mays
  Coding DNA Sequence Number=SeqID_2688
  Subcellular localization annotation: CTP_CleavageSite=68; ConfidenceScore=5.41e-01
MPGKANCCRPARMQHSALSLAFAARTTARESLGSIGLAVRGSSSLVKGTPRPLFDEPRPGEMVGRGPRGNRPSRLLGPDSRRSPWQRLPGRGDDVVLRSGDPRTASPSEARSGLAEGVVDAEGVAAPFQRQDPSLQGQSVL

SEQ ID NO: 46064 - protein, 70 aa, Zea mays
  Coding DNA Sequence Number=SeqID_2689
MVMCAKDNQLLNMERKDKSKTHELKAKVMELPLDAQSSGRRLDVDERVEQCRAVAGVLHVLARFAQVLQM

SEQ ID NO: 46065 - protein, 133 aa, Zea mays
  Coding DNA Sequence Number=SeqID_2690
  Gene Ontology: Mol. function=DNA-directed RNA polymerase activity; Cellular component=DNA-directed RNA polymerase II, core complex; Biological process=transcription from RNA polymerase II promoter
  Homolog annotation: Hit_ID=A2YRD6; Match level="QueryCoverage=33%, HitCoverage=2%, E-value=3e-18, Identity=100%"; Hit description=DNA -directed RNA polymerase
  Pfam annotation: Domain name=RNA_pol_Rpb1_2; Domain location=23-116; Score=-36.2; E_value=5.4e-05; Accession=PF00623.11; Description=RNA polymerase Rpb1, domain 2
  Subcellular localization annotation: CTP_CleavageSite=57; ConfidenceScore=5.13e-01
MAPFLRGLIRRFLASKISNPSPLPPNQNASYSYLQTLNALKQSRTQPGGRWSELDLRYVKKSSDQHLELGYKVERHLNDGDFVLFNRQPSLHKMSIMVFNMAFSVLFDGARIRKCSAHGRMQRISPWLQPLSI

SEQ ID NO: 46066 - protein, 129 aa, Zea mays
  Coding DNA Sequence Number=SeqID_2691
  Gene Ontology: Mol. function=nucleoside-triphosphatase activity; Cellular component=endoplasmic reticulum; Biological process =proteolysis
  Homolog annotation: Hit_ID=Q9SCN8; Match level="QueryCoverage=79%, HitCoverage=13%, E-value=1e-32, Identity=73%"; Hit description=Cell division control protein 48 homolog D
MALISHATSTEVAPFSFVVNDTEIFCDGEPIKREDEERLDEVGYYDVGVRKQMAQIRELVELPLRHPQLFKSIGVKPPKGNGPPGSGKTLIARAVANETGAFFFLINGPEITKFICIARITNRLQNLFS

SEQ ID NO: 46067 - protein, 477 aa, Zea mays
  Coding DNA Sequence Number=SeqID_2692
  Gene Ontology: Mol. function=histamine receptor activity; Cellular component=integral to membrane; Biological process=G-protein coupled receptor protein signaling pathway
  Homolog annotation: Hit_ID=Q5NKT2; Match level="QueryCoverage=93%, HitCoverage=90%, E-value=0.0, Identity=72%"; Hit description =Putative uncharacterized protein 131L1.1
  Pfam annotation: Domain name=Abhydrolase_1; Domain location=228-470; Score=54.4; E_value=3.8e-13; Accession=PF00561.11; Description =alphabeta hydrolase fold
MGGARVAGGGGGGEWGARAAAAAALGVAGRALNCAVSFVVFSALDVLDVVLCLAYKLADYAAEAEWRPCYCSAAADPRVAQQLPPKPKVVRLSAASPARLHLQLEDVSDTLYARPSLLADATRAGGDGVAPALTVSPAAIAALIREKTDRAPRQAPCWSDCDCKVCHAWSGTSPASLSHLYVHVQAPPAMPMAVETEDVVFIHGFISSSAFWTETVFPAFSPAARSRYRMFAVDLLGFGRSPKPAESLYTLREHVEMIERSVLRRYRLGSFHVVAHSLGSVLALALAVKYPAAVKSLTLLAPPYFPVPESEAESAAQYVMRRVAPRRVWPPIAFGASVACWYEHVSRTICLAICRHHRVWDRLFRIVTRNRVRSFLIEAFMCHTHNAAWHTLHNVVCGGAGRMGAYLDAVDRRLSCKVALFHGRDDELVPVGCTLAAGARVRRARVTVYERKDHITIVVGQERLFAAELEAIWSADQ

SEQ ID NO: 46068 - protein, 32 aa, Zea mays
  Coding DNA Sequence Number=SeqID_2693
MAPFAPPLDPPLPGAAPGVLKVSSNTISHEYI

SEQ ID NO: 46069 - protein, 125 aa, Zea mays
  Coding DNA Sequence Number=SeqID_2694
MEVHRARTVADQFSPVQCPDMSPCVTLASAEAFPGLSTPQAPSPWSESLTGVPPVRPRLSPRRSSPLCPRIRGIFPATEFAVAFSPSLPNPGDPGANLACACLNSGDLTAAEISSAPRSRSTFLV

SEQ ID NO: 46070 - protein, 677 aa, Zea mays
  Coding DNA Sequence Number=SeqID_2695
MDKDRQGAAQKRQAVVRLHEARPKRQRGAAKAAAPGGGKPPLAAKSVVPASGKAPKAAAAAGGSKSAKAAPASSTVPEAAKAARELPPPGKRVADFATDISVDDYLVGSDEGQLVVVPPAAATTAAAVVPRAKGGAFSAGGEMPALTAVRDEAGAVSRRLKEMKEALSQAADFADRAASGALMAVVSAEVERLWTQHADAVGEKSAADSKCRKLVDKVAALEGEKTNLRRQVTEERKEANEALAKAQAAQAEANLARVEGGLARERAEQLEERLSALQSRVERAEAATRTEAERTRKQLMDSYHELGARTADFEVPDREPGLRCLEWVQEELQALSTIVEGFMSYASLVTCEEAMNALSREGCRHYEVFDQADEDFECDIYKVEDPIVKESAGALYNRMWGPYGREVVRERAETARGQAERGERVDDFGALNSVLPDPEPNPTEAVPEAALQPPPETAEGAPDALAATAVVRGPSPTAAPRAEDHVKVAAESTAEETATAGSSQVQDFGPTHATATTNFLAASTVDDGNKSDGSASKFSDFGDSASSVEWTEESSDEDLDYFAALDVAAAEASPHAADAEVVPGPSTGRRRRRAVAKRRLCALAHSAMLAKALRTWSGVFVMLDWCACSWSLREQFGVVVFAFVTLRPAAPLGNCCTDSLRGELRFFMLVALARLHP

SEQ ID NO: 46071 - protein, 159 aa, Zea mays
  Coding DNA Sequence Number=SeqID_2696
MGENPAKGLTQMYKNGNLQNGIRVQMCQVQFVEIKETAEEGGDGKSKTTNKKRNVNDRFMGILCRNSDTAANPPRAKLFWKQNPSVNEMKEVGFRNDGHMVTSEWQLAVGVDRRDDCNNGALPLPLRRHRNLFGGTSRIEISGKQRSGSKGKSEVRAQK

SEQ ID NO: 46072 - protein, 166 aa, Zea mays
  Coding DNA Sequence Number=SeqID_2697
MGKGKRGRGSPRRAGDKRKRDPSPPSEDFGDSEYSEEEVSSEFEGSLALASPPTSSDDSDDSQGLAAEVWTYIRSVERARLKGSDESEVSLDEENSFGSSEEQSGDDSDDEGGGGGDDSGDGDGSEGDDGGDKGSEGNDSGDDDSGDSGDKDDSGSGKASGKAPLV

SEQ ID NO: 46073 - protein, 63 aa, Zea mays
  Coding DNA Sequence Number=SeqID_2698
MTGYRLDDGLATMAGKPRLAIDFSFDRTKGNKEWAMKLEAKGLRLDLLTKLKYDDDWKRIKII

SEQ ID NO: 46074 - protein, 358 aa, Zea mays
  Coding DNA Sequence Number=SeqID_2699
MPPEVVLLGESPLDEDRLETGPINLSDDFVVVCDAALDTLDNDALGEMLGDETGESVLLSFSVRSMLPDKVLVPSDAAVVIGDTLLDIAKDESLRSLRTPTFLDTSSAPLQGDFLGDPPCDDIDEETSRSILSSVVTGDTLLDIAKDESLRSLRTPTFLDTSSAPLQGDFLGDSPCDDIDEETSRSILSARSILLDKVFAAEDTVVRFGETPQELLEIFFPFDSSWKEEDRLRIEGHSPSGARPPGNLLRAICVSGTASPTGVDELENEDGLEVADDGDAGAEILDGVLGREPPEDGLDGVTGRRSVDWDLFACDPAGVGDDARPPAFGDGCLLGVVGAAAGIAATLRFTGPSAWPLV

SEQ ID NO: 46075 - protein, 256 aa, Zea mays
  Coding DNA Sequence Number=SeqID_2700
  Homolog annotation: Hit_ID=Q6J9V9; Match level="QueryCoverage=44%, HitCoverage=46%, E-value=3e-09, Identity=37%"; Hit description =Putative uncharacterized protein
MAKRYQLPRSCVPPTTRRKDCGCPPSGGSEGGKTRCIREREDMVAFQGGHPPFKGDSPYLRPQPSWAESSPTRSKILPLWRGGWVPRVMQTGPGQKKPNRRARYMQPPSGYKRPSTFAQTSGGSERRFAFAIMTASKKGPGKGDTPKRILLHEGNRPRASLLIRGSKAGPSEGFNSRLRARGLRTHYWSEVRRPAPQKGSTVASGHSGSAPTTDQGGNDLVTESHQREASSPRTPSKGDQVRQITRIYFWSAPPGL

SEQ ID NO: 46076 - protein, 1750 aa, Zea mays
  Coding DNA Sequence Number=SeqID_2701
  Gene Ontology: Mol. function=binding; Cellular component=kinesin complex; Biological process=translation
  Homolog annotation: Hit_ID=A3A568; Match level="QueryCoverage=98%, HitCoverage=98%, E-value=0.0, Identity=73%"; Hit description =Putative uncharacterized protein
  Pfam annotation: Domain name=PAM2; Domain location=1509-1526; Score =10.1; E_value=0.25; Accession=PF07145.6; Description=Ataxin-2 C -terminal region
  Pfam annotation: Domain name=PAM2; Domain location=1606-1623; Score =15.0; E_value=0.042; Accession=PF07145.6; Description=Ataxin-2 C -terminal region
  Pfam annotation: Domain name=TPR_1; Domain location=891-924; Score =17.7; E_value=0.04; Accession=PF00515.19; Description=Tetratricopepti de repeat
  Pfam annotation: Domain name=TPR_1; Domain location=933-966; Score =3.2; E_value=2.2; Accession=PF00515.19; Description=Tetratricopeptide repeat
  Pfam annotation: Domain name=TPR_1; Domain location=975-1008; Score =6.8; E_value=0.8; Accession=PF00515.19; Description=Tetratricopeptide repeat
  Pfam annotation: Domain name=TPR_2; Domain location=891-924; Score =23.8; E_value=0.00063; Accession=PF07719.8; Description =Tetratricopeptide repeat
  Pfam annotation: Domain name=TPR_2; Domain location=933-966; Score =8.5; E_value=2.6; Accession=PF07719.8; Description=Tetratricopeptide repeat
  Pfam annotation: Domain name=TPR_2; Domain location=975-1008; Score =14.7; E_value=0.35; Accession=PF07719.8; Description=Tetratricopeptid e repeat
  Pfam module annotation: Pfam domain module=PAM2::PAM2::TPR_1::TPR _1::TPR_1::TPR_2::TPR_2::TPR_2; Domain location=1509-1526::1606 -1623::891-924::933-966::975-1008::891-924::933-966::975-1008
MAPKAGKAKPKARGDRKKKEEKVLPTVLDVTVETPDYTLLTLKGISTDRILDIRKLLAVHVDTCHLTSFSLSHEVRGGQLKDTVEIAALKPCHLTIVEEDYTEELAVAHVRRLLDIVACTTVFGAKKPEPKPDAADAAAESAKAGSPSPGKTAPGGGEEPMYPPPKLEQFYDFFTFSHLTPPLHYIRRSSRPFVDDKREDDFFQIDVRVCNGKPVTIVASQEGFYPAGKRALISRSLVGLLQQTSRAFDGAYKALMKAFVEHNKFGNLPYGFRSNTWVAPPVVADSPSVFPPLPTEDETWGGSGGGQGRDGKHDHRPWVKEFAILAAMPCKTAEERQIRDRKAFLLHSLFVDVAVLKAVASIQQLISNHTSLHETENGTIGSVLHTEQVGDMKIMITKDKTDASSKLDVKLDGSQAPGMSSDELAQRNLLKGITADESATDTATLGVVIVKHCGYTAVVQVPVDTELPAASVAQQEIHIEDQPEGGSNALNVNSLRMLLHKSCAQAPGVQRLQTSDPQDNEATQTFVRKILTDSLQKLENEVPIVTRPIRWELGACWVQHLQNPTSEKTETKKSDETKDVPTVKGLGKQFGQLKEIKKKTDDKGGKDNGHTDNTASVKDDKDIILQRLLPEAAFQRLKESETGLHVKSLDELIEMSHKYYDDTALPKLVADFGSLELSPVDGRTLTDFMHTRGLQMRSLGRVVELSDKLPHIQSLCIHEMVVRAFKHIVRAVIAAVDDINDMADSVASCLNILLGPFLEENNDKDCGEDHNLRKRWLEVFLIKRFGWKWKDEYCLDLRKYAILRGLCHKVGLELITKDYDMDMPNPFRKSDIISVVPIYKHVACSSADGRTLLESSKTFLDKGKLEDAVSYGTKALAKLVAVCGPYHRMTAGAYSLLAVVLYHTGDFNQATIYQQKALDINERELGLDHPDTMKSYGDLAVFYYRLQHTELALKYVNRALYLLHLTCGPSHPNTAATYINVAMMEEGLGNVHVALRYLHEALKCNQRLLGADHIQTAASYHAIAIALSLMEAYSLSVQHEKTTLRILQAKLGSEDLRTQDASAWLEYFESKALEQQEAARNGTPKPDASIASRGHLSVSDLLDYINPDDELKAKEMQRKQVRAKIKGRTGQNQSELVDDEDQRSPAPNNDKNLLTENGNSGVKENGTFVEHVKDEISSDTAIHIPQDGFTEECTSDEGWQAAVPKGRSTGSRRTGAGTRRPNLAKINTSSLNSENGRYKGRGISNFSSPRVSPSEAAVSIGSRPLAKKLAKSSSFNSKAVSTAVSSNTGENSFNLNSKPASPAIATAAAKVIPSTTPSASQTVRKSLSYKEVAIAAPGTLAKASSDVHTEEKDTGDQGASPESSNSKSPKEINGHPSGEKDGAIEVSPQDDTSQVSKSPDGGKPEQTDVLIGSNQPDTVHKKSSDPAETSVAKDIDLPAPVISSGTQTEADTPNDEAPTAIEANDSSSNDDERDSGADTPEQLSSGGENEKSSLSESEKNDTPREGAKETTSKLSAAAAPFNPSSVPAFGSMAVPGFREHGGLLPSPANVPPMLSIPLRKHPHQSATARVPYGPRLAGGYNRSGHRGLRKKPVLTSGEAPTETNTSGPRIMNPNAPEFVPGQSRSPNGHPASPNGPLASPGGIPSSPQDLLSSPDSTLESPVTASPQVSECSQISPEGDVEGVGVKQNMDDTNHPESKDGEVEPEQTKAPEGTEEGAAVKDAAEELIAAEQPKSWADYSDGEVEVVEVAS

SEQ ID NO: 46077 - protein, 342 aa, Zea mays
  Coding DNA Sequence Number=SeqID_2702
MGDGDGDGARDRERESSHIYIGVANCRAAEAEVGGGERRTTHEACCIGVPGGEHGRELLLLSFAASSMWSLRPTDEAQRSVRASAGRLGGADADADASYSYQLACCASVARAGRDVIMFSMALTCPYGWLAATARAMRGRLPACLPGGELAALPRISRRPISVRVDWTLQRKPPQPPLLLEKREGAAQRGQPKVDSAPWARRPPAEEERQLSARKGGGLVVLAVVVVVVVEDPLSRQALCGKHKGGRRRRGRRRRASPPHKAKRLQKEESFRLGRESEASCVSCSSPGAVSETVAMALQEQEADGDEGGEEDDEGEDERMTGYGVGELISACPEACCPLAAV

SEQ ID NO: 46078 - protein, 161 aa, Zea mays
  Coding DNA Sequence Number=SeqID_2703
  Gene Ontology: Mol. function=catalytic activity; Cellular component =cytoplasm; Biological process=signal transduction
  Homolog annotation: Hit_ID=Q8GYJ9; Match level="QueryCoverage=81%, HitCoverage=80%, E-value=7e-36, Identity=54%"; Hit description =Putative uncharacterized protein At1g31160/F28K20_9
  Pfam annotation: Domain name=HIT; Domain location=75-156; Score =104.5; E_value=3.2e-28; Accession=PF01230.14; Description=HIT domain
  Subcellular localization annotation: CTP_CleavageSite=56; ConfidenceScore=5.67e-01
MATRAAAAATLTAATSSLLRRSTSLRPQGLRVPHRVPPQRFVRHIASSSNEEAAARAAAATADAGGPTIFDKIIAKEIPSSIVYEDENVLAFRDINPQAPAEPRHTEILGRLLYAAKVVAEKEGVASGYRVVINNGAEGCQSVYHLHLHVLGGRQMKWPPG

SEQ ID NO: 46079 - protein, 24 aa, Zea mays
  Coding DNA Sequence Number=SeqID_2704
MALWRLRAEAVASASGGGTLTVTP

SEQ ID NO: 46080 - protein, 75 aa, Zea mays
  Coding DNA Sequence Number=SeqID_2705
MVVAVEAKARKLVNGLPKQQKLQVDCPHTLAQEPSDICLKVFLMVLSALEQSLSSDWLRLKPLKAGEQHVLKLLP

SEQ ID NO: 46081 - protein, 152 aa, Zea mays
  Coding DNA Sequence Number=SeqID_2706
MGKSKKGCGSSPRSGDKRKREPTPPSEDFSNSEYSEEEFSSESEGSPAPVSPPMSSDDSDDSQGIAAEVWTYIRAIERPGLEGSDESEYSSDEEDSSDSSEEGSGDDGGDDDDDGGDGDGGGDSGRGGDGGSKGGNGGGSKGNSKGSNKASG

SEQ ID NO: 46082 - protein, 136 aa, Zea mays
  Coding DNA Sequence Number=SeqID_2707
MRFSAPRGIHYGSMVVRQRGGTAKLYRRSGESRSGRKGGDREGSPVTTTGFAALPPVSRAGWGDKKILPERDHQSVATRKTGSVARFDQWVPRDIRTSGAAPSSQESRVAGSGWRGGPTSQHAVEAELGRLQPTRV

SEQ ID NO: 46083 - protein, 92 aa, Zea mays
  Coding DNA Sequence Number=SeqID_2708
MAKSMGFPKLEVGLSAMSKDDLVDNLAYNSLKLRTNIFSITAELLPLPEPYNPLADPVMKEALDIMSVANSIIDEVVNKLLNEATVKILKED

SEQ ID NO: 46084 - protein, 299 aa, Zea mays
  Coding DNA Sequence Number=SeqID_2709
MSEPPTLEAAHQTSAVRRPMRGGQTVKTPTPEILRDRSTGRWRRGELTSTRFDPNPALPVRNRPAHRSRTLHHRKLRSVRRSREGLPGRRQGRREQQHVLESPLRGTASNGTNAQGRRGRAGEARRRPPLRLGTPSGGERTSRGGRQSRHTGGGGGSGRRSRVVTLNGSLVASSTGNSLATSTTGIRAFAECQSRVLCRVSKPSVRAVALGKEPRPGHRYRFFAECNGSGTRQRSTLCRVPYQVLGKGPDMGTLSGGFFAECHRWHSAKVDSLSSAVGQTLGKGFMDETVLTKTYEENI

SEQ ID NO: 46085 - protein, 25 aa, Zea mays
  Coding DNA Sequence Number=SeqID_2710
MTKVMLAEVVQKSRNGTREKVRTIN

SEQ ID NO: 46086 - protein, 99 aa, Zea mays
  Coding DNA Sequence Number=SeqID_2711
  Homolog annotation: Hit_ID=Q651J8; Match level="QueryCoverage=66%, HitCoverage=49%, E-value=6e-07, Identity=46%"; Hit description =Putative uncharacterized protein B1423D04.11
MGMTRIAKFMNCRVTFTTQTSNEFYFLLGTLERTSKDLGKAKVLRRSSKGVHNRKEIKSESAATLSRVPGPVCTKMGAQDASRLRLRRTGYGWKDNEII

SEQ ID NO: 46087 - protein, 213 aa, Zea mays
  Coding DNA Sequence Number=SeqID_2712
MNRTPASKGPLQTELRFHLRRYEQPHSIGGPAEQRKTDEWLAVARSSSGDDGDFCSEGPNSSSDDLRADAAAMRPSPVPKLMRQGRAEGRRVGGQSVGGVGLRGCYTSAKQNFHPPGCSPRGLGGVISLLRGLNALRNASAGLVVPSCELAVARVHGRGPSSRAGMLTLSTVWPEPGLREQPPSLRTGREDDQGQTRLFYIRPCVAFRKETNL

SEQ ID NO: 46088 - protein, 168 aa, Zea mays
  Coding DNA Sequence Number=SeqID_2713
MESQSTPSYPKTSREEPRGKSKKGGSSSHHSGDKRKREPTPPSEDFGDSEYSEKEFSSESEGSPAPASSPASSDDSDDSQGITTEVWTYIRAVERSRLEVLDESEYSSDEENSSDSSEEGSGGDGGDGDGDGGDGDNGGGSGKGGDDSDKGGSGDGGGSSKGSNKASG

SEQ ID NO: 46089 - protein, 163 aa, Zea mays
  Coding DNA Sequence Number=SeqID_2714
  Gene Ontology: Mol. function=pyridoxal phosphate binding
  Homolog annotation: Hit_ID=A3BQM4; Match level="QueryCoverage=72%, HitCoverage=21%, E-value=4e-30, Identity=54%"; Hit description =Putative uncharacterized protein
MAMLQSVETDTWFGSLGRCLQKAESGDAPNQDEMHARAYSRTDASSLLKHVTGTASLQGYADSLLDATVRHFGSAPSAQPEENGFKGHGMLAPFTAGWQGNDLHPLIIERSEGSYVYDINGNKYLDSLAGLWCTTLVLNLEHYEDARAFCIWIFVLPIGLFRI

SEQ ID NO: 46090 - protein, 155 aa, Zea mays
  Coding DNA Sequence Number=SeqID_2715
MGKSNKRKREPTPPSEDFGDSEYSEEEFSSESEGSPAPVSPPASSDDSDDSQGIAAEVWTYIRAVERSGLEGSDESEFSSDEEDSDGSEDEDDDDDGDDDDGGDSDGDGSGRGSGGGDGSKGSTRGGSSTGSTRGGSSKGSTRGGGGGSSSKASG

SEQ ID NO: 46091 - protein, 815 aa, Zea mays
  Coding DNA Sequence Number=SeqID_2716
MVRSPAFALNLRNCDSAAFVREAEDEAVRLVGRYVPRTEGQRSWEIRGSNDRLNRVFELNQLPYDGYPGQDDADRRGKKPVVETKDDPAPAAAPSSKKRRLGTAMGGLGVSDGFARELMRTCVAPGERMSSPELRESSARMLKVTGGCWPRNVPIPRAASGDVFTSRMVRKWRVFPYGRNIGAVVWAVMDKDRQGAAQKRQAAVRLHEARPKRQRGAAKAAASGGGKPPLAAKSGASAPSKAPEATAGAGGSKSTKVVPPASGVAEASKAARALPLSGKHVADFGTDISVDDYLGGSDEGQLAIVAPGAAIATAAIVPKARGEALGAGGEVSALAVVRDEAGAATLRLKGVMEALSQATEALSQVADFASRTASGALTAAVSAEVERLRTQHADAVREKSASDSKCRKLTDKAEAKLARAEGNLAKELAEHLQERLTALESRAKGAEGAMRAEAERTRTQLMDTYRGAAGTPHCRGGFMSYASLVTCEGAMNALSREGCRHFEVFDQADDDFERDVYKVEDPVVKESAGALYDRMWGPHGREVVRERAETARAQAARGERVDDFGALNCALPDPEPTPAEAVSGVALEPTPETAAIATAAPTSAAAGEDLPPKVAEGAPDAPATAVPSAEGPAAEAAETTAEAAAEATAKAPAASGPSQVQDFGPAHATATTEFLAASTAEGGNGYGESASEFFDFTDSGSSVEWTEESSEEDLDYFAALDVAAAEATPYAADTPDVPGTSTGRRRRRAVAKRRVSTEEGARLRVSRAGRQELLSLPAAASTGEGELRSLFAGEELRIMLFNYREMGIIPKVEPM

SEQ ID NO: 46092 - protein, 132 aa, Zea mays
  Coding DNA Sequence Number=SeqID_2717
  Subcellular localization annotation: CTP_CleavageSite=33; ConfidenceScore=5.39e-01
MAANAAKGGPAVMTVADAREQRARRQPSSRPIRGQRESPLSRSNGRRFAFAETTAPKKGPGKGDTPKGILPREGTRLRASLLIRGSKAGPPKGSTAASDRVGPTPTTGQRFEGRPPEGSHGRLRLLGLRAHY

SEQ ID NO: 46093 - protein, 396 aa, Zea mays
  Coding DNA Sequence Number=SeqID_2718
  Gene Ontology: Mol. function=aspartate kinase activity; Cellular component=chloroplast; Biological process=amino acid biosynthetic process
  Homolog annotation: Hit_ID=A2WYM3; Match level="QueryCoverage=20%, HitCoverage=16%, E-value=4e-38, Identity=93%"; Hit description =Aspartokinase
MADQFADSAYDTFDIGFITPDEFGNADILEATYPAVAKRLHGDWIQDPAIHVVTGFLGKGWKSGAVTTLGRGGSDLTATTIGKALGLREIQPRWVEHVGEREGGKGARRPESGEREVGIPWPSCSSRAQVGCACSRGLQASTRVREASGPKRAPVPVPVLVPARPTFSKKALVLPFIGVRRGSRVMMALPVDVAGLCPRLGDVEAPPKPGSSLSSMAEAESEPLGRARRKSSAEARAVSEPWGRMKRSSSSSGAEPESEPWVGRSGPESEPWVGRSGVHRLLGLSPSPSPGSGGAEFAVFRGLARVRALGRAELLMVPLAGPGFLCVKCSFFGAVVAAIQSGLLLSEGKASGKPEMCPPLKGGLGRDGNPFGLYADGGYQLRIRRLEGTPNYGPRQ

SEQ ID NO: 46094 - protein, 314 aa, Zea mays
  Coding DNA Sequence Number=SeqID_2719
  Subcellular localization annotation: CTP_CleavageSite=63; ConfidenceScore=5.09e-01
MGDAHRLFASSLVERNSVGVGTFQPSFGFKDFHQPARLHPPPPRRRSPEMVTTSSWVGRSKPGCDLGPTLSFKDVHHPRWGGGRAEPALCLPRGSVGHPLPRHSRERALTGPAGGPDSDNAGLVDGRRRHLQRVGFVGLAPGGPFCRRVAAAPCRCPTRPGGLEWGSAGGLVGPAVGAEAEAAREVPVADGITATIRASGLRAGGDEPLVSLLLLRRPTPMEWGWPEHEFLGSVGLAVRGSSSSVKGTPRPLFDEPRPGRLPERGDDGVLRSGEPRTASPSEAKSGLAGGVVDAEGVAASFQRQDPSLQGQSVL

SEQ ID NO: 46095 - protein, 189 aa, Zea mays
  Coding DNA Sequence Number=SeqID_2720
  Subcellular localization annotation: CTP_CleavageSite=46; ConfidenceScore=5.64e-01
MTTVQTSIRGAAAPSASTPPSAESDPASDANTVGGSPRRRKMSAPRLGNRRRGLLQEPGPSRRLDRPLRSLSQLSPEDISPAHGLGNPTLALVPPVDDLARFQPPLLRLLGLGSHLLLGRRSLLFEPTPPLSMLTLLPLAPAHRRAAEGFFNWAREASGGKAHRAEGLLRLRDTNTSLVTFRSRQLTLG

SEQ ID NO: 46096 - protein, 81 aa, Zea mays
  Coding DNA Sequence Number=SeqID_2721
  Gene Ontology: Mol. function=aspartate kinase activity; Biological process=amino acid biosynthetic process
  Homolog annotation: Hit_ID=Q5JK18; Match level="QueryCoverage=86%, HitCoverage=11%, E-value=3e-15, Identity=70%"; Hit description =Aspartokinase
MELKMALFRRSQLSLGAPDCPAGHVLRKSGVNVQMISQGASKVNMSLIVHDSDAKALVEALQAFFEDDVLAQVKAENLLVG

SEQ ID NO: 46097 - protein, 60 aa, Zea mays
  Coding DNA Sequence Number=SeqID_2722
MGVSRGELLTPESGRSCLYPAVKGTASVRSLAIVCNSHADIPGEGLAWSLGPPDAALGAE

SEQ ID NO: 46098 - protein, 127 aa, Zea mays
  Coding DNA Sequence Number=SeqID_2723
  Subcellular localization annotation: CTP_CleavageSite=56; ConfidenceScore=5.28e-01
MAARLTGSVGGPAKDGVGFGKSLWSQRGTRWYTGQASSTCYSWRLPPPRRLECCLRRALREDCGGAAVLIVRGSCPPRQSGKGDTSGIKSKSSIHPPLVGVLDPTSGIRAKDSIVCGFNHPRVGKNG

SEQ ID NO: 46099 - protein, 97 aa, Zea mays
  Coding DNA Sequence Number=SeqID_2724
  Subcellular localization annotation: CTP_CleavageSite=53; ConfidenceScore=5.32e-01
MSYYGQQQPPVSAPPAQDVIAVADSRLACHCQRQSASGWMGRGRGGSRPGALRAREVDRALRSSKSPNRGPQSPLPPRRLSLLDRLAIQSGSSRLVG

SEQ ID NO: 46100 - protein, 68 aa, Zea mays
  Coding DNA Sequence Number=SeqID_2725
MELPLDAQSSGRRLDVDERVEQCRAVVGVLHVLARFVLVLQMQHLRGHISNMDLAEGVVDAEGAAAPF

SEQ ID NO: 46101 - protein, 268 aa, Zea mays
  Coding DNA Sequence Number=SeqID_2726
MKILEAERWLKGTNSHRVVFPQRRGRKTVDLPHPGAWKAERRDAYGSAKTWSPSKGVTLLLKAALPTCVPSRHGLSLLQHTPRSSPTARGLGPTRHASRLRAEEAKPPRAVRTTAQRSQATLHFCPDQQAKGWAAMQAACNRAKWAHFSDSQHARHGGPGPRVMQSVRRLLRGPGKGDTPKRILPREGTRLRAPLLIRGSKAGPPEGFDSHLRSRGPYTHYWSEVRRPAPRKGSTAASGYSGSVPITDQGFEGWPPKGSQPPQTPSEG

SEQ ID NO: 46102 - protein, 350 aa, Zea mays
  Coding DNA Sequence Number=SeqID_2727
  Gene Ontology: Mol. function=kinase activity; Cellular component =ornithine carbamoyltransferase complex; Biological process=amino acid metabolic process
  Homolog annotation: Hit_ID=Q6QP54; Match level="QueryCoverage=33%, HitCoverage=40%, E-value=3e-21, Identity=51%"; Hit description =Putative kinase
MEPSGGIAVGAVESLLTSSCFRKGAESRRRHRVCRAPSLPIWRGEPDGTPVLFPAARVSSGRVMMAPPVDVVGLRPRLGDVEAPPKPRSSLSSVAEVGSEPQVRARRRSLAGAGAESEPWGRAKRSSSSSGAEPKSEPWVGRGGDHRLLGPSPSPSPGSGEAEIVVFWGRAQVRALGRAEFAVFWDLARVRALGRAELAVFRDLARVRALGRAEFAVFRDLARVRALGRAEFAVFRVLARVRALGRAEFTVFQDLARVRALGWAERSFLWCLWPGLTACQSHSNKWHRSRSGAGGAVLLLGRSVERRSDGGHFGSAGWGARVRIKVSGHLCIKCSCDLVGRCGDLVRVAS

SEQ ID NO: 46103 - protein, 72 aa, Zea mays
  Coding DNA Sequence Number=SeqID_2728
MEEKFEVGHAAKCSKKPKAQLQVLSAEDMEKELSEEILAFEGQSLDVVKVVVELALSWSLAMTELQRNHCWS

SEQ ID NO: 46104 - protein, 196 aa, Zea mays
  Coding DNA Sequence Number=SeqID_2729
  Subcellular localization annotation: CTP_CleavageSite=50; ConfidenceScore=5.77e-01
MARAGSTGPRVAQAGSTGPRVARAGSTGPRVAQAGSTGPRVAQAGSTGPRVARKRSWGPHEEQGKVRSRVAHRLRGKTVEEMRGSMKGLCPVGGGERRLKEKAADHVGGGANHTLGPAVLSRGVGTRETQLDAVSEEERTGGVVVELAAIVALQGTDRAPELGGYPGEEVSEGGKRVGLQPKGESPKEMGVVIQND

SEQ ID NO: 46105 - protein, 156 aa, Zea mays
  Coding DNA Sequence Number=SeqID_2730
MTTSRASSSKLTAPVLREPYSSYVGSMASALMAKKKGVQLVALDGLDRCGQFIHRHKQLLYLTVVCTHSQIARFHRLHDLFDNQFGVALDQEPSRSYLGHDLEPIDEGLVFGDVGGGIKVETYSITELVSLRRCGDDFCTASGIEVGPIKINGPVF

SEQ ID NO: 46106 - protein, 117 aa, Zea mays
  Coding DNA Sequence Number=SeqID_2731
MGMKIDPNPYPNGVKTHRVSGFGYPLPSLGQPNISEQDICCCFHTTSFPLQEDIVRAERCCSCYMNKTASSAVPAAKQYLVQTTRGLNSIGYANLVDKFKERTDKEYDQYIRHFRTT

SEQ ID NO: 46107 - protein, 74 aa, Zea mays
  Coding DNA Sequence Number=SeqID_2732
MSRAFDDYYIEDCGVILASEVMQRRIDNSGQFVILATARRRIPEARAAEWRPLASPLLRRRRPSLGTSNDDGLP

SEQ ID NO: 46108 - protein, 59 aa, Zea mays
  Coding DNA Sequence Number=SeqID_2733
MEVRLCIEPRLLDLKVGHELSVKFYPRPGKGLKEDDQVLAEQVCEDEQPTRSPPSISKF

SEQ ID NO: 46109 - protein, 160 aa, Zea mays
  Coding DNA Sequence Number=SeqID_2734
MRCQAILALNALAIWSVGVAIWPRLLLGEGWASGEPKLCADGGYQLRLGALGGAEHGVSSELLTDPPTALPPEARSDFAEGGVAAEGAAAPPPSRIPLSKWSKSMKDVLAEKIFSEENFDAEGPKHQVAHLEVSGPNPSGVALVLGEPYSKSVGKMASAP

SEQ ID NO: 46110 - protein, 125 aa, Zea mays
  Coding DNA Sequence Number=SeqID_2735
  Subcellular localization annotation: CTP_CleavageSite=43; ConfidenceScore=5.16e-01
MVAPSPPPAARRVAGQTRMLLFRHGGKTSSSSPPPGELTTVVVAVALRGEEYHVVAAVEGHELETPEAEQRPRLKRLLKTTHLELNGKPYLGGWHSSRSGASGSVFLSDRSAKGQSDCGHFDLTD

SEQ ID NO: 46111 - protein, 331 aa, Zea mays
  Coding DNA Sequence Number=SeqID_2736
  Gene Ontology: Mol. function=alpha-1,4-glucan-protein synthase (UDP -forming) activity; Cellular component=cellulose and pectin -containing cell wall; Biological process=cellulose biosynthetic process
  Homolog annotation: Hit_ID=Q0PW29; Match level="QueryCoverage=38%, HitCoverage=35%, E-value=1e-66, Identity=93%"; Hit description=GRP -like protein 2
  Pfam annotation: Domain name=RGP; Domain location=94-330; Score =122.0; E_value=1.8e-33; Accession=PF03214.4; Description=Reversibly glycosylated polypeptide
MDHIKPKNTPHNEPLPLGQKLMLHHGSDAPLRIGHSSHENMRLRSNDLPPLSHTVQTQGYRVGNPGASHAPFVHCHAGSSSSHLPEPAVNYPHMSEEGFAPVGSHMDNRRAATKRKDPIVHPAGISATGYYVGSSSNTQLSNSVQPNPAPLSEPLLRQIRLSIDRSGWDGLHLIHQEGFQRNVAKDPSGKDINALEQHIKNLLSPSTPFFFNTLYDPYRVGADFVRGYPYSLREGVPTAISHRLWLNIPDYDAPTQLVKPLERNTRYVDAILTIPKGTLFPTCGMNLAFDRELIGPAMYFGLMGDGQPIGLVLQPFEWIKKTFFEKPQPEA

SEQ ID NO: 46112 - protein, 334 aa, Zea mays
  Coding DNA Sequence Number=SeqID_2737
  Homolog annotation: Hit_ID=Q6J9V9; Match level="QueryCoverage=23%, HitCoverage=32%, E-value=3e-22, Identity=64%"; Hit description =Putative uncharacterized protein
MTASKKGLGKGIFRKGSFSAKETGPRALLLIRGSKAGPSEGGSKAGPSEGFDSRPRAHRVRDDSGYVRYMAEARATLPSAARPAPTAVPTTRVRLTTAEFSLGHNRNLRLARPQDSASASPAGGIASSPDLGLGLRRRLRHFSDDHVIAYTGLKHFSDSHVGMKALDKACYAEPPIAECIPMPRVLLSANVVVTERRALPSAALGKEAFAECLTKSTRQSAEHSTKTRIPVAEPPPRLHRAATAPPRPGRAAAALPLAKDLSRLLQAHPLGGVEQKTCYSAPRLAEQQATALSARERTGPSRNDDASPKRADKDYSVGKELVSYHVRQVSTQKV

SEQ ID NO: 46113 - protein, 204 aa, Zea mays
  Coding DNA Sequence Number=SeqID_2738
MTIKHQKFLNSNNLLAKDMDIKSDEKATKIDTNVQPVDVKSNEKGAGVGIVEASHGKAHVVITNPLIIVPIQLETPIVNRLDGNNGTSLSAFRDRGVPKPTSECAACPSPDGSSAWASAKGGEARWPESSVREVEVPRPSCSSRAQVRCACSRGVTSVHAGEGSERPQESACPVLGPARPTFSKKALVLPFIVVRRGSRCTMGV

SEQ ID NO: 46114 - protein, 102 aa, Zea mays
  Coding DNA Sequence Number=SeqID_2739
MRIILRYLLLTCGGGCETARVSSHTFIAQQVVGNNVHELAKGPPSQQNPPEGLPRNPLQDRHLSKILPRAFPGIPCRTAITAKSSRGPPYTDHSPTALAPFG

SEQ ID NO: 46115 - protein, 126 aa, Zea mays
  Coding DNA Sequence Number=SeqID_2740
MRSSSSSGAKPESEPWVERGGVSYGARGWTWLLSASLCRVAQQTERRRRRCPLVRPATFALNAPAIRSVGVVTWPRLLLGEDWASGEPKLCADGGYQLRLGVLRVPLIMVPDKVVVLNGIMESGVI

SEQ ID NO: 46116 - protein, 94 aa, Zea mays
  Coding DNA Sequence Number=SeqID_2741
MRLSQNTLNTKQPAKVSKDDGGGPLGEVDGVTTQGEFMMLASGVTVMSSRSDAMAGGSRRVRHQQHDAEEGNANRGSRVKSVLETEEWHAALFI

SEQ ID NO: 46117 - protein, 173 aa, Zea mays
  Coding DNA Sequence Number=SeqID_2742
MTKICLQLAFLRHEEEACIPKTKLPVIAYVESKWLIMFLRTFGRMPPIVSLRRSLLETLFALEDVASRSKVGQTRLDGVMLALSQLLQFQQGSKVAKYISFLYAQRGADVAILCSNICPLTWVVLLHMANPMATVALDARATLEAVGRLLDGGGDIRKVADLFNPVDVVERGV

SEQ ID NO: 46118 - protein, 137 aa, Zea mays
  Coding DNA Sequence Number=SeqID_2743
  Homolog annotation: Hit_ID=Q7XBD9; Match level="QueryCoverage=56%, HitCoverage=4%, E-value=2e-07, Identity=40%"; Hit description =Putative gag-pol
MENHLGKQCYHKGDFRYVIMILVIFISIHFVIICGVLLWRTYETHPTLSLKSGCDRLAKFMTIPHCSYLVLKMLGPYGVFMVRAVFQSSTECHMKVVKMAHSVRTFIAQKQLAVEADALPKDELFISALEATSVVAI

SEQ ID NO: 46119 - protein, 162 aa, Zea mays
  Coding DNA Sequence Number=SeqID_2744
MAPKRDSSKTAPSIDEAAKAALLAEKKRQGPRGQHPQEAFEDEAVSKRQCQDHPTPEGNLRTCSFGGVLQAPPPGFAPPESEGAIEDDKVIGISVEDQLQLRALRIKNHNLQKHKDILEAKRQRVTVQAKVCQMIQDEEQRAWELEQEITLMQGEGQHNLQH

SEQ ID NO: 46120 - protein, 121 aa, Zea mays
  Coding DNA Sequence Number=SeqID_2745
  Homolog annotation: Hit_ID=Q6QP51; Match level="QueryCoverage=33%, HitCoverage=18%, E-value=3e-15, Identity=90%"; Hit description =Putative growth-regulating factor 1
MVEKGHGSRGRMTVTRSAITKRRRWRQSGQGARFSFSGYSLRDQERGYSERDPSPRRKRAPSPPTDQRFEGWPLGRVRQPPQSTRAPRPLLVRGSKAGPSEGFDSRLRPLGLRAPLLIRDS

SEQ ID NO: 46121 - protein, 269 aa, Zea mays
  Coding DNA Sequence Number=SeqID_2746
MEVCCQTSFCQKEDGFPKLLRACTVRLGIRSQPEYDGREFVEHGTEKCVVTVYIGSSPHHVEWSVTAEDAEKRNRQLHVDLTTAQARATALESHEVIAVDALKQAEDEHVQKLMEAYLVTHNQRRALWIQEPAPSNPVQPIKAEDPQILEGHPVSIRGEKKAWELPEGAIVLEGIPVFPQAMDKQEHPESSQDPPPELFEPLTMKNIPAPSLEVKEEAASTPPSPRPSEELQESVPLEEEFDPVLPSQSPPEEVININSLLTHPGDVSD

SEQ ID NO: 46122 - protein, 234 aa, Zea mays
  Coding DNA Sequence Number=SeqID_2747
  Gene Ontology: Mol. function=oxidoreductase activity; Cellular component=cytoplasm; Biological process=electron transport
  Homolog annotation: Hit_ID=A2WZC0; Match level="QueryCoverage=50%, HitCoverage=18%, E-value=3e-30, Identity=62%"; Hit description =Putative uncharacterized protein
  Pfam annotation: Domain name=GIDA; Domain location=113-234; Score= -158.5; E_value=2.3e-07; Accession=PF01134.13; Description=Glucose inhibited division protein A
  Subcellular localization annotation: CTP_CleavageSite=45; ConfidenceScore=5.67e-01
MVVVVAGPSQTAKISVSPEPGSTRSLSSQLRARAGPFPVSWRGARAAASPRLELAQPPRLDLALGLEPGSSQPPLSSPGARARVPLAAAAVEISLSDARCTCSWYYRVTRFGIVVGGGHAGCEAALASSRLGARTLLLRSTLTGLRGSIRSVVLLQLIYPTQPCNPAVGGPAKSQLVHEVDAFGGEIGKNTDRCYLQKRVLNSSKGPVVRALRAQTDKREYAIEMKNSVERSIW

SEQ ID NO: 46123 - protein, 161 aa, Zea mays
  Coding DNA Sequence Number=SeqID_2748
  Subcellular localization annotation: CTP_CleavageSite=48; ConfidenceScore=5.29e-01
MKLWKETSRSSKITTSSRCGLAATPSRLPVKAVVIYVSFPHFDLFSTRAKSPKKCKCKNSACTIECRQKGKNSDEARKSSLRGCRARRSYKKPFLGERNLHHCLLSFGFALFSFVNLLLSFVILYIFKYCKNYSSLKGKISGRRQLCPEKLPGHINHHVRL

SEQ ID NO: 46124 - protein, 191 aa, Zea mays
  Coding DNA Sequence Number=SeqID_2749
MQAACNRTKWAHPFVSNASSMEAQAHTSCNRRAGCYMQETAPPLAPLPCLLDYGTSTATRGNPVYDPTVPTRHIGHGSVSRGRRRDGRYGQKWAGRTRKGDTPKGILLREGNGPRAPLLIRGSKAGPSEGFNSRLRALGLRAHYWSEVRRPAPRKGSTAASGHSGSAPTIDQGFVGWPSKGSQPPQTQSEG

SEQ ID NO: 46125 - protein, 196 aa, Zea mays
  Coding DNA Sequence Number=SeqID_2750
  Gene Ontology: Mol. function=actin binding; Cellular component =intracellular
  Homolog annotation: Hit_ID=Q9AY76; Match level="QueryCoverage=63%, HitCoverage=92%, E-value=4e-30, Identity=59%"; Hit description=Actin- depolymerizing factor 2
  Pfam annotation: Domain name=Cofilin_ADF; Domain location=17-134; Score=21.0; E_value=1.8e-06; Accession=PF00241.11; Description =Cofilintropomyosin-type actin-binding pr
MHNYMQSNASSGMGVAPNIRETFVELQMKKAFRYVIFKIEEKQKQILRLYMYPCGASYSFMLNAYALAFPLVSVHQTFYLIYRYPRSPLTSRIRAKMLYSTSKDRIKYELDGFHYEIQATDPSEVARWTLRFCGSGLTEAGSPLKKGPMEGHEPFGLKLIMDKISMDYGFMLNDGCIVHACFRVMIDNAIEDLNNT

SEQ ID NO: 46126 - protein, 150 aa, Zea mays
  Coding DNA Sequence Number=SeqID_2751
MTFLIDIIFNKSLPLMILMFQMGSLMLGASRGRQERGHLASSYSSGSGRLDTGIVPKALPCSLDYELVTKFADEVMMLSSMDASLVIPPVIFLWMDVLARCTLMNKDPGTHMLCTRLCPWETGVTTICEELESSRPQAWTTPHGEADGPT

SEQ ID NO: 46127 - protein, 185 aa, Zea mays
  Coding DNA Sequence Number=SeqID_2752
  Subcellular localization annotation: CTP_CleavageSite=39; ConfidenceScore=5.46e-01
SPAPKPSARSPSRPSQPSLPSPAEAPYARSSPIELRPVRSVLLFSNRAPDLESSRALHCLAPSHGALSCSLMAEATWSQPSRAPVHLVAAAVLVFFLRAVLSSMDAAAAALEFSLHALSFNSVVVPTVGLCVRALDTVKRCVSLCPSPPDRDLALLLASLLVKSFSNPRHKIHSDTISSSFRASA

SEQ ID NO: 46128 - protein, 155 aa, Zea mays
  Coding DNA Sequence Number=SeqID_2753
MAPVVGAEVVAAEEVLITDGITATIRAPGLRLFGFDSLSSPLEWGRGRGPCCSSVRPEAIAAAVWPPGAEVVVAAAGAGDAGAGGNGVSMDRGRVGSKRRLRRPEPDRAVHWRDQRRSRVAEATSRAGVLGGQLAEASGAGFLEETLAAMARAWC

SEQ ID NO: 46129 - protein, 148 aa, Zea mays
  Coding DNA Sequence Number=SeqID_2754
MALGKEGNLGTGKDIFAECCCQGTRQRDWQRGPLEDSLPSASPLDTRQRVLLCRVPTRALGTGTGGGVHWTCLCRGPHTRQNWPLCRVPRKALGKGSVTVTWRRDGDFSLPSAKWHSAKSLPSARQKVLGKETVVDVQFAERSLSSVK

SEQ ID NO: 46130 - protein, 439 aa, Zea mays
  Coding DNA Sequence Number=SeqID_2755
  Subcellular localization annotation: CTP_CleavageSite=57; ConfidenceScore=5.06e-01
MHKGSAKTWLPFKGVTLLLKATLPTCVLSHHGLSLLQHAPRSSPYDTGAGSHASCKLAQGRRSQTAARGARNCPAVTSIPPLSPRPAGERADRHAGGMQPHQAGGSSGHVVSQAHVPSWDSERTLSHSVKTACPCFVPRTARARAMAAPRTTRPVALTPRRDRRHLWQEKRATLHLRHNDRVKKTPSPPTDQRFEGWPLGGVQQPPQSARAPRPLLVRGSKAGPSEGFNGRLRPLGLRAHYLSGVRRLAPEGFTAASDVERGMTRGAIGSSASPDLGLGLGLSPGRRRTSPRPTQGSDSGSAPEDDELRLARPKAQTRAQPRRTTNSASPDPGLGLDLGLSRRSPSRPTKGLGLNLDLGRQTRPQPRRSLRLAQPRARTDHVTGGAIITLPLASSGYGEQDQRPIWLAPGPPGVETPTRDLSVSGEIPGVLGFKETKTQ

SEQ ID NO: 46131 - protein, 472 aa, Zea mays
  Coding DNA Sequence Number=SeqID_2756
MQPDCTPSLVVTQDGDLQFDGGEKQAGLRPLPLPQLQGFSSSVLGRGVRRVGVGPYAGGDLLLPSVIGGKGVRRSWRWQLPRAWLSNPSGFGAAPGAAFRHGSWKRFLCRRDSRCRPRADLQLYGLLHVLASRVRAWARVKKVHTQPIKRPSFEFNKGAKGQPRAPLVWRTGLSGVPPDSKQYLSGAPGDSDSTSSLSGILGSRRAIIHRTVRCAPDMSGAPRKHGLRNSPASVSRGSRSAKIHRTVRCAPDCPVCQRSNGSLRRQRLSAVHLMRAQRAQTSDLPIPVHRTSNSTCPVCTGHPGGPTSQKLQRLESNGSDDVAGAPDCPVCTGLSEGLMAVASALRSSLLLFGPPEQKSSSSPLLERATESLGSVGLAVRGFSCLVKGTPRPLFDEPKLGVAVSARTEAELASKRRLAGRGLGVAGRVVCSSRIPGEDPGSDGPGVVLMSSFRVEILRLLRCPRLGRTSPKV

SEQ ID NO: 46132 - protein, 148 aa, Zea mays
  Coding DNA Sequence Number=SeqID_2757
MNKTSALKVPLQMELRFRPRGYEQPPHRGACGATSSGRLASDLCSSSHGPRTDAATGRLSFASPLKGREPDIKAKEPEDASSAELEDGFHHQKLEEEVASRPVREVEPRLTSLSAPARMMKILEAEGGTKIAARLASPHHRAGGHRLG

SEQ ID NO: 46133 - protein, 59 aa, Zea mays
  Coding DNA Sequence Number=SeqID_2758
MGLGVCGSLCQVWVRPLGRSARHCGTGGYEIDGFGYDYGAGEDEVVEGDFQEFQDYDEF

SEQ ID NO: 46134 - protein, 248 aa, Zea mays
  Coding DNA Sequence Number=SeqID_2759
  Homolog annotation: Hit_ID=A3AJE1; Match level="QueryCoverage=34%, HitCoverage=57%, E-value=2e-13, Identity=41%"; Hit description =Putative uncharacterized protein
MDPMLGAIIIGAEHVCAGANTIGAYTSDADLGAEVDVRSTTPTSAPRSMAPRYVPINSTLRLACCCAHFNSSKLEMSRRGKYAKQRKGPLTGTAFDPLPLPSGVPVPMCFCGDPCKVDKSEDHDTYRQRYWMCANFAFEPTIVQRRMNLMTPPPLCDFEQWIDTEISEKDKKWLENLQKWDAEDKERMKKRREELAAEQQREDEEKMRRVAECREDKEKKLERARRAKEAMEENPDAFHKGKWPRCTQ

SEQ ID NO: 46135 - protein, 162 aa, Zea mays
  Coding DNA Sequence Number=SeqID_2760
MASGSSRGKGAVNERRKDGGKLTPMCFDGPLGPDFFEEAVFNFPVQSKKDFNKEHSLVKENCGFTRWVDPRPIFPHAEYISYLQNRIFDLEREVSNKNDEEERDTNNGGASQVQVCPDPYCCCPCHNKNVGPPSSPPHPQQTPTMGGYYGEGSTQFGMWEHY

SEQ ID NO: 46136 - protein, 85 aa, Zea mays
  Coding DNA Sequence Number=SeqID_2761
  Gene Ontology: Mol. function=ion channel activity; Cellular component= integral to membrane; Biological process=ion transport
  Homolog annotation: Hit_ID=Q4VDM4; Match level="QueryCoverage=60%, HitCoverage=9%, E-value=3e-09, Identity=60%"; Hit description=Cyclic nucleotide-gated ion channel 2
MDVGLASAVTALRTCTDVAHLAHVLEQFRLAWCGKLVRDARVVAPPRASALTSSSLGVETKLSMHAGGCHVVCWNGDISLFTWFM

SEQ ID NO: 46137 - protein, 472 aa, Zea mays
  Coding DNA Sequence Number=SeqID_2762
MVLLHSARYQQSLRRYHARGVRSRDLQARILTAEGSSGTLGVNYTFDEGLLRESGSSRRLGRSPRGLGQLSPEDISPARGLGNSIPASVPPVDDPARLWPTKSSFRANSASVRADTATPGFGSSKSDRGVPLTKQEKPRTWCLKREVEVQYRDSRQPCGASGRRSKRRFAFAIMTASKEGPGKGDTPKRILLHEGNRLRASLLIRGSKAGHSEGFNSRLRACGPRTHYWSEVQRSAPQKGSTAASGYSGSAPTTDQGGNDLVTESHQREASSPRTPSKGDRVRQITRSHLAAPLTGLTKGQRRLRRSDCCATRQSEADRQPGPASGTIGNSASPDPGLGLGLSPGRRRTPLRPTQGSDSCSAPEDGELRSARPRARTWAQPRKTANSAPPDPGLGLELSPGRRRTPFRPTLGLGLSPGLSRRSPPRPTQGLGLDLGLGRQTRPRPRRSLHIAQPRARTDHVNRRRHHYPTPS

SEQ ID NO: 46138 - protein, 289 aa, Zea mays
  Coding DNA Sequence Number=SeqID_2763
MTSHGSSDDGNALTHTDGLAREGFPRILWEVLQGAGYLTPPQYTVQQFEKHRVPRCRVRMILEPHPLQPGWRSLDSESFGYRAEDTIEAIALHGLTTFCGFHPLELSTHPIGLFPVEKEDNPMWKDQVEHAKDIWALYPGHTAHLSVRCMNALYRLQVMRGEAMSHLMALLEATKITLDNREELVVDLSQELVEKDLQVEQLSDEIHELEELVGTRENTIEVLEDQLINTQQQLAEANEHLDMHHQEIQDQEANEDVDIEGGDEPASSVDTAGSGRPPSPESSAASFAH

SEQ ID NO: 46139 - protein, 181 aa, Zea mays
  Coding DNA Sequence Number=SeqID_2764
  Subcellular localization annotation: CTP_CleavageSite=70; ConfidenceScore=5.20e-01
MEETHLHVFDAFCPRQSTPARAPACPAPRPSQTSAVARARAYKTLPGFEYTLPRTLKTSPELARRRLPVRSESAAAQSPCHRRPASRAIPNPVQPSEKTVHDSVKLPERGIRVCFAGEASPRSPELSTPPEYVDRFGRYTRRRRAHPPALVDRAIPAIPDVKPYLDVTARVSPSQPHPKST

SEQ ID NO: 46140 - protein, 455 aa, Zea mays
  Coding DNA Sequence Number=SeqID_2765
MTDKGKGKGIVIGNPRMSLISQKEIARKASDEKAKKLDDAGYAVGARVIELLCHKEKPRAGAVLPDEFTPRLRAASGNGHPLDSPEARLGQASLGRLTPYPDTRASVGQAEVTAVTSPLFFTVRYDGKTAPLASLRLPCQPPRRRLTTSHDQPPSLASGATGSSASPDIRLRPRGGGLRLARPPDSALTSVSGGIASSPDPGLGLKRSLCLARPWALTDRANRGYIITLSLASSGYKEQDRRPIWLTPTIGNDGLRRFSDGHTITYTGLKLSPDSHVGMIIQGLPTSCVPSRANPSGQGHAATISLVGPGTPSNLFSPGWCSASGVSSSCPLMAATTWYSSPHGVTTTTVFDSPGGGELGDNVSPWQKRSTPVVPATLLAGGGRGGATMATQETAPCRLSHQSESTTPALPPGTCWAMSSHLRRQRVSLPRNVSTPSRLMTQHPHKGSARRYPRT

SEQ ID NO: 46141 - protein, 49 aa, Zea mays
  Coding DNA Sequence Number=SeqID_2766
MAFTGQPPSRMQLRWAIDGYQYLFVAIDKSTKWPEATPMVHESRLEGGE

SEQ ID NO: 46142 - protein, 63 aa, Zea mays
  Coding DNA Sequence Number=SeqID_2767
MALSWFLLACCKLLRVATLRPVINRFLTIWESLRSSPISRKKNVSLLRLATILTDCIATLATC

SEQ ID NO: 46143 - protein, 159 aa, Zea mays
  Coding DNA Sequence Number=SeqID_2768
MPANDKHRDAENWGAAYGVEEGERLAGGLVLATAVAGTHARVTARRSARPPACSPAPVCSPAGLLARRPPACSPAGLLARAGLLARAGLLARAGLLARAGLLARAGLLARAGLLARAGLLARAALDPLKRRRLLLESRGTRTYGARFFTGPMCCIPFNN

SEQ ID NO: 46144 - protein, 343 aa, Zea mays
  Coding DNA Sequence Number=SeqID_2769
MALPVDVAGLCPRQGDVGAPPKPRLSLSSVAEAESEPWGRARRRSFGRGQGGVRALGSSEAEFRRLPGLSPSPSPGVGRSGVRRLPGLSPSPSPGVGRSGVRRLPGLSPSPSPGVGRSGVRRLPGLSPSPSPGVGRSGVRRLPGLSPSPSPGGRAERSSPWRLRQGLTACQIHSVEWHRSRSGAGGAVLLSDWSVERWSDGGHFGSAGGARVRIKLYADGGYQLRIRRLEAPEPLHRARGRSGTDSTFYIRPYVAFPQGGGGSAPCYPRWAPNMVSPVSCKRVIRVDVRAPFVGGRLGAQRHAQKYLRVICRTRSPGDGVRGLDASLRWDSVTRSFPLVSEMS

SEQ ID NO: 46145 - protein, 66 aa, Zea mays
  Coding DNA Sequence Number=SeqID_2770
MEEVDEHEGQHGRISRKHVKERSIMLHVKKVESPIMLSVKVKERSISSLLYLGSKEKGERTPGYGG

SEQ ID NO: 46146 - protein, 225 aa, Zea mays
  Coding DNA Sequence Number=SeqID_2771
  Gene Ontology: Mol. function=aspartic-type endopeptidase activity; Cellular component=chromatin; Biological process=RNA-dependent DNA replication
  Homolog annotation: Hit_ID=Q10GU0; Match level="QueryCoverage=44%, HitCoverage=7%, E-value=2e-10, Identity=39%"; Hit description =Retrotransposon protein, putative, Ty3-gypsy subclass
  Pfam annotation: Domain name=Vicilin_N; Domain location=16-130; Score= -73.6; E_value=0.091; Accession=PF04702.3; Description=Vicilin N terminal region
  Pfam annotation: Domain name=zf-CCHC; Domain location=92-109; Score =14.8; E_value=0.0089; Accession=PF00098.14; Description=Zinc knuckle
  Pfam module annotation: Pfam domain module=Vicilin_N::zf-CCHC; Domain location=16-130::92-109
  Subcellular localization annotation: CTP_CleavageSite=83; ConfidenceScore=5.18e-01
MEDRKCKISGPQPGSSNRPRFSGNPPQQFRQNQHPPQQQQFQKQYPQHQQQNRQNNQSGGGQFERQNQQAPRLPSPANQQNSQAAPIQGRSRACFHCGEQVHWVMQCPKKAAQQQSGPGALAKQNVSQPGAGNCSQPRYNHGRLNHLEAEAVQETPDMIVAVRLAQARPGDPRHRNSPIALTGVQEPAGARGPAPTTSDTDPHTDMTVATSRTSLTTPPELYCRR

SEQ ID NO: 46147 - protein, 354 aa, Zea mays
  Coding DNA Sequence Number=SeqID_2772
MERGNDVSPLAWSVRAQGRARRRLLLRLRPRSGEDAIPPEVEFEAEPWGRARRRPPSEAEAEAEPWGRARRSSPSEAEVESETWGRARRSPPSEAEVEAEPWGRARRSFLLRLRLNLVVASLTLAGGTTVGAGSPSARSALLLKASLAQFENLRPLCDELEPEAAVSAWTEAESSQKEASSAQERVASQAEEVQQRRLEPGQVIRERDHPRSHATEAVSWADVLGGQLVEATERPVEVSARAGTLAKTLATMAQERCWRPPLRWRSFRPCRRPRPGQIPPKVEITPKVLLLNLSMSKPAGTICLYRIAYPSESYFSRKVMSEDPAIEAVEKRERCSGRKTFSEENFDAEGVPPF

SEQ ID NO: 46148 - protein, 158 aa, Zea mays
  Coding DNA Sequence Number=SeqID_2773
RICPGVSQLSDSPRCQEEVCAGLLQRFARLRPLATFEHWKKQTATCSTPSAAPEHARARARAAPKPSQCPAIPNPVQPSEKTVHVSVKLPERGIGLCFTGEAGPRSPDFNRPPATVDREYILVPEQGAAQEVAPDPVPEPAPEDLPATALEGKPRFYA

SEQ ID NO: 46149 - protein, 78 aa, Zea mays
  Coding DNA Sequence Number=SeqID_2774
MEYLFDEPCGHQLVDLLAYGSVLFFVESAQRLLHGSGSSSDIQRVLGDIPRQVLADPTGSRWRPCPDTVGNAVLDALG

SEQ ID NO: 46150 - protein, 178 aa, Zea mays
  Coding DNA Sequence Number=SeqID_2775
  Homolog annotation: Hit_ID=A9WC61; Match level="QueryCoverage=57%, HitCoverage=7%, E-value=1e-06, Identity=35%"; Hit description =Autotransporter-associated beta strand repeat protein precursor
  Subcellular localization annotation: CTP_CleavageSite=24; ConfidenceScore=5.52e-01
MGAIKVKAQSTQGTRSRLARAQPRAKAADPGGFTSRPRAPSSNGHTFGSPEAQSSQRSNLGQIATPTDPSGDIGSSVSPDPRAWAQPRRSTTDSASPDPRARTQPRPRKTVSASPDPGLGLNLDLVRQTPLRPTPGLGLSLDLERRTRPQPRRSLRLARPRARTDHVTGGGHHYPTPS

SEQ ID NO: 46151 - protein, 222 aa, Zea mays
  Coding DNA Sequence Number=SeqID_2776
  Gene Ontology: Mol. function=kinase activity; Cellular component =ornithine carbamoyltransferase complex; Biological process=amino acid metabolic process
  Homolog annotation: Hit_ID=Q6QP54; Match level="QueryCoverage=30%, HitCoverage=29%, E-value=7e-10, Identity=52%"; Hit description =Putative kinase
MAPPVTWSVEAESEPWGRARRRPSSRVEVESEPWGRARRRPSSEVEVESEPWGRARRRPSSGVEVEFEPWGRARRRPSSEVEVESEPWGRVRWRPSSGVEVESEPWDRARRRPSSKVEVESEPWGQARRRPSSEVKVESKPWGQARQRPSFGVEVESEPWGRARRSFLWRPRLDLDAVSLTLAGGTAVGAGQAALFSCQVGQWSSKVTAVTSALPTEERASG

SEQ ID NO: 46152 - protein, 432 aa, Zea mays
  Coding DNA Sequence Number=SeqID_2777
  Gene Ontology: Biological process=response to biotic stimulus
  Homolog annotation: Hit_ID=A9P7Y8; Match level="QueryCoverage=49%, HitCoverage=88%, E-value=3e-63, Identity=59%"; Hit description =Putative uncharacterized protein
MVGLVGGSTARAEHVVANAGGEAEYVRRMHRHAPTEHQCTSTLVKHIKAPVHLVCPPSTPLFPTLNAAGPGGSAVGLPRVWAAISLRIWSQESFVRFPRPCWVWELVRRFDQPQRYKPFVRNCVVRGDQLEVGSLRDVNVKTGLPATTSTERLEQLDDDLHILGVKFVGGDHRLQNYSSIITVHPESIDGRPGTLVIESFVVDVPDGNTKDETCYFVEAVIKCNLNSLAELRVFRTTLTVALLSQGLYQQTGFRVKHSRNELKSPGDSAIYAPTMVESSANIITEPRLAEPLVIESFEVPEDIMVEEVIPEASMPTIGTDLVTTIEDPMAPLTRSPAPSLVDPTTASSGKPIVVSSGEPSVTSNPWLSTNPPRDPNIEEVLHDAKAIASNIEYNNLSMKFCKYLLAKVDHLEDWLCGLLRINSNELEGSTQV

SEQ ID NO: 46153 - protein, 204 aa, Zea mays
  Coding DNA Sequence Number=SeqID_2778
MPPAPPQGLPAAGGDPDGDRDDDDAGGSLSHGTELSEEPEPKGWIARPITRDAARGCHFHDALNTMLCRAFDRHTWSIEYHCVVYQHHRGLYPDQWEATCLYYPSRSTGSAGGVIVSPVGEGNPRLNSMVNLAVVLNTELDHALDELGKVWVEVAEVHVECAAHHYLDGGSPVPVGIQHPYRSPPRGRFDYGTPDYKTRIDLDP

SEQ ID NO: 46154 - protein, 76 aa, Zea mays
  Coding DNA Sequence Number=SeqID_2779
MRGKAASQTPPPTEARGKSHVAPAPAPAPGVGAPAPRAGDDAVSLGDWTDLAQCDAVDAPPGEKAKRGSQTYVQCT

SEQ ID NO: 46155 - protein, 427 aa, Zea mays
  Coding DNA Sequence Number=SeqID_2780
  Gene Ontology: Mol. function=protein binding
  Homolog annotation: Hit_ID=A7QUA7; Match level="QueryCoverage=48%, HitCoverage=33%, E-value=6e-39, Identity=44%"; Hit description =Chromosome chr2 scaffold_176, whole genome shotgun sequence
  Pfam annotation: Domain name=LRR_1; Domain location=109-131; Score =9.2; E_value=6; Accession=PF00560.24; Description=Leucine Rich Repeat
  Pfam annotation: Domain name=LRR_1; Domain location=133-155; Score =1.5; E_value=1.6e+02; Accession=PF00560.24; Description=Leucine Rich Repeat
  Pfam annotation: Domain name=LRR_1; Domain location=157-177; Score =3.8; E_value=59; Accession=PF00560.24; Description=Leucine Rich Repeat
  Pfam annotation: Domain name=LRR_1; Domain location=181-204; Score =4.7; E_value=42; Accession=PF00560.24; Description=Leucine Rich Repeat
  Pfam annotation: Domain name=LRR_1; Domain location=28-50; Score=5.4; E_value=31; Accession=PF00560.24; Description=Leucine Rich Repeat
  Pfam annotation: Domain name=LRR_1; Domain location=3-25; Score=12.4; E_value=1.5; Accession=PF00560.24; Description=Leucine Rich Repeat
  Pfam annotation: Domain name=LRR_1; Domain location=53-74; Score=3.4; E_value=72; Accession=PF00560.24; Description=Leucine Rich Repeat
  Pfam annotation: Domain name=LRR_1; Domain location=77-107; Score =1.6; E_value=1.6e+02; Accession=PF00560.24; Description=Leucine Rich Repeat
  Pfam module annotation: Pfam domain module=LRR_1::LRR_1::LRR_1::LRR _1::LRR_1::LRR_1::LRR_1::LRR_1; Domain location=109-131::133-155::157- 177::181-204::28-50::3-25::53-74::77-107
MKNLEHLDLSYNIITDGAIEHIAKIGTNLQYLSLKNTGITSQALCILAGTVPNLTSLSLANTKIDDSALAYIGMIPLLRTIDLSQTSFIHTEVNSEKLLSMSAFEHLKYLESLNLEDTPLSAEVIPPLASFATLKYLYLKSDFLSDPALHALSAASNLIHLGFRGNILSSFGLLQFVPPVTLCVLDLSGCWILTGDAISTFRKRHPTIELRHELLHEVEENFVGGSQFRKPRRRRSPHVKAEVGNSFAGSILVRDSAFYNILTLTQLLELIRNVMERYNGVCELQRGGDAENPNVVDGDTLADEVQVDLHMLHALMLHEIGREVDRADIVAVDEGATLKGDVELLEELVQQEGLCQAVEHISQLWTSGVDKASGLAAVDNLHQSAMEEGIIDVELMDRLVPREGEGEEDSHGGKLDNGAKGLIWGVG

SEQ ID NO: 46156 - protein, 293 aa, Zea mays
  Coding DNA Sequence Number=SeqID_2781
  Gene Ontology: Mol. function=cysteine-type peptidase activity; Biological process=proteolysis
  Homolog annotation: Hit_ID=Q5NKQ2; Match level="QueryCoverage=98%, HitCoverage=32%, E-value=1e-146, Identity=86%"; Hit description =Putative uncharacterized protein 9C20.3a
MRRAFEGCPDDLETNTNPNAEKQGGDIGASHDTPTYMGPLFDQTPSGHVAYGEETHSLHTTHDHSLPRLTELDRARSLRDFLCSSKPDPNRKIIEFDECIGNCLDIQQSFADGMCLDNVFMQCFIMCFRDDEINNCSSINKNRLVLDVNVGTLLNFEEHERYSNSPQIFDQTVLDAYLDKTLPQLDNFVDYKTIMVPILHMGHWTLYVINIQFRCIHILDSNPYGPELGGTSWKMFHYSQKDIGSRKLPWARVIMNRLNKSLQQVRPNSRIPKFGNFPIDMPPMCPTMIAVTP

SEQ ID NO: 46157 - protein, 405 aa, Zea mays
  Coding DNA Sequence Number=SeqID_2782
  Gene Ontology: Biological process=intracellular signaling cascade
  Homolog annotation: Hit_ID=A2Y1L7; Match level="QueryCoverage=89%, HitCoverage=85%, E-value=1e-163, Identity=70%"; Hit description =Putative uncharacterized protein
  Pfam annotation: Domain name=DUF231; Domain location=225-402; Score =150.2; E_value=5.6e-42; Accession=PF03005.6; Description=Arabidopsis proteins of unknown function
  Subcellular localization annotation: CTP_CleavageSite=24; ConfidenceScore=5.07e-01
MALEAEERVGDGGACAAARSVAARSTARRTSRARLRLVNVLPYMTSRDRLKGKCSLFNGEWIPNPSGPAYTNASCRFIDDHQNCMMNGRPDKEYLHWKWKPYGCDLPPFDAVRFLDSVRNKGWGLIGDSILRNQVQSLLCLLSKAEEPVEVYHDNEFKNRRWHFQSYNFTVSIVWAPFLIKSGIFENEDGVSTSEIQLHLDILDANWTSQYESFDYIIISGGQWFLRTAVYWENGAVVGGHNSQNKNVAELGFEHLYQKTLQNVFNFIVSAKHKPVIFFRTWSPDHFEDGEWFSGGSCRRKLPYNKGEYREGNIERVMRQIELESFNKAVAALRGSADMDRLRLMDTYSLSSLRPDGHVGPYRTPYPFARGSSKSTPVQNDCLHWCVPGPIDAWNDLVMKMALDP

SEQ ID NO: 46158 - protein, 25 aa, Zea mays
  Coding DNA Sequence Number=SeqID_2783
MAEFPLCLMHGALVQQQHVRPLQPR

SEQ ID NO: 46159 - protein, 495 aa, Zea mays
  Coding DNA Sequence Number=SeqID_2784
  Homolog annotation: Hit_ID=Q53PW1; Match level="QueryCoverage=84%, HitCoverage=91%, E-value=2e-62, Identity=39%"; Hit description =Putative uncharacterized protein
  Pfam annotation: Domain name=DUF247; Domain location=75-486; Score= -7.3; E_value=1.1e-09; Accession=PF03140.6; Description=Plant protein of unknown function
MTGNENLVDGVENESQQDAHVAEHAAGGTASIRRHEVHEAPPPRRYRLPKVRRAFGGPPPPPPHISFQYNSAATIERIPYNLQFIVPRNRNVIAPTAVAIGPYHRALPQLSGMQEAKAAAVAEFCRAAGQPLAAVRGKMLSVAGAARGSYAADGTLVDLDNGEFAEMMLLDGCFLLQFMASVCRRRDDDPLISRGEVRRSINAIVRDVMLLENQIPWLVLSSLMQLMPPPAGSVVNDFLLLMASAFHIVGDISNANSQTGLPAAGELDKPPPPHLLGLFHRRQMDMGAVRTQQHQGSLLRVPFQLASLSSTAVELAEMGVKLAPSKTKTFGDMAMSKRGRRWPLGLFGELSLAPLVLNRLTECWLLNMAAYELCQPQGDATDSFPVSSYVTLVSLLVNRPEDVQEMRAKGLVVSVFDDAETLGFFKALAPHLSVGYRYYEVFQCLQEYRQERWLWIAVHRFLYNNIKTIATVFSIVGVLAGLFKTILSVKQPHGP

SEQ ID NO: 46160 - protein, 123 aa, Zea mays
  Coding DNA Sequence Number=SeqID_2785
  Gene Ontology: Mol. function=kinase activity; Cellular component =ornithine carbamoyltransferase complex; Biological process=amino acid metabolic process
  Homolog annotation: Hit_ID=Q6QP54; Match level="QueryCoverage=71%, HitCoverage=31%, E-value=3e-16, Identity=52%"; Hit description =Putative kinase
MSGAPTAPRLPTVGFAIEGKKSGTGQCPGNDGASCDVVGPSPGLGEVEAPPRSKSSLSSEAEVESEPLGRARQRPSAEARAESEPWGRAKRSSSSSGAELESEPWGRAKRSSSSSGDEPESEP

SEQ ID NO: 46161 - protein, 586 aa, Zea mays
  Coding DNA Sequence Number=SeqID_2786
MNKTPAFKVPLQTELRFHLRRYEQPHTIGGPAEQRKADGWLAAARSNNDDDDFCSEGPNSSSDDLRADAAAMGPSPTSSLERQGRAKGRRVGGRSVGGTGYLVGGETSSGCRGGRRRWKRLRSRSGQRTGHAAAASAANDERPSPRSLREGAGCCPRRDRLQLGALPSPALMMNILEAEGGAEAAARLASPHPGAGGHHLGAEEAKPQRAVHATARRLQAFLRFRPNQRVKGRTDMQSAGNRAKWAHPFDSNAPSMEAQAHTSCNWRAICYMRATAPPLAPLPRLLDCGTSTVTRGNPAYDPTVLARRIGHGPVSRGRRRDGRCGQKWAGSNGGGRRAEAAVTSSAKLTRSERRFAFAVMTASKKGPGKGDTPKGILLHEGNGPRAPLLIRGSKAGPSEGFNSRLRALGLRAHYWSEVQGPAPQKGSTAASGHSGSAPTTDQGGNDLVTESHQREASSPQTPSKGDRVRHITRSSLETPCSAPSKGNMALPPSSLRKGDAGAVRLTAAKSSLRRHRKLRFARPQGSDSGSAPEDDELRFARPQGSDSGSAPEDDELRIARPQGSDSGSAPEDDGLRIALPQGSDSG

SEQ ID NO: 46162 - protein, 36 aa, Zea mays
  Coding DNA Sequence Number=SeqID_2787
MKLWKETSRSSKTTTSSRCGTIWTSQTYDVIDYFPS

SEQ ID NO: 46163 - protein, 95 aa, Zea mays
  Coding DNA Sequence Number=SeqID_2788
  Homolog annotation: Hit_ID=A0EVJ2; Match level="QueryCoverage=78%, HitCoverage=6%, E-value=1e-07, Identity=41%"; Hit description=CACTA TnpD transposase
MECMGDLISLCGFGTVTEFGMTQIQPEKLLQGHDMYILAHQADQVYFSTYPCKRLSTWRAVYNVNPRERLYTPGEEEYQFGHLEQVDEDATKVKV

SEQ ID NO: 46164 - protein, 51 aa, Zea mays
  Coding DNA Sequence Number=SeqID_2789
MGKHVPLLIMLLLSRVTALVPTITGMGDHVSGRVRAKVCGQVHSEFRNHDA

SEQ ID NO: 46165 - protein, 184 aa, Zea mays
  Coding DNA Sequence Number=SeqID_2790
MAWLGLGGPCAAGLPREAMVAMRMMVLVLTMVMVVRVETTAQEKMKLWRKTWQEIESVRSCSPVLPQEAPPAPPLSAPAAGVATGGDPDDRGGDGSSSFSTDLSTDQEPEGWVAQPITRDAARGCHFHDTLDTLLCQALDRRTWSIEYRCVVFQHSRRVYPDHWEATCLVRLRRGGLLRALFHL

SEQ ID NO: 46166 - protein, 34 aa, Zea mays
  Coding DNA Sequence Number=SeqID_2791
MATTASATKCFGTRAFAAGRAIGKRLQLDYRSHT

SEQ ID NO: 46167 - protein, 46 aa, Zea mays
  Coding DNA Sequence Number=SeqID_2792
MAPKRKNQNSAAVVIPPIDPNSELPFAEHSAFEGQGIPSLLVQWHY

SEQ ID NO: 46168 - protein, 49 aa, Zea mays
  Coding DNA Sequence Number=SeqID_2793
MAITVILSSRWATGSGYACYIDRHNHCSTDLKGNLGQEDHLLFYRELCQ

SEQ ID NO: 46169 - protein, 258 aa, Zea mays
  Coding DNA Sequence Number=SeqID_2794
  Gene Ontology: Mol. function=aspartic-type endopeptidase activity; Biological process=DNA integration
  Homolog annotation: Hit_ID=Q2R3J5; Match level="QueryCoverage=50%, HitCoverage=8%, E-value=6e-10, Identity=31%"; Hit description =Retrotransposon protein, putative, Ty1-copia subclass
  Pfam annotation: Domain name=zf-CCHC; Domain location=234-251; Score =9.5; E_value=0.056; Accession=PF00098.14; Description=Zinc knuckle
MTRVKDRHTQESIKRFKEITPRTQFSVTFIRGVEDALRDSDWVLAMQEELNNFMRNEDAKPIKTPMGTNGHLDLDTGSKSVDQKSVVDDNRRRARAADERRWSAKLGEARTQGRFHGVGECASPVREVKVSATIESPNYVTLIVDELFSILKSAEIDHQTRDKIENPSAPIMALVSRGGSSSYSSPVMFALSYLSTITEEQVEILGDEELALIANRFKQFHNNCLNWRHGGSKDGCYNYGDPDHFIAHFPKKGKPKDG

SEQ ID NO: 46170 - protein, 320 aa, Zea mays
  Coding DNA Sequence Number=SeqID_2795
  Homolog annotation: Hit_ID=Q6QP51; Match level="QueryCoverage=44%, HitCoverage=62%, E-value=8e-12, Identity=35%"; Hit description =Putative growth-regulating factor 1
MHKGSTKTWLPFKGVTIVLKATLPTCVLIHHGLSLLQHAPRSSPYDTGAGSHASCKLAQGRRSQTAARDQRVKGRTAVQAACDRTKGAHPFDFNASSMDRRRLWQAKQATLHLRHNDHVKKGTGKGDTPKGILLREGSGPQAPLLIRGSKAGPSEGFNSRLRALGLRAYYWSEGFVGWPSKGFDSRLRRRVRDDPGYVRYITKARATLPSAACAAPTAVPLNRVRLTAAKSGLGRHRKLRLARPQGSDSGSTPEDDELCLARSQGSDSGSAPEDDELRLARPQGSDSGSAPEDDELRLARSQGSDSGSAPEDNELRLARP

SEQ ID NO: 46171 - protein, 32 aa, Zea mays
  Coding DNA Sequence Number=SeqID_2796
MTSVFESLDFGLVCGAIVSLQGLLRLGLRLSK

SEQ ID NO: 46172 - protein, 140 aa, Zea mays
  Coding DNA Sequence Number=SeqID_2797
MAQSRSYAQGSFGVIAEKETDLKGKRLFRPRWIAIELLANHLRTSPQHWRPPPVNSLPLFEFRTPSASIDLRHAAKESFSNRGCRSAAAGPQLGDPLSSGGPKPEKEGHQSNASGGRLGSRDQKYGDAPSAGAKEEGNDG

SEQ ID NO: 46173 - protein, 777 aa, Zea mays
  Coding DNA Sequence Number=SeqID_2798
  Gene Ontology: Mol. function=zinc ion binding; Cellular component =nucleus; Biological process=regulation of transcription from RNA polymerase II promoter
  Homolog annotation: Hit_ID=Q53KK6; Match level="QueryCoverage=99%, HitCoverage=98%, E-value=0.0, Identity=71%"; Hit description =Putative uncharacterized protein
  Pfam annotation: Domain name=Myb_DNA-binding; Domain location=412 -457; Score=48.4; E_value=2.5e-11; Accession=PF00249.22; Description =Myb-like DNA-binding domain
  Pfam annotation: Domain name=SWIRM; Domain location=179-269; Score =88.8; E_value=1.8e-23; Accession=PF04433.8; Description=SWIRM domain
  Pfam module annotation: Pfam domain module=Myb_DNA-binding::SWIRM; Domain location=412-457::179-269
MPHSRLKWRKRKLNPDASPSKPSISTAAADHSSDSDSAALNDDEDPSALGATGDGATDNDADAAASEDPAVELREAEVLPSADAISSFPAAKRRVVNRPHASILALLEAERSACSGDVPTVALPALENISHGQLQVLSGVLPDHPSLATDPDKPSLYVCTPPPLMEGHGVPKQFQGRFHVVPKHSDWFSPGTVHRLERQVVPHFFTGKSPGHTPEKYVMLRNKVIAKYLENPSKRLAFAECQGLVGSTSELYDLSRIVRFLDTWGIINYLAAGSVHRGLRMATSLLREEPTGELQLLTAPLKSIDGLILFDRPKCSLPVEDISRMAATSSNSEAVDFDAAFSDLDGKIRERLSESSCSYCLQPLPSLHYRSQKEADIFLCSDCFHDARYITGHSCLDFQRVDGDNDESENDSDKWTDEETLLLLEGIEKYNDNWDDIAGHVGTKSKAQCIYHFIRLPVEDCLLENVEIPNAPIPFRPQSNGYQCLDSNGSTSGAPVQNIQQGNELPFINSSNPVMSLVAFLASSIGPRVAASCAHAALSFLTRDEDSRVSSEGSHAGGLGNGANSNFQNHNGASPSISPGNVKYAAMLGLSAAAMKSKLFADQEEREVQRLTATVINHQLKRLELKLKQFAEVETLLLKECEQVERVRHRISAERVRMRSALLGPTGSGLPGGSCSTMPSNPAGMSPRPVGVPGYMPQTSMPATYANNLQGHGNPQMPFLHQRPQMLSFGPRLPLSAIQTQPSPQSSNMFNSGMPNSIAPNHHQLLRSSSGNNSSAG

SEQ ID NO: 46174 - protein, 369 aa, Zea mays
  Coding DNA Sequence Number=SeqID_2799
  Homolog annotation: Hit_ID=A2XFR6; Match level="QueryCoverage=37%, HitCoverage=40%, E-value=6e-07, Identity=31%"; Hit description =Putative uncharacterized protein
  Subcellular localization annotation: CTP_CleavageSite=62; ConfidenceScore=5.27e-01
MPHQSYSSPPKTLSPPLSPLCPRICGLLPAIEFAVVLSPSLPNSGDPRATLAHASLNSGDLSAAEKSSAARSRSPLPDNEQSEVPECVVGDLPKQQPATWRDCIIACTRSRSADARSKSSRTLPPRLSGRWSMRGRLPLHLSQRCPLHHHRASRLLEETLTETETMTTPVAVRATARSAQMSQSRRDGSLDPSLVTPLGGVTSMTLSTPCCVGPSTDTFGPSKAFSEHYSITERDTVEAAMQDAARRALSQYCSLFSGVADGLDLKYYPRRSTGSAGGVIASRVGEGNHRLNNMVNLVAVLNTELDHALDELGKVRAEVAELRAECAARHYLDGGSPAPVGIQHPYRSPPRGLFNYGTPDCRTRIDLDP

SEQ ID NO: 46175 - protein, 91 aa, Zea mays
  Coding DNA Sequence Number=SeqID_2800
MGHAELVFQNNAKKLVKDVIYYARIQATNLYFQKHPEEAGPLNKKEGSSKIYLTKDQYREEATSGQKPSDIEVYQEGHKGPNPNNPDQLCS

SEQ ID NO: 46176 - protein, 133 aa, Zea mays
  Coding DNA Sequence Number=SeqID_2801
  Homolog annotation: Hit_ID=Q9FVG4; Match level="QueryCoverage=40%, HitCoverage=7%, E-value=2e-08, Identity=50%"; Hit description =Transposase DOPA
MVRRHGPDFDWRHEPLDPSVVYASGGGKAHGRYALFDGFIDSSSLMQQQGMTSNFPPPPQWSQFANTPVPPPQFTTPPTHIPAPGDRVTPEAGGSGSDPAVGTRFVDSLFAFPPPGGGGGSGQSSNHPSGGYI

SEQ ID NO: 46177 - protein, 416 aa, Zea mays
  Coding DNA Sequence Number=SeqID_2802
MEAHAHASRNRHAGRYVQATAPPLAPPPRLLDCGISTATRGDPARDPAAPAWCDDDAPVFHSSNGSRTRNGRPTKRTPRRINSAAGKAAPLGPRKGETPKRILLREGSRLRASLLIRGSKAGPSEGFNSRLRARGLHTHYWSEVRRLAPRKGSTAASGHSGSVPTTDQGFEGLGLGLSPRRRRTPLRPTQGSDLGSAPEDGELRSARPRARTRAQPRKTTNSAPPDPGLGLGLSPGRRRTPLRPTQGSDSGSAPEDDELRFARPQGSDSTLASADSLRLAQPRGSDSTSATEDRLDLDLGGASTSPNLGRGPATSTGGAIITLPQADLGYGKQDRCPIWLAPPDKVMMAPRTLYDDGGSRPPYGSKRTSARTRQPRQLSFRQASALLRRPRHHTNRVPKPLRLPRWHVLRALALLR

SEQ ID NO: 46178 - protein, 245 aa, Zea mays
  Coding DNA Sequence Number=SeqID_2803
MTFMPFDCIDGGIQKTTRETLNDKADRAKGLLHLRDTDTLLVTFHERNELPPHQRGCEITSSKRLIGDHCTSIDNDLHLGRLDSSSDGPRANATVKRPSPPSRGRRQAIKAKRPKDQVQLELMVSSAEATTSAVGSLTYGSHHLSTDDSGHLCPNAAPANDGCPNTHKEVLAPVVSAGVRTGPSRDANTAPAAYDVLYAPRCGRRHRTSCGHGGPAHGTTVARAVGGLPHPDRAAGGSSPPPPGW

SEQ ID NO: 46179 - protein, 204 aa, Zea mays
  Coding DNA Sequence Number=SeqID_2804
  Homolog annotation: Hit_ID=Q6ER15; Match level="QueryCoverage=34%, HitCoverage=47%, E-value=5e-12, Identity=56%"; Hit description =Putative uncharacterized protein P0707C02.18
MADISQELVSFGHRLVHCSYSSVAIFIGPDGGRVSAIDHTERCLPQGRLNAVLSVYSAQGSHRIQSRGRSPMKQRRYMAMTRLAASVWPSNYGWNAVVMWSWVPMSRISSRQNVEVNTGSRSETMDYDIPWRSTMSVKNICATDSAEYGVGADVVLDDAAHVEEVEVTPEAMEGALHALMTVAVHPVTILGRSGKAEGTYSRPA

SEQ ID NO: 46180 - protein, 570 aa, Zea mays
  Coding DNA Sequence Number=SeqID_2805
  Gene Ontology: Mol. function=DNA binding; Cellular component=nucleus
  Homolog annotation: Hit_ID=Q54J55; Match level="QueryCoverage=60%, HitCoverage=21%, E-value=1e-09, Identity=23%"; Hit description=Myb domain-containing protein
MDECPDTFFSLRLGPDGGTAYMRRRRIAAAALLRADSGLWRWRPSEFPSKLLEDRYAEDSFVVTIAASRFVGHFWGKPRRSFASVVKNPRAPTTVVKMQPRGAGRRGGVASRGTGRRSARENVWRRVEEGSSSAHRQEADPTDEEKMKGEEPHQQNPWEQQRKSPEGKSGIDWRHVAEDEDFKEENIKKELSVPKAVYKEVGLESEEEDPHDNRGSGIKIDDQDQNNAKRTKFEGNPWSEGKNKGKTQEGYNNNQQKGKNDQPMQHRYMKAPPAPPAEKNMWNLNKGKDIIQDISTEENLTKEGRVQITDSEEEDTSDLLGEELFAAGMNIGMYDTHKKWDTGEKDEDANERATYDKKETTKKGNVVIEEIVDEFKDEEEKNEILVSTQDSGIMLGSQEEVDQKEEAEKDMMNPKNKKHAEEKMCSKKEDRRVSERLKKDAGIRIEEKNRRIAAKRNLEGLSKKELQDLLQEGAKMLLSSPCFTVGVVCASSDDVQGSQGLGFILWRRGLPLARWLGCCNGSEIPTGESRIAARKESDQGACGYGEDRPDMAGPQGSPTEQHRREMRIGA

SEQ ID NO: 46181 - protein, 96 aa, Zea mays
  Coding DNA Sequence Number=SeqID_2806
  Subcellular localization annotation: CTP_CleavageSite=37; ConfidenceScore=5.19e-01
MSGAPEDSSTNSSSSEKSRGNSTIIHRTVRCTSDSVRCSKEERPQELASFGKLQRLLRYNSPDMSGVHRTVRCTPDCPVYLRGNDYFAPTVTYNSN

SEQ ID NO: 46182 - protein, 164 aa, Zea mays
  Coding DNA Sequence Number=SeqID_2807
  Subcellular localization annotation: CTP_CleavageSite=37; ConfidenceScore=5.12e-01
MSGAPEDSSTNSSSSRKSRGNSIIIHRTVRCTPDSVRCSKEERPQELASFGKLQRLLRYNSPDMSGVHRTVRCICGATATSRQRSPATAINARQSAQKSGTRVVAHRTLYSTCLVRHRTSRRAQKTELQRSEPNGFGDVAGALDMSGVHRTVRCTMRQTAPPNG

SEQ ID NO: 46183 - protein, 59 aa, Zea mays
  Coding DNA Sequence Number=SeqID_2808
MTRRVRLLTIFGAATAICLMLLRRSGRTGNGYPLDSGYPAGTGMDTDPYPRTFMGTGMG

SEQ ID NO: 46184 - protein, 352 aa, Zea mays
  Coding DNA Sequence Number=SeqID_2809
  Homolog annotation: Hit_ID=Q6J9V9; Match level="QueryCoverage=27%, HitCoverage=33%, E-value=2e-33, Identity=76%"; Hit description =Putative uncharacterized protein
MANRCTRSMQPPRGFVATGGPAWRPGSTCHGKRHLWQAKRAPFHLRHDDRNKKGIEKRGYSERILLSEGSRPQALLLIRGSKVAPCGVRQPPQTTWAPSPILIRGSKAGPSEGFDSRPRAHRVRDDPGYVRYMAEARATLPRKTALFASLRLLCQPQQVTTSPKFSFGHNRELRLARPQAPASASASGEGLRLARPRAPASASASGEGLRLARSQASASASASRENLRLARPRPREESHPRPTSSSASEESPPRPTSALDQLRNCGSIITLPLASCLRLQRNKTGLKHFSDGHVNTYTGLRHFPIGHLNGLPYGPYPEEVSKDDEDAATKKKRCAKGAPTDEGTSKREVVSP

SEQ ID NO: 46185 - protein, 85 aa, Zea mays
  Coding DNA Sequence Number=SeqID_2810
MHIDSANASGQLRSTYYMLMKFLSSLDQNQVHLNGRQMVDRITQERVTRVIKEASSSGCKPLPHDERTRDEDRSKDDKSKHRSYR

SEQ ID NO: 46186 - protein, 56 aa, Zea mays
  Coding DNA Sequence Number=SeqID_2811
MGSTFSKHFCKTESLIIEKPYLDSLTTSIPLRVFSLVGWYQRKNARNEVREEGILH

SEQ ID NO: 46187 - protein, 157 aa, Zea mays
  Coding DNA Sequence Number=SeqID_2812
MASPGPRGSGTSKAREQAAPLDVGRRPRAEARAARRDVGPPRRGPEQGGGRATTGPGSAAAGWGRGRRNAPPREAQGRPRRQGEGQGRAGHAGAGEHRRGEGQGWAGRAAAGRAGAGAVTHGAGAGSRRTAAGRGKPRRGRVARAGEKGRARAGKRT

SEQ ID NO: 46188 - protein, 92 aa, Zea mays
  Coding DNA Sequence Number=SeqID_2813
MMHGMASDMPGDANMLSLCLFASTLNYFVYSTLTTVSYNGTPAISQECLHDGCVTPPHDSSTTPFLVFSAVPTSLASATTRERLSMGVGSPK

SEQ ID NO: 46189 - protein, 271 aa, Zea mays
  Coding DNA Sequence Number=SeqID_2814
  Gene Ontology: Mol. function=kinase activity; Cellular component =ornithine carbamoyltransferase complex; Biological process=amino acid metabolic process
  Homolog annotation: Hit_ID=Q6QP54; Match level="QueryCoverage=31%, HitCoverage=31%, E-value=3e-20, Identity=62%"; Hit description =Putative kinase
  Subcellular localization annotation: CTP_CleavageSite=11; ConfidenceScore=5.46e-01
MGGDEVTSGTDCTAVSGTRVTSSKPFASVLASFVCSELACCGETALVLVSNARSMPGAPPVEVPAPSTRSTADEALPPAWPWLPRLVLRRRGRGRAAVEGHELKTPETEHRPGPERLLETAHLELDGKLFVNTQQAPTWRANCQRFETGGSLGRRVNVAACPSPDGSARGRARRREVRWPESGVREVEIPRPSCSSRAQVGVMMAPPVDVAGLRPRLGDVEAPPKSRSSLSSVVEVESEPLGRARRRPSGEARAESEPWGRAKRSSSSSGA

SEQ ID NO: 46190 - protein, 98 aa, Zea mays
  Coding DNA Sequence Number=SeqID_2815
MDGGNHSRGGESPFPQRLQGLEKGLEVLLSFVRGPVAPSIGGDGDYSLGERREQLAVIPEGLWQGLWQGKRATLRLRHNDRVKKGTGKGGYPEKDPSP

SEQ ID NO: 46191 - protein, 108 aa, Zea mays
  Coding DNA Sequence Number=SeqID_2816
MGLGVCGSLCQVWVRPLGRSAVHLGNLTGGNETDGFGYDYGAGKWYSFRLERVVSIATTAQEKMKSWKETSRSSKTTTSSRRGLAATPSRLPVKAAVIYVSFSHFDLL

SEQ ID NO: 46192 - protein, 54 aa, Zea mays
  Coding DNA Sequence Number=SeqID_2817
MGGGLLVAASTLRSVLPLFGPPEQKSSLSPLPEQAFPLGVGSFVPAEGEPEFRS

SEQ ID NO: 46193 - protein, 50 aa, Zea mays
  Coding DNA Sequence Number=SeqID_2818
MAPPYPRACAAAIWFWIQRPETLDTPSRVSFTHGTFGYLRINLPSIAAVF

SEQ ID NO: 46194 - protein, 18 aa, Zea mays
  Coding DNA Sequence Number=SeqID_2819
MRKGWRKEGQREVKHLLC

SEQ ID NO: 46195 - protein, 50 aa, Zea mays
  Coding DNA Sequence Number=SeqID_2820
MAPLYPRACVAAVWFWIQRPETLDTPSRVSFTHGTFGYLRINPPSIAAVF

SEQ ID NO: 46196 - protein, 344 aa, Zea mays
  Coding DNA Sequence Number=SeqID_2821
MARLRHTARKSVIPFLPSRLAERPLHRTVSGQSSHLERLHHRLREEQERRRQHGEQQGSSSSPQQEVETVRPRSSVAQLGAPLVPPRDVPAVGGAVGGAVGGATGGDPDDDDDSDHSTESSEPQEAEGWVARPITRDAARGCHFHDALDTLLRQAFDRHTWSIEYRCVVYQHSRGRYPDRWEATCLVRRPKDDLRGAEAVSEHYSISERDTAEAAMQDAARRALSQYCSLFGGVADGLNLWYYPRRPTGSTESVVVSPVGEANPRLSSTVNLVAVLNTELDHSLDELSRARMEIAELRAELAERHHQEGGSPAPVGTQHPYRSPPRGHHTYGSPVCKTRIDLDP

SEQ ID NO: 46197 - protein, 283 aa, Zea mays
  Coding DNA Sequence Number=SeqID_2822
MQAACNCTNGAHPFDFDASSMEAQSHTSCNRRAGYYVRETAPPLVPVPRLLDCGTSAATRGNPAHGPTVPTEHIGHGAGDTFGRQSGRRFTSAMMTASKKVRHVVQFRILFLFPFLSLATRIGKGDTPKGILLREGSGPRALILIRGSKAGPSKGFDGRLRALGLCAHYWSGVRRLAPRKGSIVALGHSGSAPTTDQGFVGWPPKGSTAASEHAERGMTLGTSDTWPRLGLCSRGTLGHFRDQQERFYNGIPSEGGIEPSDPIKRDRVRQITCRYFWSAPLGH

SEQ ID NO: 46198 - protein, 289 aa, Zea mays
  Coding DNA Sequence Number=SeqID_2823
MGSARVAFVLLSLEERNFAEVGTFQPSLGFKDFHQAARLHPLADASRIFIILAGEEGEASRGLPSRWPASCFFIRLLGVETILQLCGGGALQPCRGRRTVAAQSRVQHSVLCPGDGAQPHRGVSQHVVRREGGTRVLGRSHSRFRGKDGSEDLSVRFGAPGARWCGVGGQVDATAGAEVVAAGESFSADETVSATRGSTSGSLALMSGSRPSSGDVNESIPAVASVLGPSLLLQRSLASHPEFVVPQALRCGGCSYPREWNRSSVCNGTLSAGVCSLWLSGPEHRGIWA

SEQ ID NO: 46199 - protein, 522 aa, Zea mays
  Coding DNA Sequence Number=SeqID_2824
  Subcellular localization annotation: CTP_CleavageSite=67; ConfidenceScore=5.29e-01
MVTQDGDHQFDGGEKQAGLRPLPRPQLQGSSSSLLGRRARRAGACLRVDRRPASSSGFWGWKPSSSSAEEVPSSRAGEGELLLPSLGCSILSFVRATVASRTGGVSQHVVRREGGTRVLGQSHSRFRGEDGSEDLPVDAAAGAEVVAAGEVLVADEIAAAIRAPGLGSLALIACPRPSSGDVGEGLIAAASALRSSLLLFGRPERRSLSLLPEWAAASHLGFCRPTGPPMNPRSLCDEPKPEAALSAWTEAELARKENFVGLGAGDFPGRGGVAAVAGTWPGRPLVGPTLESVGPGLSARPPSAHPPLSLTARPAPPVGAAAFPARARSLALSLLAGPGCQPRLPRVTAAELLAPTFPVPTSRVELAPTSPLATCAPSPTRPHPPPPFAPQQTPFPPRCAHAEPRRHNPAVPSSVPRRRWSSAAPLAPVSSALASATRNAPQFPLPLPISLCPRSPVVRRAAATVDPGPRRVSVAAEESPEPALRPYRRTPRALPDLPDHSDCPKAPPVARAPRLRRALRPS

SEQ ID NO: 46200 - protein, 234 aa, Zea mays
  Coding DNA Sequence Number=SeqID_2825
  Homolog annotation: Hit_ID=Q93FQ9; Match level="QueryCoverage=47%, HitCoverage=56%, E-value=7e-14, Identity=38%"; Hit description=Cell surface mucin-like protein
MTLGMSDTWPRLGLRSRGTLGHFRDQQERFCNGIPSEGGIEPSDSIKWDWVRQITCSAACPALTVVQPARVRLIAAKSSLGCHRKLRLARPQGSDSTLTPEDGLRLARPQGSDSTSTLEDGLRLARPQGSDSTSTPEDGLRLARPQGSDSTSTPEDGLRLARPQGSDSTSTPEDGLPLARPQGSDSTSTPEDGLRLARPQGSDSASTSEESPPRPTSGSDRPRHRGSHHYPTPS

SEQ ID NO: 46201 - protein, 198 aa, Zea mays
  Coding DNA Sequence Number=SeqID_2826
MAMRAGCSEVGERRLTTAVARRVGIDHGAARREEVLRNGVDGREHGEVATRSWARKLGTQAKNLCVWRGKSAQRAVLGRRTAASCVLARGPHWVVAAAGAPRAACAQRTPGRAASHGRAAWAGAWRWLGCLVRLGWRSWAWPRRGAGPHGARGPTREELAWWAEREGKRGCWAERGGRERGGKGAAEPAEMGQGGEVG

SEQ ID NO: 46202 - protein, 363 aa, Zea mays
  Coding DNA Sequence Number=SeqID_2827
  Homolog annotation: Hit_ID=Q6J9V9; Match level="QueryCoverage=20%, HitCoverage=41%, E-value=1e-08, Identity=39%"; Hit description =Putative uncharacterized protein
MEEGHGSRGETMVTRSAITEQKEWRRKGQDQGETGSTFRPDRPRDSKTRSETAIPGTARARATAAPRTARPVALTPRRERRRLWQEKRATLRLRHNDRVEKGTGKGDTPKRILPREGTWLRASLLIRGSKADPSEGFDSRLRSRGLYTHYWSEERSCNGIPSEGGIEPSDPVARGPSSVDHPQLTGDTMFGAHRGQHGAFPPSSLRKGDTGAVNIPARELGTRPYTWDTASSHEGTTRPAEALREALRPRRSQTTPPRPRGLHPAGIGPFEGHDHASPEPSLGQGQPTPEDLRLARGPPPAANAVRPGRRRHRKLRFARPRARTWAKSRKTANSAPPDPGLGLGLSPERRRTPLCPTQGSDLG

SEQ ID NO: 46203 - protein, 71 aa, Zea mays
  Coding DNA Sequence Number=SeqID_2828
MALHKLYDDGGPQLSYGSRTTFVQVEQIQTCDFKNSQLQIQTSKQIDSRLSGKITKKSDPRLFGKLSKSTT

SEQ ID NO: 46204 - protein, 77 aa, Zea mays
  Coding DNA Sequence Number=SeqID_2829
MEDWSTMTPTIVIGKIAAFEMSRKMCRGEEPTSSRLYAFACDERKGIFGLESVPQWDKPKEYEGRHSAEAVSRKASA

SEQ ID NO: 46205 - protein, 392 aa, Zea mays
  Coding DNA Sequence Number=SeqID_2830
  Subcellular localization annotation: CTP_CleavageSite=2; ConfidenceScore=5.43e-01
MSSSSLKRRVFPSSKPPDGGYPPPFRLLVGGTQLHGSWYLSAIVRLQGFSSGSLVAPFRRWPPKTVTSSSWMGRDRPGCDPALSVGCVRHPRWGGGRGEPGLCLACGSANHLLFQLLVVATVLPRRDGVVLQSCRGRRTVAVQLGRNIPSSSSHSGRGRQRGSTGALGSGPLFGFDGLFASLEWDREQEPFGDCVHLRPWLPSQRSSPRRPEVACTLGDGTGVPFVMAPWMPSRLFDCLNRFTKHELPHVKVTGEAGGSDISMNRGGVDSRMGNLVGRSLAVLPVSGADAQVGQSRPRIGLAPLEAGCPRPQGIRSSCSVRFLRPPRPEEHALAALAKLRLFSSCFEHLDSVGNRDKGTSEVSVSQRRRSPSARSALAAYVYLVVSRIRFPK

SEQ ID NO: 46206 - protein, 100 aa, Zea mays
  Coding DNA Sequence Number=SeqID_2831
MARKRTKYLRTRIGTIVGEAQRIRRSTQRRSCEQESFGVIAEKETDLKMKRLFRPRWITIELLPNVKGMDFTGCEVDWTEALRMQHLKEDIIRLTEDITK

SEQ ID NO: 46207 - protein, 100 aa, Zea mays
  Coding DNA Sequence Number=SeqID_2832
MEAMSHHEPNQGGTCKNYATSKAEYTNTQLDLPVAALAPTISRMGDPVSGRVRDKVRARLHSGKHLLDLSGTIIRGTLKTLNSQLGTPISIKLQRPDGYD

SEQ ID NO: 46208 - protein, 123 aa, Zea mays
  Coding DNA Sequence Number=SeqID_2833
MELPLDAQSSGRRLDVDERVEQCRAVAGVLHVLTRSTRAISPKDVNVKTEYAPSSAKGKGKTGRSSKDVPKGMPSTTKLQKVVPKGAQRKFSAQKSFLRECRAYSEKSTLIPLKYKAKREKST

SEQ ID NO: 46209 - protein, 94 aa, Zea mays
  Coding DNA Sequence Number=SeqID_2834
MDTVDAFLERQTLNKNRGGALCTGADGNKSREKLGNLTDSAHARTIRATTADSLDRGPSDLRAGPSARHIWSPTYAPCLLVKVDEPKAYELNLM

SEQ ID NO: 46210 - protein, 244 aa, Zea mays
  Coding DNA Sequence Number=SeqID_2835
MGIRKKPEYVWKEYRENGMEKCSMAVFLGESRSYPNHPPSKSPSSGTASQTLAKVLPERPSNSYAKTTAESNKNTPTWRKRLQALSGRDPTEDDPTIVYMAGYLHTLDTHYDDLSSHCTHLNSRVESLEQQVKELKKEKVSVQECLDIAEGEEANTREAYRTLKMDYDKKLKKLAPIKKIRKKTTSQGCQMERRKKAPPATAPARIENLSDIEDMSLASLDDLLKEFGDTLEKEFGSTSGNARV

SEQ ID NO: 46211 - protein, 171 aa, Zea mays
  Coding DNA Sequence Number=SeqID_2836
MAGSKDHTDISSDNILKPAVESLTADEQQQYEDYMRQAREKFLSQYTVDRHQKVVKHGETDVASLLSSLQVPNGPARARLGSAAQRTPETRPAPCHAAWTPLSCRAPEKGPSPPHAGEGRWGCRTPEKGVVESDGPAAASEPGSVLACDSIWEEKQGKGERVPLVRCQVHL

SEQ ID NO: 46212 - protein, 184 aa, Zea mays
  Coding DNA Sequence Number=SeqID_2837
  Gene Ontology: Mol. function=nucleic acid binding
MKVVRHASMLKAGYDKAMDVLNELVSVLCRLEPDIGCNESCDVSDEEENQKEGIQNDAVGVGMDEADNAITCHDIDEPNVVTGCGSVLELVPVGKHGLLQWAESHVGLHVGRGREMRRPRHRSSSADTWDEGEVGEGIERRVASSPSPQHLPSEGPARLSHLVSKTSLDGGDTALARSGSAGVF

SEQ ID NO: 46213 - protein, 437 aa, Zea mays
  Coding DNA Sequence Number=SeqID_2838
MELMRTCVAPGGRMSSPELRESSARMLEVTEGRWPKNVPIPRAAGEDFFTSRMARDLRVFPYGRNIAAVVSAVMNKDRQEAAQKRRAVIRLPEARPKRARGTAKATTPGGSQPTLAAKPTAPGSSKVLESVKAASASGTKSAPAGAAKARELPSPGKHIADFGTNISVDDYLVGSGEGQLVVVPPAVATTVSAAVPGVKGSALSAGGEISAVAAVKDEAGTVSHRLKEASQQLSQAADFTDRVASGALTADVSTEVERLRAQHADAVREKSDVDSKCRKLAEKVAALEGERTNLRRQLVEERREANQAIAKAQATQAEAKLARVEGVLASQRAEEWEVRFNALQARMERAEASTRSKVERTRKQLVDSYRELGARTADFEVPDREAGLRFLEWLQEELLALPTIVEGFMSFASLVTCEGALNALSREGCSHYEDFGR

SEQ ID NO: 46214 - protein, 36 aa, Zea mays
  Coding DNA Sequence Number=SeqID_2839
  Homolog annotation: Hit_ID=A2YGJ2; Match level="QueryCoverage=100%, HitCoverage=9%, E-value=3e-08, Identity=80%"; Hit description =Putative uncharacterized protein
MPVKALKAFEKMAVVGMPIDEVSLTGAISACAQLGA

SEQ ID NO: 46215 - protein, 352 aa, Zea mays
  Coding DNA Sequence Number=SeqID_2840
  Gene Ontology: Mol. function=transcription factor binding; Cellular component=small subunit processome; Biological process=rRNA processing
  Homolog annotation: Hit_ID=Q10LM2; Match level="QueryCoverage=25%, HitCoverage=10%, E-value=6e-22, Identity=60%"; Hit description=Utp14 protein, expressed
MDTYMTQPEGRGADCCVLVYDANVTKSFEKLNWHVEFLIQASQSDLENLPFVMLGNKIYVDSGLREFTREHALHLQVDTEEMGVQSSNLYLRRALMTSLIILVLRQLLKLEWLAGDSWKKAFASDDVQAEFEKSKMDVLSVKNPEPEKACSCSLLGQVDRHPTEKGLPSCLVKDHEVTKRNREEALKRRNDSKLKHITIYEHVDKKELCISIKGERFQKIRDEATWIWVKELFLKILLFLSFHKFHLVYITMLLKSHFWVFGSREDAASHQSLMLEKRAGSTRAGGHTFPSQNLIPHSMDDNGQGAKEKSVHSVTRHVKPFPRVILTHPFLPKPTKLKGMSELVEVENTQTA

SEQ ID NO: 46216 - protein, 319 aa, Zea mays
  Coding DNA Sequence Number=SeqID_2841
MEEVEHEALISGGGQRDPSLAVAEELSLKAPQIRDRGEDVVGEGVATEEKREGLRPGRRGLEGVGAVASGRGGAIRCALASETAVGLGVLALNGVDNRLLLLKSTGGVLGPLASSRNSCPGGGEKGSSVIQRSAQGGGDGGRLAVDSRRQGAATHAGPVRGSPEGGGLGQHGWRWFDSDDSTAAMTMCPNSASGAAMGRAGPETADVAGKWATGGATTIGDALTTKGRAVRDALLLSGAPAAERRGAEGVAGPDNTPAMGEKGRLRCSEAWRRCCRKGDGRRRGCDVRRRAGRGEDGRRGHSKGGTVGERKGREELDGE

SEQ ID NO: 46217 - protein, 1030 aa, Zea mays
  Coding DNA Sequence Number=SeqID_2842
  Gene Ontology: Mol. function=small protein activating enzyme activity; Cellular component=cytoplasm; Biological process=protein modification process
  Homolog annotation: Hit_ID=Q10MU6; Match level="QueryCoverage=98%, HitCoverage=94%, E-value=0.0, Identity=84%"; Hit description =Ubiquitin-activating enzyme E1 3, putative, expressed
  Pfam annotation: Domain name=ThiF; Domain location=42-172; Score =17.6; E_value=4.2e-08; Accession=PF00899.12; Description=ThiF family
  Pfam annotation: Domain name=ThiF; Domain location=441-584; Score =163.2; E_value=6.8e-46; Accession=PF00899.12; Description=ThiF family
  Pfam annotation: Domain name=UBACT; Domain location=728-789; Score =46.0; E_value=1.4e-10; Accession=PF02134.12; Description=Repeat in ubiquitin-activating (UBA) protein
  Pfam annotation: Domain name=UBACT; Domain location=829-897; Score =113.6; E_value=5.9e-31; Accession=PF02134.12; Description=Repeat in ubiquitin-activating (UBA) protein
  Pfam annotation: Domain name=UBA_e1_C; Domain location=903-1025; Score=201.7; E_value=1.8e-57; Accession=PF09358.1; Description =Ubiquitin-activating enzyme e1 C-termin
  Pfam module annotation: Pfam domain module=ThiF::ThiF::UBACT::UBACT::U BA_e1_C; Domain location=42-172::441-584::728-789::829-897::903-1025
MVPRSDVGGGGSSNASGVVEIDEDLHSRQLAVYGRETMRQLFASNVLISGLNGLGAEIAKNLALAGVKSVTLHDTGNVEMWDLSGNFFLSEDDIGKNRAVACVAKLQELNNAVLIYTLTEELTTEHLPKFQVVVFTDISLDKAFEFDDYCRNQQPPISFIKTEVRGLFGSVFCDFGPEFSVLDVDGEDARTGIIASISITTDNRTMVSCVDDERLDFQDGDLVVFSEVQGMTELNDGKPRTVMCAGPFSFCIEDTSNFGTYTKGGIVTQVKERKILKFKSLRDSIREPGNFPLSDCSKFTRPPLLHFAFIALDKFRKEFGRFPGVACGLDAQRFVEFTASINEATIDYKIEDELDENLLRLFASGSKAVLNPMATMFGGIVSQEAVKACSGKFHPLYRFFYFDSSESLPTHQLDPKDLKPLNSRYDAQISVFGSKLQKKLRDANVFVVGSGALGCEFLKNLALMGVSCSRKGKITITDDDVIEKSNLSRQFLFRDWNIGHPKSTVAATAASAINSCLHIDALQNRACLETEHVFHDAFWEILDVVINALDNVNARMYMDMRCLYFQKPLLESGTLGTKCNTQVVIPHLTENYGTSRDPPEKQAPMCTVHSFPHNIDHCLTWARSEFEGLLEKTPKEVNSFLSNPAQYAASMKKAGDAQARELLEHVCECLEKECCGTFDDCITWARLKFEDYFSNRVKQLTFTFPEDAATSMGAHFWCAPKRFPHPLEFSAADSSHIQFIMSASILRALSFGISIPDWAKDTDNLADAVSKVAVPEFKPKSGVKIETDVKAENISSASVDDAAVIEDLLSRLKACTKKLPPRFQMKPIQFEKDDDTNFHMDLIAGLANMRARNYGIQEVDKLKAKIIAGRIIPAIATSTAMATGLVCLELYKVLARGHPIEDYRNTFANLALPMLTTSEPLPPTVIKHGDMTWTVWDRWSIEGDITVAELLKWLSDKGLSAYSVSCGTSLLYNIMFTRHKDRLSKKIRDVAKEVAKVDIPEYRKHLDVVVACEDDNGKDVDIPLISIYFR

SEQ ID NO: 46218 - protein, 653 aa, Zea mays
  Coding DNA Sequence Number=SeqID_2843
MALRIWHLLGEALQVGDEGLGLGEGLSVLHTLHVAFVRVSVCGSDGYDPVGARHLELEVGVVGDGHELGVARSPQHRVVGSSEPDHLEREGFLSEVGGSPEVDGQIELSKGLDTLPGDDPVKGRHIGPDRGQIDLQEFEGLGVDDIEAAASVHEDLGEPNVADDGVDNELVLSWARHAVGVVALVEDLPTLLLAVPSRGVRHLPTVDHEAVVDLGELLCFVILLLVVVVGSATFRRWPGPVEVAPKHDALLEGVLDGPLVIGARLLEHLIEEIGTSRRFPRVLVLSGGDKVRVGGVAFRLRLLLVLLLGAALSGRPGDVFRLSALGLFVLPEDGLNRLLARGELGGDVHQLARPGGGLVTQLAHQVAAGGASEERVDDVRVGDVGQFGALLRESPDVVPERLSRLLAVASEILGVPRAHVRALEVADEGLDQVVPVGDLPRRQMLQPGPSGVGEEQGEVADDEVVIVRSTQLAGQSVVHEPQFRPRLPRVLCDGSRGSEPGRERCSSYGPAESLQTGWFRRGTPILPAVIASPTPGVVASAHLFVEVGSTVVAVVLVAEATRGRRRRVAHAPGMDRGFPHESGSHGAMLRGVPLPSGGRAFGPSDRGILQEILELSLDTPPFGDRCQVLANPTGNRWRPCPDVIGNAVLDALG

SEQ ID NO: 46219 - protein, 98 aa, Zea mays
  Coding DNA Sequence Number=SeqID_2844
  Subcellular localization annotation: CTP_CleavageSite=72; ConfidenceScore=5.10e-01
MSGAPGDSNSKLLTFGNFQRPLRYNSPDCPVYTGHVRCSKEGRPQELASLGFSLQPLRYNSPDMSGVHRTVRCNFGATTTSGANGYLQRIYCAPARAE

SEQ ID NO: 46220 - protein, 194 aa, Zea mays
  Coding DNA Sequence Number=SeqID_2845
  Pfam annotation: Domain name=Transposase_28; Domain location=26-174; Score=-57.7; E_value=0.024; Accession=PF04195.3; Description =Putative gypsy type transposon
MPSSSSSTTNTPPTGASSEDTLSNVAVEELHPGDTVEFGVSRIFSVRVQDMQQLGYFGSEVGRVPGAEEVLEPEGELVVFEVFFTAGLHLPAHRFVAEVLQRFEVQVHQLMPNAMVALAKYVWATTSYGAEGGAARIVGRYVPRTEGLRSWDIRGSNDRLNRVFELNCLPYGGYPREDVADRRGKKPMGVTEKG

SEQ ID NO: 46221 - protein, 673 aa, Zea mays
  Coding DNA Sequence Number=SeqID_2846
MDKDLQGAARKRQATVRVHEARPKRHRGTAKAEASGGGKPPLPTKVGASAPGKAPETTVGAGGPKLSKVVPSVSGVAEAAKAARSLPPPGKRVADFGTEIDVEDYLGGSDEGPLALVVPGAAIATAAPAPKAGGETLDAGGEVSALALVRDEAGVATRRLKGATEALTRATEALSQVADFTSRTASGALTAALSAEVERLRTQHADAVREKSASDSKCRKLAEKVAALEKKADLRRQLAGERREANEAIAKEQAAQAEARLARAEGNIAKELAGELQRRLTAQESRAEGAEAAMRAEAERTRMQLMTSYRELGVRTGDFEVPEREAGLRCLEWVQEELQELPTVLAGLMAFTSLVTCEAAMNALSREGCRHFEALDQVDEDFGRDIFEVEDPVVKESAGALYDRMWGSYGREVVRARAEAARAQAERGERVDDFGALNSALPEPETTPAEAATGVAPGPTPETAEDAPGAPASAAAGEDLPPKVAEGAPDAPAAAVPSAEDPAEAAAEGPAAAGPSQVQDFGPAHATATTEFLAASTAEDGNECGGSVSEFFDVTDSGSSVEWTEESSEEDLDYFAALDVAAAEAAPHAADAPGVPGPSTGHRRRRAVAKRRISAEEGARLRVSRAGRQELLSLPAASGVGEGELRSLFAGEELRIMLFNYREMGIIPKVEPM

SEQ ID NO: 46222 - protein, 45 aa, Zea mays
  Coding DNA Sequence Number=SeqID_2847
MGARLRPWARRWRGEGVGTAAALQGREHSEPTCNFEGERCSINIK

SEQ ID NO: 46223 - protein, 222 aa, Zea mays
  Coding DNA Sequence Number=SeqID_2848
MEDSLVIRTSYCSEVEGFPHLLRSCALRMGIRKKPEYVWKEYLENGMENNKNTPAWRKRLQALSRRDPTEDDPTIVYMAGYLHTLDNQYDDLASHCTHLNSRVENLEHQVRELTREKASLQESLEIAEGEETNTREAYRTLKMDYDKKLKKLAPARKIRKKTKSQGCQTEQKEEAPPALPPTRIGNSSDTEEMSLANLDDLLKEFGDTLEKEFGSTLDSTRV

SEQ ID NO: 46224 - protein, 93 aa, Zea mays
  Coding DNA Sequence Number=SeqID_2849
MEEQTPSETTCGPSGLRRGPSGLYRDDNGYGYGQITADNYPLDMGMVEFDIRGYGYGYNKWAGNGYPLDSGYPAGTGMDTDPYPRTFMGTCMG

SEQ ID NO: 46225 - protein, 206 aa, Zea mays
  Coding DNA Sequence Number=SeqID_2850
MAEAIMDEVVDRLLNEAAEVMTFVPKDTHISSHNIFVSALILRCKLCIPLGTSLELLRLLLRRYKLCIPLGTSLELLRLLLMRYKLCIPLGTSLELLRLLLRRYKLCIPLGTTLEQKTYTALPSERLFVTSSDLLCVPYNDFLLLLRIFDSPKHIGSLLAAGPVATEVEAEAVARKLEADSPKQQRLQDGCPHILGCRANDTKLYA

SEQ ID NO: 46226 - protein, 81 aa, Zea mays
  Coding DNA Sequence Number=SeqID_2851
MAMWGKRPLHHHIVDSDFWALVNGKLRSESREEVPAIAHRTFIPAVVKWVAVAGDLYAAKPGKITLWRFALFLSSSRAFRG

SEQ ID NO: 46227 - protein, 464 aa, Zea mays
  Coding DNA Sequence Number=SeqID_2852
  Gene Ontology: Mol. function=structural molecule activity; Cellular component=cytoskeleton; Biological process=actomyosin structure organization and biogenesis
  Homolog annotation: Hit_ID=P53496; Match level="QueryCoverage=33%, HitCoverage=40%, E-value=1e-80, Identity=95%"; Hit description=Actin- 11
  Pfam annotation: Domain name=Actin; Domain location=4-326; Score =99.6; E_value=9.8e-27; Accession=PF00022.10; Description=Actin
MADAEDIQPLVCDNGTGMVKHQPRQAGFAGDDAPRAVFPSIVGRPRHTGVMVGMGQKDAYVGDEAQSKRGILTLKYPIEHGIVSNWDDMEKIWHHTFYNELRVAPEEHPVLLTEAPLNPKANREKMTQIMFETFNTPAMYVAIQTVLSLYASGRTTDFRDYLYRNFRYSVEKTEGLGWEYSTDGKCEKMPSTNMLNVHIQSLPCFEQEGMVWIWPRDDPPKATIPSLLPPSGFTCSLLMQGVHGLGGGWRLGSSMAASSSCSTTRHSSSLRASAPLQVLHIIGREDRVQIDDARRLHRRAVTPAAVRINEGIFLYRARVLPHDLGSHPYSSYPMQSPNGQFKLQYNQAMTNVQSCVNVKTSILILEICDKRHALCIREDTESPCPVQDSPRLEVVTDELGRDYLIGGVQFLDWIHVPVFGPLVQELFHLHVYSVHSYNGNRQISISFFGYCVIIRFRCNARALT

SEQ ID NO: 46228 - protein, 154 aa, Zea mays
  Coding DNA Sequence Number=SeqID_2853
MQELVVPSPCNAEHVANSKRWKRGTTADGGGEKALGMVCCSGGKDGTGDGECGNGSRCNGSEVVGQSGGGAMADVLGVDSTAAMREDMEAICVAKSPSWRWTLARAVVIVANSDGWAEAVVSASSDPSISDTRLLELPRLRRLYEWLMVGGLEE

SEQ ID NO: 46229 - protein, 107 aa, Zea mays
  Coding DNA Sequence Number=SeqID_2854
  Gene Ontology: Mol. function=structural constituent of ribosome; Cellular component=intracellular; Biological process=translation
  Homolog annotation: Hit_ID=P34788; Match level="QueryCoverage=91%, HitCoverage=64%, E-value=9e-38, Identity=75%"; Hit description=40S ribosomal protein S18
  Pfam annotation: Domain name=Ribosomal_S13; Domain location=4-97; Score=134.7; E_value=2.7e-37; Accession=PF00416.13; Description =Ribosomal protein S13S18
MCLTCRRVCRAGELTPEELERLMTVVANPRQFKVPDWFLNRKKDYKDGRFSQVVSNALDMKLRDDLERLKKIRNHRGLRHYWGLRVRGQHTKTTGRRGKTVGVSKKR

SEQ ID NO: 46230 - protein, 230 aa, Zea mays
  Coding DNA Sequence Number=SeqID_2855
  Homolog annotation: Hit_ID=Q6QP51; Match level="QueryCoverage=29%, HitCoverage=42%, E-value=2e-12, Identity=45%"; Hit description =Putative growth-regulating factor 1
MSRLLETTEPVQWLEAAPRMTLQHLQHKDDALVFHSSNDSRTRRRYPASRPSRCINYLGSGKGTFRRSPSQQKKWAPSPPTDQGFKGCTLWGSATSPEHSGSEPFTDQGFEGWPLGVILQPPRTCRVRDDPDYVRYMAKARATLPRPLADSYRIGLGRPLGLPNSNSLETPCSAPTEGNMARSPCSLRKGDEGAYNKKPRRSSIVLSLRAEARRLLSHQATAKLLTTSIN

SEQ ID NO: 46231 - protein, 257 aa, Zea mays
  Coding DNA Sequence Number=SeqID_2856
  Gene Ontology: Mol. function=N-acetyltransferase activity; Biological process=metabolic process
  Homolog annotation: Hit_ID=A2XMU8; Match level="QueryCoverage=63%, HitCoverage=89%, E-value=2e-60, Identity=69%"; Hit description =Putative uncharacterized protein
  Pfam annotation: Domain name=Acetyltransf_1; Domain location=81-162; Score=55.6; E_value=1.7e-13; Accession=PF00583.15; Description =Acetyltransferase (GNAT) family
MEATATPRTQEVMKPEPGTVKVTVDEVTLRKFELSDVDAMMAWASDPQVAALCRWEPYESTEPLLAFIRDVVLPHQWFRAICLGSEPRPVGAVSVSPTGDPCRAELGYVLARAHWGRGVATAAVKRTVTAVFGEVPGLERVEALVDVANLASQRVLEKAGFTREAVLRKYGANKGVVRDKVMCSFIDPDASYVAAYAAVYDKLRRSRRLDAVQSGYPALSIIKQGDLMVVANVGDSRVVLGTASDDDAITPSNSSST

SEQ ID NO: 46232 - protein, 389 aa, Zea mays
  Coding DNA Sequence Number=SeqID_2857
MAAVSAKGASQDPWSNFCASGEISSDAAAKDVAGSVSQQLRHVSQQLKHAAAFTDHVASGALTLEFAAEIERLRAQHTDVVREKSAAENKSRRLTERLAAAEAEKGDLRRQLTIAFEASGQEVGLRFLEWLQEELGVLPTIVTGLMSFASLVTCEGADLILKRSAGALFDRMWGPHGRETVRERSDRAIDQMAHDKEVEDFGDLDGTLPDSMLPEASGVELAPPSDAGKGPSATPAPTGAGEDPTPAPALTGEDASKAMGEPAAEDPAAAAGPSQVPTFEPAQATVADNTDFVAASTVVSVDDSLFGSVSECFESDGESRSLFPWTKESLDEGLDYFVALDAAAAETSPRVEGAGDLGVGSEGWWENIVWVNFREVAGAVVWGWNVVVF

SEQ ID NO: 46233 - protein, 359 aa, Zea mays
  Coding DNA Sequence Number=SeqID_2858
MSSSSSSAANVPLGESSSEDTMSDLAAVELHPGHMVEFGVSRISSVRVQDMQQLGYFGNGVGRVPGAEEIPEPEVCLGGDFIWRSALRRGLRQELLSALAEEKNWEQDCTVWIVHLYAEDWEDFDGSCGTSSLRPQQVGQLVAEDDRDEGALRCAARMSSGHDLVEEFIGYGVWPLAHGWAMGKVCRHQMPSLGEQQVRSLAFTFDLRGRDPAAFVREVEDGAVRIVGRYVPRTEALRSWDIRGSNIRLNRVFELNRLSYDGYPGDDAVVAVDRCGEKPVATAGEGSSREAAPAMKKRKLGTTTEGLGVSNRFAVELMGTWRGPRGKDVFARAPGVFGANADGYRGSMAKECSNPPRGR

SEQ ID NO: 46234 - protein, 265 aa, Zea mays
  Coding DNA Sequence Number=SeqID_2859
MGRRETEREGGRKPEGDRRKKGKPAAFVFVPRPGRGNDGTSCDVVGPSPGLGEVEAPPRSRSSLSSEAEPLGQARRRPSAEARAESEPWGRAMRSSSSSGAEPESEPWGRAKRSSSSSGAEPESEPWGQAKRSSSSSGAEPESEPWGRAKRSSSSSGAEPESGPWGRAKRSSSSSGAEPESKPWGQAKRSSSSSGAEPESEPWGRAMRSFLWRLRPDLAAVSLALSSGAAVGAAQAALSSCQAGQWSGEVTAVTSALSTEGHASG

SEQ ID NO: 46235 - protein, 353 aa, Zea mays
  Coding DNA Sequence Number=SeqID_2860
  Pfam annotation: Domain name=zf-CCHC; Domain location=254-271; Score =16.0; E_value=0.0057; Accession=PF00098.14; Description=Zinc knuckle
  Pfam annotation: Domain name=zf-CCHC; Domain location=29-46; Score =26.5; E_value=9.7e-05; Accession=PF00098.14; Description=Zinc knuckle
  Pfam module annotation: Pfam domain module=zf-CCHC::zf-CCHC; Domain location=254-271::29-46
MGHKINLMGVSLQVKDLLFNIDMKKQRKIGCFACGEKGHFRDNCPNTVESTKGRSKGKALTSVKTWDDSSSEDESPGTRSHRSSSRSSWSSRKCLMARENFETFANLNCELSTKIEQLESCVPSSATNDGLIKKNEKLKAKLASSQEAIESLLGKMEVLSMHNNEITTKLENIDSTPEVSVIEMPGIIKKDASTSCFDLIDDSNPCNQVLVEDIVVETFLNEVLYDKKGKAKQIQPPQDNTTTGVNKPVERETVNCRLCHKEGHKSYQCKLKTEDKQKLKQKPTSKISNTYINKVDKKAATPYLIKKRKNGKVIAIKANKQVNKGKGAKPIWVPKEINSTMKSTKKVWISRGK

SEQ ID NO: 46236 - protein, 90 aa, Zea mays
  Coding DNA Sequence Number=SeqID_2861
MRTIRSKSPRNSQEKPLSSSGYEIDGFGYDYGAASPLQPNRILAEYVDVYSPLLYTPNPPSPGCQHCNHCSGEDEAVEGDLQEFQDYDEF

SEQ ID NO: 46237 - protein, 196 aa, Zea mays
  Coding DNA Sequence Number=SeqID_2862
MSRAYWRCSPLHGDPEEMVERAHVLHRELVLKGDDHVLEEVDTGCREHDVVDTEEEVDYVVAEPMDEHGYVRPGLDKAEGDQIGGEATVPSPLCLFKAIQRAVSLADQTRYTVSVSAVEEGILDVQLVDHPISREGEGEDDPNGGKLYDGPGGLVVVHSEVLSEATKDPTGLVAIERAIKGELVAENPLAGYTKSQ

SEQ ID NO: 46238 - protein, 125 aa, Zea mays
  Coding DNA Sequence Number=SeqID_2863
MPLGFDRWSSDFWARLDVRWRTRHVLLSVRCASMGTPDFCARWRAINAVAAEQPLRFPEAGEFLRPLFLGAPDTVRCTPDSPVNYSGVPLEIPKGGEFELESSGAPDTVRCPRPEVPSVVPLLLC

SEQ ID NO: 46239 - protein, 103 aa, Zea mays
  Coding DNA Sequence Number=SeqID_2864
  Subcellular localization annotation: CTP_CleavageSite=48; ConfidenceScore=5.10e-01
MDFNPSSLFLLSSLRSPSLSPPAPCACPLCPCARPPYPCPVAEAQPLRARPGAPYDDEDNDGFYDDDYAYGFYYSFHLERVKKKENGVEADLREFQDFDEFED

SEQ ID NO: 46240 - protein, 48 aa, Zea mays
  Coding DNA Sequence Number=SeqID_2865
MEALEAPHVLEALVPQWDKKVKSKVEMQTLMDDAGIFTEVSETTQGSD

SEQ ID NO: 46241 - protein, 234 aa, Zea mays
  Coding DNA Sequence Number=SeqID_2866
  Gene Ontology: Mol. function=unfolded protein binding; Cellular component=chloroplast; Biological process=cellular protein metabolic process
  Homolog annotation: Hit_ID=Q9FXL5; Match level="QueryCoverage=17%, HitCoverage=12%, E-value=3e-09, Identity=70%"; Hit description =Chaperonin-60 alpha subunit
  Pfam annotation: Domain name=zf-CCHC; Domain location=120-137; Score =22.0; E_value=0.0007; Accession=PF00098.14; Description=Zinc knuckle
  Subcellular localization annotation: CTP_CleavageSite=28; ConfidenceScore=5.47e-01
MSRSYRRARPAAAGSPPASTSSPTPSVSPSAPKMFIAVRNVVIDQYDVPKVINDGVTISKAIELPNALEHAGATLLQENWDVALEELNRLKEIIDSKKLIECEQVEDLLFNIDRKKQRKRGCFACREKGHFRDNCPNMAKPTKRTSKGKALTSVKTCDESSSEDEPPRTRSHRSSSRSSRKCLMARGKMSIPSSSDDSSGDDVEGGGKPSLDELAEAVNFFRMYALNKRLNLKL

SEQ ID NO: 46242 - protein, 30 aa, Zea mays
  Coding DNA Sequence Number=SeqID_2867
MENHPEKQCYHKGEVYGIHDPWQMGNTTCG

SEQ ID NO: 46243 - protein, 324 aa, Zea mays
  Coding DNA Sequence Number=SeqID_2868
  Homolog annotation: Hit_ID=Q5NKP3; Match level="QueryCoverage=11%, HitCoverage=15%, E-value=3e-08, Identity=78%"; Hit description =Putative uncharacterized protein 9C20.7
MAVADVPSPESSVLGMSRAFDDYYIEDYGVILVPEVMQRRTDNNDQFVILATVVGIDAGKDGKKDGGPRKHAAPTLAAATSSPTSLYLTAVGASRRDARAARGEGDGGAIWPTPGSCAPFVVAALAASAAGGRSCAGPWHGWRPAVAVAHVGRGRLAPRECSLTRAVLSGDGGGSWRGRHDAALAGVVETATGYVNGCRGWAPRLWPFWAMAASRGWSGMSSRLRQHQLVALASAGWWRRRQAPKSSSLCGTTGQRSIADRGRWRHDDVTPFLKVSLLTFVSARLCLQLLLRFSAPGMRVENVSKVGQKPEAGRRVKIGSWSFS

SEQ ID NO: 46244 - protein, 412 aa, Zea mays
  Coding DNA Sequence Number=SeqID_2869
  Gene Ontology: Mol. function=protein serine/threonine kinase activity; Cellular component=integral to membrane; Biological process=protein amino acid phosphorylation
  Homolog annotation: Hit_ID=A2X7J1; Match level="QueryCoverage=100%, HitCoverage=58%, E-value=2e-86, Identity=41%"; Hit description =Putative uncharacterized protein
MARAPAKVHAAAGTGTKASLSPCPSRCGDVEISYPFGIGLGCFRQGFELTCDQTAPSPRLFFVSGNSSIQVTSLYVGNSAVLASAVGFNVTMNAGVDTYTKSWEAPTATGVSFYADNNYLYTVGCGVYVYVFGDNREIMESANTGSGVCEGLGCCSIPMRGGQGFTLKLGRLNSTIPQFGEALSSVKIIVSQNYEFVTDDVYASWVNTSNVQGMLLDIAITDQPNCASAQSQENKDTYACTSESICNDVLPPVVSQGGYSCFCPGQIEGNPYIEDGCIAYYNPEAPSIRNCTRLCGNISVPFPFGIEEGCYANDNLRLNCTINDTTLILDRGYAQYRVTNLSLDDGLLMVTNMLNDTSSKNVERIIITSNYDNYQEVMDGNYDFSQEDTAIKWVISNITCQKAMQNNATYAC

SEQ ID NO: 46245 - protein, 104 aa, Zea mays
  Coding DNA Sequence Number=SeqID_2870
MAAALRLQRQSLTASPFLFSAHGLRYRKLEVILTTNIDGLDGIGNHEPIKTKDKKFYERSEHWLYQTPQRIKGYLNLASAKIKQLYMIGVVTSIKWHLSRIIGQ

SEQ ID NO: 46246 - protein, 81 aa, Zea mays
  Coding DNA Sequence Number=SeqID_2871
MATGRTGGACVVAVDWICVDLVSCVENYSMDLATPVATGGLAAELCIVDVPIARDAMVAAADGMIAVNSVHHREGSYTISV

SEQ ID NO: 46247 - protein, 105 aa, Zea mays
  Coding DNA Sequence Number=SeqID_2872
MNRHRHSRCHYKRNFGSAPAGTNNPHIGGPVGRRNPRWLADARSGSSDNDLRSKRPNNSSDDLRADAAAIRPSPTSPLEGRGQASKVVELEELSAYFTCNCSLLC

SEQ ID NO: 46248 - protein, 168 aa, Zea mays
  Coding DNA Sequence Number=SeqID_2873
MKNCFEGVKSTTTNDCIVRLFHVNNIKHNLFSSCVVDKSECHWHCDFAECYNLPPSEATKRMCGIMNFVFGLLHLSEGLSKYDISCAACINQNIMDQKSFDHTRDDHSIVVWVILELKILLGEGSLHPDMLYPSLCFLLLLLVGWALSMNRLLSGVPASEPKPLQLDC

SEQ ID NO: 46249 - protein, 720 aa, Zea mays
  Coding DNA Sequence Number=SeqID_2874
MVRSPAFVLNLQNRDPAAFVREAEDGAVRLVGRYVPRTEGPRSWDIRGSNDRLNRVFELNQLPYDGYPGQDDADRRGKKPAVEIGGDPAPAAALSSKKRKLGTVMGGLGVSDGFARELMRTCAAPGGRMSSPELRESSARMLRVTRGCWPRNVPIPCAAGEDSFTSRMVRKWRVFPYGRNIAAVVSAVMDKDRQGAAQKRQAAVRLVEARPKRQRGAAKAVAPSGGKPPLAAKSGAPASSKAPEATAGAGGSKSTKVVPPAGGVAEVAKAAGALPLPGKRVADFATNISVDDYLGGSDEGQLAIVAPAAATTTAAVVPKAKGGALSAGGEASAFAVIRDEAGAASRRLEEVTEALSQASRRLKEVADFSNRTASGALTAAVSAEVERLRTQHADAVREKSAADSKCRKLTDKVAVLEKEKADLRRQLAAERRETNEALAKEKAAQAEAKLARAEGNIARERAEQLQERLTALESRMERAEAVSRAEAERTRKQLMDTYRELGAGTGEFKVPDREAGLRCLEWVQEEMQALPTVVEGFMSYASLVTYEGAMNALSREGCRHFEVFDQADEDFERDIFKVEDPVVKESAGAIYDRMWGAHGREVVRERAEMARAQVARGERVDDFGALNSAPPDPEPTPAEVVPGAALEPTPETAEDALDASASAAAGEDLPLGVAEGAPDAPAAAVPSAEDPVAVAAETTAEATAEPVAGAPATSGPSQVA

SEQ ID NO: 46250 - protein, 490 aa, Zea mays
  Coding DNA Sequence Number=SeqID_2875
  Gene Ontology: Biological process=intracellular signaling cascade
  Homolog annotation: Hit_ID=Q5VQ37; Match level="QueryCoverage=71%, HitCoverage=83%, E-value=1e-153, Identity=70%"; Hit description=Leaf senescence protein-like
  Pfam annotation: Domain name=DUF231; Domain location=315-489; Score =94.1; E_value=4.3e-25; Accession=PF03005.6; Description=Arabidopsis proteins of unknown function
MVLGKEGNLGTGKAIFAECSQRHSAKKETWEPAKTSLPSAFTKALGKYTGEGAHWRVLCRVPVHLTLGKEAGGGAHWTSLCRGPLEQTLGKIGLFAECHRRHSAKDPSPSLGAVTVTFLCRVPNGTRQSLCRVPDKKQQRGGEGGCDIFRGEWVPDPDAPYYTNDTCKVIHEHYDCMGYGKPDLGFVNWRWQPDGCDLPRFNPWRFLHMMRGKTLAFVGDSLGRNHKDSLICLLTTVAEPTTSWPSSKHTVYYYADYNFTVAHFWAPYLVRHEQIDEDGPAHTGVWNLYLDEPDGVWAAHVAEFDYAVVSASSWFYRPSMLYEAGRLVGCHYCRLPNVTDLTLRYALRMATRAALRALSGADGRFRGTALLRTVDPSQYEGGEWNKDGNCVRTAPFRRGQNAVQGLEREFRTLQLEEFASAEKAATDGGGKVRMLLMDTTEAMILRADAHPSKYRGWTPEKHFTLHNDCVHWCLPGAIDTWNDMLLHMLK

SEQ ID NO: 46251 - protein, 231 aa, Zea mays
  Coding DNA Sequence Number=SeqID_2876
  Gene Ontology: Mol. function=zinc ion binding; Cellular component =intracellular; Biological process=regulation of transcription
  Homolog annotation: Hit_ID=A2XV26; Match level="QueryCoverage=81%, HitCoverage=23%, E-value=2e-67, Identity=69%"; Hit description =Putative uncharacterized protein
  Pfam annotation: Domain name=zf-B_box; Domain location=1-47; Score =37.2; E_value=5.9e-08; Accession=PF00643.15; Description=B-box zinc finger
  Pfam annotation: Domain name=zf-B_box; Domain location=55-102; Score =38.5; E_value=2.4e-08; Accession=PF00643.15; Description=B-box zinc finger
  Pfam module annotation: Pfam domain module=zf-B_box::zf-B_box; Domain location=1-47::55-102
MRIQCDACEAAAAAVVCCADEAALCARCDVEIHAANKLASKHQRLPLGDAAALPASLPRCDVCQERPAFIFCVEDRALLCRDCDEPIHVPGTLSGNHQRYLATGIRVGFSSVCGASAEGLPPAPPKGSSKPTAVVSAPAAGTTTKTRTVKDALPQEKDSSLGLKELEWFEDIDLFHAHSPAKTAMAEFFASPQPVSNAGFYKANGARLFKKSRMEVPDDDDEDYFIVPDLG

SEQ ID NO: 46252 - protein, 196 aa, Zea mays
  Coding DNA Sequence Number=SeqID_2877
MGPDLGETGQLGRGIDEGIPDDASKEEGEDLGEAGARADAVAVQCLHDFCRLHQWEGEGVCHSLRREHRRQIDSKSYGFCPFANRQAATLGYLSSCHGGAWWRRRGTRGRGELGSSDQWKRRRGAQGHGRDGIQRLAASSGMVEGGDREEGEGIRHHPGKRASGHVVAWFAQNGREGGRREMGAQSSRGDGGRPAW

SEQ ID NO: 46253 - protein, 257 aa, Zea mays
  Coding DNA Sequence Number=SeqID_2878
  Homolog annotation: Hit_ID=Q6J9V9; Match level="QueryCoverage=43%, HitCoverage=39%, E-value=6e-46, Identity=80%"; Hit description =Putative uncharacterized protein
MGPQVLVGGQSPKKPLANRHENGRLRDGVGVEVMQLHPIVVWERPHEATRRHPKPPLMEGGETDHVSRRRSRFGLAPRGQPLRLRPPGERTEQTLSNKGLQILHSDGGERPRVTRRNDGRRVSHRRAKAVEAEEMRDRETGHFRGVLRNEGNGPRALLLIRGSKVAPHGVRRLPQSTRALSPLLIRGSKAGPSKGFDSRPGTCRVRDDPEYVRYTAKARATLPRYPKTFPRPAGTICNGIPPKGGTEPSDPIEWVRV

SEQ ID NO: 46254 - protein, 73 aa, Zea mays
  Coding DNA Sequence Number=SeqID_2879
MALGKEENLGTGKAIFAECCCQGTRQRDWQRGPLEDSLPSAGPLDTRQRVLLYRVPTRALGTGTGGYLLFKIW

SEQ ID NO: 46255 - protein, 458 aa, Zea mays
  Coding DNA Sequence Number=SeqID_2880
MAAHSSLTEAGGRQQGLNRSDSCPSARLRRSSDGHDITPTGCQDLSGCHIGMAFLEKVGRAGTRTRQALSWGRSLPSPAWTLVTPYCKRTRPGRGTNMKAAGFPPLSRPSPATSLPPFALAHALDPSGLGHAAHSLVGLGTPGSRLFLAWQEQQQQEPSNESLLAAKGSSIHLLMDGVATIREVMVDLVAALLESLCNAITAPRDLLGKPGFHQLHFFKHPVHGGVGGFHSGGSRMPRHDAKRIQVNKPLAMPTISLKRPSGGGAGRLRRLLASLRPPGPLSVQTGFPTSLADIVVKNHGRIRNTRKRRRAAAAAAEPQQMRELSVARDAAAPAPVRPGIGAVFSVRPGLLAVCGAAVALALVVICWSKQMVAAATLASVALSWIESVRSNRWRPETNAEVHLRGRVSPIREVADSPKSRRAGCESEPDNVGNDAASLWSADTSKPSANNNPKLKQSR

SEQ ID NO: 46256 - protein, 110 aa, Zea mays
  Coding DNA Sequence Number=SeqID_2881
  Subcellular localization annotation: CTP_CleavageSite=31; ConfidenceScore=5.06e-01
MGGGLLAAASALRSALPLFGPPEQKSSSSPLLEQRQSWLENENLVGRSLPGLSVSGTDAGVDQPRPRIGPVPLEDGWPRPQGQPAEPPARAGFPEKSLDRVTVRGWVGPR

SEQ ID NO: 46257 - protein, 218 aa, Zea mays
  Coding DNA Sequence Number=SeqID_2882
  Gene Ontology: Mol. function=peptidase activity; Cellular component =cytoplasm; Biological process=proteolysis
  Homolog annotation: Hit_ID=Q6ZIR2; Match level="QueryCoverage=74%, HitCoverage=17%, E-value=5e-39, Identity=56%"; Hit description=DegP protease-like
MESTLKGIRGSDVPCVLDLDNAATVVGGVKDTYREDRATEEQLATPLDMLLCARIDPVKSHIGCLLLQHLKLSPTSICANVVFEEMQQSAILRDAHAYGVTVHVPPVCMLDGVHSQHFFGTRVIIYHSEHLGLVAVDRKTIVVSIAVILLSFAAYSIEIPGEVVFLHPVHNFDLVAYDPSALGAGASVVQAAKLLSGSGATTVEDQKVLEEKQLLKIQ

SEQ ID NO: 46258 - protein, 121 aa, Zea mays
  Coding DNA Sequence Number=SeqID_2883
  Subcellular localization annotation: CTP_CleavageSite=87; ConfidenceScore=5.55e-01
MDATREASSSEAQSERSSRSSVRNTRSRRGSGSHRGTHSVRRDKPSWRGHSSITGDNQRSRGVVIARNRSLETNVSITTLEESAPVVGDDGWRRLVLLAFIEAPSPVVSDDDGPNGRSRGG

SEQ ID NO: 46259 - protein, 117 aa, Zea mays
  Coding DNA Sequence Number=SeqID_2884
MADSGCARKRSGEREPDAAGRERAHQRVSRVADGKAKLTMALGRARAQRRPRNRRWASAGDGGALGSREQSEREGEGAGQRAQMRERRWASRAWGSDVAGERADVGASKAGRSWARG

SEQ ID NO: 46260 - protein, 252 aa, Zea mays
  Coding DNA Sequence Number=SeqID_2885
  Gene Ontology: Mol. function=kinase activity; Cellular component =ornithine carbamoyltransferase complex; Biological process=amino acid metabolic process
  Homolog annotation: Hit_ID=Q6QP54; Match level="QueryCoverage=23%, HitCoverage=20%, E-value=1e-13, Identity=67%"; Hit description =Putative kinase
MSGGLRNESASKLEKVEVASTSSFGADVDPRAIDLAMRITEKMFLKMKEDEAKNKIEEEENDRWRPNDESTSSQGSSFKSTSHMCFIANGSDSESEIEDEEEQESDSEDEDDLQQFFAQLSKKNQMNLLKLTKRAEEQKEMLHKQEDFLIRKIEDLEKLTKEHEKLKCSHDDLVQRVMMAPPVDVAGLRPRLGDVEAPPKPRSSLPSMAEAESEPLGRARRRSSAEAGAESEPWGRAKRSSSSSGAEPESEP

SEQ ID NO: 46261 - protein, 158 aa, Zea mays
  Coding DNA Sequence Number=SeqID_2886
MTFVEYVDVYSPLLYKSPPPQVVPIVLSAQEVKLMAHIRCTACKSVIPFLPSRLAERPLRRKVLGQSSHLERLHCRLHEEQERRRQEQEKEQQDSSPSPQREVESERPPSPAPQLEMPPAPPQGIPAAGGNPNGDEDDNDAGGSSSHGTVRSEEPELE

SEQ ID NO: 46262 - protein, 57 aa, Zea mays
  Coding DNA Sequence Number=SeqID_2887
MESHDLRAERESRLVGGYEIDGSGYDYGVGCQHCNHCSGEDEAVEGDFQEFQDYDEF

SEQ ID NO: 46263 - protein, 181 aa, Zea mays
  Coding DNA Sequence Number=SeqID_2888
  Subcellular localization annotation: CTP_CleavageSite=37; ConfidenceScore=5.59e-01
MGIASVVFPSFESVWWRGNSSSWASAVSSTLPASAVRAHSRTSLESLATSLYLRAPTLFEPCLRPHSLPHPISRSPAPARALLTPLDPAGDPRSPPRPSSPPETVPSHPELRPKIAGYRFAHAHPMPGPACQRPCLLALGSTDNEQSEVPECIVGDLPEQQPGGDAGNMEDFEEFQDYDEF

SEQ ID NO: 46264 - protein, 164 aa, Zea mays
  Coding DNA Sequence Number=SeqID_2889
MESHDLRTERESRLVGGYEIDGSGYDYGAGKWYSFRLERQEIESVRSCSPVLPLEAPPAPPPGAPATGVAAGGDPDDGGGDDSSSHDTDFPADQEPEGWVARSITRDAARGCHFHDALDTLLRRALNRRTWSIEYRCVVYQHSRGVYPDRWEATCLVRRPENSL

SEQ ID NO: 46265 - protein, 202 aa, Zea mays
  Coding DNA Sequence Number=SeqID_2890
MARAEDVEDFGHLNSAQPEAEVNPVVPEAEVDPAPPPETSEGSPAAPAPMAEDPPKAAMEVAAEDPMVAAGSSQVQDFGPAHATATANFVAASTVVAGNESNESTFKFSEFDDSGSLVVWTEESSDEDLDYFAALDVAATEASPRVTGAEVLPGPSAGRRQRRAVAKRRVSEVDGGRLRVGGAGKRELLSSQVGASIGEGKL

SEQ ID NO: 46266 - protein, 129 aa, Zea mays
  Coding DNA Sequence Number=SeqID_2891
MASKGPTRSVPLAKVMVATTDVPTTQIYHYFACGGDDAYSTALSKRYYRAYGGHSDEFVALAPNPLVSVDAVIGTGTKSSVITSISVSKELNESPGARRCHRTKEEEWATIQSKIEVVVALQKEALIVG

SEQ ID NO: 46267 - protein, 161 aa, Zea mays
  Coding DNA Sequence Number=SeqID_2892
MWQHWALGRAGSGGAPDRAQTRINTRPMPRSQHFLLRDLVMGGPELTWWGPNSIQWLRAALLWGSRLCAQGSCAFLRRSGPDDVVSENATSTAHEISLGMFSVRLGIAAQASCLHTIVRGTPDPGYRQGALIGAIESDRTAESDQYPFGHHFCIKSPSTLA

SEQ ID NO: 46268 - protein, 98 aa, Zea mays
  Coding DNA Sequence Number=SeqID_2893
MPSVRHSVKSLVAESLALPSVALGKAFFAECPTKGTRQRLQHSAKPWIPTFTIAQSHYDNIDLLELSKGFVLGYTEEELDKIKEEMSPLKGKYAYTFS

SEQ ID NO: 46269 - protein, 698 aa, Zea mays
  Coding DNA Sequence Number=SeqID_2894
MAVSLRWRSSPSNTVCTGRREKLDMRLHNSDRALSRRSPGRLRWKLWSWSPMLEISGATGGTTGLMFRRLKSKITQGSLPPFCVLIIMWRTRHLKWRRMMKMRGPFRIAACTSSGRDLVEEFIGYGVWPLAHGWALGEVCPREIPSLGGRKVRSPLFALDVRGRDPAVVVREAEDGAVRIVGRYVPKTEAQQSWDIRGSNNRLNMVFELNCLPYGGYLGEDVVDRRGKKPAAVIEDDPALEAAPATKKRKLGTAVGELGVSDSFAMELMGTCAAPGGRMSSPELRESSARMLEVTGGRWPRNVPIPRAAGEEFFTSRMVHDLRVFPHGPNIAAVVSAVMNKDRQDAAQKRRAVIRLPEARPKRARGTAKATIPGGSQPTLAVRMATPGSSKVPESAKAVGVGGTKSAPDGAAKVHEPPSPGKRVADFGTNISVDDYLVGSGEGQPVVVPPAVATTASTAVLGVKGGAFSVGGEIAAATAVKDEAGTAADFADRVASGALTADVSAEVERLRAQHADAVREKSAAESKIRRLADKVAALEGERTNLRRQLAEERREANQAIAEAQAAQAEAKLARAEGSLATQRAEEWEVRFNALHGRMERVEASTHSKVERTRKQLMDSYRELGARTADFEVPDREAGLCFLEWLQEELLALLTIVERFMSFSSLVTCEGAVNALSREGCSHYEAFDRSDEDFGREIF

SEQ ID NO: 46270 - protein, 216 aa, Zea mays
  Coding DNA Sequence Number=SeqID_2895
MPRSRHFLLRDLVMGVPKLTWWGPNSIQWLQAALLRGSRLCAQGSCAFLSRSGPDDIVSENATSTAHEISLGLFSVRLGIAAHASCLHTVVGVPLIQGTDSGPRARLRGGNKPADLAPMPEVGPLVAAKMKRRTYRGVSAGVRWKDPRQGCPPSDLTAGELALFVSCVVVVEMELGLRLKADVILLLFVRLDVSRLDTSVSKRVVNNSREAALAGI

SEQ ID NO: 46271 - protein, 340 aa, Zea mays
  Coding DNA Sequence Number=SeqID_2896
MKKRITAGQLHAPCAVMGCAGVFWRGPHQGHLLYPAAVPRQWSSRRMTTSLVVGISKLGYGLPPAISFKDGRRSFASLAKEANFGYAGSVISGAISCRVPSSLARMALGPPPTLPPAAWSGRGCPSTARATIAPCAGPPHPWLLPRRWPYWGAYKTPYAAGAVVVFLDGLVLTPWEDESEDLFTRRGSRRPPVWRWPSSSVLRWSQPLRLHDPTSGLARWLMSWATSSGSPPEQEVKGKAWTRVRTGPLLTLGSSSFRDLAEVRTLLGGSGLICIGVQCPSVEVRTPRYILGCVVFPCHVAPFGLPMRWGQATSSMWPGDVAWAWRLHAVEEGTPDLGYR

SEQ ID NO: 46272 - protein, 254 aa, Zea mays
  Coding DNA Sequence Number=SeqID_2897
  Homolog annotation: Hit_ID=Q6J9V9; Match level="QueryCoverage=38%, HitCoverage=31%, E-value=2e-07, Identity=41%"; Hit description =Putative uncharacterized protein
MTAPRTTCPVALTLRQGERHLWQAKRASFHLHHDDNNKNGTGKGDISKGILLHEGSGPRALLLITSSKAGPSEGLAPRKGSTATSEHSGSASTTDQGFEGWPLEGFDSRPRARRARDDSRYVRYMAEARATLPSVTCPAPTTAPPARVRLTTAKSSLTRNRKTLPRPTSGLGPRLSLERWSPPRPTPGLGLNLGLGRWSPPRPTLGLGLNLDLRRNHATGNKTVVPSGSPRPGSCASTGLKRSSDGHDTACTGL

SEQ ID NO: 46273 - protein, 153 aa, Zea mays
  Coding DNA Sequence Number=SeqID_2898
MAMMGSASKRCTSDRRPNLLSDYASTWLSEVLRTRTSVGGPNTLGGSVTCDERGERVNGPRIIMVYGHGSMGMCCLRDKIGIRINVWYRGQVFERTKHMSENMTLSLSGPGTECPMPDYGGYNCGHYTAAPGVYLSRLKLDLNRLLLAANETA

SEQ ID NO: 46274 - protein, 81 aa, Zea mays
  Coding DNA Sequence Number=SeqID_2899
  Subcellular localization annotation: CTP_CleavageSite=20; ConfidenceScore=5.21e-01
MAAIFSGLASIARSERMNPRSMPRGTPKTHFSGLSFTPFPQTLECCFKVREKVGGFPRLDYDDIDASRNDRVSHPEVESTI

SEQ ID NO: 46275 - protein, 259 aa, Zea mays
  Coding DNA Sequence Number=SeqID_2900
  Subcellular localization annotation: CTP_CleavageSite=41; ConfidenceScore=5.26e-01
MDGDEVTSGTDCTVISGTRLTPSKPFASALASSVRFGRVVNARHVACWGAGVVDSLDSQRGAASCLATVAPPPPAAARKATGQTRMLLFRHGGKTSPSPPSPGGLTVVVVAVAPRGKEYHVVAAIEGHELETPETEQRPGLKRLLETTHLELNGKLFVKTQQTPTWRANCRRFDPGGSLDRRVKLSLRAPAQMGWRETEHEGGKPRLVLSCARVGALAVGVTSVREGERESRATTLLCMRALDLPFIDAMRGSRCTMGV

SEQ ID NO: 46276 - protein, 64 aa, Zea mays
  Coding DNA Sequence Number=SeqID_2901
MWSCDPRAERESRLMGKVCNLCRVLETDISEVLTVMSGLGILFGKEEGVEADLKEFQDFDEFED

SEQ ID NO: 46277 - protein, 212 aa, Zea mays
  Coding DNA Sequence Number=SeqID_2902
MTLEPHPLQPGWRSLDFESFGYRAKDTIEAIALHGLTTFCGFHPLELSTHPIGLFPAEREDDLMWKDRVEHTKYIWAIYPVMRGEAMSHLMALLEATKITLDNREELVVDLSTEMVEKDLQVEQLSNEIQELEELVGTRENTIEVLEDQLINTQQQLAEANEHLDMHHQEIQDMEANEDVDIEGGEEPASSVDTAGSGRPPSPESSVASFAH

SEQ ID NO: 46278 - protein, 214 aa, Zea mays
  Coding DNA Sequence Number=SeqID_2903
  Subcellular localization annotation: CTP_CleavageSite=44; ConfidenceScore=5.38e-01
MGGGLLAAASALRSSLPLFGPPEQKSSSSPLLERATARRLSVFCCSAGPPIEWGCSYLRRWNRGSVCNGTLNASVFVHRGCRGLNINVCASESCFSRKVMSEVSVSRRRRSPSARSALPLMRTLTRPWGSVTDAVEKARRIAPTEELPSVKTCSVRGITYPNVSYLSQKVMSEVGLLILSHALEVDTILVWNDDPWGAPEVHPMGVAPDLQMDF

SEQ ID NO: 46279 - protein, 74 aa, Zea mays
  Coding DNA Sequence Number=SeqID_2904
MSPMKLMKDRGLERSFCCAVVHAVVGRAHCSGYEGPMFLCGSDNDTVELRQCRQADFSDWNLWFFLKIENVLAS

SEQ ID NO: 46280 - protein, 413 aa, Zea mays
  Coding DNA Sequence Number=SeqID_2905
  Homolog annotation: Hit_ID=Q6QP51; Match level="QueryCoverage=34%, HitCoverage=63%, E-value=2e-29, Identity=55%"; Hit description =Putative growth-regulating factor 1
MRKKHIITLKCPNVQASAAAKNKHPYSGYHYKRDSGSTPAGMNDLHTRGLAGQQTPRQGKRHLWQAKRASFHLRHDDRVKKGTGKGDMSKRILLSEGNGPSSPPTDQGFEGWPLGRVRQPPQSTRAPSPLLIRGSKAGPSEGFDSRPRARRVRDDSGYVCYMAEARATLPSLGRNRKLRLAPTSGLGLGRRSPPRPTPGLGLSVGSGGITSSPDPGLGLRRRLKRFSDSHVGMYTGSCSSLPDTRNGDTTHDETGVEAEGRSRRVEIAHSRNIMRQKHVLRERSTFERSMIGEGDTTKEHQQADLLASSIVRASRSPAREADSNARIRAGHGGRACGRIEGVTMDPSRKATVATDPAGKTRSGQRDNGSSREGCDNGESNQEGCDSDRSNEGDEGEGNGAGPAGLGPAPGLAG

SEQ ID NO: 46281 - protein, 355 aa, Zea mays
  Coding DNA Sequence Number=SeqID_2906
  Subcellular localization annotation: CTP_CleavageSite=59; ConfidenceScore=5.57e-01
MPSHSPHALRPSAFRAPGWGAPALPSSRCGRSATSWRLVPFSHHSASRICIRQPGCIPSLMVTQDGDHQFDGGEKQAGLRPLPRPQLQGERALTGLAEGADFDNAGPIGRKRRQLQHAWFAGSAGFGTASGATSHRWAECGYLPVVVLPSLRHDASARRSVLAHPGGLEWGSAGGQVAAIVGAEVVAAGEGFSADEIVGAICAPGLRLFGFDSLSSPLEWGRGRGPWAAASALRSSLLLFGRPERRSLSLLQWSVASHLELVVPQALRCGGCSYPREWNRSSVCNGIMSAGDSPVGWLNRLTKYELPCAEGDENPRLLCDEPEPEAAVSAWTEAELAREETSSAQEQGTSQAEEA

SEQ ID NO: 46282 - protein, 124 aa, Zea mays
  Coding DNA Sequence Number=SeqID_2907
MVPATLGIDEDVVDKNHDKLIQFFHKYLIHEVHEKGGVGGLRPPKVFSDSELWIWSTTRTKAEPGEGRRQPKLYAGKLRRDSTRGNRLKDKKTSGSSIDFHKPLTNVMDMDVILRGLRPASINR

SEQ ID NO: 46283 - protein, 123 aa, Zea mays
  Coding DNA Sequence Number=SeqID_2908
MNSPTPASGGDSRFSSDFLSRDGFPSILWEVLNSAGYPTPPLYTVQLTDDTVEAATMKTLTTFCGYHPLEMVMHPLGLFPAEKKDDPMWCNRVSHVKDVWAMYPDLVGRVIVQCMSALYRLQP

SEQ ID NO: 46284 - protein, 23 aa, Zea mays
  Coding DNA Sequence Number=SeqID_2909
GLPELEDEVAGDCRQLMQEAKGE

SEQ ID NO: 46285 - protein, 172 aa, Zea mays
  Coding DNA Sequence Number=SeqID_2910
  Subcellular localization annotation: CTP_CleavageSite=39; ConfidenceScore=5.18e-01
MSCSSFSVNNSRGVTTLKPKKVKVLTHRPKRTDTVEEPRPAEGSSAFESSYPAPAEAKRELTEESKPKIAVEQLKALSPLKGTVPPKVSTPASAPAAEEKIVKGSAEASTTQAAVEAGPSTPAEAGPSGAAEEGAEASPSEAVEGPSMLIKEGATEDLSSLPPEPLPRNWIS

SEQ ID NO: 46286 - protein, 181 aa, Zea mays
  Coding DNA Sequence Number=SeqID_2911
PGLLRPPTKHLRLRAWTDRDLRANLRTGDPHTVVDPRETFPYVLDHFTRSHLAARPAPPVSRFVILPAYDAPLSLHRRPSPPSLHRRLLAAQESLAPLRPPPLDQRPRQYCPAVASPRRRSSTTTLLPSPEPKSRSAAVFPLSELTGGNPAAKLRHLPAGSPLPTSSDQIEPTSRSAIPSP

SEQ ID NO: 46287 - protein, 254 aa, Zea mays
  Coding DNA Sequence Number=SeqID_2912
MWKTSSIPPPAGGLSAAIVAVARRRKEYHVVAAVEGHELKTPKMEHRPGLERLLETTHLDLDGKLFVNTQQAPTRRANCRRFDPGGSLDRQPWVGRGGGSSEVKVESVFRGRGRVRAPGRARRRPLSEAKAESEPWGRARRSSSSSGAEAESEPWGQARRSSSSSGAEAESEPWGRARRSSSSEAKTGAEPWGRARRSFLWRPKPDLATVSLTLSSGTAVGATEAALSSCQAGQWSGEVTVVTSALSTEGRASG

SEQ ID NO: 46288 - protein, 757 aa, Zea mays
  Coding DNA Sequence Number=SeqID_2913
  Gene Ontology: Mol. function=hydrolase activity
  Homolog annotation: Hit_ID=Q8S9P9; Match level="QueryCoverage=42%, HitCoverage=81%, E-value=1e-143, Identity=75%"; Hit description =Purple acid phosphatase-like
  Pfam annotation: Domain name=Metallophos; Domain location=345-623; Score=67.5; E_value=4.6e-17; Accession=PF00149.19; Description =Calcineurin-like phosphoesterase
  Subcellular localization annotation: CTP_CleavageSite=72; ConfidenceScore=5.42e-01
MAPPVTWSVRALGWARRRLLRGRGRVCLPRSRSSPSPWVGRDGDRRLRPRSSPSPGSGEAEFVVFRGRGRVRALGRARRSSSSSGAEPESEPWVGRGGVRRLPGPSPSPSPGSGEAEFVVFRGRARVRALGRARRSSSSSGTEPESEPWVGRGGVSYGARGRTWLLSASLCRVAQQSEWRRRRCPLVRPATFALNAPAIRSVVVAIWPRLLLGEDWASGEPKLCADWVYQLRFRSLGELPVFHGPCSQRQGQPSRHVSLPLYYPAPPSDSERGASPDQEHAKPDAPRTTPPKPSSKSAMHKWWRSPGPALLAAALAIVVAALRPATEHAAAKGRPPLRFGPGGAFKVALFADLHYGEDAWTDWGPAQDAASDRVMAAVLDAENPDLVVYLGDLVTANNLPVPNASLYWDRAVSAARGRGVPWATVFGNHDDMAFEWPPEWFSPDGVPPLRWPPGPGSGCGFRGTPRTDLMAAETGANRLLSYSSSGPRELWPGVSNYVLQVLSRGRRARGDGHDHDPALLMYFLDSGGGSYTEVVSSAQVRWFHTQSQFLNPDGRIPELIFWHIPSTAYAKVAPKAKSEIRKPCVGSINEEEVAPQAAEWGMMDALAKRSSVKAVFVGHNHGLDWCCPYDGEEREQELWLCFARHTGATTSSPSAACPTRPASALCPVYPTPSVRATSYYACPASDPTPDGPGRPHEADSHVLLTPLVLGRNKERRLRRKLACPVPTPPRAIATPKQAHESQAGEREPTPADHQAQE

SEQ ID NO: 46289 - protein, 191 aa, Zea mays
  Coding DNA Sequence Number=SeqID_2914
MGRETGSLHLLAPLLLTGGKGADLVIRGNVVLNTLSARSTSTLLRDQICINSSSSWQVFWPSQTVLRDRLRFRSLMKKCGMKSLVDDLLLLTQATSPCALVLVTAASANGFHIAPEFVPVMEAHLAMATPVSEACQHGCDGVHASVEGGDLGASVARQKCLGPSEFVYWTGSSSIWDLAMQVDKNETVSTV

SEQ ID NO: 46290 - protein, 466 aa, Zea mays
  Coding DNA Sequence Number=SeqID_2915
  Homolog annotation: Hit_ID=Q2QNR2; Match level="QueryCoverage=29%, HitCoverage=12%, E-value=3e-07, Identity=35%"; Hit description =Retrotransposon protein, putative, unclassified
MHVVGDILKRRIAPLQRRARLCCWFTGPNDIGRIQRGPGTDLSWEELELLVKGITGESFVPESLILPHGIPALGDDLGLRTAILATVLTLDESGVAVCQTGGRDPHRGIRISDALARGPQPAVVAPNAPAAVPRPLDKGKGAASSSSAPEARQPVATATIGSATTTTTTTIGPTATTTTWGATGLPCSSWGSGSSGAKVKRRRSGGGGPNCSDGYRSLNDGDVVEYTVGSGRGGPDYTHPRHRGWHSHAAPVPLPRVLSRAHHALHETEAVILREWEALEAEHQHLSDWRTQLEERTMAASLQFAFERSELERDRKDYKRDLQKVYARELEASRREKKLARREEALSEREALTTELRAKLKALDQTLVAQRVQQVQAIEKIQKWERELENKASNIALAKENLKEKDASLDRREMDLAWWEKDLAFREEMFERQDKLLAEHELKAEEKEKKLDRIQQFQAAQAAPGP

SEQ ID NO: 46291 - protein, 101 aa, Zea mays
  Coding DNA Sequence Number=SeqID_2916
MADQEREKWKLARARKLSLLTSHIPGTRCKRVSRLFSPLDLYPTNVLEKSANASRHVSGEGVQQALLKILEGTVSSESGYGYTSVWSRRSLSGTEDDHDEG

SEQ ID NO: 46292 - protein, 180 aa, Zea mays
  Coding DNA Sequence Number=SeqID_2917
MDSYFLFGLLKLGQLVLNLVVHRLQASSSKRKQGLEISADSVQLEIQGPHRMMRRSTMHLVDLEGDILWGRDIAGEGRRHLGWRVVGRGKRVLGVDGEARCGEWRQCPRLKATMAWARGVSRTFLAVAEGSSRRHGARLRALGNGGQGRVHGRAATGRQARMQMKENNKGDVCLFSVFHL

SEQ ID NO: 46293 - protein, 245 aa, Zea mays
  Coding DNA Sequence Number=SeqID_2918
  Gene Ontology: Mol. function=hydrolase activity, acting on acid anhydrides, catalyzing transmembrane movement of substances; Cellular component=integral to membrane; Biological process =metabolic process
  Homolog annotation: Hit_ID=Q8H1X2; Match level="QueryCoverage=61%, HitCoverage=16%, E-value=3e-70, Identity=85%"; Hit description =Plasma membrane P-type proton pump ATPase
MSLRRTNSVATFLAVYANWGFARIKGWAGVVWLYSIVFYFPLDLIKFFIRFVLSGRAWDNLLENKTAFTTKKDYGLEEREAQWATAQRTLHGLQPPEASSNTLFNDKSSYRELSEIAEQAKRRAEIARLRELNTLKGHVESVVKLKGLDIDTIQHNYTSNNWVPRREEIGTGPKAKIISEIHSEAEKNLGLRPGAASVIRNGRGSPGGPLSPGGGFPMNRSGTGGMMSGMPGSRKMPGMPGLDSR

SEQ ID NO: 46294 - protein, 846 aa, Zea mays
  Coding DNA Sequence Number=SeqID_2919
  Gene Ontology: Mol. function=helicase activity; Cellular component =chromatin; Biological process=viral genome replication
  Homolog annotation: Hit_ID=Q1EPC6; Match level="QueryCoverage=66%, HitCoverage=39%, E-value=0.0, Identity=61%"; Hit description=DNA helicase homolog, putative
  Pfam annotation: Domain name=DUF889; Domain location=380-554; Score =176.3; E_value=7.7e-50; Accession=PF05970.5; Description=Eukaryotic protein of unknown function (DUF889)
MSDKVERVVNRPGADRSMITAYFEANKLHEEARGILYRDFPEWYTWQQGKVWQRRKQNTGGQVGRIASTLPSEGERFYLRLLLNHVTGATSYADLRIVDGDTLPSFHEAAQRRGLLEADNTIDECLNEGELYQMPSALRRLFATILVYCEPNDVAESWQRHLDTMSEDYHRITHSKTHLQQMVLIDIRNMLQSMGKDIKTFPLPSIIDRYDDSQGIDREIYEEESIEAMIEDVALQETLNEEHKSAYEKILSIVDTSNGDVFFVDGPGGTGKTYLYKALLAVLRSQDKIAVAIATSRVADSIMPGGRTAHSRFKIPLTIDDGAICTFTKQSGTSKLLQKASLIIWDEASMAKRQSIEVLDNSMRDIMGRPGLPFGGKTIVFGGDFRQVLPVICKVSRGQIVAASLWSSYLWESMCHLKLVHNMRAKSDPWFAEYLLRVGDGNEEVNIDGDVRLPDEVCVPYTGDDRVLDRLIDDIYPSLNENMSNTSYITSRAILTTRNDWVDIINMRMIDRFQREQMMNIDPANELCNGTRLVHAGMRVFLPRIPLCPSDDEMFPFNFKRKQFPIICTQGDLALIDWIKEIPCEPRVEVMLIDDAFVERKWMECLFQPDAYLGDEVIDCYINLIKAQEHLKCQSGGRVHIENAFQFNFLKRDGDVETKTDELYPIKDMAQISSAERRVLLYPDHDMILDSPTNPKKRKLLCVSEDSEVLMEDDDGPITQADLERWLVHDWDKRTPIKIPTDECTNDFLLSGLSTKDMPVTKADLIDVLCDYIMTIQDDSTLEMTWVRSFNIFKIEISVNDLPNVLRVNLDMTLKCFDMAVRLLAIKESHMSKDEMIKDKKHYMDM

SEQ ID NO: 46295 - protein, 42 aa, Zea mays
  Coding DNA Sequence Number=SeqID_2920
  Subcellular localization annotation: CTP_CleavageSite=2; ConfidenceScore=5.02e-01
MAGSAAAALGRFGRPLPAPPPARPPPAPPRRFGRPCPAPPAG

SEQ ID NO: 46296 - protein, 572 aa, Zea mays
  Coding DNA Sequence Number=SeqID_2921
  Homolog annotation: Hit_ID=A2WXD4; Match level="QueryCoverage=12%, HitCoverage=4%, E-value=3e-16, Identity=65%"; Hit description =Putative uncharacterized protein
MAQRLREESQRLPQQLGQAADFAERVASGVLTADVAAEVEKLRTQHADAVREKSAAESKNRRLAEKVAALEAEKTDLRRKLAEERREANKVVAEAQAAEAEAKVARAEVSLANQRTEEWEARFNALRGRVDKAEASTRSEVKQTLTQFVDSYRELGARAADFKVPDREAGLRFLEWLQEELLNLPTIVEGFMSFASLVTCEGAVNALSRVGCRHYEVFDQADENFEREIFKVEDPVVKQSAGALFDRMWGAHGPEAVRERSDRAREQVKMEHAEDVEDLGGLNDAPPEAAGDIPVLPSDASEGPSAVPVPAAAGEDPVSVPAPTKEGALKAAAEPSVEDPMAEAGPSQVQGFGPAYATATDNDNFVAASTVVVEDVLDDSVSKFFESDDSGSSVEWTEESSDEDLDYFLAFDVAAAEASSRVMGAEVFPVASGGRRRRRAVAKRRVSEVEAGRLRVDGASKRELLSSPAGIDQVDIRLQAVHLIGRLLALSNIYFGENNKVVFIEFLKRFSNKSAKVRIVAIDAVKACYMEVVFVLVILIFATLPHEILEMTSKFMTKPPRILMKRDELTLT

SEQ ID NO: 46297 - protein, 287 aa, Zea mays
  Coding DNA Sequence Number=SeqID_2922
  Homolog annotation: Hit_ID=A7PYF8; Match level="QueryCoverage=57%, HitCoverage=49%, E-value=2e-19, Identity=35%"; Hit description =Chromosome chr15 scaffold_37, whole genome shotgun sequence
MASLPCSQIKLSKVLVRRKFHESGQTNLPRPLHWKPLRPGRFENLVLQCTKNLSWETSLPYASAEDDASIIKGTGVVEPIDTEEAPQIPILQSDEDVVEVKNEPSWHLKAFKLAMWLVGPSILLVTVFHGPNIAGLLSLVGLDFIFNMGAMLFFLMADACSRQENNIFDLKRSALDDLRTETTSSKKTSTFNVDVSACRNGPGHKGPVWFGDGRSEGKAEGGGEDGRTGGGGERGEDAGLPVDGWRDGAWEGGGLREGGGAADRMQGEVRPRADVGRMRRRGRTMWV

SEQ ID NO: 46298 - protein, 526 aa, Zea mays
  Coding DNA Sequence Number=SeqID_2923
  Gene Ontology: Mol. function=protein dimerization activity
  Homolog annotation: Hit_ID=Q2R244; Match level="QueryCoverage=76%, HitCoverage=98%, E-value=1e-132, Identity=58%"; Hit description=F -box domain containing protein, expressed
  Pfam annotation: Domain name=DUF295; Domain location=433-490; Score =63.5; E_value=7.2e-16; Accession=PF03478.9; Description=Protein of unknown function (DUF295)
  Pfam annotation: Domain name=F-box; Domain location=115-161; Score =21.7; E_value=0.0026; Accession=PF00646.24; Description=F-box domain
  Pfam module annotation: Pfam domain module=DUF295::F-box; Domain location=433-490::115-161
MKQTWESQATLEARISAERQNASCCRPGPRQRIDEHGLRELGPAGRFVEHLQHQLDAVGLGLGIRERHGDKHGPTLEEDATTGRCEGSNPSDLKLMDKYEASEFNTLFDPNTMEKTAEDLSFDVLWLIFANLELPDLVRAGSVCSIWRDIYTSLCNSGSYNPQHTPCLLYTSESAGTKAACLYSLAEKKTYTLTLPDPPLCSRYIFGSSYGWIVTADERSELHIVNPITGDQIALPSVTTIDQVKPIFSDIGVVCGYEHSGYSGVWEVSDIPSIFDLSELRDHLFHKVFLSSDPSAGDYFMVLIHNPHCQLSFARAGDDKWTWLPQGDSYDDCLFNGQLLYACTQLGEIHEFDLGTPTITHKIFLGRVKDLYDEKIYMVQASCGQMLQIWRSDDTIEEGDNEDEYDPDFGPDLPWHSTSMIKVYKLEPTSKKLVEISSLGANVLFLGHNLSLCLHAEEHPQLKANHIYFADDEPYTYFKSKRRDIGVFDLERNCSEKIVSPQLWSNWPAPVWLVPNPRRIGLSLCK

SEQ ID NO: 46299 - protein, 88 aa, Zea mays
  Coding DNA Sequence Number=SeqID_2924
MADQEREKWKLARARKLSLLTSHIPGTRCKRNVLEKSANASRHVSGEGVQQALLKILEGTVSLESGYGYTSVWSRRSLSGTEDDHDEG

SEQ ID NO: 46300 - protein, 284 aa, Zea mays
  Coding DNA Sequence Number=SeqID_2925
MSSSSSSAADKSPAGVSSEDTLSDMAAELHPGDIVEFGVSRISSVRVQDMQQLGYFGSGVGRVPGAEEIPEPEDELVVFEAFFTAGLCLPAHRFVVEVLRKFEKRKIGDEIAQFGSSYPQFEVGEDDENEGAFRCAARMSSGRDLVEEFVGYGVWPLAHGWALGEVCPREMPSRGGQLVRSPVFALDLRGRDPAAFVREVEDGAVRIVGHYVPKTEGLQSWDIRGSNDRLNRVFDLNCLPYDGYPGVDAADRRGKKPMGGAEEETSQDASPAVKKRKLGTIVGE

SEQ ID NO: 46301 - protein, 87 aa, Zea mays
  Coding DNA Sequence Number=SeqID_2926
MACQAIAESPRIRYLESNHNFSEESDAYIDNTVMKAIDTSRKRISWCSSAGSWRTMRIQWPQNCNLYLSVDQLRIPIPTEILDGESW

SEQ ID NO: 46302 - protein, 25 aa, Zea mays
  Coding DNA Sequence Number=SeqID_2927
MAQTTPNMDMDVTRTRAQASICTFG

SEQ ID NO: 46303 - protein, 435 aa, Zea mays
  Coding DNA Sequence Number=SeqID_2928
MAERYQLPQSCVPPTTRRKDGGSPPSGGLEGGKTRRIREREDTVAFQGGHPPFKGGSPYSRPQPSRVESSSHTPRSSPAARGLGPTRHASRLRAEEAKPPRAVRTTAQRLQATLHFCPDQRAKGWAAMQAACNRARWEKRATLRLRHNDRVQKGTEKGGYPEKDPSPGRNQAPSPLLIRGSKASPLEGFNSRLRSRGPTPTTGQRFKAASDRVGPTPTTGQRFEGRPLERVQRPPQATRAPRPILIRGSKAGPRRVHSRLRHRARDDHGIPSEGGIEPSDPIARGPGLADHPQRLGGCSRKPGSGRTVDSVNIPARELGTRPYTRATASSHEGTTRPAEALHEALRPRRSETTPPRPRGLHPAGALAHTHRNKTQPRKAGPLAKKCDESLQASANTPFEARELLSGTIIRGTLKAPNSQLVTPISTKLQRPDGCD

SEQ ID NO: 46304 - protein, 276 aa, Zea mays
  Coding DNA Sequence Number=SeqID_2929
  Homolog annotation: Hit_ID=Q5GAU8; Match level="QueryCoverage=26%, HitCoverage=51%, E-value=3e-27, Identity=77%"; Hit description =Putative uncharacterized protein
MRLHGGAVLGKDVVKRQGRGGAELFLCGKGVGEGTTMEGTAWIDGPDKFDPRYLLFANWLSGRTSHERFKCWVPPPPNPPPMTDAEKEVATERRMDSPPRCDCGDRAIIDEDHEKQFCCPNIDYPYGWRKCHFREWLYGPLSHWPEPEETRKCSWESYDDKREVMRTIESKRLKGQKMCCGSQLVDLYINDRIRDMRRDAKSAFYDSPKRAEYRRLKAADEKRAHDAREWEAAQAEKQMLDNLTNMVEASSSQFLHISPNHLLRQWRSTVGQLFHM

SEQ ID NO: 46305 - protein, 314 aa, Zea mays
  Coding DNA Sequence Number=SeqID_2930
MSLPSAFAKALGKDTGKGAHWRVLCRVPVHQTLGKETSFAECLLGLSAQGLAVGSTRPVFAECRRWHSVKDPSPSLGAVTVTFLCRVPNGTRQSLCRVPDKKYSAKKPLPMYSSPSVLCRVLHSAKEILNAFLDPLLGAIGYGAEVTQAPSSDVATTVRVDVEADVSLARRHRSWRRARGFDSRRAPLAHSLLTPCRHRPLALRCPSAEPPHTEPPHHAARSSQPHAAPPPRITPSRCPPPRSPPNAAASSTAAPARNAAAPSTVVVQAATPSTAPSPTSPRRCPCRSPSPSRPSSPRSTLLPTVFFRLDLLQR

SEQ ID NO: 46306 - protein, 232 aa, Zea mays
  Coding DNA Sequence Number=SeqID_2931
MPPARPQGIWAAGGDPDGDRDDDDADDSSSHGTELSEEPEPEGCIARPITRDTARGCHFHDALDTLLCRAFDRHTWSIEYRCVVYQHRRGLYLDQWEATCLVHRPDDDLQGAEAFSEHYSITERDTAEAAMQDAARRALSQYCSLFNGVADGLDLKYYPRHSTGSAGGVIVSPIGEGNHRLNNMVNLVVVLNTELNHALNELGKVRAEVAELRAECAASHYLDGGSPAPVGI

SEQ ID NO: 46307 - protein, 123 aa, Zea mays
  Coding DNA Sequence Number=SeqID_2932
MKLPEQGIELCLTGDTDSGSPDFTRSPGSVDRAPRSTIGRKREILGEIDGVQPKPSKDLMEHSNIIKECEFIQNLKGCNLTDGEYILIPEQGVAQEVVQEPAPESAIEDLPAPALEGKPRFYA

SEQ ID NO: 46308 - protein, 291 aa, Zea mays
  Coding DNA Sequence Number=SeqID_2933
MTSHGSSEGGNTHSHTDGLAREGFPRILWEVLQGAGYTMPPQYVVQLFEEHRVPRCRVRMTLEPHPLQSGSHSLDSESFGYRAEDTIKAIALHGLTTFCGFHPLELSTHPIGLFPTEKEDDPMWKDRVEHAKDVWALYPGQTAHLTVRCMNALYRLQAVRGEAMSQLMGLLEATKITLDNREELVVDLSTEMVEKDLQVEQMATRIQELEELVGARENTIEVLEDQLINTQQQLEEANQHLDMHHQEIQDMEADEDVDIEGGVEPEPASSLDTAGSGRPPSPESSVASFAH

SEQ ID NO: 46309 - protein, 153 aa, Zea mays
  Coding DNA Sequence Number=SeqID_2934
MGTIRDGVKASIVTGKGENATKVGIGKTPFSNPDGKDDISKGRHRISIMERSRQNFQGVKEGGAVNDEIDEALSLNRDGKEEASKGRFNVSRRQGNRYHEGLKVITDKDVGDEVNRHKTKDMSTIKNGVKMGPINGKGQGTSKGQISKLPLSN

SEQ ID NO: 46310 - protein, 172 aa, Zea mays
  Coding DNA Sequence Number=SeqID_2935
  Gene Ontology: Mol. function=carboxyl- or carbamoyltransferase activity; Cellular component=ornithine carbamoyltransferase complex; Biological process=amino acid metabolic process
  Homolog annotation: Hit_ID=Q8SA97; Match level="QueryCoverage=58%, HitCoverage=18%, E-value=6e-21, Identity=57%"; Hit description =Ornithine carbamoyltransferase
MEPGGGTAVGAVESLLTSSCFRKGAESLRRHRVCGAPSLPIWRSEPDGTPVLFPAARVSSGLGDVEAPPKPRSSLSSMAEVESEPLGRARRRPPAEARAESEPWGRAERSLPSSGAEPKSEPWVGRSRVRRLPGLSPTPSPGSGGAEFAVFRDLARVRALGRAERSSPSSGT

SEQ ID NO: 46311 - protein, 36 aa, Zea mays
  Coding DNA Sequence Number=SeqID_2936
MAMMGSTLEKMYLCQDLLDVGLMIEDPLTGHVPRHG

SEQ ID NO: 46312 - protein, 175 aa, Zea mays
  Coding DNA Sequence Number=SeqID_2937
  Subcellular localization annotation: CTP_CleavageSite=7; ConfidenceScore=5.18e-01
MGFASIPAVTEPPKSLGPPTVVLVQQTSDNPAGAPDHLTSSISEFLTFPKSVSPVTQTLQYIGGPRKNDLTIYWALGPFVRSFTLLVDPGDIYPPQAPDLWVNLETEALFRACALEVGISICRILNFIGCTGEIGMKLFALCFGGQHYVINILLQRSAYILSLAAEFAIHPYLAR

SEQ ID NO: 46313 - protein, 75 aa, Zea mays
  Coding DNA Sequence Number=SeqID_2938
MGARAGGPGARPRGRAGGVGRAAEPAMGPSGEGKGREDRGREERGRGLTGYGDGAAERGGGSATGRGGGLGRGGG

SEQ ID NO: 46314 - protein, 280 aa, Zea mays
  Coding DNA Sequence Number=SeqID_2939
  Homolog annotation: Hit_ID=Q2QQ41; Match level="QueryCoverage=69%, HitCoverage=84%, E-value=2e-09, Identity=25%"; Hit description =Putative uncharacterized protein
MDESGVVWQLVFCFQKKGAFEKSGFKKVRRVESKKEISLLGLVTLSQLSPKGSGHFTVVLNRERAASDRLKRMPMLFDDYRDEDFYGLPQKYCIVARGAKIEAITYMYETVKHFDNLLHEKHVYKMHNVKFGLHPGEFNFRHLNGLMELCLNQQTIVEPYNVPIQMASFPKQIFLNLADIAELPNRTLVGGLYISLKFGGDLLNKNALRWALAKEDYGIIIRTMFRRFRRQECLEPSDHTAIHFNPFHHNTHYFGPIQKALMAWNNRQFAVTFLEEQRRR

SEQ ID NO: 46315 - protein, 59 aa, Zea mays
  Coding DNA Sequence Number=SeqID_2940
MVAVGALQRGRGGGGSALQRGEGGGSSAHGGGHGLFQASRGSGQSEEKLHYPMHAEDWA

SEQ ID NO: 46316 - protein, 346 aa, Zea mays
  Coding DNA Sequence Number=SeqID_2941
MAERYQLPRSCVPPTTRRKDCGCPPSGGSEGGKTRCIRERKDMVAFQGGHPPFKGDSSYLRPQLSWAESSPTRSKFLPLRRGGWVPRVMQTGPGQKKPNRRARCMQPPSGYKHSSAFAQTSGPTRHATGAPVATCEQLHRHSHHYHASSTAEPAGRSSGHVVSQAHVTSWDSERTLSHGMKTARPCSVPRTARARATAASRTTRPVALTLRRDRRRLWQGKQATLRLRHNDRVKKASGKGSRPRRIYVSPEAPSSNGHTFGSPEAQPSPRSNLGQITTPTDQIAGAFNAKGSDSGSAPEDDELRFARPQGSDSGSAPEDDELRLARPQGSDSGSAPEDDKLRFARP

SEQ ID NO: 46317 - protein, 271 aa, Zea mays
  Coding DNA Sequence Number=SeqID_2942
  Subcellular localization annotation: CTP_CleavageSite=60; ConfidenceScore=5.28e-01
MAQTVRYLNPPGPRNGPRRGGKQRPGSEIVGRSSDANGDFSAAARGRTSRQKGPTRRSPVVSAGAHDEKLTRGARLPATKGKQGSESRVAPTATMNKRPAFKVPLQTELRLRLCRYEQPHTIGGPAEQQKTDERLAIARSSSGDDDDFCSRGPNSSSDDFRADAAAMRPSPMPSLERQGRTEGRRVGGQSMGGIGYLVGGRTSSSCRGGRRRREQLRSHSGQRARHAAAASATDGERPSPRSLREGAGRRSRKGRPQLGTLPLPSTDDENP

SEQ ID NO: 46318 - protein, 454 aa, Zea mays
  Coding DNA Sequence Number=SeqID_2943
MAERYQLPRSCVPPTTKQKDGGNPPSGGLEGGRTRCIREREDIVAFQEGHPPFKGDSPYLRPQPSRAESSPTRSKVFPYGAGTGSHTSCKPAQSKRSQTAVRGAYNRPAVTSDSPLFPRPAGERADSHAGGMQPRQVGALLRLPTRPAWRPRPTRHATGAPNASCMQLHRHLRHHRASSTAEPIPQLEATQRMTQQRQPGATVNTAKNGPAVMAVAGGQEQRSRRQPSLRPIQGRRDNPLSRREDNAPVFRSSNGSRTRNGRLQGPGKGDTPKRILPREGTRLRASLLIRGSKAGPSEGFDSRLRSRGLYTHYWSEVRRPAPRKGSTATSGYSGSAPTTDQGGNDLVMESHQREASSPRTPSPGDRVRQITRSSPETPCSTPIEGNMALPPSSLRKGDAGAHHRKLRFARPRARTRAKPWKTANSAPPDPGLGLGLSPGRRRTPLRPTQGSDSG

SEQ ID NO: 46319 - protein, 374 aa, Zea mays
  Coding DNA Sequence Number=SeqID_2944
  Gene Ontology: Mol. function=RNA binding; Cellular component =spliceosome; Biological process=protein modification process
  Homolog annotation: Hit_ID=A2X2W1; Match level="QueryCoverage=36%, HitCoverage=17%, E-value=2e-55, Identity=82%"; Hit description =Putative uncharacterized protein
MRAAQLEENRGSQVNVAGDDEAPMRIVKNYKRPEERIPAERDPTKFVVSPITGELIPISEMEEHMCISLIDPKYKEQKEKMLAKIKETTLAPDDEISRNIVGLARTRPNIFGTTEEEVSNAVKAEIEKKKVEQPKQLHLSDLACRCPRPPQPLPLVRNNLLSHFAGGIVKNRSESDAPCWEADVVDESEERECLVKVDMGTELKTCMDENCVLKRDLGVLARREDTDCMPVNWLYDRPDNMRRSYLSNDAYNILEMDHTPDLTPSENEDHAVNGSTVLEGLKSLRLTSDLRWKVWCRHSMKKKKSLKSWRKRPQKFIGPKLWQNLQRLLTNLMSCIACLRTFLLKWKTLSCNCNKEILRSLSCEKKLQKALMKC

SEQ ID NO: 46320 - protein, 200 aa, Zea mays
  Coding DNA Sequence Number=SeqID_2945
MEVRCQTSLCQNEDGFPKLLRACTFRLGIRSHTEYDGREFVEHGTEKCVMTVYIGSSLHHVEWSVTATGHRFKDTCQVVARKALRALCQIYEEEVVDTAQILSALSEKLREVIDVEALKQAKDEHVQKLMEAYLVTHNQRRALRIQEPASSNPVQPMRAEDPQILEGHPVSIRGEKKAWELPEGAIVLEGIPVFPQAMNK

SEQ ID NO: 46321 - protein, 135 aa, Zea mays
  Coding DNA Sequence Number=SeqID_2946
MVARTASNDEEARGGADEEATTSVQAGAARVGGLDAIRRRFDPGGSLYRRVKLSMRLLAQMGWRETEHKGENMARVILRQGDALAVGVTSVRERERVSLFVSSFSRATLPHGGPGPSFYRCKERVQVYNGGVAMR

SEQ ID NO: 46322 - protein, 138 aa, Zea mays
  Coding DNA Sequence Number=SeqID_2947
MQVACNRTAGAHPFGFVASSMEAQAHASCSRRAGYYVQETAPPLAPMPRLLDCGTSAATRGNPVHDQTVPTEHIDHGDQVRGYSERDPSPRRKRAPRKGSTAGQSTRASSSLLIRGSKAGPSKGFDSRPRALGLRAHY

SEQ ID NO: 46323 - protein, 198 aa, Zea mays
  Coding DNA Sequence Number=SeqID_2948
  Gene Ontology: Mol. function=transporter activity; Cellular component= membrane; Biological process=transport
  Homolog annotation: Hit_ID=Q8GTY9; Match level="QueryCoverage=60%, HitCoverage=29%, E-value=2e-43, Identity=61%"; Hit description =Nramp1 protein
  Pfam annotation: Domain name=Nramp; Domain location=3-184; Score= -150.9; E_value=2.8e-07; Accession=PF01566.9; Description=Natural resistance-associated macrophage protein
  Subcellular localization annotation: CTP_CleavageSite=77; ConfidenceScore=5.04e-01
MDFRATLFPRHPDLFRLVNTSRGHALQLADPPPTSPPSPLSLRPAVPPDRLMDRLRRHNLFLHSALVLSRNTPSSVRGINDACRFFLLESGVAMFVALLINICIISVSGTVCNSSNVSPDDSAKCSDITLDSSSFLLRGFLDIKMRQWLRNLMTRSIAIVPSLIVAIIGSSCCYGKERGETWQGILLRADRGKEAKVG

SEQ ID NO: 46324 - protein, 108 aa, Zea mays
  Coding DNA Sequence Number=SeqID_2949
MRRRRWILAASAPAPVPVARSAAISAAGVSATEHPELRRGDGGVHPVAPGTRVGGQRGEVPEEGLGLERTPGEGRVHCRPGRAVTDVGVVDRLRAGGGLVVPAASAAA

SEQ ID NO: 46325 - protein, 844 aa, Zea mays
  Coding DNA Sequence Number=SeqID_2950
  Gene Ontology: Mol. function=cysteine-type peptidase activity; Biological process=proteolysis
  Homolog annotation: Hit_ID=Q5NKQ2; Match level="QueryCoverage=97%, HitCoverage=92%, E-value=0.0, Identity=54%"; Hit description =Putative uncharacterized protein 9C20.3a
LLRSASALTYPVLRRGLLDPRQGRAADEDDDFMPSSKKRNLDDSPGKVLKKQKLNVRCNPQDVLVSIQILNDRQQQAIARRGFSSILDMRLDALGSRSHLAWLMEKLDPNDMTIRAGPGKELKITKDTVHLILGLPNAGGGTALGIDEAVVANNLRAELGLSKEDFGITALQDRLRKGSDDDLSIRCFFLILFNRLLFPTASWGITNHEVLLTEQMDRFHQIDWCQLIFNDLCQAAKKWHNRSVTNVSTTIYGCSIVILLYYLDHLHDSAAPLNKRGTPRIKYFDRNIIQALTRADKGKIRKGEEAFGHCSHKTRTNAFDVPRPDPSGQHSIHIELPLIRDLISSKLNQLPSRHRMGFIEKLSHFDAEVGKACSVIKQNLQQIVEKQFNLSDVFGELIDEVLRAEAGDNEDAYDVQKTTSKSDDILPQTAEGCTCPAPPTVPDMSTPVSQLDTQFTDTQGKHGDGGKNMPTNTNVTPKATPHMDPDAPIFDATPQIKSTGGVQQVAETDLPDSGPCFDQTPSEHVYVETHPATNTPQVGQASLDSEMQTVLALREYLCGLQSDTRRTIIDYGEYSATCSDIYESFADGKCLDNGFMQCFIQCVIHDAKNQQTSMSSNCLVLDVNVGSILNFEEQERHSRNPQPFDESVLHTHLDNSLPETDELDQYKAIMVPMVSRGHWTLYVVNKVKKCIHILDSNPYGPTLGGTTWKDYHFAHLGSGGRKLPWAKVIMSRLNKAIQHVRPSSCFPKFGNFTIDLCQNCPNMVAGSNDCGFYVMGYILFYLCDEGSLRSDIEAVCTNLPFNSTVGPWQHMEQSEIRSLALHYITFHPKNKALSLLQDIQRFKV

SEQ ID NO: 46326 - protein, 46 aa, Zea mays
  Coding DNA Sequence Number=SeqID_2951
MAVMDSTSEKMYLWQVRKQQISVASVPRWFHMRKNKNEDAGGQGPP

SEQ ID NO: 46327 - protein, 459 aa, Zea mays
  Coding DNA Sequence Number=SeqID_2952
  Homolog annotation: Hit_ID=Q6J9V9; Match level="QueryCoverage=24%, HitCoverage=46%, E-value=4e-07, Identity=36%"; Hit description =Putative uncharacterized protein
MKILEAERWLKGTNSHGVAFLQRRGEKAADIPHPGGLEGGKTRCIKEREDMVAFQGGHPPFKGGSPYLRPQPSWAESSPTHSKVLPYGAGAGSHTSCKPAQSRRSQTAVRGAYNRPAVTSDSPLLPRPTGERGGQPCRRRATAPSGRTSPTPNTPSMEAQAHASCNRRAECFVHTTAPPLAPLPRLLDCGTNTATRGDPAHDPAAPAWRDGQCGQKWAGSNGGGRRAGAATTSRSGRRFAFAIMTASEKGPGKGDTPKRILPREGTRLRASLLIRGSKAGPSEGFDSRLRSRGLYTHYWSEVRRPAPRKGSTAASGYLGSAPITDQGGNDLVTESHRREASSPRTPSPGDRVRQITRSSPETPCSAPIEGNMALSPLLLAERQHRGVCKKVESVPDRPLALCRGSGAALANPAPAEPLTASTYQPENLGPDRTPGLRPARMRDDQTSQSITRGIKTSEE

SEQ ID NO: 46328 - protein, 101 aa, Zea mays
  Coding DNA Sequence Number=SeqID_2953
ELRQLREIATAARYNSLDMSVYTGLSGVTAGQRLLRANGHLQAHLIRARSAQKSGTRALAHRTLYSACPVRHWTSRRAQKTELQRSEPNGLGDVAGAPDMS

SEQ ID NO: 46329 - protein, 440 aa, Zea mays
  Coding DNA Sequence Number=SeqID_2954
MVIRRDDHQHCGGEKQAGLRPLPRPQLQGCSSSLLGRGHTELGPVSAWAGDPLLPPAFGGDGHPPALQRRRPPAMRGKANLCCQDRVQLSVFHPGDGGRLHWGVAQHDVRRKGGTRVLGRSHSRSCGESGSEDLSVRFGAAAACWCGVGGQVAAVVGAEVVVTIGEAASAEAVASADETIRATCTLDLRLFGFNGWFSSPVRGRERGPFSSSVCPEAIAAAVLPPETEVVAALLVQRSSASHLEFVIPQALWCRGCSYPREWNRSPNLWPLCDELEPEAAVSAWTEVESARKEASSAREHVASQAEEVQQRRLELCLVIRERDQPRSHVAEAVSRAEVLRGQLAEAAERPAEASARAEILAENLAVRAQARCRRPPSRWRSFRPCCRLRPGHIPPRVEMTPRDLFVGSRIAYPSESYFSRKVMNEDSVIDIVEKARKSFW

SEQ ID NO: 46330 - protein, 238 aa, Zea mays
  Coding DNA Sequence Number=SeqID_2955
  Homolog annotation: Hit_ID=Q6QP51; Match level="QueryCoverage=90%, HitCoverage=95%, E-value=9e-52, Identity=53%"; Hit description =Putative growth-regulating factor 1
MGPRTLLLIRGSKAGPSEGFDSRPEHSGPEPITDQGFKGWPLGRVRQPPQSTRALCPLLIRGSKAGPSEGFDSRPRARRVRMTLGTSVTWPRLRLRSRGFIEKQPWPNRLANRPYRRRIQCEDRLTPYPDTRASVGKVEENNVAHPAQTVVPATRARLTTASSASGATGSSASPDLRPRPREEVSASPDPKTRPQPRPREESCPRPTPALASGEVSASPDLGLGPTTPQGIHHYPTPS

SEQ ID NO: 46331 - protein, 125 aa, Zea mays
  Coding DNA Sequence Number=SeqID_2956
MVTGEKSEVSGKKNDERTPSKEAGDKHKEDKEESIGSIKEVPEPCVHANVAVGEVLEPCVCDNVAVREVPEAYRSTVGGAAGILLTSPYFRRGLRTTVVMDTRGEPSLPVTGTSQMGRQSCSLVA

SEQ ID NO: 46332 - protein, 48 aa, Zea mays
  Coding DNA Sequence Number=SeqID_2957
MESHDLRAEWESRLVGGDKDDGYDYGNGKEEGVKANLQEFQDFDEFED

SEQ ID NO: 46333 - protein, 561 aa, Zea mays
  Coding DNA Sequence Number=SeqID_2958
  Homolog annotation: Hit_ID=Q6J9V9; Match level="QueryCoverage=13%, HitCoverage=32%, E-value=4e-13, Identity=52%"; Hit description =Putative uncharacterized protein
MSCLLDCETGAATRGNPAHGPTVPTEHIGHGSVSRGRRHDGRYGQKWAGSNGGSTRAEAAVKSSAGSRPLLEQQGSPLPRREDDAPVFRPVALTSRQGKRHLWQAKRATFHLRHDDRVKKGTGKGDISKGILLRKGSGPRALLLITGSKDGPSEGGSKAGPSEGFDSRPRARRARDDSGYVRYMAEARATLPRGSRAALANPPPAKPLTASTNQPENSEPDYAPGLRSDRQGFVCSRDTVSPRPSPALGGNCSPRRIHASPEGLLKQRAHPRLVRSLARAGFVVKQPWPNHLTNRPYRRRIQCKDRLAPYPDMRASVGKVEENSAARPSPTVVPPARVRLTSAGSSLKRHRKLRLAQPWASASGGSLRLARPWASASREVSTSPDPRARPRKVVSALPDPRARPRPRKVVSASPDPRTRPQPRPREESRPRPTPASALKRSLRLARPWARTDHAARDGGSLPLMEARRRQQAPNNPDSCASTGLKRSSDGHDAAALIRRVVARDSLVTPTASAPTLAQDNTSRETPPPPGVETPTPAKVGVAKCFIDPFLHSLCVSLFVYK

SEQ ID NO: 46334 - protein, 51 aa, Zea mays
  Coding DNA Sequence Number=SeqID_2959
MPSMGSRHSACSAEAGCRGGDKDDGYDYGNGKEEGVKANLQEFQDFDEFED

SEQ ID NO: 46335 - protein, 338 aa, Zea mays
  Coding DNA Sequence Number=SeqID_2960
MHRILPPFEPPDGELPRCLRLVVGGAQPYGGGHPSAIARLQGFSSGSLAAFPHQWSPRMVTTSLMVGRSKPGCGLCPALTFKDLHHPCWGRGRGEPGPAFAWAGDSLLPLASGGENHPPALRRRHPPAMRGKANCCCLARVHHYVLYPGDCARPHRRVSQHVIRREGGTRVLRRSRSRSCGEDGSEDLPVRFGATGARWCGVGGQVAAVVGAEVVAARGGFSADEIVGATCGRTSGSSALAACPRPSCGDVGEGPPAAAFALRPSLQLSCRPRRRSLTLQQWSVNPRLLCDEPEPEAAVSAWTEAESAREEASLVREHVASLAEEVQQRRLELGQVVR

SEQ ID NO: 46336 - protein, 313 aa, Zea mays
  Coding DNA Sequence Number=SeqID_2961
  Homolog annotation: Hit_ID=Q7XCK8; Match level="QueryCoverage=100%, HitCoverage=100%, E-value=6e-93, Identity=61%"; Hit description =Expressed protein
  Pfam annotation: Domain name=DUF241; Domain location=84-308; Score =18.1; E_value=6.7e-07; Accession=PF03087.5; Description=Arabidopsis protein of unknown function
  Subcellular localization annotation: CTP_CleavageSite=58; ConfidenceScore=5.42e-01
MAVGFRRTLTTLASPKSMAPSFLLDCARPKKLSYARVRSTSLPVRLHPLAAALHESARALLAWADAPAQTGPAWVADGAGRAGRVLSGLADLLHHPQARDALRRHPWTTEQLLDDLLLLADLHGCFRESLVALTQLLAETHAALRRRDGARLAAALRAQRRSAREVSRLASSARDLSHRAAPDDDSDEATLADAFAAATAAVAAASAAVFAGVSAASAESAASAAPSPRTPTPYSPARTPGSPMWLVTDLLRRRRTVSFEDSCGEEEEERKAAMGRVRGLEACVDAAESGCQEVYRALVNARVSLLNLLTPTF

SEQ ID NO: 46337 - protein, 70 aa, Zea mays
  Coding DNA Sequence Number=SeqID_2962
MGWATWFLATVCFFAASQLFVSDALDSSFGVGSVTSNKLAHEPIEAHVRQPVQQAVPSRLHAFRRFGIQE

SEQ ID NO: 46338 - protein, 205 aa, Zea mays
  Coding DNA Sequence Number=SeqID_2963
  Subcellular localization annotation: CTP_CleavageSite=27; ConfidenceScore=5.14e-01
MSGTPILAHRTSNSTCPVCTGHPGGPRSQKLQRSESNGIGDVAGAPDMSGVHRTVRCAIEQTASTNGQVWWRLSVRWRTGQSGAHRTCPVPQPRHQCRWILTVGASDFWARLDVRCTPDKYCGTSGSSCRRNSQYYFAIPHSPVYPVQSEKRKPVSKKFPKERGPKGALPGARDNVYPQPPHFKASKFSANTLNTRASAFNTRHN

SEQ ID NO: 46339 - protein, 142 aa, Zea mays
  Coding DNA Sequence Number=SeqID_2964
MGEREGGRGEVAGVGRERGGSPAAFVFVPRPGRRGGSSEVEVESVFRCRGRARAPGSGEAEIVWPRPGRSPSPGVGRGGDRLAVFRVLARVRALGSGGAEFAVFRVLARVRALGSGGAEFAVFRVLARVRALGSGGAEFAVF

SEQ ID NO: 46340 - protein, 62 aa, Zea mays
  Coding DNA Sequence Number=SeqID_2965
MRLHTLRVIDEAEVPDLSASRDNSDLSEDDPCDPTTTSKPEAPMQSLNQLPVVTDLADARSA

SEQ ID NO: 46341 - protein, 87 aa, Zea mays
  Coding DNA Sequence Number=SeqID_2966
METRALLFCLGIREKTEREKDLNMLDSDCRRTPTCDGHHGQMRARIGMFKHNMESLSSLLSYGSGIIVISVLIPTDVHPLGDCPIFR

SEQ ID NO: 46342 - protein, 679 aa, Zea mays
  Coding DNA Sequence Number=SeqID_2967
MQAACNRARWTRFSDFRHASLEAQAHASRNQRASCCMQATAPPLVPPSHLFGCGAYAATRGDPAHDPAAPAWRVGQSDRKDRERGIPRKGSFSAKEPGSEPLPTDQRFEDWPSEGFNSRLRSRGPDTHYWLAPEGFTVASDTERGMTGAHRRHHVRCPSRRLGGCSRKPGSGQTVDSVNIPARELGPRPCTRATASSHEETTRPAEALRKALRPRRSVTTPPRPRGLHPAGALARTHRNEMQPRKAGPLAKKCDGSLQASANTPFEARGLLSGTIIRGTLKTPNSQLVTPISIKLQRPDGAACATPTAVPLDRVSLTGSRALPKAPWETPLRPTLGLGLGLRPRRQRTPLRPTPGLGLGLRPGRRRTPLRPTPGLGLGLRPGRRRTPLRPTPGLGLGLRPGRRPNDLRLARPQGSDSALASAKRSPPRPTRGLGLGLGNGRQTRPRLRRSPHVALPRAQVRHVNRKRHHQPTPSRLGSRRTRPASHLASSAGWAMMAPPSSMTTAALSSLTAAERRQQGLDRSNSCPSARLRRSSDSHDITPARCQDLSGCHIGIARGQAVSLAARSRRLESSFNLARRRFFGDKFGSWFPNFLLLFLWLLNQDAVELVGGEKLDLNTVVEFDPGLGSSLGRLHGLSGKLSKGSDEVGGLREWLAMSAVLGRWCLLFAANSDDLWLWRE

SEQ ID NO: 46343 - protein, 123 aa, Zea mays
  Coding DNA Sequence Number=SeqID_2968
MDRPTPTTTTDDPHLNVFARDPQTSPDPSPEQPRRRKIRKALENSEHWMQIFFLVYLSNEESSKNKRNPSPEQIQDCNLADGEYVLIPEQGAVHEEDQELAPEPAIEDLPAAPTIEGKPRFYA

SEQ ID NO: 46344 - protein, 470 aa, Zea mays
  Coding DNA Sequence Number=SeqID_2969
MDKDRQGAAQMRQAVVRLVEARPKRQRGSAKAAAPGGGKPPLAAKSGVPASSKAPEATAGAGGSKSTKAMPPSSRVPEVAKAARALPLAGKRVTDFATDISVDDYLGAKSLARFFLIYLLVADFANRTASGALTAAVSAEVERLRTQHADAVCEKSAADSKCRKLADKVAALEGEKADLRRQLAGERRETNEALAKAQAAQAEANLARAEGNLARERAEQLQERLIALESRVERAEAATRAEAERTRKQLMDTYHELGARTGDFEVPDREPGLRCLEWVQEELQALPTVVGGFMSYASLVTCEGAMNVLSREGCRHFEVFDQADEDFERDIYKVEDPIVKESAGAIYDRMWGPHGREVVRERAETARAQAARGERVDDFGALNSAMPDPEPTPAEAVSGATLEPPLTTAENAPDTSASAVAGGDLPPETAEGAPDAPATAAPSAEDPAMVAAEATAEATAEATAEAPQVA

SEQ ID NO: 46345 - protein, 241 aa, Zea mays
  Coding DNA Sequence Number=SeqID_2970
MKRKIAKYISECDTCQRIKASHLKVAGITWDPCNKKLSIPSSMRWPDRKDSHACDLGELLNTGRRTLPRVRRALSAPEHARARPRAPYAAPSRTVSPARARAYKASLGVDRTPPRTLDLTGARDHRRLPCKRRARGHPIPRHRRPACRALPSHARPSEETVHASVKLPEQGIGLCLAGEASPRSPDFTRPPVNVDRPEHPPPTGSPACALSATTAVKPYLAVTARTSRSQPRPSPDLSHHR

SEQ ID NO: 46346 - protein, 242 aa, Zea mays
  Coding DNA Sequence Number=SeqID_2971
MAMMGSTSEKMYLCQVIECKIEEVGSTKVDSVIMHASRLKTPLINFPPYGDMPCTRKTTCKSTGPIGVPRHRLAPRHEESSSGSNDPIGDLEAQVEQLRTELHHRNRVWAEDSQRIAELSTEAGRLRFELSERDSVVDWAINSRSITWHREAKARARVDELIMALDKLQVYCNTLHEEVHVLYGRLHPDVTADSVAMGARPSGTAGEGPDGELDLFKPPPSMNLADEQSPAADSEATKDNED

SEQ ID NO: 46347 - protein, 242 aa, Zea mays
  Coding DNA Sequence Number=SeqID_2972
  Gene Ontology: Mol. function=oxidoreductase activity, acting on paired donors, with incorporation or reduction of molecular oxygen, 2-oxoglutarate as one donor, and incorporation of one atom each of oxygen into both ...
  Gene Ontology: Mol. function=donors; Biological process=protein metabolic process
  Homolog annotation: Hit_ID=Q5GAV6; Match level="QueryCoverage=27%, HitCoverage=16%, E-value=2e-09, Identity=46%"; Hit description =Putative uncharacterized protein
MGVAPAGAVTPPGGGAMEEAVATQHVQDDGTVVDDLSKITKGLSHPLHLATIVADGEIALHENMKLGVEAKCASFAIAEELLLDGQPGAARSAIRGASRLHQLGGECAQHPGQHNDIHAPPGWHGGASVREDMVGNEGGLVVEVFNNIDVVVRDTALGWWESGVVGDDRNALKVGGSLAFPGEGVLGGGDQDLASCLLRSINDGRRLCRGHGGATQAVAGSVGREEFSESDRSQDCDCLVIP

SEQ ID NO: 46348 - protein, 99 aa, Zea mays
  Coding DNA Sequence Number=SeqID_2973
MGKPVPSLLMLLLSRGGQHGSSSLISCEKQTIRIEFLNLASDRTCTHHNRNGRPRLRSREEGNLLPGSIRLCINRGLPSKAVAGRSSGAGSGAGFGATS

SEQ ID NO: 46349 - protein, 245 aa, Zea mays
  Coding DNA Sequence Number=SeqID_2974
  Pfam annotation: Domain name=zf-CCHC; Domain location=129-146; Score =28.5; E_value=2.5e-05; Accession=PF00098.14; Description=Zinc knuckle
MAKGLLPRDRMKPHTWTSLKRVPHSLLKLKILLKLMSGSGRAVSTALAVEAKNTGQGKSKGFGGDRSNQGPEKRTRLVIRPFNQNRSSSRPPSYPFKQPVFIRPATAPTSTNQPSAPGAHFPAIPSSSTGCFNCGKFGHFIKDCPYPRQNKSTNQQNSGSSNQGKGNMANNSAGKYVKKTGRIYYTQVATTPEGEPIMMVSWAAREEGGSAMGDGDSLRVPFGGEDGEEMEQQRCAWMLLGAGQG

SEQ ID NO: 46350 - protein, 95 aa, Zea mays
  Coding DNA Sequence Number=SeqID_2975
MARPVGLNKRAAARIYHTQVLTLREIRARKIMGAQLTVALPGSPPGTAIDQPGSRRAAMKLCFPPDVIVDITPQLITLNQGSKSDIYHKNKHSSV

SEQ ID NO: 46351 - protein, 47 aa, Zea mays
  Coding DNA Sequence Number=SeqID_2976
MATTAAEDNLFLPRHKVDLALIDWIKEIPYEPRVEVVLIDDAFVERK

SEQ ID NO: 46352 - protein, 109 aa, Zea mays
  Coding DNA Sequence Number=SeqID_2977
MGLGVCGSLCQGGYEIDGFGYDYGAASPLQPNRILAEYVDVYSPLLYTPNPPQVVSIATTAQAKMKLWKETSRSSKTTTSSRCGLAATPSRLPVKAAVIYVSFPHFDLL

SEQ ID NO: 46353 - protein, 152 aa, Zea mays
  Coding DNA Sequence Number=SeqID_2978
MGKSKKGGSSSHHSRDKRKREPTPPSEDFGDSEYSEGSPVHASPPASSDDSDDSQGLAAEVWTYIRAVERAGLEGSDESEYSLDEENSSDSSEEGGSDGDGGDDDDDGGDGDGGEGDGKGGDGGGKGGDGGGKGGSGDGGDGSSRGSNKDSG

SEQ ID NO: 46354 - protein, 86 aa, Zea mays
  Coding DNA Sequence Number=SeqID_2979
MYSKVATVGPDPHGKVSEPWMHSPDLRARFKTSTGGVPVRSGGRQYARAAAYTVLIITHTSLMKLPLHADTTQVADVRAQGDCPGD

SEQ ID NO: 46355 - protein, 294 aa, Zea mays
  Coding DNA Sequence Number=SeqID_2980
MTSHVPTDEGNGHSHTDGLEREGFPRILWEVLQGASYATPPQYAVQLFEEHRVPRYRVRMTLEPHPLQPGWRSLDSKSFGFRAEDTIESIALHVLTTFYGFHPLELSTHPIGLFLAKKEDDPMWKDRVEHAKDVWALYPGHTAHLTVQCMSALYRLQALRGEAMSQLMGLVESTKITLDNREDLVVDLSTELVEKDLQVEQMVTQIQELEDQVEARENTIEVLEDQLQTTQQQLDEVNQHLDLHHQEIQDMEAEGAEEHVEIEGGEEPEPTSSLDTAGSGRPPSPESSVASFVH

SEQ ID NO: 46356 - protein, 140 aa, Zea mays
  Coding DNA Sequence Number=SeqID_2981
MAPTAFSCVASPRRRAVSCSRKSMEESAEVIHHPAHWLVRPFGMASTGQLLSRMQLSWSNDQAERANTEILKGLKTRTYDCLKSMVQIGSTSFRPYYGGTGPHPAELPGRPRSSWSMGSKPAFPQKSLWAPHEFSLSMSL

SEQ ID NO: 46357 - protein, 66 aa, Zea mays
  Coding DNA Sequence Number=SeqID_2982
SARKSGSRVVGGAGGTVTINTVSFSAPEALLVCERSPAGGTEVINDLADGLKPVRDDRHADLQRVR

SEQ ID NO: 46358 - protein, 33 aa, Zea mays
  Coding DNA Sequence Number=SeqID_2983
VVMKFNGFGYANGDGEDEAVEGDFQEFQDYDEF

SEQ ID NO: 46359 - protein, 51 aa, Zea mays
  Coding DNA Sequence Number=SeqID_2984
MPEIDLPKQQKLQGGYPHTLGYKASASAISFLFLDGDMAHLGGMALVLTTE

SEQ ID NO: 46360 - protein, 170 aa, Zea mays
  Coding DNA Sequence Number=SeqID_2985
MVDGATRGTSRSDGATREGIEAVHGTSEDTKVVVGGGCAIQSKVGSGMAHRLRGEAVEEMGGGVQGLYPVAGRERRLKEEAAYHIGGGANHAFGPAILGSGVGARETQLDVMGEEERARGVVELAAIITLEGTNRAMELGRDPGEEVGEGGECVGLQAKRESPKKVREIV

SEQ ID NO: 46361 - protein, 486 aa, Zea mays
  Coding DNA Sequence Number=SeqID_2986
  Subcellular localization annotation: CTP_CleavageSite=50; ConfidenceScore=5.31e-01
MNSLIRLHRAKWAHFSDSKRPTWRPRPTRHATGMPNASCMQVHRHLRHHRASSTAEPMPRLEATQCTTQQRQPGATVNAAKNGPAVMAVAGGQEQRSRRQPSSRPLRGQRENPLSRREDNAPVIRSSNGSRTHNGRPANHSPRRINSAAGQARLWQEERTTLRLRHNDRIKKEGFDSRLRSRGLYTHYWSEVRRPAPRKGSTAASGYSGSTPTTDQGFEGWPPKGSQPPQTPREGLPWVRLIHNQGSGCAPELTGDTMFGAHRGQHGAFPPSSLRKGDGSVHKRDSITPRPSLASDKGSRPRRISVSPEAPSSGERVPGSPEALSSPRSNPDQIAAPTDQAAGAFNAKPQKTTNSAPPDPGLGLGLSPRRRRTPHRPTQGSDLGSAPEDDELRSARPQGSDYAPTSANGLRLARPRGSDSTSATEDRLDLGFGGASTSPNLGRRPAPSTGGAIITLPRADSGRRNKTGVPSGSLRQIGNDGAPHTL

SEQ ID NO: 46362 - protein, 81 aa, Zea mays
  Coding DNA Sequence Number=SeqID_2987
MGAEPWGRARQSFLWHPRPDLAAVSLTLSSGTAVGAMQAALSSCQAIWPRLLLCEDWASSEPKRSKCLGIPYLRSELPYAY

SEQ ID NO: 46363 - protein, 408 aa, Zea mays
  Coding DNA Sequence Number=SeqID_2988
  Gene Ontology: Mol. function=nucleoside-triphosphatase activity; Cellular component=protein complex; Biological process=protein catabolic process
  Homolog annotation: Hit_ID=Q9SEI3; Match level="QueryCoverage=64%, HitCoverage=66%, E-value=1e-134, Identity=91%"; Hit description=26S proteasome AAA-ATPase subunit RPT4a
  Pfam annotation: Domain name=AAA; Domain location=176-354; Score =119.9; E_value=7.7e-33; Accession=PF00004.20; Description=ATPase family associated with various cellular activities (AAA)
  Pfam annotation: Domain name=AAA_5; Domain location=176-292; Score= -9.9; E_value=0.016; Accession=PF07728.5; Description=ATPase family associated with various
  Pfam annotation: Domain name=Sigma54_activat; Domain location=142 -272; Score=-179.6; E_value=0.024; Accession=PF00158.17; Description =Sigma-54 interaction domain
  Pfam module annotation: Pfam domain module=AAA::AAA_5::Sigma54 _activat; Domain location=176-354::176-292::142-272
MADAEDAAAARRRAAITDYRKKLLNCRELESRVGTVRESLKNAKRDFTKTEDDLKSLQSVGQIIGEVLRPLDNERFIVKASSGPRYVVGCRSKVDKEKLTSGTRVVLDMTTLTIMRTLPREVDPVVYNMLHEDPGNVSYSAVGGLSDQIRELRESIELPLMNPELFLRVGIKPPKGVLLYGPPGTGKTLLARAIASNIDANFLKIVSSAIIDKYIGESARLIREMFGYARDHQPCIIFMDEIDAIGGRRFSEGTSADREIQRTLMELLNQLDGFDELGKIYCNCKHHPVSQGNVAQRRGGHELEPRSAAPHGPAATNAQRVVWLEQMVARPIDPLVRRRVVMVVARSTQMRASAGRSVAEGRHVLQPPLRGGEQPPRCSGTLVQLRLPRNGAPPSSASPADVLGNRVL

SEQ ID NO: 46364 - protein, 251 aa, Zea mays
  Coding DNA Sequence Number=SeqID_2989
  Subcellular localization annotation: CTP_CleavageSite=85; ConfidenceScore=5.19e-01
MQPGCIPSPMVIRRDDHQPSGGEKQAGLRPLPRPQLQGSSSSGLRRRSAPSGGLPPRGSVTLFFPQRSGEKGILQSCGGVLQPCRGRRTAAPWPGCSFLSFIRAAVVPRVGRPRPGPPRVVSCTGGSLNTSYAARAVLVFWDGPSEDGSEDLSVRSGAAAVRRRSVDGFDPTDGALRLFGLNGLSSPLVWGQVTGETLGVRYPAGPLNLWPLCDELKPKAAVTWTEAVSTRTEVFSMRGQMASQAEEVQQW

SEQ ID NO: 46365 - protein, 187 aa, Zea mays
  Coding DNA Sequence Number=SeqID_2990
  Homolog annotation: Hit_ID=Q6J9V9; Match level="QueryCoverage=20%, HitCoverage=13%, E-value=1e-09, Identity=76%"; Hit description =Putative uncharacterized protein
MAEAWATLPRYPRTFPRPAGMTHNGIPPEGGIEPSDPVEKGSGPANHLQENNTARPAPAAVPTTRAKPTTVEFSLRRNRKLRLARPQGSALASGGNLRLARPWVSALALASEESPPRPTSGSDQPRQEGCIITLLLASSGYEGTRPASHQAYPGNKRWWFPTCNHDVGGPQAPYGSKETSARSMQRQ

SEQ ID NO: 46366 - protein, 931 aa, Zea mays
  Coding DNA Sequence Number=SeqID_2991
  Gene Ontology: Mol. function=protein binding; Cellular component =extracellular region; Biological process=pseudouridine synthesis
  Homolog annotation: Hit_ID=A2ZIJ8; Match level="QueryCoverage=87%, HitCoverage=77%, E-value=1e-137, Identity=40%"; Hit description =Putative uncharacterized protein
  Pfam annotation: Domain name=Extensin_2; Domain location=42-397; Score=-118.8; E_value=0.012; Accession=PF04554.4; Description =Extensin-like region
MRHGGGGRGGGGKRGRGRGAGSGRRDARPGNDSYRGDRGRRHDYRSRRTASPDHRPRRPRGEDNDRDPPRGGRIGYGDRSPPRGGRTGYGDRSPPGGGRTGYGDRSPPGGGRTGYGDRSPPGGGRTGYGDHSPPRGSRIGYGDRSPPRGDRIGYGDRSPPRGDRIGYGDRSPPRIGRIRIGYGNRSPPRRERAGYGHLDASPRRGHAPYKDAFGSPGGDRHASPRGRREYGDSRVSPPGGRDYERAPCREERDRYGRPGRGADLGHNSPPAHMLPDHPSDLGRSASLRADDHSLLKDDYPRGGPHRSIRKENELFANGDLTLRISATEMGRTSAMYSQDRRLSPPPPIYPYVPRETGFLTGGSAMKASDGYGAGTGSAQRLHDDDDFKYHKDAPHIERSRDIDRHYSGSRDLVVEKGGVAERYASADDLPSGRIRETESLYSSRGMLESDLVPCRQLKVLGDPSSALPAKDHHPYRMYTEPGYETSNRYIMEGLGRSSHDSLGHGSDHPHRFSGGSLEHVSGHGDETLLDIARQAHSKHTPRAASLEYDVHDTHSEPENLRGNVSMTSRHTSVSTSLRGLRDERINDNLRLSRRIEEDEGSIESMHQDTEHLIRHCYNGDASVQYQTARGGDDHYSHSPGTEPIGIARRLAHQHEFDSFGYSSDQEASLMVSRKRCRSPEYHDHEIDMYQADHGFAGHEHYDDDVVDEYDIPPPRMSRFDDEYDEIHDVLANRDVFSRISLPHETNQEWTDMDQGNHPHSNILGYGCSKHVPMHQRLSKPNYHSQFGETPMHGRGRGRGGLTKSAKKGLRTAPHQLHDGYPSGRNEFVRPNKFSKSSKDELNGSEVKHEDAPEYEDVPLQKDPPEGSEEFSKQVDEAFLKYTKILNESPAMQKKYREAPKGSLPCCVCGSSCLLAGMVTGMEKSKEKLCLL

SEQ ID NO: 46367 - protein, 98 aa, Zea mays
  Coding DNA Sequence Number=SeqID_2992
  Gene Ontology: Mol. function=kinase activity; Cellular component =ornithine carbamoyltransferase complex; Biological process=amino acid metabolic process
  Homolog annotation: Hit_ID=Q6QP54; Match level="QueryCoverage=78%, HitCoverage=36%, E-value=1e-10, Identity=45%"; Hit description =Putative kinase
MALPVDVAGPRPRSGDVGAPPKPGLSLSSVAEAESEPLGRARRRSFGRGQGGVRALGSGEADPSPSPGSGGAEFAVFRGLARVRALGRAERSSPSSGA

SEQ ID NO: 46368 - protein, 419 aa, Zea mays
  Coding DNA Sequence Number=SeqID_2993
MAPRVPCDDGGSQLSYGSRRTLRRSSDGHDITPTGCQDLSGCHIGMAFLEKVGRAGTRTRQALSWGHSLPSPAWTLVTPYCKRTRPGRGTNTKAAGFPPLSRPPPATSLPPFTLAHALDPSGLGHAAHSLVGLGTPRSRNADTIRAPSPSLSLCAPMKLVVHLWFTRSTLIGFLTLQPQLRRRRPEGQQDSSPSPQQEVESGRQPSPALQPEMPLAPQQGISTARGDPNGDGDDDDGGSSSHNTKLSEEQEPEGWIARPITHDTARGCHFHDALDTLLRRAFDRHTWSIEYHYDDLHGAEAFSEHYSITVRDIAEATKQDDARYALSQYCSLFSRVANGLDLKYYPRHSISSARGVIVSLDGEGNLRLNNMVNLVTMLNTKLDHTLDELGKARTEIEELRAERAACHYQDAGSLTLVVI

SEQ ID NO: 46369 - protein, 279 aa, Zea mays
  Coding DNA Sequence Number=SeqID_2994
MQVACNRTEGAHPFDFDASSMEAQAHTSWTGKGDTPKGILFREGSGPQAPLLIRGSKAGPSEGFNSRLRALGLRAHYWSEVRRLAPRKGSTAASGHSGSAPTTDQGFVGWPPKGSTVASEHAERGMTLGSGAALANPAPAKAFTASTYQPENLGLDYAPGLRPENSAACVAPTVVPLDRVRLTAAKSSLGRHRKLRLARPQGSGSTSTLDDGLRLARPQGSDTASASEDGLRLARSRARTQPRPRKTDSASPDPRARIQPRPRKTNSTSTSEEPPPRPT

SEQ ID NO: 46370 - protein, 217 aa, Zea mays
  Coding DNA Sequence Number=SeqID_2995
MPGKANCCCPARMQHSILWPRFRGEDGSEDLLVRFEVAGARWCGVGGQVDTAIGAEVVAAGESFSAVETISATCGPTSGSLDLMSRSCPLSGDANESLPVAASVLGPSLLLQRSLAGRLEFVVPQALRCGGCSYPREWNRSSVCNGTLSAAWTEAELAQKRKLRRPEPGRVVHWWDQHRSRVAEAMSRADFAEGGVDAEGAAAPPPSTSEPAGSVRL

SEQ ID NO: 46371 - protein, 155 aa, Zea mays
  Coding DNA Sequence Number=SeqID_2996
  Homolog annotation: Hit_ID=Q8LQI9; Match level="QueryCoverage=29%, HitCoverage=8%, E-value=9e-09, Identity=60%"; Hit description =Putative uncharacterized protein P0456E05.22
MEVRGAPDLTDFMNDWFFGKVGAQHSSGVGYDLTRESSKTPASSAQGIATDKLSADSVSGHPYLRLIFDIRTRTRYLLRIKNSIHIRYPRLWQREYGTWAVGLAVVREVVPNSSDSTCQVTLKVSGTIIRGTLKAPNSQLVTPISIKLQRPDGCD

SEQ ID NO: 46372 - protein, 192 aa, Zea mays
  Coding DNA Sequence Number=SeqID_2997
MAPPVDVAGPRPRLGDVEAPPRSRSSLSSVAEVESEPLGRARRRPLAEARAEFESWGRAKRTQVRALGRAEQNSSSSGAEPKSEPWVGRSGVRRLPRLSPSPSPGSGGAEFAVFRGLARVRALGRAERNSSSSGAEPKSEPWVGRSGVRRLPGLSPSPSPGSGGAELPMTGQWSGEVTAVTSALSAERRASG

SEQ ID NO: 46373 - protein, 423 aa, Zea mays
  Coding DNA Sequence Number=SeqID_2998
  Homolog annotation: Hit_ID=A2WY58; Match level="QueryCoverage=75%, HitCoverage=63%, E-value=6e-73, Identity=50%"; Hit description =Putative uncharacterized protein
  Subcellular localization annotation: CTP_CleavageSite=44; ConfidenceScore=5.49e-01
MAPHTLPDDGGSRPPYGSKRTSARTRQPRQLSFRQAPALLRRPRHHTNWVSKPLRLPQRHALATWRYRQRDHATRVHHLVPYAPRPLRLLRPLLLIPSLPPNPRRKCRFRDAPTPDSPHGRATSISPISAVHSRHRCHTSASSAPAFAADGSSDGVARLSSFLRRQRAVVAVLAAGDRTASRPTKLVLSDASKSVSSIVAAICYAWMLPSKGDGQAAVPVVNMRRSRMAWCRQAAWLLYHVGVDASALLFTDEVDMDGLIMDQRVSLLVVGQDVLKSKAEVASVCTTLTHTYCEDAYSLLQNLDIKKLLALISNYIIKKLKIHTLMAVINFYLSFCPVMLVHNDHSFVEYLKNTYRYSTTDDNEDRPREKKQSSSASGSSQDAKKSNSTNQRTTRGSGGRASDEASRGKNKFFLTKWFGFGSK

SEQ ID NO: 46374 - protein, 221 aa, Zea mays
  Coding DNA Sequence Number=SeqID_2999
  Homolog annotation: Hit_ID=Q6JAD6; Match level="QueryCoverage=38%, HitCoverage=11%, E-value=7e-12, Identity=50%"; Hit description =Putative uncharacterized protein
MSRTKNVLAPGGGDDEDPPRPFRQVKGKTVYLEQQEGCKKQRLDRAARVAIVAAAAAEQAERGAQLQIPSDQIAYRVRRLASHPRSSAPTTPTTATTLPPTSPAPVTPAPSTTSAIPTTSTTPASTAPPPASAPPIPPARFRERDETEESFRAQMSAQIVLRVHRLLDLPAFLLATGARDGSRSGKMRVSRLPARQHIRASSAYPCSRELAGKIFDPCPYP

SEQ ID NO: 46375 - protein, 254 aa, Zea mays
  Coding DNA Sequence Number=SeqID_3000
  Homolog annotation: Hit_ID=Q6JAD6; Match level="QueryCoverage=100%, HitCoverage=35%, E-value=2e-96, Identity=70%"; Hit description =Putative uncharacterized protein
MRFRFEREDVTIHASQIRQLFGFNESSTRLHSLCYGTSDPPRRPHNGVGPGTTHIMALFRPPFTDGSRCSSTDFTTAAKFLYQLMRWTLLPRMGYREAATHIQLWLLGALVSHSEINVVDFLICEIEDTVLDGLRARRQLPYAHYLCHIFAQLIRPPQFQGTLEASRLLFGAYRPALEDPVPAPAPVINTQAEDTTFHQFETQGAAVPDDDVFGVPPPPLPPMPSCTHDHEAGSSSGAAPAAPPAIDPALATIL

SEQ ID NO: 46376 - protein, 183 aa, Zea mays
  Coding DNA Sequence Number=SeqID_3001
MAGGNELAGAKERWLAGEGECGAKRVRALGSGGAEFAVFRVLARVRALGSGGAEFAVFRVLARVRALGSGGAEFPMAPLARPDCLSDSLCRVALQSEWRRRRCPSVRLLYADGGYQLRIRRLEGRGLGFRFLLVLLLDAMVHIVEHHDFMPEDFMLEEEAASSTPRATNLPAPGAAPAVHSAR

SEQ ID NO: 46377 - protein, 153 aa, Zea mays
  Coding DNA Sequence Number=SeqID_3002
  Pfam annotation: Domain name=Transposase_28; Domain location=1-152; Score=-41.5; E_value=0.0014; Accession=PF04195.3; Description =Putative gypsy type transposon
MALLDPPECFQSEVALNLVRNLLGWGAPAFSGRIHVGDSPLGDLAAGEFVLFVSNLPCGLVLPISSFFLLLLEELGLQPHHFTPHFILQAVIFAYLCEMSVGATLDERVLRGDLPEVESELSCGSIFRVSFTSVPWYTSMNWSSSNSMRWEAS

SEQ ID NO: 46378 - protein, 252 aa, Zea mays
  Coding DNA Sequence Number=SeqID_3003
ARRLQDGLVAARQRSGQDTLNAEAAHRLGRATQRPYVRLRPLAYVMGSGPRGSIGSPPERGAEAYTVWSGHVSASDPRLTLTKAPEFFVPESRDPAVSGPDPTQRGPGTGEEAHYRGRWLAPHAAVRLLCTRRPTPKEYDSWARASVSEALVSAEMKRCGGSLLAWRFAFFALGDRRPRSMARGPGPPCQRLVHCFRRRWRGTTVRSSRGGSPSSHSETRHKLYDFVGPGPHVRGWVALVRIGRDFLWRLEA

SEQ ID NO: 46379 - protein, 81 aa, Zea mays
  Coding DNA Sequence Number=SeqID_3004
MMQGTCEHQAIKCSCASNPAQKPNPEKQAAASEYATDHAAVGHGGRETRATMDFSKSELPAINGDQETCEVYPKLYNITAI

SEQ ID NO: 46380 - protein, 515 aa, Zea mays
  Coding DNA Sequence Number=SeqID_3005
MTPVVLSPLRQQGDVSRVPAASPAVLHTGLRHFSDGHVITHTGLRLSPDSHVGMDPPGSEMPTGLEQDYGAGSDAGQLAIVPSQVAATSPAAAVGAKGTSQDPWSKFCASGKISSVAASRDMAGIVSQQLKHDKSTVENKSRRLAKRLAAAEAENEGLRRRLAEERRDANKACAEAQSAQAEAKLARVEASLARQRAEEMETRLGSLRDRLDKTEASTRAEVERTYTQLVDAYRELGARTAPFEAPGQEVGLHFLGWLKEELEVLPTIVTGLMSFASLVTCEGAVNALSREGCGHFEAFDQSDEGFEREIFQVEDPMAHDEEVEDLSDLDSTLPEASGVELALPSYAGEGPSATPASTGASEDPVPATALTGADASKVVAEPAAEDLGPSQVPTFGPAQATAADNTDFVAASTVVPADDNLFGSVSECFESDGESGSSFSWTEESSDEGLDYFVALDVAAAETSPRVEGARDLPSASTGYRRRRVVAKHSVGEFSRSGRRRRMGMERDRLRVDRI

SEQ ID NO: 46381 - protein, 122 aa, Zea mays
  Coding DNA Sequence Number=SeqID_3006
  Homolog annotation: Hit_ID=Q6J9V9; Match level="QueryCoverage=31%, HitCoverage=13%, E-value=7e-14, Identity=89%"; Hit description =Putative uncharacterized protein
MAEARATLPRYPRTFPRPAGTICNGIPPEGGIEPSDPVKKGSGPANHLQENSAARPAPTAMPTTRERLTTAESSLRRNRKLRFARPQAPASGGDLRLARPQDSDSASASGGIASSPDPGLGL

SEQ ID NO: 46382 - protein, 113 aa, Zea mays
  Coding DNA Sequence Number=SeqID_3007
  Homolog annotation: Hit_ID=Q6QP51; Match level="QueryCoverage=26%, HitCoverage=13%, E-value=4e-08, Identity=86%"; Hit description =Putative growth-regulating factor 1
  Subcellular localization annotation: CTP_CleavageSite=43; ConfidenceScore=5.15e-01
MRLRKPKQKAGANGRVKDHRRPLFRVYKGPGENRSKLRPNPPRNSNSKGLGKGMFRKGSFSAKEAGPEPITDQGFEGWPLGRVSTAAPEHSGFTPITDQGFEGWPVGRVRQPP

SEQ ID NO: 46383 - protein, 185 aa, Zea mays
  Coding DNA Sequence Number=SeqID_3008
  Homolog annotation: Hit_ID=Q6J9V9; Match level="QueryCoverage=70%, HitCoverage=45%, E-value=1e-58, Identity=86%"; Hit description =Putative uncharacterized protein
MRLRKPKQKASTNGRVKNHRRPLFRGKRHLWQAKRAPFHLRHDDRVKKGTGKGDISKRILLSEGNGPRALLLIRGSKVVPCGVRQPPQSTRAPGPLLIRGSKAGPSEGFDSRPIAHRVRDDPGYVCYMAEARATLPRYPRTFLRPAGTICNGIPPEGGTEPLDPIEWVRVQQITCRYFWSAPLGH

SEQ ID NO: 46384 - protein, 531 aa, Zea mays
  Coding DNA Sequence Number=SeqID_3009
  Gene Ontology: Mol. function=binding; Cellular component=cohesin complex; Biological process=chromosome segregation
  Homolog annotation: Hit_ID=A2Y169; Match level="QueryCoverage=94%, HitCoverage=47%, E-value=0.0, Identity=70%"; Hit description =Putative uncharacterized protein
  Pfam annotation: Domain name=HEAT; Domain location=256-292; Score =7.7; E_value=1.9; Accession=PF02985.13; Description=HEAT repeat
  Pfam annotation: Domain name=HEAT; Domain location=295-331; Score =9.1; E_value=1.2; Accession=PF02985.13; Description=HEAT repeat
  Pfam annotation: Domain name=HEAT; Domain location=338-374; Score =2.0; E_value=13; Accession=PF02985.13; Description=HEAT repeat
  Pfam annotation: Domain name=STAG; Domain location=134-249; Score =187.1; E_value=4.4e-53; Accession=PF08514.2; Description=Stromal antigen (SASTAG) protein
  Pfam module annotation: Pfam domain module=HEAT::HEAT::HEAT::STAG; Domain location=256-292::295-331::338-374::134-249
MDETLASLRRPKRGRPPRPREDYTAYFEDVAEAGGLAPPQSKRKRAASAAAAASLEDLPLIDIIKHNGRLISHAVKRLVEDYESKKNSVTFQILTMIFEACGAKHEIYPDYLRESDVDDVVVSLVDLAKKGLVEDNYNSKHKDLKNFKENMVSFWDSLVIECQNGPLFDDLLFQKIKDYVVALSCAPPRVYRQVASMIGLQLVTSFISVAKTLSGQRETTQRQLNAEKKKQSDGSLIESLNNRLAFTHANITYLEELMRKIFSGLFMHRYRDVDPEIRMSCIRSLGIWVVSYPSLFLQDIYLKYLGWTLNDKNAGVRRTSVLALQSLYEVDENIPSLGLFTERFYTRIIQLADDIDVSVAVSAIGLIKQLLRHQLLSDDDLGPLYDLLIDEPPMIRRAIDGENESSEVHIGRMLQILREFSDDPVLSSYVIDDIWDDMKAMRDWRCMISVLLDENPAIELTDIDGTNLVRMLRASARKAVGERIVPAVDNRKLYYNKGEKVVDGQKQNGIAGQLKTWAAYVMASVFLDGKR

SEQ ID NO: 46385 - protein, 321 aa, Zea mays
  Coding DNA Sequence Number=SeqID_3010
  Homolog annotation: Hit_ID=A7Q6S9; Match level="QueryCoverage=18%, HitCoverage=11%, E-value=2e-07, Identity=53%"; Hit description =Chromosome chr12 scaffold_57, whole genome shotgun sequence
MAPVLGGGSARTGELRRPMSVLGGGSARTRELRRPTPVLDGSFARTGEGGALEDRRGRERSEARDGQATTTTMLGGGLARTREGERRLRNDRRGGERSERERKREKRPGLMRTLKIRCYVEIGRLPFSGRRGRSEGGKWEHRVQLDFSSSIVEQFLLRPFLAGIFFDPVLDKSSRLFELVFKRLSLGDNVLSEDDIDAIVAQLACPRVLGWGFEEWRHERRRRRPRCSPPWAPSPNKVLVGLTRLHAATTPDDVILSPPETATRMWMMGVPRMRGGWARGGGYTRGGMGRHRGDDAGSAHATADLLWRRQIWTTRARLDRR

SEQ ID NO: 46386 - protein, 49 aa, Zea mays
  Coding DNA Sequence Number=SeqID_3011
MEETKPWYGGASDRSGGEYNMPCQLNPRVHGGYGNIGKILTNFGMEGPT

SEQ ID NO: 46387 - protein, 188 aa, Zea mays
  Coding DNA Sequence Number=SeqID_3012
MGSHELCRPPGGSPFHTEHAAGHSCLPLAGVHSVLLGHWKLTVAEMLSLGNATPSGLVLHNGNILGLLVALGLSDYSDYLLGQEGEVPGCFVSGTDFHPVGCAGGVLASVPEILPYYHQAFWNMISTEVVSELLPSDSFKVDIGGEDVIQVVVPEWLSGMTRNHVGFARAVPSNISSKSLAFNHPISH

SEQ ID NO: 46388 - protein, 91 aa, Zea mays
  Coding DNA Sequence Number=SeqID_3013
MRLTMRWPSASLVTCNPSGLRTAGGDTERSQLAKAQDDSFVFCYVVCASVRFQSEAKLRLPPHGTVRHRSGWSTHSLEVLLAAMSAQSCRR

SEQ ID NO: 46389 - protein, 182 aa, Zea mays
  Coding DNA Sequence Number=SeqID_3014
MTVRLTPTRSRADQVKTSLFLERQEMSFSGGVDMCARQLFGCRLVVPETSCPWWPLFLGNLLLGAHSLHHEIGNNICAVAAPVPGLGHACHCRGPGGIVLTASGFAGGVLVGYVVHLLLTAVVPSGVCLRRPCPGSAGLQRVLGLSLRLDLTLMELFGSGILLEQLIELLDIFGWVPDAVTV

SEQ ID NO: 46390 - protein, 436 aa, Zea mays
  Coding DNA Sequence Number=SeqID_3015
  Gene Ontology: Mol. function=signal transducer activity; Cellular component=myosin complex; Biological process=signal transduction
  Homolog annotation: Hit_ID=Q10F06; Match level="QueryCoverage=91%, HitCoverage=26%, E-value=0.0, Identity=80%"; Hit description =Unconventional myosin heavy chain, putative, expressed
  Pfam annotation: Domain name=Myosin_head; Domain location=9-436; Score=299.0; E_value=9.3e-87; Accession=PF00063.12; Description =Myosin head (motor domain)
MAEDGASATQAMVAQTRPTGPCNGEGCPGGAVHGGEGGRSRFGKFVEIQFDKSGKISGAAIRTYLLERSRVCQINSPERNYHCFYFLCAAPSEDLKKYKLGDPSLFHYLNQSACIKVDGINDAEEYLATRKAMDTVGITDQEQEAIFRVVAAVLHLGNINFTKGREADSSIIKDDKSRFHLNTAGELLMCDCEKLENALIKREINTPEGVITTTVGPNSATISRDGLAKQIYSRLFDWLVNRINASIGQDPNSNKLIGVLDIYGFESFKTNSFEQLCINFTNEKLQQHFNQNVFKMEQEEYTREQINWSYIEFVDNQDVLDLIERKPGGIIALLDEACMFPKSTHETLSQKLYEKFKNHKRFTKPKLSRTAFTIQHYAGDVTYQSDQFLDKNKDYVVAEHQELLNASKCSFVSGLFPQATEENTKSSKSSIATRFK

SEQ ID NO: 46391 - protein, 188 aa, Zea mays
  Coding DNA Sequence Number=SeqID_3016
  Homolog annotation: Hit_ID=Q7XBD9; Match level="QueryCoverage=27%, HitCoverage=2%, E-value=8e-07, Identity=56%"; Hit description =Putative gag-pol
MDEGCTRPLPSDSDIKLEYHWRHSSDSPEANLGGRCGIDLPEANLRGRHGFDFTEANLGGRHSHSSPECSHDSPERSHESPKRSPDSPEAISGDYPMLGTQGIITIHADFQGAAECFRGAIHMAHTARPSMAPWTQSDGTPAWDDLTILSNEASTSTYMRPTEETKRINLGFSNERKTAVIRSSLTNK

SEQ ID NO: 46392 - protein, 109 aa, Zea mays
  Coding DNA Sequence Number=SeqID_3017
MDVDDVLKLDSERAKEPREDHTVHPVLGWEQLGDGIDEDVVVEGVGLKGEERLVVPASVVGGRRVEDNEDEQPDSLDTNHLSVEVSDDRDLVLRGRGSTGATGEGSAAE

SEQ ID NO: 46393 - protein, 333 aa, Zea mays
  Coding DNA Sequence Number=SeqID_3018
MEKLTEPGCLGNAIGHSAILGLSAGARPAQKLQRNKEGLSRGAAEEAKNFLGSDEVGLTRGVHVKAHLLDRVGDVEPVKVRHASLLQNVDGVVALVKEEALGAMLHATGRDPAVKEYDTGGCEHNVVDVEKLVDQRARQRTVRIVAGLTAGLRSHRSHSGMQRMLSEASKDTIGPVLIQSTICLELVTKDPLAGDHVGVRRTLHQVPDGGGYRRGSRSSGDHEHQLVNMLDNTDGLACDHRVDVAGVMMDGDMMVNRRLSRDWVGARGDASEEGTGGLRGRDHRSELKVARAMGPLMEQVETTGPRTVQKRSPRLRVNSYYINAKYRLTIDLN

SEQ ID NO: 46394 - protein, 180 aa, Zea mays
  Coding DNA Sequence Number=SeqID_3019
  Subcellular localization annotation: CTP_CleavageSite=2; ConfidenceScore=5.13e-01
MEAQAHASRNRRAGCFMQATAPPLAPPPRLLDCGTNTATRGNPAHDPAAVNAAKSGPTVMTVAGGREQRRSGQRFAFAVITAPKKGPGKGDTPKRILPREGTRLRASLLIRGSKAGPPRGSTAASDRVGPTPTTGQRFEGRPPKGFTAASGYSGSAPITGQGFEGWPPKGSQPPQTLSEG

SEQ ID NO: 46395 - protein, 97 aa, Zea mays
  Coding DNA Sequence Number=SeqID_3020
MADDKGGKGKREQGEGKRKRPPTSPSDNFGDSKFSKENISSEGNDSPPLAPPLSSSDYSDDSMVLLVAEQAYIRSIERAGLEVSDNSEEEDSSEADS

SEQ ID NO: 46396 - protein, 76 aa, Zea mays
  Coding DNA Sequence Number=SeqID_3021
MDPKGKKKVTDEKEKEILSGDKEGKTVDSRSGKTKKDMKKKRIKKIIFVIILSFVVITILVKLRLDHASVYPQPDS

SEQ ID NO: 46397 - protein, 297 aa, Zea mays
  Coding DNA Sequence Number=SeqID_3022
  Subcellular localization annotation: CTP_CleavageSite=53; ConfidenceScore=5.05e-01
LDSLCDNGHKFNHSVSCPFFLSHGVQLRLSHVASLPANYRVKLNTDTHLNFLPSKAVSKVHNIANKMTKCWVQQKGKEPTVGPLVWAHRTVRCATGQCPVHHRTVSGTPGDSSSNSPPSGISRGSRAIIHRTVRCTPDSVRCAMEKRPQELFRFGKSQRLVRYNSPDMSGVHRTVRCDSSATAIPRQRLPAEALNAPQRAQTSGLPILAHRTMNRSCPVRHRTSRVAHKSELQRSDSNGTDDVAGAPDMSGVHRTVRCAIEQTGSPTATFGGWGYKYPNHPTFIAIQVFHFSTTYKS

SEQ ID NO: 46398 - protein, 384 aa, Zea mays
  Coding DNA Sequence Number=SeqID_3023
  Gene Ontology: Mol. function=DNA (cytosine-5-)-methyltransferase activity; Cellular component=chromatin; Biological process =regulation of transcription, DNA-dependent
  Homolog annotation: Hit_ID=Q9ARI6; Match level="QueryCoverage=22%, HitCoverage=9%, E-value=5e-10, Identity=46%"; Hit description=DNA (cytosine-5)-methyltransferase 2
  Subcellular localization annotation: CTP_CleavageSite=39; ConfidenceScore=5.70e-01
ASTGAVLPASRTSCFLQHAALSPARRAFSTCFPRLPSPACSLYVAINSIAPAIPPSQETLPSMAPHQGSPRSIFTEKSRLPRVPFHPWRRCCKCPYGPLAPTALHRQNGSSSIPPSTAKRRRKAVSSMKKPKPMPKQAKPAVVGMKKKRETERMELVVDDVCAEEPDKEERISGWKRSAMAKEIHQNQEEEVVAVSTAKRRRKAASSGKKPKPTPKKAKPTMVGMKKKGETERVELVVDDVCAEEPNEEERVSGRKCSTMAEEIHQNQEEEEEEVVALASIASRRGRAPSAKVRPDRAGASGGVSQPQAGAACEGVAASPRQRVRARRGQATDPHSIAERSGCTALSIVKQGGLMVVANVDDFRVILDTGSDDDAITLSSSLST

SEQ ID NO: 46399 - protein, 111 aa, Zea mays
  Coding DNA Sequence Number=SeqID_3024
  Subcellular localization annotation: CTP_CleavageSite=96; ConfidenceScore=5.55e-01
MAPGGAASAARGQHAASARPASARPALCQCGQPARAPRAPIARSAVAASPPPFVGVTQPFHAVRNALALPSDVVCLRSPFAVCPRLTIATIVLGCSQESTKDRRRAIHVRT

SEQ ID NO: 46400 - protein, 78 aa, Zea mays
  Coding DNA Sequence Number=SeqID_3025
MCAVHRYAKGQPIFLGLLASYLGHSPEALLLLGLSWVFNAASVGPFARAAEMLMGSLFSASAVQGICEQESEVTVVDL

SEQ ID NO: 46401 - protein, 145 aa, Zea mays
  Coding DNA Sequence Number=SeqID_3026
MGKNNKRKREPTPPSEEFGDSEYSEEEFSSEPEGSPAPVSPPALSDDSDDSQGIAAEVWTYIRAVERAGLEGSDESEYSSDEEDSDGGDEGEDDDDDDDDDGDGSGRGGGDGSGRGGGDGSRDSTKGSSRGSTKGGGGGRGRASG

SEQ ID NO: 46402 - protein, 86 aa, Zea mays
  Coding DNA Sequence Number=SeqID_3027
MYFVNYGPPKSPPMEVGCEHTVHCRGKRDYNKFSEICASARVSNPFPNVDLFPVVCEDALKWKTIAAKSVATNGVEEEELLEKKST

SEQ ID NO: 46403 - protein, 150 aa, Zea mays
  Coding DNA Sequence Number=SeqID_3028
MGKNNKRKREPTPPSEEFGDSEYSEEGFSSEPEGSPAPVSPPASSDDSDDSQGIAAEVWTYIRAVERAGLEGSDESEYSSDEEDSDGGEEGEDDDDDDDDDDDDGGSGGGGDGDGRGGTKGGSGGSGDSTRGSSRGSTRGGGGGRGRASG

SEQ ID NO: 46404 - protein, 79 aa, Zea mays
  Coding DNA Sequence Number=SeqID_3029
MAVARRRWARRWSPRAREAGGATMVEGRGGAGRGGATAVGAVARRRWARRCSPRVRAGGGAMAGGGASGWRRDGERAGE

SEQ ID NO: 46405 - protein, 59 aa, Zea mays
  Coding DNA Sequence Number=SeqID_3030
MGKWLINLDQALSRQSRPSVSIKDRTVDWPVVVETLQLATYLSMGQVEDSVGTVDIGKG

SEQ ID NO: 46406 - protein, 148 aa, Zea mays
  Coding DNA Sequence Number=SeqID_3031
  Subcellular localization annotation: CTP_CleavageSite=57; ConfidenceScore=5.19e-01
MQAACNRAKWTRFSDSQRASMEAQAHASRNLRRMLHAGNCTATCATIAPLRLRDQCRDSRRPSARPSGASLARRNRERGIPRKESFPVKEPGFEPPLLIRGSKAGPLRGSTVASDRVGPTPTTGQRFEGRPPEGLHGRLRLLGLRAHY

SEQ ID NO: 46407 - protein, 299 aa, Zea mays
  Coding DNA Sequence Number=SeqID_3032
  Subcellular localization annotation: CTP_CleavageSite=30; ConfidenceScore=5.46e-01
MAPPATWSVRALGRARRRLLRGRGRVCLPRSRSSPSPWVGRGGDRRLRPGLSPRVGQGRVRRLPGPRPSPSPGVRRGRVRRLPGPRPSPSPGVGRGGVRRLPGPSPSPGSGEAEFVVFQGRGRVRALGRARRSSSSSGAEAESEPCGRARRSFLWRPRPDLAAVSLTLSSGTTVEVAQAALSSCQAVGVAIWPRLLLGEGWASGEPKLCADWGYQLRLGVLGVPLIMVPDSSYRASKGVLILAWRLLSHFFCKGTGLSRLRFVPVGARERTRRGVAPEASEEWFDSFEVLMRFVMLWPV

SEQ ID NO: 46408 - protein, 225 aa, Zea mays
  Coding DNA Sequence Number=SeqID_3033
  Gene Ontology: Mol. function=kinase activity
  Homolog annotation: Hit_ID=Q6QP54; Match level="QueryCoverage=20%, HitCoverage=17%, E-value=2e-09, Identity=65%"; Hit description =Putative kinase
MGQRETEREGGKNRRETGVKGETRGLRVCPAPRSGALAVGGYKRPRGREREACTRRPVLPTRPTLCKRALDLPFIGVRRGSRCTMGDVAPWVGEAEAPLRSRSSLSSEVEVESEPLGRARRRPSAEARAEPWGRARRSSSSSRAEAESEPWGQARRSSSSSGVEAESEPWVGRGRVHRLLGPSPSPGSGKAEFVIFRGRGRGRVRALGRARRSSSSSGAEAESEP

SEQ ID NO: 46409 - protein, 147 aa, Zea mays
  Coding DNA Sequence Number=SeqID_3034
  Homolog annotation: Hit_ID=UPI00005A9633; Match level="QueryCoverage =26%, HitCoverage=7%, E-value=8e-08, Identity=74%"; Hit description =PREDICTED: similar to Copia protein (Gag-int-pol protein)
MAPRVLHDDGGSQPPYGSKETSGPPGVETPTIMIKKRKMIKKNRVKDRLTQESTKRYKEITPVEDALRDSDYVLAIQEELNNFTRNEDAKPIKTPMGTNGHLDLDMRGKSIDQKGDLMVVANAGDYRVVMGTTSDNGAVTSSSSSST

SEQ ID NO: 46410 - protein, 235 aa, Zea mays
  Coding DNA Sequence Number=SeqID_3035
MKAGEHREDKEGECFVRFGHGGGLTPSSITAKKKEIGLLELVIVSHESQRIWGALGGIRAVRSQPEYDGREFIEHGTEKCVVTVYIGSSLHHVEWSVTAAGHRFRDTCQVVAHKALRALCPIYEEEVADTPLRFFLHFQRNRPVWMARMRALEGKQLLEDDPIVVYLTAYLLTLDAQYDFLARHHRQMIARAEDAEKRNCKLHVDLTIAQARVAALESSEAIAVEALKQAKDEHV

SEQ ID NO: 46411 - protein, 88 aa, Zea mays
  Coding DNA Sequence Number=SeqID_3036
MTDIYNNYKRSNNNRLLRYIYHPQQWPSNSMKVLQGRQEPVEGEGGGDVARAHSAIDEAGGKALHAPVELHTGEASTAWAGSDDDSDK

SEQ ID NO: 46412 - protein, 47 aa, Zea mays
  Coding DNA Sequence Number=SeqID_3037
MGRLEPQAERESWLMGCHWCNLCSGKEEEIIIEEDLQEFQDFDEFED

SEQ ID NO: 46413 - protein, 67 aa, Zea mays
  Coding DNA Sequence Number=SeqID_3038
MARLNALITLGSAMVMEWSVEAVGVEGDGGGQGWVVKRLDAQRRWTAATQFVVALQTFTVRDSSPVA

SEQ ID NO: 46414 - protein, 57 aa, Zea mays
  Coding DNA Sequence Number=SeqID_3039
MGSSSLRAEWESQLVGGYEIDGFGYDYGAGCQHCNHCSGEDEAVEGDFQEFQDYDEF

SEQ ID NO: 46415 - protein, 155 aa, Zea mays
  Coding DNA Sequence Number=SeqID_3040
MGKSNKRKREPTPPSEDFGDSEYSEEEFSSESEGSPAPVSPSASSDDSDDSQGIAAEVWTYIRAVERSGLEGSDESEFSSDEEDSDGGEDEDDDDDDGDDDDGGDGDGDGNGSDGGSGGKGSTRGGSSTGSTRGGSSKGSTRDSGGKGSSSKASG

SEQ ID NO: 46416 - protein, 466 aa, Zea mays
  Coding DNA Sequence Number=SeqID_3041
  Homolog annotation: Hit_ID=P02977; Match level="QueryCoverage=60%, HitCoverage=54%, E-value=3e-07, Identity=23%"; Hit description=M protein, serotype 5 precursor
  Pfam annotation: Domain name=zf-CCHC; Domain location=31-48; Score =25.1; E_value=0.00024; Accession=PF00098.14; Description=Zinc knuckle
  Pfam annotation: Domain name=zf-CCHC; Domain location=336-353; Score =7.1; E_value=0.13; Accession=PF00098.14; Description=Zinc knuckle
  Pfam module annotation: Pfam domain module=zf-CCHC::zf-CCHC; Domain location=31-48::336-353
MRMIRKINLMGVPLQVEDPLFNIDRKKQRKRGCFACGEKGHFRDNCPTMAEPKKERSKGKALTSVRTWDESSSDDEPPRTRSHRSSSRSSRSSHKCLMARGKMSIPSSSDDSSSDDDGEGKPSVDELAEAVKFFQDVCTKQKAQCKTLKNRLISSQNDYKGLLEKIETFAYLNCELSTKIELLESSAPSTATDDGLIKKNEKLKAKLASSQEAIENLLEKMETLSIHNNELTTKLENISSTSAASLVEIPEIIKKDASTSCFDLIDDSKPCNQVLVENIVVETCSDEVAKENEQLKQEVARLGKALYDKKGKAKQIRPPQDNTTAGVNKLIEGETVICRLCQREVHKSFQCKAMTGDKQRQELKQNLQHLHQKGGQKGCYTIFDQEEKEWKGDSNQGQQASQQRKGSQTHLGAKGNNFNHEKHQEGLDPEREVSRPKVKREIWRLGKLGMYIMGYIILDQVYCQVG

SEQ ID NO: 46417 - protein, 98 aa, Zea mays
  Coding DNA Sequence Number=SeqID_3042
  Gene Ontology: Mol. function=carboxyl- or carbamoyltransferase activity; Cellular component=ornithine carbamoyltransferase complex; Biological process=amino acid metabolic process
  Homolog annotation: Hit_ID=Q8SA97; Match level="QueryCoverage=88%, HitCoverage=21%, E-value=5e-10, Identity=41%"; Hit description =Ornithine carbamoyltransferase
MALPVDVAGLRPRLGDVEAPPKPRSSLSSMAEAESEPLGRARRRLFGRGQGGVRALGSGEADPSLSPGSGGAEFAVFRDLARVRALGQAERSSPSSGT

SEQ ID NO: 46418 - protein, 132 aa, Zea mays
  Coding DNA Sequence Number=SeqID_3043
MSGAPEDSNSKLLTFGKFERRLRYNSPDCPVYTGHVRCSKEERPPKLASLGNSLQLLRYNSPDCPRSGTPMLAHRTIYSACPVRHRTSRRAQRTELQRSEPNGFGDVAVAPDMSGVHRTVRCAIEQTASPNG

SEQ ID NO: 46419 - protein, 38 aa, Zea mays
  Coding DNA Sequence Number=SeqID_3044
MRVEWGGNEIDGSGYDYGIGEDEAVEGDFQEFQDYDEF

SEQ ID NO: 46420 - protein, 82 aa, Zea mays
  Coding DNA Sequence Number=SeqID_3045
MNLGTREDLEWFGPPERNTLLHCVLDCCQSLRAESLSLSSGKLPWQHISDNGHSAPCSTGVLFGNGLDRHAACRMAWTPPAS

SEQ ID NO: 46421 - protein, 245 aa, Zea mays
  Coding DNA Sequence Number=SeqID_3046
  Homolog annotation: Hit_ID=O48967; Match level="QueryCoverage=40%, HitCoverage=21%, E-value=7e-28, Identity=64%"; Hit description =Putative uncharacterized protein
MAIQVPAAPPEKVRRYVKPVGIPAGVRHRYHNSRWKHRCDGDIFSCRLVWACPDLAHEPRPRVNLLLRRALRAVRCELRQRLPATRCGGPPPRSEARARRDSPDIISRFTKVRGTFPRGGKKKKKKDRDHQKLWSTALVVAAATGGRGDRNKRPRPKSGNSGSCPVHHNGRHSAVECREIIDLVKRVSERHEQSSKDGSPPRRRPGMERVDDGEVAAAERDLGYQSPKGDLKDVFAGDSYSGGDN

SEQ ID NO: 46422 - protein, 294 aa, Zea mays
  Coding DNA Sequence Number=SeqID_3047
MVCRLLGWDAPVFGGRICAGAILPGELAAREFVLFLSSTSLAGWYRRSCLSSAGGARPRGGGALPPVLGVKDVHQPCGGGERAGPRLCLSHELVTRIFLQHSEEKDDHQPCEGWRRTSATRLRADRKRRLSPRFQLHGLDGLVLTLVGGRGRGPLRHGARAEVAMAHALRWPPSLASRRPTGRAYEGGPHRAGLGPDPRFPSAFDDGVLVLMLKPFLHGLVRSLDPWGVQKGFRAKVPFSRGHLAVVDPFHARSATRWGAVLGRLLVSLADAFHEVDDLATLHGAVATVVVHRA

SEQ ID NO: 46423 - protein, 143 aa, Zea mays
  Coding DNA Sequence Number=SeqID_3048
MDAQYDVTQEWLDRMKITRKGLRGTKRRCQRFIYNYTKSTVRNTVDYSGQEKLFGKTGQARTVRALAADRPRHKDDPRTEPMQKHKFPLQTVRRKSKDRPSPRADRPASGADRPVGKKPKNPKGRTVRTRRADRPRSAERPNG

SEQ ID NO: 46424 - protein, 173 aa, Zea mays
  Coding DNA Sequence Number=SeqID_3049
  Subcellular localization annotation: CTP_CleavageSite=52; ConfidenceScore=5.54e-01
MSSFSLKRRVFPSSKPPDGGPAASLRRRSPEMATSDLMPQGFSSPGLGRGVRRVEVGPRVGGGPPLHSVMGGEAGIARGVRQLQRAWSSAASGFGATCGAGVCHGSWKRFFRRRGGRDRPRADLQLLRPSARPCLTSFGMGGGLLAAASTLRSALPLFGPPEQKSSSSPLLEQ

SEQ ID NO: 46425 - protein, 43 aa, Zea mays
  Coding DNA Sequence Number=SeqID_3050
MGEISGMTAVWDMRGWNALRSRHWLLTLGRAARPTVLRPRRRA

SEQ ID NO: 46426 - protein, 244 aa, Zea mays
  Coding DNA Sequence Number=SeqID_3051
  Homolog annotation: Hit_ID=A2YWY9; Match level="QueryCoverage=85%, HitCoverage=86%, E-value=4e-51, Identity=52%"; Hit description =Putative uncharacterized protein
MAEPAGKARERRVSIEEVAKKLSLWHTATFRPILTHAELEPILCAAGFVALPSAPATHQKQDERPGVAWREYAFLGGGNASPAAAAPRRWLGPRPRLPYPRVDGLHLKTYQAFLGAVEAYLGAHRVSNLFHVRLMPVTSPHDRAFDKVFRPMRNCSPEEDGLIVYREGTLDDLTVETCSRHAATGDDGAAGHVIPGISCSDLGCLRKVDGNCLEEGCKSRRGTARGHDDDFFVVQLKDLFPSYY

SEQ ID NO: 46427 - protein, 67 aa, Zea mays
  Coding DNA Sequence Number=SeqID_3052
MAGLARCRAEREGARAGASATAAPWLAAPSQTGHARRTGARGREPRRDVRAGPNSAVAGEDGKKRGE

SEQ ID NO: 46428 - protein, 395 aa, Zea mays
  Coding DNA Sequence Number=SeqID_3053
MEDQAIPFARVPARIGQDQWVVMGGLTSMHVRRPRLCCWFTGPNDIDRIQRGPGTDLSWDELAVLVGGITGETFVPESLILPQNIPTLCDDPGLRTSILATLLTLDESGVAVRQTGGWDPHRGIRISDAPAGGPQPTSVARSATPAVAPSPLDKGKGAASGASTGAPAPGAPAAAIAAAGSVIASLPGSLEGPGPQVTPPPPDTRPTDGPGSQQQESVGGDAGGPSPAAAKTAPHVLAGEAAPPASGGVAAAEEALAGGSAPPSGTGGDAGGASSSNPPPASEEMEVGFGRRLRSRAEQEAAPIPLPRMLSRAHQVLSDTGAAILREWEALEAEHQRLSDRRTQLEERTKTASHQFISERSQLERDRKEYKRHLQKVCARELEASRREKKVARRE

SEQ ID NO: 46429 - protein, 175 aa, Zea mays
  Coding DNA Sequence Number=SeqID_3054
  Homolog annotation: Hit_ID=O48967; Match level="QueryCoverage=92%, HitCoverage=34%, E-value=9e-34, Identity=51%"; Hit description =Putative uncharacterized protein
MVQIVEHRDLSPEDFLMEEGATSSMPRGSYCPAPGAAAMHTAQQHTLAQTSRAPSGAAHGGALSAARELLRNPPSSTASPECMRQWREDVDRLLGMAHSGSARPRPRSFRRQREVSASVCSPSVRGARTDDLRVELNCWRAGEDARISLEKADDLRAELNRRRGRGCPSLSGEDA

SEQ ID NO: 46430 - protein, 175 aa, Zea mays
  Coding DNA Sequence Number=SeqID_3055
MALGSLSSEKSQLKSGSSSSSEPAGPEVETTVSRSQVDHIWYPGRSGYALAKALTEAGSLGGSKLNLKGTGWKTDVTSWLMDGGEVASGTECTVISGEEYHVVAAIAGHELETPKAEHRPGLKRLPKIVHLELNGKVFVNTQQSPTWRANCQCFEPTRTLNRPVNLSLRVPAQMG

SEQ ID NO: 46431 - protein, 491 aa, Zea mays
  Coding DNA Sequence Number=SeqID_3056
MAERYQLPRSCVPPTTRRKDNGYPPSGGLEGGKTRCIREREDMVAFQGSHPPFKGGSPYLRPQPSWAESPPTHSKVLPYGAGAGSHTSCKPAQSGRSQTAVRGAYNRPAVTSDSPLLPRPTGERGGQPCRRHATAPSGRASPTPNTPSMEAQAHASCNRRAKCFVHATAPPLAPLPRLLDCGTNTATRGDPARDPAMPAWRDGQCGQKWASSNGGGRRAGAAATSGTGGASGRRSGRRFAFAIMTASKKRLGGCSRKPGSGRTVDSVNIPARELGTRPYTRATASSHEGTTRPAEALREALRPRRSETTPPRPRGLHPAGALARTHRNKTQPRKAGPLAKKCDKSLQASANTPFEARGLLSGTIIRGTLKAPNSQLEHLMQRWPDTFVLTRAPQSRSDRRHFAAPLTSLTERQRRLRRSDCGATQQSEADRRSGPVEGTIGSFASPDPGLGHGLKSRKTANSAPPDPGLGHGLSPGRRRTLLRPTQGSDTG

SEQ ID NO: 46432 - protein, 395 aa, Zea mays
  Coding DNA Sequence Number=SeqID_3057
  Gene Ontology: Mol. function=transcription factor activity; Cellular component=nucleus; Biological process=regulation of transcription, DNA-dependent
  Homolog annotation: Hit_ID=Q2RB16; Match level="QueryCoverage=82%, HitCoverage=75%, E-value=1e-101, Identity=58%"; Hit description=AP2 domain containing protein, expressed
  Pfam annotation: Domain name=AP2; Domain location=163-222; Score =50.0; E_value=8e-12; Accession=PF00847.11; Description=AP2 domain
  Pfam annotation: Domain name=AP2; Domain location=63-121; Score=42.3; E_value=1.8e-09; Accession=PF00847.11; Description=AP2 domain
  Pfam module annotation: Pfam domain module=AP2::AP2; Domain location =163-222::63-121
  Subcellular localization annotation: CTP_CleavageSite=37; ConfidenceScore=5.76e-01
MERSQPQHQQSPPSPSSSSSCVSADTVLVPPGKRRRRAATAKANKRARKDPSDPPPAAGKRSSVYRGVTRHRWTGRFEAHLWDKHCLAALHNKKKGRQGAYDGEEAAARAYDLAALKYWGPEALLNFPVEDYSSEMPEMEAASREEYLASLRRRSSGFSRGVSKYRGVARHHHNGRWEARIGRVLGNKYLYLGTFDKSSVSADTQEEAAKAYDLAAIEYRGANAVTNFDISCYLDHPLFLAQLQQEQPQVVPALDQEPQADQREPETTAQEPVSSQAKTPADDNAEPDDIAEPLITVDNSVEESLWSPCMDYELDTMSRSNFGSSINLSEWFTDADFDSDLGCLFDGRSAVDGGSKGGVGVADFSLFEAGDGQLKDVLSDMEEGIQPPTIISVCN

SEQ ID NO: 46433 - protein, 325 aa, Zea mays
  Coding DNA Sequence Number=SeqID_3058
  Gene Ontology: Mol. function=two-component response regulator activity; Biological process=two-component signal transduction system (phosphorelay)
  Homolog annotation: Hit_ID=Q7FS86; Match level="QueryCoverage=22%, HitCoverage=83%, E-value=4e-18, Identity=73%"; Hit description =Putative response regulator
MEIAAPAQAERTPCPMTERIQLMLVIAVPPEETAAGAGSELVEVEVEEYFDRTVAGAVAVETAMAVEVVGMSLELELASYQCGNLVVLQRIPQKMIHHLWKQLAQQQKMREWRSAPAQSPGLCITIGSPDHPPTRAHDPTHALAVIQSHAATIKTPPRRQGLGFSGGGGSLGRASAGDPGGQQRCRPEAGDRRRRSTRNERQRRSRGGRASGDGVLEADGRRQRTLGPMATAFVPSVSAMATADVAPASEAPSPAPKANNSRKAVVLGMTGYELLKRVKESVALRDILVVIMSSENVPTCIIPLPGGIRPAPRRNLGPIRRYEIN

SEQ ID NO: 46434 - protein, 35 aa, Zea mays
  Coding DNA Sequence Number=SeqID_3059
MAAAAAFVVVVVQLQASSGVSFALQSPFRDELLAV

SEQ ID NO: 46435 - protein, 424 aa, Zea mays
  Coding DNA Sequence Number=SeqID_3060
  Homolog annotation: Hit_ID=Q6J9V9; Match level="QueryCoverage=25%, HitCoverage=46%, E-value=1e-40, Identity=65%"; Hit description =Putative uncharacterized protein
  Subcellular localization annotation: CTP_CleavageSite=32; ConfidenceScore=5.64e-01
MMTASKKGSGKGTFRRSPSQQKKRAPSPLLIRGSKAGPSKGFDSCPRTRRVRDDPGYVRYMAKARATLPRYPKTFSRPAGTICNGIPPKGGTKPSDPIEWVRVQQITCRDHLTPYPDTRASVGKPRAQQGAPPRPTLGLGLSLGLERRSPPRSTPGLGLPNPAHRRGRSSPLAPVTSFPSAHLRPTPRSRPRTLTHRPHSSVPTPSPSLATAPPGKLAPPVSRPVVLAAYGFTAVTSGHRPPPRPVPSPIPLPHRKVWHRPVLAAAPTSMHGTAHRAVSSSPLCGINSSVVHLTGVRRAPPLPFPRAPIKGSPRALPCPAPTSATPLPPRLSSVTKAPPSSSPLVSLPPLLPSPLVVQREIRKAYQLRHTDVNLGHHSPTLISAQTSSSTTPTMELRHLPAVSPLPAPSSQIEPAPKFASPSSC

SEQ ID NO: 46436 - protein, 67 aa, Zea mays
  Coding DNA Sequence Number=SeqID_3061
  Subcellular localization annotation: CTP_CleavageSite=53; ConfidenceScore=5.18e-01
MAQGHISLSEVASETDCTVISGTRLTPSKSFASVLASSVRLGLACCGETTPVVVSADPYLARELSAF

SEQ ID NO: 46437 - protein, 107 aa, Zea mays
  Coding DNA Sequence Number=SeqID_3062
MPVTTCEKLHRHLRQYRAFSTENQCRDSRRPCAWPNGANRAHRSRVSQPREKARRTGGTFGRRSRRRFTSAIMTASKKGPGKGILRKGSFSVKEAGPEPPTDKRFEG

SEQ ID NO: 46438 - protein, 177 aa, Zea mays
  Coding DNA Sequence Number=SeqID_3063
MGGAEPGSFAEKDPSRATGVPVARRVGLGPRLACQKLEKRVHLARLHAACMAARPFCPLVWAEMGGSPGRALERVGEDSARGAWGRTGNRLSRLLGPDSWRSPWTSASPEAGSGFAVDVVDAEGATAPLGVKTRACRIRSSCSVCFLRPPRPEEHALAALAKLRPFFLLFRASGLCR

SEQ ID NO: 46439 - protein, 373 aa, Zea mays
  Coding DNA Sequence Number=SeqID_3064
MGSTRVAFVLLLLEERNLTEVGTLQPSLGFKDFHQTARLHYLTNDHTGCGGQAEPEFYLPHGPAGHLFLQHSGERALTGLAEGRTLTMRGRSAASVVSSNMPGSLAQLAQLALALLPVPPPTAGAELGVTRGQTSGSLALTACPRPSCGDMGKGLSTAVFALRSLLLLFSRLRRRSLALLLQRSPASHPEFVVPQALRCGGCSYPQEWNRSSVCNGTLSAGSALPLKASLAQLRNPRLLCDEPEPEAAVSAWTEAELARKGASSAQEQVASQAEEVQQRRLEPGRVIRERDQLRSHAAEAMSQADVLGGQLAEATERDPGGVTSARAGTLEETLAAMAQARITYPSESYLSRKVMSEKTRYYGLENILRVKAT

SEQ ID NO: 46440 - protein, 139 aa, Zea mays
  Coding DNA Sequence Number=SeqID_3065
MGKNNKRKREPTPPSEEFGDSEYSEEEFSSEPEGSPAPVSPPASSDDSDDSQGIAAEVWTYIRAVERAGLEGSDESECSSDEEDSDGGDEGEDDDDDDDDDDDDDDDGWGGGDGSRDSTKGSGRDSTKGGGGGRGRASG

SEQ ID NO: 46441 - protein, 45 aa, Zea mays
  Coding DNA Sequence Number=SeqID_3066
MKHYSLEDNEPWTKVNENMITKLYLCLGKDWFSNDAIAITGIREQ

SEQ ID NO: 46442 - protein, 228 aa, Zea mays
  Coding DNA Sequence Number=SeqID_3067
  Gene Ontology: Mol. function=transposase activity; Biological process= transposition, DNA-mediated
  Homolog annotation: Hit_ID=Q69J12; Match level="QueryCoverage=25%, HitCoverage=25%, E-value=3e-15, Identity=64%"; Hit description =Putative uncharacterized protein B1054C11.15
MAFCRAEATFSEVEEKRLGWAAWILNCTMASFDEAVMRESLERWVWESDFRYMGYLSSAGSTRLVIESLPLQGYVVSFVTCVVLSCSGSFTGNVSSDDEHSVCRSMGVQPATGTDGHAACRMAWPPPIVLVPVRVGEDQPPLPRTASVQLMALMCPLQFHLTKLLLLETGRELSIKKCISIIGTMEVTKEEKAKAYNVFKDLDNRQIFLSACDDDAESALIWLRNEMA

SEQ ID NO: 46443 - protein, 29 aa, Zea mays
  Coding DNA Sequence Number=SeqID_3068
MEMRVANGISVASDVDLETYFHKNSSKKE

SEQ ID NO: 46444 - protein, 202 aa, Zea mays
  Coding DNA Sequence Number=SeqID_3069
MMVTRSAIAEREGWRREGPGGRFSFPWLDLSGCKKPKRETRSGVKNRHRTLSGVYKDQGEDGSNVPPGPDAGFKKREAKQPFLERLAHETVAPPTTRPVALTPRLDRRRFWQEQLATLRLRQNNRAKKGTGKGDTPKGILPREGTRLRASLLIRGSKAGPPKGSTAASDRVGPTPTTGQRFEGWPPERFHGRLRLLGLRAHY

SEQ ID NO: 46445 - protein, 18 aa, Zea mays
  Coding DNA Sequence Number=SeqID_3070
MGIFGLRIMNMKHGQDEA

SEQ ID NO: 46446 - protein, 95 aa, Zea mays
  Coding DNA Sequence Number=SeqID_3071
MPPWIGRSTRRRRARPPAHVDRAIPAVSSDEPYLDVIARPSPSRPHPSPDLPRRREYILVPEQGAAQEVAPDPAPEPAPEDLPATTFEGKPRFYA

SEQ ID NO: 46447 - protein, 99 aa, Zea mays
  Coding DNA Sequence Number=SeqID_3072
MAATFTLATAKGKDAPTCGTRSPVHGTREILGYRPGGIPWKVVSAVRDSRQQRKTDPRRSVGARVGDGPDAWGPRAARTRDPRAREPDPWGPLVSAGCS

SEQ ID NO: 46448 - protein, 178 aa, Zea mays
  Coding DNA Sequence Number=SeqID_3073
MTTAALSSLTEAGGRQQGPNRSDSCPSARLRCSIDSHDTTSAGCQDLSGCHLGMAFLEKVGPAGMRAGAGALLGPLASLTRVDACNPLLQAHPTWARDEHEGCGISTSLTTRLRPPRSPPFALAHALNPSGLGHAAHSLVGLGTPRSRNADNTGHVRCSKEERPQELASLGFSLRLLR

SEQ ID NO: 46449 - protein, 104 aa, Zea mays
  Coding DNA Sequence Number=SeqID_3074
MAVMGSTSKKMYLCQVPKTLYLATYLIMGKLEPGYSIHEKTIAHWEWRDGESGTYPPGKGPPKRGDPQLGINLFGSPNFSDMKTGSSTLIVDNKQNKGWILKES

SEQ ID NO: 46450 - protein, 91 aa, Zea mays
  Coding DNA Sequence Number=SeqID_3075
  Gene Ontology: Mol. function=nucleic acid binding
  Homolog annotation: Hit_ID=Q7EZ58; Match level="QueryCoverage=59%, HitCoverage=26%, E-value=4e-15, Identity=70%"; Hit description=RNA Binding Protein-like
MESSVVGAIQRGELREVPDCSRHSAVETEVEGNVPVGGYAIASVKIIRNKQTGHSEGYGFIEFSSRAAAEHTLVNFNGQMMPNVEMTFKLN

SEQ ID NO: 46451 - protein, 62 aa, Zea mays
  Coding DNA Sequence Number=SeqID_3076
MASGAKAWLMSRHRISASRISGILGLFAHEERHDNGWERWADQLGEGAAVLVLPHERVLEET

SEQ ID NO: 46452 - protein, 47 aa, Zea mays
  Coding DNA Sequence Number=SeqID_3077
MANIASSVPKHLSRTSLTVRRSMILNSRDMPNTEFVKEMDYAPTFFK

SEQ ID NO: 46453 - protein, 1211 aa, Zea mays
  Coding DNA Sequence Number=SeqID_3078
  Gene Ontology: Mol. function=nucleoside-triphosphatase activity; Cellular component=nucleus; Biological process=proteolysis
  Homolog annotation: Hit_ID=Q8H6B2; Match level="QueryCoverage=99%, HitCoverage=98%, E-value=0.0, Identity=84%"; Hit description =Bromodomain protein 103
  Pfam annotation: Domain name=AAA; Domain location=427-617; Score =273.4; E_value=4.5e-79; Accession=PF00004.20; Description=ATPase family associated with various cellular activities (AAA)
  Pfam annotation: Domain name=AAA_2; Domain location=423-557; Score= -44.0; E_value=0.025; Accession=PF07724.5; Description=ATPase family associated with various
  Pfam annotation: Domain name=AAA_5; Domain location=427-563; Score =9.5; E_value=0.00055; Accession=PF07728.5; Description=ATPase family associated with various
  Pfam annotation: Domain name=Bromodomain; Domain location=903-990; Score=78.4; E_value=2.4e-20; Accession=PF00439.16; Description =Bromodomain
  Pfam module annotation: Pfam domain module=AAA::AAA_2::AAA _5::Bromodomain; Domain location=427-617::423-557::427-563::903-990
MEGKGDASVTPVRTSDRLRQRPKYYARGYMYYNPAMRKKVKSKKRTAASQIAKKLLRKPAARPPPADVGQPAGRSRGPTRHLIANRATIRTPNRSWSTSANLRRSTRKRRISVNLEGYDTDSSSMEDDDLMRPRYRSSKSKGGNNAAHNEVSARPKRQKLSNSIPRREGLRPRRSLRGQRLHPYHESEDDQESSDEQGAEDQRENGNEIEEDVGDEEEVDGGDEAEGDGDDEDGEEEQEGRRRYDLRERSEVRRPSPRKEGKHRPQSPRRVLVHGIGPKNSKYLKKGGSRMHKRPRFSLPDDSDDSLLVDEPDEGPSMPWMRSGRGSMPWLMGGLDMHSPAAWGLSVGASGWGHQGDTSTSLMPGVQTAGPSSKGGADIQPLQVDENVSFKDIGGLSEYIDALKEMVFFPLLYPDFFANYHITPPRGVLLCGPPGTGKTLIARALACAASKAGQKVSFYMRKGADVLSKWVGEAERQLKLLFEEAQKNQPSIIFFDEIDGLAPVRSSKQEQIHNSIVSTLLALMDGLDSRGQVVLIGATNRIDAIDGALRRPGRFDREFYFPLPGYEARAEILDIHTRKWKDPPPKELKMELAASCVGYCGADLKALCTEAAIRAFREKYPQVYTSDDKFVIDVDSVSVEKYHFLEAMSTITPAAHRGSIVHSRPLSTVIAPCLKSHLEKIMEHISDIFPFLSSIDFSKFSALSYGSSIPLVYRPRLLICGGESVGLDHVGPAVLHELEKFSVHSLGLPSLLSDPSAKTPEEALVHIFGEAKRTTPSILYIPQFHLWWDTAHEQLRAVLLTLLNELPSNLPVLLLGTSSVVFTDLEEEYQVDQPSFDDRLRYFSILFESLLSFQMEESRNKSKKQKSAIDLPKAPKEVEGPKVSELKARAEAEQHAVRRMRMCLRDICNRILYNKRFNVFHFPVLEDEVPDYRSIIHKPMDMATVLQRVDSGQYLTRAAFIKDIDLIVSNAKTYNGDDYNGSRIVSRACELRDVIIVVVSNEPLFGQVQGMLSQMDPSLVSFCDKIASQGGPLQAVDDEDRAILQAAPVAQLVSGTRISARLRNVQPEVNLSQSYEVLRRQKKSAENEQSMTRDEKSPEDVDLSKPTDAEEAAKEPESNGTTKEANDSPAKEPEVSTSPEPMESDNGKIAAATGDDLLEQLEALKQRFMELTASYGVPQLERLYSKIMKGAIELTSKESNEDHRRYNTREY

SEQ ID NO: 46454 - protein, 278 aa, Zea mays
  Coding DNA Sequence Number=SeqID_3079
  Homolog annotation: Hit_ID=A2YGC2; Match level="QueryCoverage=56%, HitCoverage=73%, E-value=2e-07, Identity=28%"; Hit description =Putative uncharacterized protein
MRLLVLVMLMVLEIESVRSYSPVLPLEAPPAPPLGIPASGVAAGGDPDDGGGDDSSSHDTDFSADQEPEGWVARPITRDAARGCHFHDSLDTLLRRALNRRTWSIEYRCVVYQHSRGVYSDRWEATCLVHRPENSLQGAKACSEHYSISERDAARRALSYYCSVLGGVADGLDLKYYPRRPSGSTGGVIVSPVGEDNPRLSSTVNLAAVLNTELDHALDELSRARAEITQLRAERMERRHLDGGSPAFVGTQHPYRSPRRGHQPYGNPDCKTKIDLEP

SEQ ID NO: 46455 - protein, 202 aa, Zea mays
  Coding DNA Sequence Number=SeqID_3080
MGGRTQAPWPRQGRAAAGRARRAKPGRNGAVAGAGDAGDAPGATPAPAAREGEGRDEGGEGDGAYRGTGSSERTRRRRFRTTRTMGREERNVMGERDEQGTTARLTGGPHAQRRRRLGNCPARAQAEGAGEPLGGWAARQPNGPRRGGVFRGPGGEESGWATGTEPAQNEREEGGKEARLGRAQEKRPKREEKGFFYLFFLF

SEQ ID NO: 46456 - protein, 169 aa, Zea mays
  Coding DNA Sequence Number=SeqID_3081
  Subcellular localization annotation: CTP_CleavageSite=54; ConfidenceScore=5.50e-01
MCDVGLATSWLSTVPVPVAKLAAVVTTVVSCRLLVADGAALGTTLSMSSRPGLGASTRLARVIPQVQRTCPSPIPYLSAGPWSPVVSSFSWFLGHLCGSVCRPELVSLASKSALFSSSSATPLSGDHSNHPSTSLWPEYLEKFVTQVLGRGSEAQYFVNLGRKHVLVVD

SEQ ID NO: 46457 - protein, 169 aa, Zea mays
  Coding DNA Sequence Number=SeqID_3082
  Homolog annotation: Hit_ID=A2XNX6; Match level="QueryCoverage=72%, HitCoverage=42%, E-value=2e-38, Identity=66%"; Hit description =Putative uncharacterized protein
MPWIHHLLLLSPSLHRLPRRTLHRAPSPAVDLAHTPAISNSFLGRQLPEAELLGADIFLVSFSIHAPNAEEDGSKVQAFLVEMESAIRDHPLWANTTDQEIDHTLEGLEKYVMTKLFDRTFGTSTEDAVSDMDISEKIGLLQLFVKPHHLDIPKVVHNEASWLAILISQ

SEQ ID NO: 46458 - protein, 438 aa, Zea mays
  Coding DNA Sequence Number=SeqID_3083
  Gene Ontology: Mol. function=nucleotide binding; Cellular component =intrinsic to membrane; Biological process=defense response
  Homolog annotation: Hit_ID=A3BXI7; Match level="QueryCoverage=47%, HitCoverage=18%, E-value=9e-59, Identity=56%"; Hit description =Putative uncharacterized protein
  Pfam annotation: Domain name=NACHT; Domain location=73-235; Score= -26.6; E_value=0.007; Accession=PF05729.3; Description=NACHT domain
  Pfam annotation: Domain name=NB-ARC; Domain location=35-313; Score= -24.4; E_value=1e-08; Accession=PF00931.13; Description=NB-ARC domain
  Pfam module annotation: Pfam domain module=NACHT::NB-ARC; Domain location=73-235::35-313
MNLKGLSVFLISRTFLFPLSCLSINSVELQRYPFPDVERFDNEAFDRAAVVGRDNDKAKIKDMILQSNAQKFSIIPILGLVGLGKTTLARLIFLDQGEGWDFDLRIWISLNRKLNIKMIASDIISQCNHREEKLLDVRTDMEIQENFQLLKRCLQEALHEKHCLIVLDDLSSTDKNQLDELKEMLKGTNESIKVLVTTSSEITAELLHTIPPYKLCPLSEDDSWKIFSQKAFGNCDGDNTDLKKIGKEIVKSGWFPHHSACSTTAASALASADPLFTVRGDDLCHIRSTSTDAPRSYHVPLAGGCGFTPWLGRLHSTISMPRWPQPTVPRRAPDSPPSFGPPCPAVHDARRRLFLLSSMSNCPTPLHLPSLFKLRNAQWTVLQTASAMGSTGQQSKAADGKMIDDVNLDYIRWVALEQVLSFLMTSMTQEVMGQLAIY

SEQ ID NO: 46459 - protein, 148 aa, Zea mays
  Coding DNA Sequence Number=SeqID_3084
MVSPVSCKRVIRVDVRAPFVGGRLGAQRHAQKYLRVICRTRSPGDGVRGLDASLRWCNTPAIPNPVQPSEKTVHVSVKLPERGIRLCFTGEADPRSPDFNRPPATVDREYILVPEQGAAQEVAPDPAPEPAPEDLPATALEGKPRFYA

SEQ ID NO: 46460 - protein, 126 aa, Zea mays
  Coding DNA Sequence Number=SeqID_3085
  Subcellular localization annotation: CTP_CleavageSite=17; ConfidenceScore=5.32e-01
MVNAAQKWAASNGGGRRAGTAVTSSARLASHPGAGPGKGDTPKRILLREGNRLRASLLIIGSKAGPSVGFNSRLRARGLHTHYWSEVRRPVPRKGSTAASGHSGSAPTTDQGFEGWPSKGSQPPQT

SEQ ID NO: 46461 - protein, 252 aa, Zea mays
  Coding DNA Sequence Number=SeqID_3086
  Homolog annotation: Hit_ID=Q7XBD3; Match level="QueryCoverage=13%, HitCoverage=6%, E-value=8e-08, Identity=82%"; Hit description=Zeon1 gag protein
MDEYIWADNDFCQRREEAYRFSEMTRGFEGRIHPSMSDQSTDPVRVMTKEASFRGHNIAHSLQGSSKVPSGHQLQEAEAAGASEEDMGISPGKSIAYYMVKTRATLQEHARLPFRSKKRLPKQKPDRTSRSRFYILLRATLLTYQNMWAINLQLLLLRQAIHKISGPSFHCHLHCHLFIPKANSQMGASTPNSNATSGRSLKLVQSTTLYQNRSTYIEEYPTFENLYRRNTRRRGSKVVPKGMQNLYHRNRR

SEQ ID NO: 46462 - protein, 213 aa, Zea mays
  Coding DNA Sequence Number=SeqID_3087
MPPRMRKTARKSTRPIGVPQHQLAPRHEESSSGSNDPIGDLEAQVEQLPTELHHRNRVWVEDGQCINELRADIRHLQDELFERDLAIDWAVNSCSIAWDREAKARARVEELSMAIDNLQMPSRTRAHDGAGTSRGQEDTPNPPPVPPTLAEVIAALVTATANNTRFLREMAGNQFQQQGGRAYPQGPRETSYLDFSETRPPLFVKVEDPLEAD

SEQ ID NO: 46463 - protein, 73 aa, Zea mays
  Coding DNA Sequence Number=SeqID_3088
MPEIDLPKQQELQGGYPHTLGYKASGTKHPWHLYPLELEAEDNSAAAPKPGKPGRNIAASAAGFPCHQSEWNE

SEQ ID NO: 46464 - protein, 225 aa, Zea mays
  Coding DNA Sequence Number=SeqID_3089
MSICFADCPSPGPRKNDLTIYWALGPFVRSFTLLVDPGDICPPQAPDLWVDFEVISPKIPGPACRYSLHALHGCDSFEKYTDNSWASPQWVWARDGLSTQRRSSPLSLRGLRLPSPLRESSDDSDDSQGLAAEVWTYIRAVERSGLEDSDESEYSSDEEDSSEEDGGGDGDGEDDDDDDDDDEGGGGGDGDGDGNGGGRGGSSDSKGDDDGSRGGSGGGGSRASG

SEQ ID NO: 46465 - protein, 79 aa, Zea mays
  Coding DNA Sequence Number=SeqID_3090
MSDQSIAPVRMMTKEASFRGHNTPHSLRDSSKAPSGHQLQGAEAAGALVEDMGINPRKFIVYSVVKTRATLQECAKSLF

SEQ ID NO: 46466 - protein, 238 aa, Zea mays
  Coding DNA Sequence Number=SeqID_3091
MWIRKKGNVFRQIRSLFKRLCDEGYSPSSPWEWDDQGLPGLGEGLRWKTLWPLGHPTAQRWKGSHICCEVVRFAWESARSRNTSGRSIPRVEWRNALWQSTWEKAETIQTILLSKSLLSDTAFQILARMLPERPSDNYARTTTSNKNTPTWRKRLQALSGGDPIEDDPTIVYMAGYLHTLDNQYDDLTLHCTHLTSRVESLEQKVRELLREKASLQESLAIAEGEETNTREAYRTLKI

SEQ ID NO: 46467 - protein, 264 aa, Zea mays
  Coding DNA Sequence Number=SeqID_3092
MQPDCSPPPAVTQDDDRQPCGGEERTGLWPPPALSFKDVHHLCWGGGRAESVSCPPHGLATRFFLQHLGEKSVHQPYGGGELPPAAWSRCGCPSTARAMVAPCAGQPRPRPFPRRQPHRGVAQHVVRRRGGVRVLGWSCPPSRSEDGSEDLLVHAGATAIRRCGVGARVAAVVGAEVVVTIVVVGEPLGVCYLAAPLVWRGGSPLSRPEETARAGTLAEGLAVAVGSGRSAQAMASQQRAWAEGLETALNESVKNYKALSQAAE

SEQ ID NO: 46468 - protein, 115 aa, Zea mays
  Coding DNA Sequence Number=SeqID_3093
  Homolog annotation: Hit_ID=Q6QP51; Match level="QueryCoverage=33%, HitCoverage=17%, E-value=9e-11, Identity=79%"; Hit description =Putative growth-regulating factor 1
MEAQAHASCNRRAECFVHATAPPLAPLPCLLDCGTNTATRGTGKGGYPEKDPSPRRNQAPSPPTDQRFEGWPLGRVRQPPQIAWALHPLLVRGSKAGPSEGFHGRLRLLGLRAHY

SEQ ID NO: 46469 - protein, 129 aa, Zea mays
  Coding DNA Sequence Number=SeqID_3094
MWKDRVEHAKDIWALYPGQTTHLTVRRGEVMSHLMALLEATKITLDNREEVVVDLSTEMVENDLQVKQMSNEIQELEELVGTKENTIDVLEDQLINTQQQLAEANQHLDMHHQEIQDMEANEDVDIEGG

SEQ ID NO: 46470 - protein, 53 aa, Zea mays
  Coding DNA Sequence Number=SeqID_3095
MGLGVCSSLCQGRDEDDGFGYDYGTGCPRCNHCSGEDEVVEEDFQEFQEYDEF

SEQ ID NO: 46471 - protein, 317 aa, Zea mays
  Coding DNA Sequence Number=SeqID_3096
MWIGKKGNVFLQIKSLFEKLCDEGYSPSSPWEWDDQGLPGLGEGLRWKTLWPLGHPTAQRWKGSHICCEAVRSAWESTRSRNTSGRSISRAEWTNALWQSTWEKAETIRTIILSNSLLLDTAFQILARMLPEQPSDNYARTTTSNKNTPTWRKRLQALSVGDPIEDDPTIVYMAGYLHTLDNQYDDLTLHCTHLTSRVESLEQKVRELSREKASLQESLAIAEGEETNTREAYRTLKMDYDKKLKKLAPARKIRKKTKSQGCQIEQKEEAPPTLRPAGLRNSSDTEEMSLASLDDLLKEFGDTLEKELGSTLDSTRV

SEQ ID NO: 46472 - protein, 175 aa, Zea mays
  Coding DNA Sequence Number=SeqID_3097
  Gene Ontology: Mol. function=nucleic acid binding; Cellular component= intracellular; Biological process=regulation of transcription, DNA -dependent
  Homolog annotation: Hit_ID=Q4U4A6; Match level="QueryCoverage=100%, HitCoverage=100%, E-value=2e-70, Identity=76%"; Hit description =Ramosa 1
  Pfam annotation: Domain name=zf-C2H2; Domain location=46-68; Score =23.7; E_value=0.0007; Accession=PF00096.17; Description=Zinc finger, C2H2 type
  Subcellular localization annotation: CTP_CleavageSite=38; ConfidenceScore=5.15e-01
MEGEDDGAQMKLQQQQQSPCSDNLSLSAASSWLPPQVRSSSSSSSYTCGYCKKEFRSAQGLGGHMNIHRLDRARLIHQQYTSHRIAAPHPNPNPSCTSVLDLELSLSSLLAHGAASSDGGLSVPVAKLAGNRFSSASLPTTKDVEGKNLELRIGACSHGDGAEERLDLQLRLGYY

SEQ ID NO: 46473 - protein, 71 aa, Zea mays
  Coding DNA Sequence Number=SeqID_3098
MGLSVCGSLCQAKGAPLIRDTLIRDGWFIGGDEDDGFGYDYGNGCPRCNHYSGEDEVVEEDFQEFQEYDEF

SEQ ID NO: 46474 - protein, 255 aa, Zea mays
  Coding DNA Sequence Number=SeqID_3099
MGEGPAEQQKTDGRLAVVRSASNDNDFCSGGPNSSSDDLRADAAARRPPPVPKLVRQGRAEGCRVGGDSPYLRPWPSWAESSPTRSKVLPLRRGGWVPHVMQVGPEQKKPNRRARCVQPPSGYKRLSTFAQTSGRKGGQPCRRHATTPSGHASPTPNTPGMEAQTHASCNRRAECFVHATAPPPAPPPRLLDCGTNTATRGDPAHDPAAPAWRDGQCGRKRAGSNGGGRQAGAAVTSSAKLTSHPGAAREPSLTA

SEQ ID NO: 46475 - protein, 339 aa, Zea mays
  Coding DNA Sequence Number=SeqID_3100
  Subcellular localization annotation: CTP_CleavageSite=30; ConfidenceScore=5.05e-01
MEECFPAASPHQWSPKTVTISSMVGRSKPGCGLRPALSFKDLHRPCWGRGRGEPGPGFTWAGVPLLPPASGGGNHSPALRRRRLPAMPGKANCCCPASVQHSALCLGDGGQPHQGVSQHVVHREGGTRVLGRSHSRFRGEDGSEDLPVHFGAAGARWCGVGGQVDAAVGAEVVAAGESFSVDETVSATRGPTSGSLALISGSRPSSGDANESLPAVASALGPSLLMQRSLASHPEFVVSQALRCGGCSYPREWNRGSVCNGILSAGLRNPRLLCDEPEPEAVVSAWTEAELAREETSSAQEQADVLRGQLAEATERLVKLSARAEFLEETLAAMAQALC

SEQ ID NO: 46476 - protein, 133 aa, Zea mays
  Coding DNA Sequence Number=SeqID_3101
  Homolog annotation: Hit_ID=Q7XBD4; Match level="QueryCoverage=90%, HitCoverage=20%, E-value=1e-09, Identity=32%"; Hit description =Cinful1 polyprotein
MVPPEILSPLAEAELPKVTKAPATTPKRRIMASVLDAVMEMTRAPAPPVKKVAETVTTRAKTEAGPSVPAEAEPVATEHKAEQDFPDTSMALEKDLEAGLSAMSKDDLADSLAYNSLKGLILSNARPEGAKEC

SEQ ID NO: 46477 - protein, 54 aa, Zea mays
  Coding DNA Sequence Number=SeqID_3102
MESHDLRAEREPRLVEMFELQVAMRLMVLGSDSGNGEDEAVGGDFQEFQDYDEF

SEQ ID NO: 46478 - protein, 302 aa, Zea mays
  Coding DNA Sequence Number=SeqID_3103
MESHDLRVERESQLEGKVHNLYRVAMRLMVLGSDSGNALCDDFQLCNCCVRELLILAHTWFAFGLPSKNRQETESVRSCSPVLPLEAPPAPPLSAPAAGVAAGGDPDDGGGDSSSSHDTDFSADQEPEGWVARPITRDAARGCHFHDALDTLLCRALDRQHYSISERDSPEAAMQDVAQHALSHYCSVLGRVADGLNLKYYPRRPSGSTGGVIVSPIGEDNPRLSSTVNLAAVLNTELDHALDELSRASAEIAQLRAEHAERRHLDDGSPAPIGTQHPNRSPRRGHQSYGNPECKTKINLEP

SEQ ID NO: 46479 - protein, 89 aa, Zea mays
  Coding DNA Sequence Number=SeqID_3104
MGRTMLGEYKTPERFWNNKIKINHLPQHWCIPQIKMRNRYLKIQTWIKGEHMKKKIKRKKHNKHLKLKSGQPFKETIQWIKFWVTSAKE

SEQ ID NO: 46480 - protein, 169 aa, Zea mays
  Coding DNA Sequence Number=SeqID_3105
  Homolog annotation: Hit_ID=Q6QP51; Match level="QueryCoverage=71%, HitCoverage=48%, E-value=2e-11, Identity=41%"; Hit description =Putative growth-regulating factor 1
  Subcellular localization annotation: CTP_CleavageSite=60; ConfidenceScore=5.62e-01
MAQGHISLSRVRQPPQSTRAPRPPLLRGSKAGPRMGSIAASSHSGSAPTTDQGFVGWPPKGSTAASEHAERGMTLGTSGTWPRLGLRSRGTLGHFRDQQKRFCNRIPSEGGIEPSDPIKRDRVRQITCSRQGRSNRNHFAAPLTDLTGKQRRLPCSDCCATRQSEADSS

SEQ ID NO: 46481 - protein, 66 aa, Zea mays
  Coding DNA Sequence Number=SeqID_3106
  Gene Ontology: Mol. function=oxidoreductase activity
  Homolog annotation: Hit_ID=A2T1W7; Match level="QueryCoverage=62%, HitCoverage=13%, E-value=1e-10, Identity=75%"; Hit description =Aldose reductase
MRLNKNVGLALEKLFEDGVVKREDLFVTSKLWPGNHAPEDVQEDLCSALEDLRLDYVDLYLVNSCS

SEQ ID NO: 46482 - protein, 166 aa, Zea mays
  Coding DNA Sequence Number=SeqID_3107
MGAGWRSRTTSGDRGGDRRGRDTGAEGEAGMRESRAGGVGTRGMPRCRFRGGGGRAALSAKGYQCCLRYVYGWKQGNSAAYPAPTAVPLDRVRLTAAKSSLGRHRKLRLARLQGSDSASTSEDGLRLARPQGSDSASTSKDGLRLARPQGSDSTSTSDDGLRLARP

SEQ ID NO: 46483 - protein, 152 aa, Zea mays
  Coding DNA Sequence Number=SeqID_3108
  Gene Ontology: Mol. function=zinc ion binding; Cellular component =intracellular; Biological process=biological_process
  Homolog annotation: Hit_ID=Q6K653; Match level="QueryCoverage=80%, HitCoverage=29%, E-value=1e-62, Identity=95%"; Hit description =Ubiquitin-associated (UBA)/TS-N domain-containing protein-like
  Pfam annotation: Domain name=PUB; Domain location=55-140; Score =123.8; E_value=5e-34; Accession=PF09409.1; Description=PUB domain
MNVCELTLAVSHTPQVKTSNSLWYMNLQSALPVRPATKAERMRDCLRNLKQQNKDDDAKVKRAFQTLLTYIGNVAKNPDEEKFRKIRLTNATFQERVGNLHGGIEFLELCGFEKLEGDEFLFLAREKVDSAILNTAGAELNSAITNPFFGVL

SEQ ID NO: 46484 - protein, 215 aa, Zea mays
  Coding DNA Sequence Number=SeqID_3109
MLEVVVLAGQATVMDGWTANSAGLVNGWIIEVVKRRLLNLRCRGSGRRCILQKEVKRHRCKQSGRKWKHLLIKDHMAGYNHHQVEMSRQRITEAAKHAKLRIIWYSAMEELVQELVADRRRGPPVEQCEAYARLCHYVERFRDKMQDTATPQESRRGMVNKFRAIVSLKAFRYTTKLSLSIGNEIIKMSIDFGFLAQWERPAIMSKIIKHDQVGT

SEQ ID NO: 46485 - protein, 142 aa, Zea mays
  Coding DNA Sequence Number=SeqID_3110
MWRRSRDRRRAYLRESWRPELCPRCGAESRRRSGSGEQFAGVDRPPTRCRCRGNSRRVEAKLPDHTRKPEREHKGESLAAWSTGCGFASVRGTRKAEPVFIGGCCADGGGDFVAADLGKGTSPTGRAHGPEKGSEEQTRWRG

SEQ ID NO: 46486 - protein, 183 aa, Zea mays
  Coding DNA Sequence Number=SeqID_3111
MAAASALRSSLLLFGPPGAEVVVVAAAGAGDDESFVDLPLLLKGTPRLLFDEPKPGVAVSARTEAELARKEDLVGRSLAGSSVSGTDAGVDLSRPRAGLMSSGDSWPRPRGDQPSRLLEPDSWRRPWRRWPGRDDDVVLQSGDPRTASPSEARSDLAKGVVDVEGAVAPFSRQDSSLQDRIIL

SEQ ID NO: 46487 - protein, 180 aa, Zea mays
  Coding DNA Sequence Number=SeqID_3112
  Homolog annotation: Hit_ID=Q6QP51; Match level="QueryCoverage=24%, HitCoverage=20%, E-value=3e-07, Identity=68%"; Hit description =Putative growth-regulating factor 1
MQAACNRAKWAHLSDFQHAHASCNRRAGRYVQATAPPLAPLPRLLDCGTSTATRGDPAHDPAAPAWRDGQYGQKWAGSNGGGRRAGAAVTSSAKLTSHPGAGPGKGDTPKRTLLREGNRLRASLLIRGSKVGPSEGSTAALERVGSTPTTGQRFEGRPLGRVQRLPQATRAPRPLLIRGS

SEQ ID NO: 46488 - protein, 195 aa, Zea mays
  Coding DNA Sequence Number=SeqID_3113
MAPPVDVVGPRPRLGDVEAPPRSRSSLSSVAEVESEPQGRARRRPSAEARAKSEPWGRAKRSSSSSGAEPKSEPWVGRSGVRRLPGLSPSPSPGSGGADSRSGAGGAVLLSGRSVERRSDCGHFGSVDWRTRVRIKLCADGGYQLRIRSLEVGAREHTRRGVAPEASEEWFDSSEVLMPRAMLRLVWSFPHASWP

SEQ ID NO: 46489 - protein, 305 aa, Zea mays
  Coding DNA Sequence Number=SeqID_3114
  Gene Ontology: Cellular component=exocyst; Biological process =exocytosis
  Homolog annotation: Hit_ID=A3A773; Match level="QueryCoverage=89%, HitCoverage=35%, E-value=3e-92, Identity=63%"; Hit description =Putative uncharacterized protein
MSSSVPPPPPQQELESPSAGGDKVLAAAQHIVKSLATSKNAADDMIRILSGFDNRLSSITNDHLFPSPDLTAASASEISAAAASFDAADQLIQLWDATPDALVFEAPEDDIAQYLAAVDVAIDHLARGGPGGARAGEELRHLMVRHAVPIDPTGLFFSLRRLSLESMDDLDACPDFDAATPHSLDATPAGPETARGASLGSNPFEDQVFDPVRPEAVEDLRAIAHRMARAGYARELADAYCGIRRDLLDEYLSVLGVERLSIDDVQRIEWKLLNDKMKKWVHGVKTVVRVLLAEGKGFRAGEGFG

SEQ ID NO: 46490 - protein, 320 aa, Zea mays
  Coding DNA Sequence Number=SeqID_3115
MDGGNHPRGGEPSFSQLLQGLQKGLEILLSLARGPVAPVTADGGHHSLRKRREPPIVLPEVKPPALPPLVRRYEDGRDVLLRPRLPQLEDAATGPHRHANSSLPRRRGKKLRGEEMGPQVPVGAIPKNPSQTAAKMAACAMELGLRLCSSTPDEAQHIPRRRGQGGSTRRGHPLRLRVTGERTKQTIGDKGLQIVRRDGGERPRVARRNNGYPVGHHQAEEVAAERTRRHLWQAKQATLHLRHNDRVKKGTEKGDTPKRILLREGSGPRAPLLIRGSKAGPSEGFDSRLRALGLRAHLLIRGSKAGPSEGLRAPRGGVNR

SEQ ID NO: 46491 - protein, 310 aa, Zea mays
  Coding DNA Sequence Number=SeqID_3116
  Gene Ontology: Mol. function=hydrolase activity; Cellular component =nucleus; Biological process=metabolic process
  Homolog annotation: Hit_ID=A2YL55; Match level="QueryCoverage=78%, HitCoverage=84%, E-value=4e-76, Identity=62%"; Hit description =Putative uncharacterized protein
  Pfam annotation: Domain name=Abhydrolase_3; Domain location=76-286; Score=138.8; E_value=1.6e-38; Accession=PF07859.4; Description =alphabeta hydrolase fold
MEPDVDEVVFDAPGYFRIYKNGRVDRFNEPVLVAAGVDDSSGVSSKDVVLDADTGLSVRLFLPNRHGPCGEKLPVLVYFHGGGFIIGSAKSAMYHNYLTALASAAGVLAVSVDYRLAPEHQLPAAYDDCWAALRWAASARDGWIAEHGDAGRVFVAGDSAGGNIVHNVLMKASSADKGAPRIEGAVLLHAFFGGSTAIDVEPERAVAITKKLWSFACRDAAGGADDPRINPTAPGAPALECLGFLFGRTPAGAPPRSQLCHRGMLMGGRQVCGRRSYDGWLGLDLSLPFRSIEAMPLDWDRAYEIPSLVF

SEQ ID NO: 46492 - protein, 138 aa, Zea mays
  Coding DNA Sequence Number=SeqID_3117
MKKKSKRDLEMKHKTAALKLTQRFLSKDLKWERQEMCVREREVFLGLEMEFKSFSLLWGERGAVEPPLTAPGDLFASLTGRVQIRGQRGQRPAELPLRTSSTGLDHHGTSVYKPSLGLHLRLVPRSPFLAIFTLSSHS

SEQ ID NO: 46493 - protein, 98 aa, Zea mays
  Coding DNA Sequence Number=SeqID_3118
MKSHVTTKLEAKLGINMSLVLGTRRAISLDHEIDFGDSEYSEEEFSSESEGDDDGDDDRGDGDDGDDDGDDGSRGGNGGSSRGSNSGGSSKGSNKASG

SEQ ID NO: 46494 - protein, 558 aa, Zea mays
  Coding DNA Sequence Number=SeqID_3119
MVATVVPKAKGGALSAGGEMPALTAVRDEAGAVSRRLKEMKEALSQAADFADRAASGALTAVVSAEVERLRTQHDDAVREKSAADSKCRKLADKVAVLEGEKTVLRRQLAEERKEANEALAKAQSAQAEANLARAEGSLAKQRAEQLEERLSALRARVERAEASTRAEAERTRKQLMDSYHELGARTADFEVLDREPGLRCLEWVQEELQALPTIVEGFMSYASLVTCEGAMNALSREGCRHYEVFDQADEDFERDIYKVEDPIVKESAGALYDRMWGPHGREVVRERAETARGQAARGERVDDFGALNSALPDPESNPAAAVSEAALEPPPETAEGALDAPAAAAAGGGPPPEAAEGVPDAPAAAAASGGPPPTAASRAEDPVTVAAEATAEAPATAGSSQVQDFGPVHATATANFLAASTVDDGNKSDESASKFSEFGDSGSSVEWTEESSDEDLDYFAALDVAAAEATPHAADAEAVPGPSAGRRRRRAVAKRRVSEADGGRLRVSRAGRQELLSLPATVSSSEGELRSLFAGEELRIMLFNYREMGIIPKVEPM

SEQ ID NO: 46495 - protein, 15 aa, Zea mays
  Coding DNA Sequence Number=SeqID_3120
MGTPDSSVGHQTGKG

SEQ ID NO: 46496 - protein, 216 aa, Zea mays
  Coding DNA Sequence Number=SeqID_3121
MAMPSSTPSAAAEERELEDKASDIALTKENLKEKDTSLDRRAVDLARREIDLAFQEKMLERWGMLLAEHKLEAEEKEQKLEERIRQFQAAQVAPGLQAVEATRKALEDLRAEHRAGVQRIAAWAGEASTTLVPLGMSPILVSELPMSISDALPVLDSTVDRLRCLDQILGARLEAEGGRLCRVVIEYILTCFRSHDPAISLEPVIAGPGTNTEDAA

SEQ ID NO: 46497 - protein, 319 aa, Zea mays
  Coding DNA Sequence Number=SeqID_3122
  Homolog annotation: Hit_ID=A2YGC2; Match level="QueryCoverage=49%, HitCoverage=71%, E-value=7e-09, Identity=26%"; Hit description =Putative uncharacterized protein
MIAGFGPRDNGQLAESEGVAGEDPEQQSVGEGKCPLTHLCPTHSYNSLPAFTQFIPKVVMRMMILVMTMVLQEIESVRSCSPVLPLEAPPAPPLSTPTARVAARGDPDDGGGDSSSSHSTDLSEEQELEGWVARPITRDAARGCHFHDALDTLLCQALDQRTWSIEYRCVVFQHSRGIYPDHWEATCLVRRPENSLQGAEICSEHYSISERDSAEVAMKDVARRALSHYYSVLGRVADGLNLKYYLRRPSGNTGGVVVSPVGEDNPRLSSTINLATVLNTELDHALDELSRARAEIAQLRAEHVEHRHLEDGSPAPVRT

SEQ ID NO: 46498 - protein, 58 aa, Zea mays
  Coding DNA Sequence Number=SeqID_3123
MAAALDKNRPLEVPPGEGGVVGALRHDGPHGSWCGTVGEGETVDNKLQILAGCDCEQC

SEQ ID NO: 46499 - protein, 224 aa, Zea mays
  Coding DNA Sequence Number=SeqID_3124
MAGAHLGTQDYDHMWKNLRSKSRICPGVSQLSDSPRCQEEVCAGLLQRFARLRPLATFEHWKKQTATCSTPSAAPEHARARARAAPKPSQCPAIPNPVQPSEKTVHVSVKLPERGIGLCFTGEAGPRSPDFNRPPATVDRGTPCTSLRFLARLDSLDLHEAPYALGLNYAAVDRPGAHAADELAPPAHVDRAIPAIPDDEPYLDVIARPSPSQPYPSPDLPRRR

SEQ ID NO: 46500 - protein, 400 aa, Zea mays
  Coding DNA Sequence Number=SeqID_3125
  Homolog annotation: Hit_ID=Q6QP51; Match level="QueryCoverage=36%, HitCoverage=92%, E-value=6e-14, Identity=35%"; Hit description =Putative growth-regulating factor 1
MQTACNCTKGMRPFDFDASSMAAQAHTSCNWCDSYYVRKTPPPLALMPRLLDCETSVATRGNPAHGPAVPTKRIGHGSVSRGRRRDGRYGLKWTDSNGGSRREEAAVKSSAGSRPLLGQQGSPLPRREDDAPVFRPSNGSHNCCPANHSSRRIDSTAGQAKRMTLHLRHNDRIKKGTGKGDTPKGILLCEGSGPRALLLIRAASGHSGSAPTTDQGFEGWPPEGFDSRLRTRRARDDSGYVRYMAKARATLPRVRLTTAESSLRRHRKLRLARPQGSDSASTLEDGLRLTRPQGSDSGSTSEDGLCLARPQGSDSASTSEDGIRLARPQGSDSASTSDDGLRLARPQGSDSASTLEESPPRLTLGSDRPRYRGPIITLPLASSGYGEQDRRPIWLAPVNR

SEQ ID NO: 46501 - protein, 172 aa, Zea mays
  Coding DNA Sequence Number=SeqID_3126
MSASVSRAIFPAARPPPYPYPYHLYQYPPSSYGQPPTSEAGIQASFPIRLYAPPPPATDGSQASFQVPPYAPPPYAPPPHEAPHLYAPPPYGAPPPVAPLFVGSENQAEENLVPKENRPKRLEWTTADEKKRAEAVACCSLCTVAAEDPAEADKLLKIQRDLDETKIILEHD

SEQ ID NO: 46502 - protein, 288 aa, Zea mays
  Coding DNA Sequence Number=SeqID_3127
MEKRHGGGGCTLLHLLGTAAAMAFLLPRSAGAANDAKWHAHAHPVAGAVGHGAPAPHEHAAGLSPLSAPPPTAGADDDLLPPPSRAPVQKAAPHFGFPLQPGDASAAAPSGSEGYPFIGSNPTVPLPTGMTDTSTVLPLPDTGTGDATTKAVGLAASVRAPVSSMIGLGVFLATLFLHKEVQSFGSSYLVRGVDLEQGQTDLIQQIKVQLEEVLHMEVEHIDEVLHAEVEHMEEGRTEVDHMKTVDIDTNDRDKGMVVDAQPEILHGILRLKHRSDDVVEKTHQTEGL

SEQ ID NO: 46503 - protein, 100 aa, Zea mays
  Coding DNA Sequence Number=SeqID_3128
MAERYQLPRSCVPPTTRRKDCGYPPSGGSEGGKTRCIREREDMVAFQGGGSGAALANPAPAKPLTASTYQPENLGPDRAPGLRPARMRERPDQPKHCARH

SEQ ID NO: 46504 - protein, 529 aa, Zea mays
  Coding DNA Sequence Number=SeqID_3129
  Gene Ontology: Mol. function=chlorophyllide a oxygenase activity; Cellular component=chloroplast; Biological process=chlorophyll biosynthetic process
  Homolog annotation: Hit_ID=Q8S7E1; Match level="QueryCoverage=95%, HitCoverage=95%, E-value=0.0, Identity=87%"; Hit description =Chlorophyllide a oxygenase, chloroplast precursor
  Pfam annotation: Domain name=PaO; Domain location=409-494; Score =133.5; E_value=5.9e-37; Accession=PF08417.3; Description =Pheophorbide a oxygenase
  Pfam annotation: Domain name=Rieske; Domain location=221-318; Score =96.0; E_value=1.1e-25; Accession=PF00355.17; Description=Rieske [2Fe- 2S] domain
  Pfam module annotation: Pfam domain module=PaO::Rieske; Domain location=409-494::221-318
MGFQFTMNPISAHRRALSTSNPITCQGVGRYGGIKVYAVLRDDGAEFAKNNNLEALFHVDDPGPRVPIKKGKFLDVNEALEVVRFDIQYCDWRARHDLLTIMVLHNKVVEVLNPLAREFKSIGTLRKELAELQQELAKAHNQVHLSETRVSSALDKLAHMETLVNDRLLPPDGASSTSTAQPTSLVPSTSSTARVRAKKPPRRGLNVSGPVKPYNPSLKNFWYPVAFSSDLKDDTMVPIACFEEQWVIFRGKDGRPGCVQNTCAHRACPLHLGSVNEGRIQCPYHGWEYSTDGKCEKMPSTKMLNVRIQSLPCFEQEGMVWIWPGDDPPKATIPSLLPPSGFTVHAEIVMELPVEHGLLLDNLLDLAHAPFTHTSTFAKGWSVPSLVKFLTPASGLQGYWDPYPIDMEFRPPCMVLSTIGISKPGKLEGKSTQQCSTHLHQLHVCLPSSRNKTRLLYRMSLDFAPWLKHVLNEDLRLVLGQQERMINGANVWNWPVSYDKLGVRYRLWRDTVERGSERLPFSNQAESGS

SEQ ID NO: 46505 - protein, 175 aa, Zea mays
  Coding DNA Sequence Number=SeqID_3130
MADLEVGSIGSEEVGRGLPAGRWRSSAAGIAVGRERRGEELTGEKEDDGASRIGLGRGEEGSGRGWCEEDGVRGELFIGARGRGERWSSLTPASFPVPPLMAHSAAEGTLRRGGTGEDAGQGKEDGAVPNFPVRRGDGGEETAVKDGGEGTAGVVCGEDDEAADRWAGLPVGASA

SEQ ID NO: 46506 - protein, 382 aa, Zea mays
  Coding DNA Sequence Number=SeqID_3131
MAQGHISLSHSVLCPGDGGQPHRGVSQHVVRREGGTRVLGRSHSRFCGEDGSEDLPVRFGAPGARWCGVGGQVDAAANAEVVAAGESFSTDETVSASCGPTPDSLALMSGSRPSSGDANESLPAVAFALGPSLLLQRSPASHPELVVPQALRCGGCSYPREWNRSSVYNGTLSAGVCSLWLSGPEHLGILGVILKPRLLCNEPEPEAAVSAWTEAKLAREETSSAQEQVTSQAEEAYQRQLELGQVVHWRDRCRSRAAEAMSRAKVLGGQLAEATERPIKPSAWAGFLEGTLAAMAQARIVYPSESYLSRKVMSEDYVIDIVEKARKIISAEKFSSIKTCSVNGIAYPSVSYLSQKVMSERGFPLLAPEGGSGFAEARLTLP

SEQ ID NO: 46507 - protein, 113 aa, Zea mays
  Coding DNA Sequence Number=SeqID_3132
  Homolog annotation: Hit_ID=Q8LND4; Match level="QueryCoverage=77%, HitCoverage=98%, E-value=1e-08, Identity=44%"; Hit description =Putative uncharacterized protein OSJNBa0044A10.15
MVTPGEDVGELQRGGDAENPNIAGSHTLTDEVHVDLHMLCALVLHRFGGEVDSDDVIVVDNGGALKGAVELVEYLAHPGGLGHVVGHSTVLDLYTGVGDDRLSFGGPGDEVDA

SEQ ID NO: 46508 - protein, 150 aa, Zea mays
  Coding DNA Sequence Number=SeqID_3133
MEVAHDPLESGEMGLTWGVHMEAHLLDSVGDVGPGEVEDVDGVLGVVKEDTLGHALSSNVDKVVEGPVDSLHQSAMEEGILDVELMDRPVPGEGEDDANGGKLDDEAEGLVVVTPGFRGPNTGAIHMYVRIKSHTYDDSWYKNECYIFNI

SEQ ID NO: 46509 - protein, 292 aa, Zea mays
  Coding DNA Sequence Number=SeqID_3134
  Homolog annotation: Hit_ID=Q5JMS6; Match level="QueryCoverage=99%, HitCoverage=99%, E-value=1e-133, Identity=82%"; Hit description =Membrane protein-like
  Pfam annotation: Domain name=aPHC; Domain location=43-262; Score= -137.7; E_value=0.048; Accession=PF05875.3; Description=Alkaline phytoceramidase (aPHC)
MDVSRKKKWVAWAVAAAIFVVLMLVTPAIPQDEAYHDFADQRTLFLGIPNTLNVISNIPFFFVGVTGLILCHFNNYFRLSSQGELWSWTLFFAGVTAVGFGSSYYHLNPNDATLVWDRLPMTIAFTSVMAIFIIERVDDRAGAKSLAPLVIAGALSIIHFDDLRPYAVVQFVPCIALPVMAIVIPPMYTHSSYWLWAAGFYLLAKVEEAADKTIYNWTHQIVSGHTLKHLCAAMVPVFLALMLAKRTTEPERISLLQKWKTSWVAVRERRFKDSSTVDVDCGYAVVSSISEQ

SEQ ID NO: 46510 - protein, 145 aa, Zea mays
  Coding DNA Sequence Number=SeqID_3135
MGKSNKRKREPTPPSEDFGDSEYSEEEFSSESEGSPAPVSPPASSDDSDDSQGIAAEVWTYIRAVERFGLEGSDESEYSSDEEDSDGGDEDEDDDDDDGGDGDDGGDGDGSGSGRGGGSSKGSTKGGSSRGSTKGGGGGRGRASG

SEQ ID NO: 46511 - protein, 174 aa, Zea mays
  Coding DNA Sequence Number=SeqID_3136
MGQRTDFNELTIKQFLTTAEINIQDQLIVWMIGFKRYVATFVEFATANSLDYDMISQGVDLYTKDQFEDYAQYYEPARLGIPRHFSETPGLRHHPAVINKIAKMDKNQNLAYAPYIMALIKAKTRFEGRRETTHTPFRPFKNEIGFLTRPLTPFPNDEGVQADDFATQLEAHPA

SEQ ID NO: 46512 - protein, 129 aa, Zea mays
  Coding DNA Sequence Number=SeqID_3137
  Subcellular localization annotation: CTP_CleavageSite=27; ConfidenceScore=5.14e-01
MVKNFGSKTVQIAMNAVVTSQLLVSLYSAAVDRKDQTVTLQGGTDARSEVGSFLRNELREGVFWTFGFPKLKRLFSRVKLVTKNDLAPRKGLLLGLCFGAPKVSHEETASAEVVSKRWPKVPFHGASAF

SEQ ID NO: 46513 - protein, 318 aa, Zea mays
  Coding DNA Sequence Number=SeqID_3138
  Homolog annotation: Hit_ID=Q6J9V9; Match level="QueryCoverage=20%, HitCoverage=27%, E-value=4e-10, Identity=51%"; Hit description =Putative uncharacterized protein
  Subcellular localization annotation: CTP_CleavageSite=46; ConfidenceScore=5.55e-01
MAVAGGRKQQSNRLQAHIPSWGSRGALSHGVKTTRPCSVPRTAHTMAAPRTTRPAALTPRQGRRHLWQAKRAMLHLRHNDRVKKGTGKGDTPKGILLWQGSGPRALLLIRGSKAGPSEGFDSRLRALGLRAHYWSEVRRARDDSGYVRYMAEARATLSRGSGAALGNPDLAKPLTASTYQPENSEPDYAPGLRPENSAACPALTTVPPARVSLTAAKSSLRRHRKLRLARPQGSDSTSTSEDGLRLARPQGSDSTSTSEDGLRLARPQGSDSASTSEESPPRPTSGSDRPRHRGQGSDNPDNCTSTGFKRSSDGNDIT

SEQ ID NO: 46514 - protein, 46 aa, Zea mays
  Coding DNA Sequence Number=SeqID_3139
MERLEPRAEWESWLVGKVYNLCKVLETGGEAGNMDDFEEFQEYDEF

SEQ ID NO: 46515 - protein, 72 aa, Zea mays
  Coding DNA Sequence Number=SeqID_3140
MPVECLLGAFVLRRYFRIQNYEYGARPGRSLNQTKVECSRSCAQGSFGAMAEGGTDLKMKRLRGPRQISISR

SEQ ID NO: 46516 - protein, 60 aa, Zea mays
  Coding DNA Sequence Number=SeqID_3141
MGTKASLSSRETGGKLSSCQKCDDYIKTPGVTSYGPLRTRRLSEHRRKINLKPKGPSSAS

SEQ ID NO: 46517 - protein, 192 aa, Zea mays
  Coding DNA Sequence Number=SeqID_3142
  Gene Ontology: Mol. function=nucleic acid binding
  Homolog annotation: Hit_ID=Q75HA0; Match level="QueryCoverage=56%, HitCoverage=33%, E-value=1e-08, Identity=30%"; Hit description =Putative uncharacterized protein OSJNBa0056E06.12
MQELMAQQNEIPRQVAQRQPPPQHYGGGDHHQRPPAAATYQEFLSTWPPLFTQAEDPLDADGNRTELQYAQAFNDLCQYAGYHVDTDEKKRDRFRRGLSTKLRDRLNTVRANSYNELVNMAISQEDCITARQAEKKRKTPVAGPLAQPQRLRIVSDTQNRGPQQQQGRWVIRPQQQQQAPARSQPPVQRNNQ

SEQ ID NO: 46518 - protein, 198 aa, Zea mays
  Coding DNA Sequence Number=SeqID_3143
MADKDKGKGVIIGHPRALDVHKFIYNYSKLIIQNTVDYSGQEKLFGKTPMRGLSGPLWQTVHDTRRAPPPPADAHRMFCRHRCTYAPSSATPESAIVAPSSPSASAVVLLRQRFCSSAAVSPLRRGLRPLVLLRQRVGHGRVRQTALIAPRLVPEPLVPRCGQSARLRRTLTAGPSGATTPKPALAVRSRSFVSDRMV

SEQ ID NO: 46519 - protein, 46 aa, Zea mays
  Coding DNA Sequence Number=SeqID_3144
MGRLEPRAEWESRLMGNVCDLCRVLKTGGEAGNMEDFEEFQDYDEF

SEQ ID NO: 46520 - protein, 26 aa, Zea mays
  Coding DNA Sequence Number=SeqID_3145
MDKLEALLRPKEGQSNPAVLSQCQGY

SEQ ID NO: 46521 - protein, 283 aa, Zea mays
  Coding DNA Sequence Number=SeqID_3146
  Gene Ontology: Mol. function=kinase activity; Cellular component =ornithine carbamoyltransferase complex; Biological process=amino acid metabolic process
  Homolog annotation: Hit_ID=Q6QP54; Match level="QueryCoverage=28%, HitCoverage=42%, E-value=7e-20, Identity=55%"; Hit description =Putative kinase
MSSIPPPAGGLSATIVVVARWWKEYHVVAAVEGHELKTPETEHRPGLERLLETAHLELDGKLLVNTQQAPTWRANCRRLETGGSLRPTSECAACPSPDGSSAWASAKVGSEVAGDGRERGGNPAAFVFVPRPAGEILAPCWCDVVAVGGATEPGGGTAVGAVESLLTSPCFRKGAESRRRHRASGAPSLSIWAELARWDTGSCSLRPESARGRVMMALPVDVAGLCPRSGDVEAPPKPGSSLSSMAEAEPELLGRARRRSFGRGQGGVRALGSGEAEFVVFWG

SEQ ID NO: 46522 - protein, 400 aa, Zea mays
  Coding DNA Sequence Number=SeqID_3147
MAQYGLSLSRARMGHRPAQLPTYPAGYASYFADTLGPCSSLSIPTSQHLDFFSDRWDPHVRTFFTRSDSVTNSSEGRGLCCDLFARVSGGLGRGWVSVSDSAAEYKTSRNQRPLPCPSRAGGVVPNLGAAASETVMGAAALAPPAPPLSAPAAGVAAGGDPDDGGGNSSSSHNTDLSEEQELERWVARPITSDTTRECHFHDVLDTLLRHALDRRTWSIEYRCVVFQHSRGGLPRPLGGDLLGAPSGEQYLGAEVCSEHYSISERDSVEAAMQDVTRRALLHFCSVLGGVADGLNLKYYPRRPSGSTRGVIVSPVGEDNPRLSNTFNLAVVLNTELDHALDELSRAHDEITQLRAERAEHRHLEDGSPAPVGTQHPYRSPQRGHHAYGNPDCRTKINLEP

SEQ ID NO: 46523 - protein, 79 aa, Zea mays
  Coding DNA Sequence Number=SeqID_3148
  Homolog annotation: Hit_ID=Q2QV41; Match level="QueryCoverage=97%, HitCoverage=46%, E-value=3e-17, Identity=62%"; Hit description =Expressed protein
MAKNTRSRRQKKLKAYDLSALSKSLPEPGAPKQKPEAKLNYKSRQTLVLQEAGHLKVVLGKMQFQLDPFAVIHQHLLAT

SEQ ID NO: 46524 - protein, 102 aa, Zea mays
  Coding DNA Sequence Number=SeqID_3149
  Homolog annotation: Hit_ID=A2XFR6; Match level="QueryCoverage=50%, HitCoverage=14%, E-value=8e-07, Identity=49%"; Hit description =Putative uncharacterized protein
MDLPRIRVENGVILEDSSDEFLPTPTPLAEEEEEEESINEEANGDRGFRTLSAHESLTPLSTYAASVNDAAMRTLWSLSHTYRQQLHNTKYRHLPLRIHGES

SEQ ID NO: 46525 - protein, 228 aa, Zea mays
  Coding DNA Sequence Number=SeqID_3150
  Homolog annotation: Hit_ID=Q6ZD72; Match level="QueryCoverage=78%, HitCoverage=54%, E-value=2e-23, Identity=39%"; Hit description =Putative uncharacterized protein P0450B04.17
MECEPEELQFLGVVGIYGFSAEILRGPHRSLFARIATAFALPLSALFLLHVAISHVLFTHIDFDDTTLDASSPGTDTQRRLLSRLASYWLALLLFKSAYLLALLLLSLLSVVASVYSAKRNTLTFLRMLSVVPRVWWRLAAMFLAAFALLFAYHSFVVLVFVGLLVAMDNGSSLAGLLPFLVVVAYLLGLVYLGRRKGKPKSKSKPKDTCSWFDGGRKAMIQLAGELF

SEQ ID NO: 46526 - protein, 238 aa, Zea mays
  Coding DNA Sequence Number=SeqID_3151
MELGGWCNNSLAADSAPGAALDALDVCTGVCCRAECTAVVAPGAGRLVARGVEEAAASSTTKSSVKKSWCSTMWTMMLSRRTSKNLKPTPYLRRTAQRPYIRLRPLAYVMGSRPRGSIGSPPERGAEAYMVWSGYVSAPDPRLALIKAWVFFVPGSRDPAEGGPDLTQRGPGPIPGIRSVPTEVLDPARWSGPRMQGSVTFPWGPDPPLISWRILSSLVTWRSRSRPHDGVEHSLPRD

SEQ ID NO: 46527 - protein, 209 aa, Zea mays
  Coding DNA Sequence Number=SeqID_3152
  Subcellular localization annotation: CTP_CleavageSite=68; ConfidenceScore=5.55e-01
MSPARARAYKASQGFSRMPPRALDLTEARDRRSLPCTRRASTRPSTHHRRSANRAIPSPVQPSRETLRASVKLPEQGIELCLAGDAGSRSPDFTRPSASVDRAPRSKLKKIEKVCNVHLSVGVVWNLSCMTQDTFEMDTSMLGRVAATLIRDLGRSRVIFLALAQGQEIGCIHFDNRMMMVCGHGSMGMRGLRDEIGIRINVRIPVSSV

SEQ ID NO: 46528 - protein, 146 aa, Zea mays
  Coding DNA Sequence Number=SeqID_3153
MGKSKKGGSSSHHSGDKWKCEPTPPSEDFGDSEYSEEFSSESEGSPVHTSPPASSDDSDDSQGIAAEVWTYIRVVERAGLEGSDESEVSLDEGDSSDSSEEGSDGGEGVGDDGATAMAMAARATAKAAAVAARAAVAAAMPVARHH

SEQ ID NO: 46529 - protein, 66 aa, Zea mays
  Coding DNA Sequence Number=SeqID_3154
MVKNFGSKTVQIAVNAVVTSHLLVCLYSAAGLQGRSSFIMCEQVSSDLYQKGRSSKDTKVDIAPKL

SEQ ID NO: 46530 - protein, 151 aa, Zea mays
  Coding DNA Sequence Number=SeqID_3155
  Subcellular localization annotation: CTP_CleavageSite=69; ConfidenceScore=5.05e-01
MEHKGKTRLVLSRTRGVLVVGVTSVREREGVSLFVSSSFPRTTPSQEGPGPPFYRCKERVQVYNGGCSLCANVSGREVPEPCVHANVAVREVLEPCVRDNVAVGEVPEPYRSTAGGAAGILLTSPYFCRGLRTTVVMDAHREPSLPFTGTS

SEQ ID NO: 46531 - protein, 258 aa, Zea mays
  Coding DNA Sequence Number=SeqID_3156
  Homolog annotation: Hit_ID=Q6QP51; Match level="QueryCoverage=28%, HitCoverage=33%, E-value=2e-29, Identity=85%"; Hit description =Putative growth-regulating factor 1
MQEACNRTTVVHPFGFITSGTGKGDVSKRILLGEGNGPPSPPTDQGFEGWPLGRVRQPPQSTRAPRPILIRGSKAGPSEGFDSRPRARRVRDDSGYVRYMAEARATLPRSRPRLPRDAISPRPTLASGGNSSPGRIHASPEGLLRQWAHPRLAQGPARTGFVEKQPWPNRLTNRPYRKRIQCEDRLTTYPDTRASVGKASALGGGLRLARPQDWASASASGGIVSSPDPGLGLRRSLRLARPWARTDRATGDTSLPYP

SEQ ID NO: 46532 - protein, 465 aa, Zea mays
  Coding DNA Sequence Number=SeqID_3157
MVIRRDDHQPCGGEKQAGLWPLPRPQLQGCSSSGLGRGRTEMGPASAWAGDPLLPPAFGGEGHPPAVRRRRPPAMRGKANCCFLDRVQLFVLHPGDGRRPHRGSHNTSYAARAVLMFRDGPVLVLVARAGVRTCRCALGRPPPPWCIVGGQVAAVVGAEVVVARGEAASAEAVASADDTVSATCAPGLWLFGFNGWFSSPVRGRERGPSSSSVCPEAIAAAVLPPETEVVAALLVQRLPASHPEFVVPQALCLRPLCDELEPEAAVSAWTETELARKEASSAREHVASQAEEVQQRRLELCQVIRGQDQPRSHATEAVSQAEVLGGQLAEASERPAEVSARAGTLAETLAGLFGSRIPRPSVSYFLRKVMSEKTRYMNDLKHLKGRSDVAVGCSKRCCRPRLVRWPASEVPGLPPGSLGTRPFGRGSVTETADTVPSVVRPRPELLPTGLVASVVVRLCPRGTVF

SEQ ID NO: 46533 - protein, 189 aa, Zea mays
  Coding DNA Sequence Number=SeqID_3158
MAGVGRASCASGEAHRRRGFWPNHGDIAQSSESGTFTRGQGGHGCKESKNGSPDHDIREETMFQRMKSLILNNCVALFLAHNIQEQVTNIDAHRGVNSLAQPSASIHLHHATEEGNSARGCPAVIGHQPRDTLAERSPEPEKEGYRPNTIGGGVGPRNQRTGSYPPTSAEKEREVASASRHLEEHRQSC

SEQ ID NO: 46534 - protein, 36 aa, Zea mays
  Coding DNA Sequence Number=SeqID_3159
MQSLQVTGLTWHRATQWTPRQVLTESYSGNSLRLLK

SEQ ID NO: 46535 - protein, 183 aa, Zea mays
  Coding DNA Sequence Number=SeqID_3160
MPPAPPQAIPIAGDRDDDDASGSSSHGTELSEEPEPKGWIARPITHDVARGCHFNDALDTLLRRAFDRHTCGVADGLDLKYYPRRSTDSAGGVIVSPVGEGIPRLNSMVNLVVVLNTELDHATDELGKVRAEVAELHAECTAHHYLDGGSPVPVGIQHPYRSPPHGRFDYGTPDCRTWIYLDP

SEQ ID NO: 46536 - protein, 33 aa, Zea mays
  Coding DNA Sequence Number=SeqID_3161
MPPAPLLPPLSSLLHLPSRAKGSQLHHNDCTVM

SEQ ID NO: 46537 - protein, 169 aa, Zea mays
  Coding DNA Sequence Number=SeqID_3162
  Subcellular localization annotation: CTP_CleavageSite=27; ConfidenceScore=5.27e-01
MKLWKETSRSSKTTMSSRRGLAATPSRLPMKAAFIYVSFPHFDLLHTARKSVIPFLPSRLAERPLRRPVAGQSSHLERLHHRLHEEQERRRQEQEQQGSSFSLQQEIESVRSCSPVLPLEAPPAPPLGAPASGVAAGGDPDDGDGDDSSSHDTDFSANHELEGWFARSM

SEQ ID NO: 46538 - protein, 25 aa, Zea mays
  Coding DNA Sequence Number=SeqID_3163
MAGSAAALPRAPAGSAAPCPAPPAG

SEQ ID NO: 46539 - protein, 117 aa, Zea mays
  Coding DNA Sequence Number=SeqID_3164
MEDLSAMTPTIVIGKITTFEMSQKMCRGEEPTSSRPYAFAYDERKGKKKAPTSSSSSEEEEEEESDDDKDNQPSTSYSEDEETIRCVRKVEDLLFNIDREKQRKRMLRMRGEGSLQG

SEQ ID NO: 46540 - protein, 216 aa, Zea mays
  Coding DNA Sequence Number=SeqID_3165
  Gene Ontology: Mol. function=oxidoreductase activity; Biological process=electron transport
  Homolog annotation: Hit_ID=A3BMR4; Match level="QueryCoverage=27%, HitCoverage=11%, E-value=2e-14, Identity=73%"; Hit description =Putative uncharacterized protein
  Subcellular localization annotation: CTP_CleavageSite=43; ConfidenceScore=5.41e-01
MPGAQIFVGPAPASFNSTTRLGTNPGRVPSGSNLGELGSTLILYMHVFSICFLNEGSRTQATSLLCCPWYHDWDLSEILGAPKGSTTINVFSECTKAESFLPFGSGSRACVGQKFVVLAISMLIASLLRSYEAFLQIPKKEEEYPVTYVLMLIPNIHKLSMASEARKRHRLKPRLTLDFGPKFKAGNHSSQFSYGAAPRKPWKQQQSNTRLSIPKH

SEQ ID NO: 46541 - protein, 263 aa, Zea mays
  Coding DNA Sequence Number=SeqID_3166
  Subcellular localization annotation: CTP_CleavageSite=9; ConfidenceScore=5.41e-01
MAPPQAVFVCSIAGAFASPLVPALTVTSESSSLYRSPAPLASQVLCDPWWLGPVLRCPVAVVGGSVASSLIVSSPALPIISVTPSPLPSSLDLLKLKCYAMMTSLVQYCSVIVGGSGASAAHVDACRDVAGDTDYVGGSVMARMSGGIVWCLLPYFTLEAASYSKIAREILILYAFAFILDPRAKMRGFHKVLHRLSTLNGKATKAWDDIYGDDETYSTSSGTCIGSIPGEDWELADQHKKHTVEKETKDLEAAFEAMYLDDE

SEQ ID NO: 46542 - protein, 28 aa, Zea mays
  Coding DNA Sequence Number=SeqID_3167
MASARQVVYRVFIGGGGCDAKVEDGTPR

SEQ ID NO: 46543 - protein, 357 aa, Zea mays
  Coding DNA Sequence Number=SeqID_3168
MAFILIYIPIWLYLENGEESEVIEEKAQPPLESRARTWLYFDICESKPDSPVNEGKPRPASARTILASRIPWKWDRHTLESLFLSRMNQQEAPTGVGEFLRDFGVPVVLWRLLQEVGYIETPKYQWSRTVLRGQPWYEVVVRIPERARKPSWPHWMFHAEGMTPWEGAQARLLESIPIGQDSVESASARVLMAVLELQLTRGHSRQMWQQLYTGSYAAFKMMEMAKNRACTQAQEQLEETKVQAEQVIGLKHQVTELQTQHQVDQLRIKELEHQLTNAHSKSKVLSQQQEEIHSYAVTVKEELKETVGFLSHQDQVLEELHRTYPMEFQTAQRLVNHLQQTVHMLNGAFYSAPTPTD

SEQ ID NO: 46544 - protein, 162 aa, Zea mays
  Coding DNA Sequence Number=SeqID_3169
  Gene Ontology: Mol. function=nucleic acid binding
  Homolog annotation: Hit_ID=Q6UU68; Match level="QueryCoverage=38%, HitCoverage=12%, E-value=4e-11, Identity=49%"; Hit description =Putative DNA-binding protein
  Pfam annotation: Domain name=zf-CCHC; Domain location=19-36; Score =18.8; E_value=0.0021; Accession=PF00098.14; Description=Zinc knuckle
MTIKRDESKRQMHCKDKHHICYNCREKGHLFKVCPKGKNPKPNLAIHSNMLRRPKFDSCARKFLSSDILSIGNNLFYGKNVNIKLVAPKFKLGSSSRRQHNDVLRKGEKAPVAEPPKLLGPHAPALVSKTSDGYACAPDNLTGSVQVSQGPQINHLQPGPQD

SEQ ID NO: 46545 - protein, 159 aa, Zea mays
  Coding DNA Sequence Number=SeqID_3170
MGKSKKGGSSSHHSGDKRKREPTPPSEDFGDSEYSEEKFSSESKGSPVHASPSTSSDDSNDSQGLTAEVWTYIRAVERAGLEGSDESEYSSDEENSSDSFKEGGGGDGGDGDDDRGDSDDGEGDRKGGDGGGKGGSGDGGDGSKGSSRGCNKGSSKASG

SEQ ID NO: 46546 - protein, 125 aa, Zea mays
  Coding DNA Sequence Number=SeqID_3171
DPKKRLCPIVYHLSLFVGFTEGGKHLVTSNDLRAGNVCELVKGPDDGEPRRLGSEMETATLGLGDGDGDGGVGLGDGAAWRAPSSETVALGLGLGDGVAGAHGSETGTGTAAQQPGGVVSAPGEN

SEQ ID NO: 46547 - protein, 146 aa, Zea mays
  Coding DNA Sequence Number=SeqID_3172
MNRTNRERFPPAVFNLKKKSRERHGGRKKERGSARGVSRAGHAPQAAPSTGELGRPRPARAAGVASSAEAVRARATDRLRRPEVAGAQGRGERIEQGRAGLDEGMWGLHAEALSGSRPRCRAGQGLGRGLACAGAGHRCGFSCIRD

SEQ ID NO: 46548 - protein, 611 aa, Zea mays
  Coding DNA Sequence Number=SeqID_3173
MPSSSSSSDTTPPAAASSEETLSSVMVEELRAGDSVDFGVSRMTSARVEDMQRLGYFGGGVARASGTEEVPEPEVMDKDRQGAAQKRQATVRIHEARPKRPRGTAKAVASGGGKPPLAAKAGASAPSKAPEATAGAGGSKSAKVVPPASGMAEASKAARALPLAGKRVADFGTDIIVDDYLGGSDEGQLAVVAPGAEIATAAIVPKARGEALDAGGEVSALAVVRDEAGAATRRLKRVTEALGQATEALSQVADFASRTASGALTAAVSAEVERLRTQHADAVREKSASDSKCRKLTDRVAALEKEKADLRRQLAAERREANEAIAKGQAAQAEAKLARAEGNLAKELAEHLQERLTALESRAKEAEAAMHAEAERTRTQLMDTYRELGARTGDFEVPDREPGLRCLQWAQEELLELPAVVGGLMSYASLVTCEGAMNALSREGCRHFEAFDQADEDFDRDIYKVEDPVVKESAGALYDRMWGLYGREVVRERAEAARAQAERGERVDDFGALNSALPDPEPTPAEAATGVALETTPGPAEDAPSVPTSAVAGEDLPPKVAEGAPDAPAAAAPSTEGSAAEAAETAAEAVAGPTAEPTVEASAAPGPSQVA

SEQ ID NO: 46549 - protein, 111 aa, Zea mays
  Coding DNA Sequence Number=SeqID_3174
MAGEVFVFDSTISLTRMCPLNGSTMCIMQDNRSREGIVFGREFSLLQEMTTRLGPDMNLPAFRPPQGSVSNAQGSEGAANVQGFLVHGSGGSGHLPGGGGGSGQNSHSPQE

SEQ ID NO: 46550 - protein, 455 aa, Zea mays
  Coding DNA Sequence Number=SeqID_3175
  Homolog annotation: Hit_ID=Q6J9V9; Match level="QueryCoverage=23%, HitCoverage=28%, E-value=7e-11, Identity=42%"; Hit description =Putative uncharacterized protein
MQAACNCTKGAHPFDFDASSMEAQAHTSWNRRASYYVQKTAAPLAPAPHLLDYGTGAATRGNPAHGPAVPTRHAGHGLVSRGRRRDGTRKGDTPKGILLREGSGPRAPLLIRGSKAGPSEGFDSRLRALRLRAYYWSEVRRLAPRKGSTAASGHSGSAPTTDQGFVGWPPDGFDSQPRARRVRDDSGYVRYITKARATLPRGSGAALANPAPAKLLTASTYQPENSEPDYAPGQRPENNASCAAPTVVPPARVRLTATKSSLGRHRNLRLARPRARTRPRLGRRSPPRPTPGLGLSLNSGRRSPPRPTPGLGLDLDSRRRSPPRPTLGLELSLNSGRRSPPRPTPGLGLSLNSGRRSPPRPTPGLELDLDSGRRSPPRPTAGLGLDLDLGGVTTSLGPTTPQGEAIITLPLASPGYGEQDRRPILLAPGSSAHPTATTPHEQGSNTSLITTSART

SEQ ID NO: 46551 - protein, 484 aa, Zea mays
  Coding DNA Sequence Number=SeqID_3176
  Gene Ontology: Mol. function=structural constituent of cell wall; Cellular component=extracellular region; Biological process =cellulose and pectin-containing cell wall organization and biogenesis
  Homolog annotation: Hit_ID=Q41707; Match level="QueryCoverage=79%, HitCoverage=82%, E-value=3e-18, Identity=24%"; Hit description =Extensin class 1 protein precursor
  Pfam annotation: Domain name=Extensin_2; Domain location=4-357; Score= -108.1; E_value=0.0043; Accession=PF04554.4; Description=Extensin -like region
  Subcellular localization annotation: CTP_CleavageSite=49; ConfidenceScore=5.31e-01
MELPLRCTINLGAGWSPASPTRYFDSSGAGSSQASPTRYFDSSGAGPLSASPTRYFDSSGAGSGAGLSPASPARYFDSSGAGWSPASPTRYFDSSGAGPLSASPTRYFDSSGAGLSPASLTRYFDSSGAGPLSTSPTRYFDSSGAEPLSASPTRYFDSSGAGLSPATPTRYFDSSGLGCHPPRRLATSTALGAGWSPASPTRYFDSSGPGPLSASPTRYFDSSGAGLSPASLTRYFDSSGAGPLSASPTRYFDSSGAGLSPASPTRYFDSSRAGLSPASPTRYIDSSGAGSSPDSPTRYFDSSGAGSSPASPTRYFDSSGAGPLFASPTCYFDSSGTGLSPASPTRYFDSSGAEPLSTSPTRYFDNSGAAPLFASPTRYFDISGAGPLPASLTRYFVSSGASAHLTKTTRRSKLLDPRMENTIRKTFEDYKEKSSEIRIWIFKLIVSQVNLKLEGLWGMDIPWVQMRRIIYMGRPTDSGPRPMG

SEQ ID NO: 46552 - protein, 78 aa, Zea mays
  Coding DNA Sequence Number=SeqID_3177
MSDHAKREIVTGDKPTSSGKTPSRESGNKYKEESSSSIKSHRRDDKKKKKKEENEEGGLLRDRLFNTLHLRHRVVHYF

SEQ ID NO: 46553 - protein, 125 aa, Zea mays
  Coding DNA Sequence Number=SeqID_3178
MGVGAALCLCGSLARVRYVGSVSRRESWPEEDARAAVDRDLVMELPLDAQSSGRRLDVYERVEQCRAIAGVLHVLARSIQVLQMQHLRGIHTYREEAPRTELLGSRRRLGEGERWPAAASSLVAN

SEQ ID NO: 46554 - protein, 370 aa, Zea mays
  Coding DNA Sequence Number=SeqID_3179
MAHSPPLLAERRRRGVCKKSSLSLIVLSPCAEARGLLSQKPAPAKPLTASTYQPESLGPDRAPGLRPVRMRERPDQPKHYARVSLTGSQALPKAPRRTPLRPTPGLGLGLRPGRRRTPLRPTPGLGLGLRPGRRRTPLRPTPGLGLGLRPGRRRTPLRLTPGLGLGLRPGRRRNSASHDPRARTRAKTRKTTKLRLARPQGSDSALASAERLPPRPTPWLGLGLGNRGQTQPRLRRSPHVTLPRAQTRHVNRKRHHHPTPNRLGSRRTRPASHPASSAGWAMMALHKLCDDGGPQLSYGSRATSAGTRPLQQLSLCQALSHLRQPRHHASKEHYWVKKSDQGHNLPSASCAPASSVTCSSTRNNINKQYA

SEQ ID NO: 46555 - protein, 150 aa, Zea mays
  Coding DNA Sequence Number=SeqID_3180
  Subcellular localization annotation: CTP_CleavageSite=93; ConfidenceScore=5.22e-01
MSSSSLMRRVLPSSKPPDGWYPPPFHLLVGGTQLHGSWYLSAIVRLQGFSSRSLATPRHRRSPKMVTSSSTVGKAGQAAASTPPSASRIFVIQAKMEDEASRGAAPVWVGCLFLPPAPGGRMASSSPTETSSSHAGIGRALVALGLRLPA

SEQ ID NO: 46556 - protein, 124 aa, Zea mays
  Coding DNA Sequence Number=SeqID_3181
  Gene Ontology: Mol. function=aspartic-type endopeptidase activity; Biological process=DNA integration
  Homolog annotation: Hit_ID=Q8S479; Match level="QueryCoverage=25%, HitCoverage=2%, E-value=9e-09, Identity=87%"; Hit description =Putative pol protein
MGEKQMFSCYVKNKDSQDKIIFGDGNQGKVKGFALITPLAATRAPTATGVPPGHVLVAVVAPPSCCAPTTVGPSAVARPYSVVLSSEPGARPCGARLATPGRGAATGTGARRSERSSALPPVHR

SEQ ID NO: 46557 - protein, 353 aa, Zea mays
  Coding DNA Sequence Number=SeqID_3182
  Gene Ontology: Mol. function=rRNA binding; Cellular component =nucleolus; Biological process=embryonic development ending in seed dormancy
  Homolog annotation: Hit_ID=Q2V9A2; Match level="QueryCoverage=84%, HitCoverage=78%, E-value=1e-113, Identity=67%"; Hit description =Putative RNA processing factor 1-like
  Pfam annotation: Domain name=Brix; Domain location=141-335; Score =238.9; E_value=1.1e-68; Accession=PF04427.9; Description=Brix domain
MVKENKRKQPPADAAPPPGDEGEGRSGRKGKKARKEKAEAILPSQIKNKDKRREPPERQVPRTIENTREPDETVCRPDDQEMNVHLDCCATQSNVLYSNLGAMFVDLLRPQFQLSTVQLFAGNDADEFSAVLKQHITPKILITTCRFNSGRGPAFIDELMQVIPNSQYVKRGTYELKKIVEYANNRDFTSLVVVHTNRREPDALLIIGLPDGPTAHFKLSKLVLRKDIKNHGNPTSHKPELVLNNFTTRLGHRVGRMIQSLFPQDPNFRGRRVVTFHNQRDYIFFRHHRYIFETKEKKVASKEKTSGSKSGSEKQQVICRLQECGPRFTLKLLTLQHGTFDTRSGEYEWVHKE

SEQ ID NO: 46558 - protein, 952 aa, Zea mays
  Coding DNA Sequence Number=SeqID_3183
  Subcellular localization annotation: CTP_CleavageSite=32; ConfidenceScore=5.02e-01
MPTSSSSAAATPPADASPLADTSSEETLSTLVAEELRAGDSVDFGVSRMSSKRMIGDEVVQFGSCTFTPKTGKTTMQVVELVPCARNKWGNWNEFWFYVVEGTVEGHEGLPVSEMCSHFYSAYPPFEVAEEDADEGALRCAAGLSSGRDLVEEFVAYGVWPLAHGWALGEVCPRQMPSHGGKMVRSPAFALNLQNRDPAAFVREAEDGAVRLVGRYVPRTEGQRSWDIRGSNDRLNRVFELNQLSYDGYPGQDDVDRRGKKLVVETGYDPAPAVAPSSKKRKLGTAMGGLGVSDGFARELMRTCAAPGGRMSSPELRESSARMLRVTGGWWPRNVPIPLAAGEDLFTSRMVREWKAEEAAGGCEGCGPGGGKPPLAAKSGVPASSKASEAAAGAGGSKSTKAVPSSSRVPEVAKAARVLPSPGKRIADFATDINVDDYLGGSDEGQLAIVAPAVATTVAAVVPKEKGGALSAGGEMSALEAVRDEAGAVSRRLKEVKEALSQCRKLADKVAALEGEKTDLRRQLAGERRETNEALAKAQAAHAEASLAWAEGNLARELAEQLQEQLSALESRVERAGAATRAEAERTRKQLMDSYHELGARTGDFEVPDQEPGLRCLEWVQEELQALPTIVEGFMSYASLVTCEGAMNALSREGCRHFEVFDQADEDFERDIYKVEDPVVKESAGAIYDRMWGPHGREVAARGERVDDFGALNSALPDPEPIPAEATSGSALEPPPETTEGATDAPAAAAAGGDPPPETAEGAPDAPTAAALRAEDPAMVAAEATAEAPATAGSSQVQDFGPAHATATTDFLAASTVDDGNEYDGSASEFFDFADSGSSVEWTEESSEEDLDYFAALDVAAAEASSHVADTEDVPGPSTGRRRRRAVAKRRVSGAEGGRLRVSRAGRQELVSLPAAASTGEGELRSLFAGEGLRIMLFNYREMGIIPKVEPM

SEQ ID NO: 46559 - protein, 128 aa, Zea mays
  Coding DNA Sequence Number=SeqID_3184
  Subcellular localization annotation: CTP_CleavageSite=76; ConfidenceScore=5.04e-01
MHPSPPPIALGCLAGDLTAASTRHRAVDRPPQAPSGQIGPTPMIPYPRPCLATTPPSQNRAPGGEPPRTSPAVEPTAEEGSDPPEFIAPEEGQEPDPSEINLLCQESFDEGKSIFPLMHNLPILSTTT

SEQ ID NO: 46560 - protein, 170 aa, Zea mays
  Coding DNA Sequence Number=SeqID_3185
  Homolog annotation: Hit_ID=Q6J9V9; Match level="QueryCoverage=44%, HitCoverage=26%, E-value=7e-28, Identity=80%"; Hit description =Putative uncharacterized protein
MMTASEKALSPPTDQGFEGWPLGRVSTAAPEHSGFKPITDQGFKGWPLGRAGPSEGFDSRPRARRVRDDSGYVRYMAEARATLPRYPRTFSRPAGTICNAIPPEGGIEPSDPVEGVWVRRITRRYFWSVPLGHQPTPNEQGTCVHSDHIGSGAALAPGYDQTVDSVNKPA

SEQ ID NO: 46561 - protein, 175 aa, Zea mays
  Coding DNA Sequence Number=SeqID_3186
  Homolog annotation: Hit_ID=Q6QP51; Match level="QueryCoverage=45%, HitCoverage=46%, E-value=2e-11, Identity=43%"; Hit description =Putative growth-regulating factor 1
MTGKQRCPPRSDCRASHPGEADNKSQSTTEFDLGRNRKLRLTRPQAPASGGGLRLARPPDLASTSVSGGIASSPDPGLGLKRSLCLARPWARTDRANRGYIITLSLASSGYKEQDRRPIWLTPATGNDGAPRATMTPVALSPLRQQGDVSRILAASPAVLLQGSGASPTATLSCV

SEQ ID NO: 46562 - protein, 51 aa, Zea mays
  Coding DNA Sequence Number=SeqID_3187
MGLGVCGSLCQGGDEDDVYDYGNGCPRCNHCSGEDEAVEEDFQEFQEYDEF

SEQ ID NO: 46563 - protein, 25 aa, Zea mays
  Coding DNA Sequence Number=SeqID_3188
MGTDLLTVGSTDAAAPSGNYYFLNM

SEQ ID NO: 46564 - protein, 32 aa, Zea mays
  Coding DNA Sequence Number=SeqID_3189
MGTDLLTVGSTDAAAPSGEWIRGGDMAPGTNL

SEQ ID NO: 46565 - protein, 202 aa, Zea mays
  Coding DNA Sequence Number=SeqID_3190
MRAACNRTKGAHPFDFDASSMAAQAHTSCNRRAGYYVRETAPPLAPVPCLLDCGTSAATRGDPAHGPTVPTEHIGHGSVSRGRRRDGRYSQKWASSNGGTGKGDIPKGILLREGSGPRAPLLIRGSKAGPSKGFNSRLRALGLRAHYWSEVRRLAPRKGSTAASGHSGSTPITDQGFVGWPPKGSTAASDAERGMTQGMFDT

SEQ ID NO: 46566 - protein, 103 aa, Zea mays
  Coding DNA Sequence Number=SeqID_3191
  Gene Ontology: Mol. function=kinase activity; Cellular component =ornithine carbamoyltransferase complex; Biological process=amino acid metabolic process
  Homolog annotation: Hit_ID=Q6QP54; Match level="QueryCoverage=66%, HitCoverage=37%, E-value=2e-14, Identity=53%"; Hit description =Putative kinase
  Subcellular localization annotation: CTP_CleavageSite=54; ConfidenceScore=5.08e-01
MALPVDVAGLCPRSGDVGAPPKPRSSLSSVAEAEPEPLGRARRRSFGRGQSGVRALGSGEAEFVVFRGCPSLGSGGAEFAVFRVLARVRALGRAEQSSPSSGA

SEQ ID NO: 46567 - protein, 341 aa, Zea mays
  Coding DNA Sequence Number=SeqID_3192
MVSPVSCKRVIRVDVRAPFVGGRLGAQRHAQKYLRQLARWLRDAWAWASKLACQKSEKRVHLARLHAACMAARPFRPLVWAKVGVACNRWAVTCTTRGGLASSALSRDATPWELVPFSHRSASRIFIMQPGRTPPPVVTHDGDLRLDGGGKRAGLRPLPLPQPQGFSSPGLGRGVCRVEVGPCVGGGPLLHSLMGGGAVVVRGAGSCSVPGFRTRVASEPLAAPASATTAGRGSSAGVIARAGHGLTSNSTAFCPSLPYEFRHGRGPPGSSTRPEVSAAAVRPPGAGDGAPFIGLPLLHRPSPSEWGCSYLRRGNRSSICDGTSNASVFVHCGCRGLNMLL

SEQ ID NO: 46568 - protein, 190 aa, Zea mays
  Coding DNA Sequence Number=SeqID_3193
MARPGFPQGTKLIMPIPAGQGEGAGRDLPVAWGLGCARWGSGSSLSDPPIGWEHPRSPGLALRRGPQSYVPPGSGSRGSEWRGVAMTLGEEMEAKGGGEAERGRVGGGGREASIAAGAEAGNVVERGTCGGAKAIWLGLPRIMLHGGLVSPKENQLWILSGTIIRGTLKAPNSQLVTPISIKLQRPDGSD

SEQ ID NO: 46569 - protein, 110 aa, Zea mays
  Coding DNA Sequence Number=SeqID_3194
MGAAEAVGEFGKSTGRDKQAQVKPYSVLNRRQISLCRPTYRYTETHCLYQDPSTQMPIIAMHLATTCNLEVPHPPIGIMMSSRWVNTPELHQPLSWSCNHVVAGITDYTN

SEQ ID NO: 46570 - protein, 219 aa, Zea mays
  Coding DNA Sequence Number=SeqID_3195
  Gene Ontology: Mol. function=metal ion binding; Cellular component =Golgi apparatus
  Homolog annotation: Hit_ID=Q653G1; Match level="QueryCoverage=72%, HitCoverage=26%, E-value=4e-75, Identity=82%"; Hit description =Dehydration-responsive protein-like
  Pfam annotation: Domain name=DUF248; Domain location=1-215; Score= -81.5; E_value=7.6e-21; Accession=PF03141.7; Description=Putative methyltransferase
MEDEPSDDSVTVDDEEPPQKKQKEALSAAKKESSSEDEDDSSEESSDDEPTKVEEKKEIWHSRVIQYWKHLKFEIQKDSFRNVMDMSANLGGFAASLKKKNVWVMNVVPFTESGKLKIIYDRGLMGTTHDWCESFSTYPRTYDLLHAWLLFSEIEKQGCSLEDLLIEMDRILRPYGYAIIRDKVDVVTYIKKLLPALRWDDWTFEMRPKKDALTKIYII

SEQ ID NO: 46571 - protein, 209 aa, Zea mays
  Coding DNA Sequence Number=SeqID_3196
  Subcellular localization annotation: CTP_CleavageSite=55; ConfidenceScore=5.13e-01
MPAKSPRAAPFSPSRPAYAPCPQSLRAPPLRSLWQDYRGRPPFKGSDLWTSQQWRCSILPGISVGDGYCPSCRAPPASYMPLPLSPMTRQTSSPRRRRHRLRPPSILAPTSRPRSTGAAPAIRTPHIVPPFHHFLLAFRASRTLFSAVVQLSLSAASGVKFLCLFSSSRRIGLAFQLRLNPLIGDSDWLVIDEAETEAEAPMSVPTYHK

SEQ ID NO: 46572 - protein, 600 aa, Zea mays
  Coding DNA Sequence Number=SeqID_3197
MQAACNCTKGGAPFRLQRVQHGAQAHTSCNRRAGYYVRETAPPLAPVPRLLDCGTGAATRGNPAHGPTVPTEHIGHGSVRRGRRRDGRYGQKWADSNGGGRRTEAAIKSSAGSRPLLGQRESPLPRREDDAPVFRSSNGSRTHNGCPANHSSSRINSAAGQAAPLAGEAGTGKGDTPKGILLREGSGPRALLLIRGSKAGPSEGFDSCLRALGLHAHYWSDVQRLAPRKGSTAASGHSGSAPTTDQGFVGWPPKGSTTASEHAERGMTLGTSDTWPRLGLRSRGTLGHFRDRQERFCNGIPSEGGIEPSDPIKRDRVRQITCRKATQGRMKKAESVLDRPLALCGGSGAALANPAPAKPLTASTYQPENLEPDYAPGLRPVKAPSIQGTRSRLARAQPREKAADPGGFTSRPRVRSSNGRTFDSPEAQLEQASRRSNLGQIATPTDRIENSAACPAPTAVPLDRVRLTAAKSSLGRHRKLHLARPQSSGSTSTPDDGLRLARPQGSDSTSTPDDRLRLARPQGSDSASTSEDGLRLARPQGSDSASTSEDGLRLARPLGLGLNLDLGRRSPPRPTPGPGLSLNLGGASASPDLGLGPTTS

SEQ ID NO: 46573 - protein, 95 aa, Zea mays
  Coding DNA Sequence Number=SeqID_3198
  Subcellular localization annotation: CTP_CleavageSite=26; ConfidenceScore=5.32e-01
MEPGGGTAVGAVESLLTSSCFRKGLRAAAVTGPAASLRRRSPKMVTSSLMVGECEPGCGLCPSLSLKDFHHQGWGGECAELGSAPAWAVARSFPQ

SEQ ID NO: 46574 - protein, 331 aa, Zea mays
  Coding DNA Sequence Number=SeqID_3199
  Gene Ontology: Mol. function=protein serine/threonine kinase activity; Cellular component=cytoplasm; Biological process=protein amino acid phosphorylation
  Homolog annotation: Hit_ID=A2WRL1; Match level="QueryCoverage=82%, HitCoverage=77%, E-value=1e-133, Identity=74%"; Hit description =Putative uncharacterized protein
  Pfam annotation: Domain name=Pkinase; Domain location=9-324; Score =118.9; E_value=1.5e-32; Accession=PF00069.16; Description=Protein kinase domain
  Pfam annotation: Domain name=Pkinase_Tyr; Domain location=9-205; Score=-120.5; E_value=4.9e-05; Accession=PF07714.8; Description =Protein tyrosine kinase
  Pfam module annotation: Pfam domain module=Pkinase::Pkinase_Tyr; Domain location=9-324::9-205
MEPRIGNRFRVGRKLGSGSFGEIYLGTNVQTNEEVAIKLENVKTKHPQLLYESKLYRILQGGTGIPNVKWFGVEGDYNVLVMDLLGPSLEDLFSCCNRKLSLKTVLMIADQMINRVEFVHSKSFLHRDIKPDNFLMGLGKRANQVYIIDFGLAKKYRDTSTHQHIPYRENKNLTGTARYASVNTHLGIEQSRRDDMESLGYVLILPWQGLKAGNKKQKYEKISERKVATSIEAPAVGQSSGMAPVANNNRHSGSLAKQKSPVRPEASTSRDAVMPDSSDGRRSSSGRRHSSNPKNYESTIRGMQGLNFDGDDRARTAAGDQPVPFHLNAAA

SEQ ID NO: 46575 - protein, 375 aa, Zea mays
  Coding DNA Sequence Number=SeqID_3200
  Gene Ontology: Mol. function=nucleic acid binding
  Homolog annotation: Hit_ID=Q2QU58; Match level="QueryCoverage=86%, HitCoverage=61%, E-value=5e-09, Identity=23%"; Hit description=Zinc knuckle family protein
MARRRSQKNKKTTPKENKEVTLEILLSDCSNYASWSTSVVNAFRTIDSRLEQILDKSIIPSSYNGKNTSEKDQRCIHLNYLAYDILSKSLSKKDYRAFIMNYNEHISDAHDIWTRIKSKFNESKHISSYDASTSFSPCETNPLKEEEENERWRPNDESISPKGLSSHFDSHICCVANENDSGSTNEDEEDERSFMQLYAHLSQIDKAVVLKLLKRAREQSEALHMLEDILTIKIQSFEELTKEHEELKCSHVDLVQSKSSFELESPGTKDDTCQKLKEENKRLRTSLTQLKGKCTAQPFQDNRDYMMKKLKTGITVACTKSLEENVKDLRIVKRKEQKKKVNTSAKSLDHASMQGNIQGNDQATLHTKKNKKCSE

SEQ ID NO: 46576 - protein, 43 aa, Zea mays
  Coding DNA Sequence Number=SeqID_3201
MVLAMAMDRGATSVEEKVMSLQRFKVSIANAENSSSKTMNTTA

SEQ ID NO: 46577 - protein, 167 aa, Zea mays
  Coding DNA Sequence Number=SeqID_3202
  Subcellular localization annotation: CTP_CleavageSite=44; ConfidenceScore=5.64e-01
MGGDLLAAASALKSVLPPFGPPEQKSSSPPLLERVTVRRSSVFCCSAGPPLSSGVVRTCGGGTGVPFVMALRMPGFFVHRGCRGLNMMVGRGPRGNRPSRLLGPDSRRSPWQRLSGRDDDVVLQSGDPWTASPSEARSDLAEGVVDAEGVTAPFQRQDPSLQDQSVL

SEQ ID NO: 46578 - protein, 196 aa, Zea mays
  Coding DNA Sequence Number=SeqID_3203
  Homolog annotation: Hit_ID=A3AA52; Match level="QueryCoverage=63%, HitCoverage=20%, E-value=4e-44, Identity=72%"; Hit description =Putative uncharacterized protein
MRMSKLLRGVMESDWGPRVKPLSFKSLGVINHYALRNTMQALTGLGGRNLARRHPSRLLRLNALLLLCLCAFPAPARSQNTTMATAAPASVEGFNCTTNRTYPCQVYTLYRAGFAGVPLNLAAIGDLFAVSRFMVAHANNLSTTAALANGQPLLVPLQCGCPSRYPSSYASMQYQIGSGDTYWIVSTTKLQNLTQY

SEQ ID NO: 46579 - protein, 145 aa, Zea mays
  Coding DNA Sequence Number=SeqID_3204
MLRRHITCQWNGQAARLIRNKCKGRAAQRPYVRLHPLAYVTGSRPRGSIGAPPERGAEAYTESRDPAVSGPDPTQRDSGPVLGVRLAAVEVLDLTRRSGLYMQGFDTFPWGPDPLLIPWRILSSPATWRPWSRPRGGVGCCSPCD

SEQ ID NO: 46580 - protein, 109 aa, Zea mays
  Coding DNA Sequence Number=SeqID_3205
MKRRTTAGGGSLLAWRFAFFALGDPHTRFTMASLLYLERFQSEGALNLVRNLLGWGAPTFAGRIRAGASPLGDLIAGEFVLFVSYLSYGLALPISPFFLQLLEELGLQL

SEQ ID NO: 46581 - protein, 139 aa, Zea mays
  Coding DNA Sequence Number=SeqID_3206
MSSSSSVASVSPADPSSEDTLSDLVATELQPGYTVEFGTLRISSVRVQEMQQLGYFGDGGEVEDLPWLSAAVMCSHCYVVFPPFEVAKDDEDEGALRYAARMSSGRDLVEEFIGYGVWPLAHGWVLGEVCPRQMPTLGE

SEQ ID NO: 46582 - protein, 178 aa, Zea mays
  Coding DNA Sequence Number=SeqID_3207
MAAARLIRNKCRGHAAQKPYVRLRPLAYVTGSRPCGSIRSPPEWGAKAYAIWSGHVSAPDPLLTLIKAWVFFVPVSRDLAVSGPDPAQGGPGTPVEVLDLTRRSGPYVQGSDTFPWGSGPTVDILEDIVFSGHVAAPEPSAWWGRALFATRLEIAAWTPRLHTVVRGTPVSGYQQILT

SEQ ID NO: 46583 - protein, 273 aa, Zea mays
  Coding DNA Sequence Number=SeqID_3208
MEPPNAHPGRRLILALRGRGIARRGRAGVPRHRCPRRQGGGGRGCDKRRAPEAGDGIVAHPDNGGPPVFRFLGRWIGRGHVGDERGMALGFIFVEGELARSRDGCGRSTARIPRSARQYRGRAESERLPNRARLSAPAGVRVDDGSRELTGVGLRGMEGAFVINTSYCSDVEGFSYLLQSCALHVGVRKKPKYLHTLDTHFDDLFSHCTHLNSQVENVEHQIKELKEENATLQNSLEMAECDDANTREAYRSLKDYARKLKRFAPVKRVRKHF

SEQ ID NO: 46584 - protein, 319 aa, Zea mays
  Coding DNA Sequence Number=SeqID_3209
  Homolog annotation: Hit_ID=Q5NBA8; Match level="QueryCoverage=93%, HitCoverage=74%, E-value=1e-130, Identity=78%"; Hit description =Putative uncharacterized protein P0453A06.7
MSSSSGEFGRRHQDNVEVIFPESQVVGSGRQLEESGVLNGALKAQGNSWGLHMPLVCPDGAVVAYAWKRQLAGQAGASAVDRTRLALKAFTDQKRRFFPHLEDEVVSHLHDGQPGDTKKSKLFTSNGYLEEKSLSEILKNLEHEVPNIKIFTYWHLDWSKRASSLASLLDDDFVDPSKELNLQNMDKSRSDALTTTIDQVAVIELLVPSIFRAVVSLHPAGSTDPDAVAFFSPTEEHADKALQYFINAEPSKALPLLLRWIASYQTLFTKVCSKCRRLLMMDKSLALLLPPVHRPYHQTSNVGPDLQEAYHIGCSSYDG

SEQ ID NO: 46585 - protein, 141 aa, Zea mays
  Coding DNA Sequence Number=SeqID_3210
MGKNNKRKREPTPPSEEFGDSEYSEEEFSSESEGSPASSPCGLAAEVWTYIRAVERSGLEGSDESEYSSDEEDSDGGGEVEDDDDDDDGDDGDGDGSGGGWGSGGGSKDGDGGSSRGSNRGGSSKGSTKGGGGGSSSRASG

SEQ ID NO: 46586 - protein, 148 aa, Zea mays
  Coding DNA Sequence Number=SeqID_3211
MGKNNKRKREPTPPSEEFGDSEYSEEEFSSESEGSPAPVPLRESSDDSDDSHGLAAEVWTYIRAVERSGLEGSDESEYSSDEEDSDGGGEVEDDDDDDDDDDDDGDGDGSGGGSKDGDGGSSRGSNRGGSSKGSTKGGGGGSSSRASG

SEQ ID NO: 46587 - protein, 303 aa, Zea mays
  Coding DNA Sequence Number=SeqID_3212
MEVGLRFLGWLQEELEVLPTIVTGLMSFASLITCEGAVNAWSREGCTHFEVFDQSDERLRTRNLPGRRPVMKRYAGALYDRMWDPHVRDTVWERFDRAMEQMAHDEEVEDLGDLESTLPALSGAKEGIGGQLAPPPDAGEGPVMTPAPTCAGEDPVPAAAPACEDTSVEAVGPAAEDSAASAGPSQVFSSDGEFGIPFSWTEESADEDLDYFAALDVAAAETSPRVEAGEVSDLRSARTECWRRRVVLKHRLARFREVVGTIGWGWSGTAFEQIGLVNESYCLRRLGRALVRGICGIFLRVRN

SEQ ID NO: 46588 - protein, 317 aa, Zea mays
  Coding DNA Sequence Number=SeqID_3213
MRIVGRYAPRTETLWSWDIRGSNVRLNRVFELDRLPYGGYLGDDTAVTVDRQKKGRRLWMRKVLHEEPCRLRPLKRETRVGDPSREVKKAQGISKSTAPGSGKPPPAAKPAVPGPSKPSSGAKAVAPGSSKPPSAEPTQERGPSSRLRTTEAVVGGAELSMDICVDDYRVGGVMMFDARTGRGLVVAAASVAAPTKAKGASQDTWYKFCASGEITSAAAAKDVPGSVAQQLKHAAAFADHVASGTLTSEFAAERKRLEGMIERLRTQHTEAARDKSTAENKSHRLIEKLSAAKAEKEDLSRRLVAKKKDADRACAEA

SEQ ID NO: 46589 - protein, 49 aa, Zea mays
  Coding DNA Sequence Number=SeqID_3214
MGKKYPPQTFVGITTGKYFCRGDEELKSDKESHIAISTNFGVLPVKVRD

SEQ ID NO: 46590 - protein, 146 aa, Zea mays
  Coding DNA Sequence Number=SeqID_3215
MVQWVTRSMRSGVVTNSGERERTVPVGLVLGSSSGKLHGLSRKLYEGSDRAKVGGGGLITVGILGRLWWVAGRSPELRASSGKPGVVRRGRQGRWSCMRAGFIATRGHDTGVGTGAAEGERGARAGVLWARSRMTAHVEHVVVYFC

SEQ ID NO: 46591 - protein, 794 aa, Zea mays
  Coding DNA Sequence Number=SeqID_3216
  Homolog annotation: Hit_ID=Q7XE59; Match level="QueryCoverage=20%, HitCoverage=22%, E-value=4e-07, Identity=31%"; Hit description =Putative uncharacterized protein
  Pfam annotation: Domain name=Transposase_28; Domain location=26-205; Score=-65.1; E_value=0.09; Accession=PF04195.3; Description=Putative gypsy type transposon
MSSSSSSAANTPPADASSEDTLSNVAAEELHPGDTVEFGVSRISLVPVEDMHELGYFGSGVGHVPGAEEVPEPEGELVVFEAFFTTGLRLPAHRFVAEVLQRFEVQVHQLAPNAVVALAKYVWAATSYGGEVKDHPGLPVAMMCSHYYVAYPQFEVAEDDEDEGALRCAARMSSGRDLVEEFIGYGVWPLAHGWALGEVCPHEMPSLGGQRVRSPAFALDLHGRDPAAFVREAEDGATRIVGRYVPRIEGLWSWDICGSNVRLNRVFELNCLPYGGYPGDDAADRREKKPVDVTEEGPLQGAAPATKKRKLGTAVGEWGKPVPAAKPAAPEHNKASASAKAAASGGSKPPLGGLYHGAGSGEGQLAVVPPPVVTTSPTAVVGAKGAARDPWATFCVSGEILSAAAAKDVAADFADLVASGALTADVAAEVEHLWAQHANAVREKPEAKVARAEGSLVRQRAEELEARFNALCSRVDKVGSSTRAEVERTHAQFVDAYRELGARTTEWLREELLVLPTIVTGFMSFASLVTCEGGVNALSREGCRHYEVFDQADENFECEIFKVEDPMVKQSAGALFERMWGPHGREAVRKRSDRAIEQMAHVEDLVGLDGVLPEAAEVDPVPPSDAGEGPSVTPAPAAAGEDPAPAPAPTGEDALKVVAEPAAEPAAEDPTAAAGPSQVLGFGPAHATATDNAIFVVASTVPADDDSFGSVSKCFESDDSGSSIAWTEESSDEDLDYFVALDVATAEPSPRAEGSEELPGASEGELRNLFEGEELRTMLFNYREMGVIPKVEPM

SEQ ID NO: 46592 - protein, 118 aa, Zea mays
  Coding DNA Sequence Number=SeqID_3217
  Subcellular localization annotation: CTP_CleavageSite=58; ConfidenceScore=5.20e-01
MDSLGLPTPRAIGDCSPKQPTIFYLLLTRRTICDTPSTVAGTCEAPSMLRVSDDMRTRSAVGRSTTGIMASQLGVRPPEPSQQRPRLVVLPGDGRGTATTTPLPGTDIIPDDRSTRVE

SEQ ID NO: 46593 - protein, 112 aa, Zea mays
  Coding DNA Sequence Number=SeqID_3218
MTDSPRTRVDERRSARGCDRGRGQQVGVEEQDEGREDEHDVRRWRKRWCAHDVKRPRGHAIATARVGVGAGVGRIRGGGACSYALCREWGGAEVEAGWERENKQDGERGGGN

SEQ ID NO: 46594 - protein, 312 aa, Zea mays
  Coding DNA Sequence Number=SeqID_3219
MGTQSTRSNRSKVEKRHLKRRIDATKKKTMEASSSTLVAVISHQPTSVLDLLKDDSSHSSTRANSDSDETLEGLLHGDTAAKRQWWGTRRPATRRRCTNANARHTSSPARPPSASSRKSSTPSCKSSTASMGTSSRGAWRLRGPSQESSSPSTSRRGQEPSSSTCQPEPSMIGPTSKRPSSGILGHRQATRKLLVPKEVHPEEWGKSTRLHPMVFLEKKRAPRHHRCDIVSAFTYGSMNKAFIHELERGIPKTTADLLEIATKSADGKDAVGTIFHKRKSPHDADVPSSENGEGWEHFNKRWRNHRARHDDE

SEQ ID NO: 46595 - protein, 274 aa, Zea mays
  Coding DNA Sequence Number=SeqID_3220
MDEGCTQPLSSDPIVGAKAKTLPFAPAFINLAAPTEAKQPTRSTLRPLHYKTKAYDDVAPSHVLTRPGGPRGIRPIERKFQHLAPIVRATNKTPAMAPKRASSKAAPSVDEAAKAALLAKKKGKALADTTHQEACEDDTVNKRQHNDQPTPEGSLRTCSSEGQPQQPPPGFAPLEGEDATEDDEVIGVSAKEQLQLRALRIKNRNLQIRKKSSRPSANVFPRKPNAKANMICSTARPSNSARQSESYSFLSADSSSRTPQHSKASTTLMSGVPW

SEQ ID NO: 46596 - protein, 91 aa, Zea mays
  Coding DNA Sequence Number=SeqID_3221
  Gene Ontology: Mol. function=metal ion binding
  Homolog annotation: Hit_ID=A7P3H9; Match level="QueryCoverage=86%, HitCoverage=34%, E-value=2e-14, Identity=49%"; Hit description =Chromosome chr1 scaffold_5, whole genome shotgun sequence
MDHVLAGLMGDHLALIVDRLLIESTLEAAIGGGKHMVDLCQETMDVEYFHRGLGGGSVTKVVECRICQEEDWDTCMEAPCTCCGSLKLGLV

SEQ ID NO: 46597 - protein, 42 aa, Zea mays
  Coding DNA Sequence Number=SeqID_3222
MAEALAAMAGGIELAGAKERGLAGEGFELGIKVNIPDLWLKV

SEQ ID NO: 46598 - protein, 110 aa, Zea mays
  Coding DNA Sequence Number=SeqID_3223
  Subcellular localization annotation: CTP_CleavageSite=57; ConfidenceScore=5.71e-01
MASPLQPPSSRASASASSASRTPRRRRASPPARVDRPTPAISDGDPHTVVIPETSPTSSTTSPEQSRRREYVLIPEQGPVQEEDQEQASEAAIEDLPAAPAIEGKPRFYA

SEQ ID NO: 46599 - protein, 94 aa, Zea mays
  Coding DNA Sequence Number=SeqID_3224
MAGGIELAGAKERGLAGEGWYWRETLGDTGVSQPSPLKGISSRDSGQSPPRVKRRIRRAGGGVGCDYVSASLGRQSGKLDLKNSSVSQVASSSE

SEQ ID NO: 46600 - protein, 107 aa, Zea mays
  Coding DNA Sequence Number=SeqID_3225
MTGFGRAVVRVAAGCAGGSQARREVAVAGVRFVILLLSFVILYIFKYRKENSSLKEKVSTRFQEGDSCAPRSYQGTEITMSGYNFIKVINFTLDMFEGPMAGLEPKD

SEQ ID NO: 46601 - protein, 47 aa, Zea mays
  Coding DNA Sequence Number=SeqID_3226
MGCRGCSLPPSGNQGGRKAVEELVTKDPGDQQIEVAEQELIEGKLCP

SEQ ID NO: 46602 - protein, 135 aa, Zea mays
  Coding DNA Sequence Number=SeqID_3227
  Homolog annotation: Hit_ID=A2Y2N2; Match level="QueryCoverage=32%, HitCoverage=5%, E-value=1e-14, Identity=88%"; Hit description =Putative uncharacterized protein
  Pfam annotation: Domain name=PPR; Domain location=93-127; Score=30.1; E_value=8.1e-06; Accession=PF01535.11; Description=PPR repeat
MSRTFDDYYIEDCGIILAPKVTQRRIDNTSRIGSSTWRDISSLSSMAVAEVYSPTAAAAAQQQREKATSQIWRAVVGWIDETSLPPGSRLDVRAYTTVLHALSRAGQYERALELFAELRRQGYEIKRDSMFHKAR

SEQ ID NO: 46603 - protein, 127 aa, Zea mays
  Coding DNA Sequence Number=SeqID_3228
MRLILWYLFLTCGGCETARVSSHTFIAQQVVGNNVHELAKGGSSREVYEIVGSRITTIGVMVEKGPFGTAPAPDSKRGSGGAVPNGRIRRISSSRGSGSRAKEAGAGVLPNRPLIYHITFDLERLIY

SEQ ID NO: 46604 - protein, 252 aa, Zea mays
  Coding DNA Sequence Number=SeqID_3229
  Gene Ontology: Mol. function=kinase activity; Cellular component =ornithine carbamoyltransferase complex; Biological process=amino acid metabolic process
  Homolog annotation: Hit_ID=Q6QP54; Match level="QueryCoverage=21%, HitCoverage=19%, E-value=1e-09, Identity=64%"; Hit description =Putative kinase
MPSWVSERFWRPVHVMSWLSEERLGPMEPEVGRGSDSSEVEAESEPWGRARRRPSSGVEAESEPWGRARRRPSSRAEAESEPWGRARRRSSSEVEAEFEPWGRARRSPSPGVEVESKPWGRARRRPSFEDEAESEPWGRARRRPSSEVEAESEPWSRARRSPSSKVEVESEPWGRARRSPSSEVEVESEPWGQARRSFLWRLRPVLAAISLTLTGGTVVGAAQAALFSCQVSQWRGEVTAVTSALSTEERAS

SEQ ID NO: 46605 - protein, 313 aa, Zea mays
  Coding DNA Sequence Number=SeqID_3230
  Subcellular localization annotation: CTP_CleavageSite=50; ConfidenceScore=5.60e-01
MDPVGTSSPSVVDIVAATSTTPGHGSRRASPSSAMDPAAATSPPAIDPVRASSPSDVDLIGVAAASTHAMYLVGATLPPPPRHRSSRGLLALRHGPRWSLLALRHGSRQSRLDHHHGPRRSHLARDYNSSRSRQQHWGVTTARAQQQWGATESDRARQGKGGEEDSCLPASVTHATKWESEEAPECPPSFGNDIYALSGPNPTQASRCNEDVGLADFDGALPSSSRRRRLRVKGSVFAFAPTFALRGTSSTKSSGSGRLEMRNTLRPVDPGDICPPQAPNLWVDFEVMNPKIPRSSLQDPELHWVHRRCTQWV

SEQ ID NO: 46606 - protein, 220 aa, Zea mays
  Coding DNA Sequence Number=SeqID_3231
MVSPVSCKRVIRVDVRAPFVGGRLGAQRHAQKYLRQLARRLLDAWAWVPKLTCQKLEKRVHLARLHAACMAARPFCPLVWAKMGGRLGGPWSVLEKTQPVAPGGARRESCLQKEGDSFRKATMSSSSLKRRVFPSSKPPDGGYPPPFRLLIGGTQLHGSWYLSAIVRLQGFSSCCPAAPLRRRSPEMATSGLMVGESEPGCGLFPSLSLKDFRHPGQDGR

SEQ ID NO: 46607 - protein, 418 aa, Zea mays
  Coding DNA Sequence Number=SeqID_3232
MAHSPLLLAKRRRRGVCKKSSLSLIVLSPCAEARGLLSQKPAPAKSLTASTYQPESLGPDRAPGLRPVRMRERPGQPKRYASAACATPTAAPLDRVSLIGSQVLTKAPRRTPLRPTPGLGLGLRPGRRRTPLRPTPGLGLGLRPGRRRTPLRPTPGLGLGLRPGRRRTPLRPTPGLGLGLRPGRRRTTAPPDPRARTRAETRKTTKLRLARPQGSDFALASAERLPPRPTPWLGLGHGNRRRTRPRLRRNLHVALPRAQTATSTGSVIIILPRIDSERRQQGLDRSNSCPSARLRRTSDSHDITPAGCPDLSGCHIGMAFSGKVGRAGPRTGQALSWGRSLPSPAWTLVTPLLQAHPTWARDEHEGRGTSTSLTLDSGHLASPPFALAHALDPSGLGHAAHSLVGLGTPLSRNADNHR

SEQ ID NO: 46608 - protein, 275 aa, Zea mays
  Coding DNA Sequence Number=SeqID_3233
MRSKEVAFAREDHLRGHFQDLVMAYNDLEDYSNVLHEEVHQLYYQLHPDDAPGATEAEGGVVLADGGEPDADSEEEVAPVFAPGGNSLGGSDMPRRVRLSDIAGTSQGGVEDDSDPPPPPIPPTLADAIAALVNATANNARVLREVLQNQNQHGARVPPNNARNASYMEFMETRPPTFIKAEEPLEADEWLWVEKTNWKCLGSSSQDFAQSGAPDCPVVHRTVSGELVALGNSSSTYGYNSPDCPVCTGLSGEPTVGRANGRPRDLRGTRGRANG

SEQ ID NO: 46609 - protein, 283 aa, Zea mays
  Coding DNA Sequence Number=SeqID_3234
  Homolog annotation: Hit_ID=Q6QP54; Match level="QueryCoverage=29%, HitCoverage=34%, E-value=3e-07, Identity=45%"; Hit description =Putative kinase
MAHRTVRCTPDMSGAPATSLVSLDSDRWSSDFWARLDVRWRTGHALFTVRCACFRVPDDCALLVRIKCVAGTRCRPNSLSPGDVGAPPKLGLNLSSVAEAESEPLGRARRKSFGRGQGGVRALGSGEAEFVVFQGRAQVRALGSGGAEFAVFRVLARVRALGSGGAEFAVFRVLARVRALGSGGAEFAVFRVLARVRALGSGGAEFAVFRVLARVRALGSGGAEFAVFRVLARVRALGSGGAEFAVFRVLARVRALGSGRAEFPMAPLARPDCLSDSLYRVAL

SEQ ID NO: 46610 - protein, 585 aa, Zea mays
  Coding DNA Sequence Number=SeqID_3235
MAHRTVRCTPDMSGAPATSLVPLESDRWSSDLWATPDVRWRTGQLLFIVRCASMGKPDVCARCGAFNASAVKVHVPVTNLANAAVSATNDVPGITNIMPSLVLAEGPSVNHVKAASDDINSDKLCVKVAARGAQAVAADVALVPTTPATSLAAPTSPPKSVNDDCKSNNDVAVPRLSATVLHDITKLIEPLPVVVRVVSSTPPPAPLGIQLVFESMPSRCKASVLWILLAIPWPPFVPMYLVGDAVVVAVVTVISSMPLLLQCYHSGVACVLTDANSSLSTFQLERNVVWKPPWQYHNTSSEPLVLMKFVYFSTGVHGTLDMVSTISEQCYVVLHLLITSETCMSWTLSLAQELKTDDVSLVASDENSYGLIVPSYTSCSFHEGLSEMLCQLVIFFVVVLSEREEDKHLHCAQQMYSVSEISIRRVGFLASIMKEKSGIDLVDMVVQLFLFFDHNLNEIFATLASGPERSFCAMFSAAYIELYLVVQQQGALFHIADGGFASLFCIYLWKVSWPSFTISGTIIAIWCCDLFKKLPWQPPNQEGVHQQQCDAPCQLEIVYYGNDVVYNQDPFVSHDVIKNKFTTFP

SEQ ID NO: 46611 - protein, 137 aa, Zea mays
  Coding DNA Sequence Number=SeqID_3236
MAEGLTDGEIAPRGSRDAREDMGARNRSETHWIARSTRGGGRPKSGEVDLGPPVKSGRVRGLGKLHGLLAKLAEALARLEGGWSGLATVAEALAAMAGGIELAGAKERGLAGEEIWSQEIQSVSLLKPEANPWFCRV

SEQ ID NO: 46612 - protein, 147 aa, Zea mays
  Coding DNA Sequence Number=SeqID_3237
MEMVAQEKSWGGQRMAAGMDLYPGGSRLASKAPVKRPRISRARREELALSVEEEERAAPAVPRARETQHRRGRKWNQADPLGCGSHRQRAVHVWLWPREGVLGRVPAGCNEYGQKHSGIYSLQIVYILGITNPTPLKNNLVLEIKKI

SEQ ID NO: 46613 - protein, 187 aa, Zea mays
  Coding DNA Sequence Number=SeqID_3238
MEMVAQEKSWGGQRTAAGMDLYPGGSRLASKAPVKRPRISRARREELALSVEEEERAAPAVPRARETQRRRGRKWNQADPLGCGSHRQRVVHVWLLPREGVLGRVPADCNLADGEYVLIPEQGPVQEEDQEQASEAGIEDLSAAPAIEGKPRFICITVLLYATLLHLMLVGLQCALKCRSCLKPLVA

SEQ ID NO: 46614 - protein, 292 aa, Zea mays
  Coding DNA Sequence Number=SeqID_3239
MADPIVKESAGAIYDRMWGPHGREVVRERAETARAQAARGERVDDFGALNSALPDPESNPAEAVSEAALEPPPETAEGVPDAPAAAAAGEGPPLETAESVPDAPAAAAAGEGPSPTAVPRVEDPATVAVEATAEAPATAGSSQVQDFGPAHATATTNFLAASTVDGVNKSDGSTSKFSDFGDSGSSVEWTEESSDEDLDYFAALDVAAAEASLHTADTEDVPGPSTGRRRLRAVAKRRVSGAEGGRLRACMVKLCALTHLAMLAKAFVRLCPRATSARMVFAVDFGFSHLLC

SEQ ID NO: 46615 - protein, 34 aa, Zea mays
  Coding DNA Sequence Number=SeqID_3240
MGSRHSACSAEAECRGKEEGVEADLQEFLGEFED

SEQ ID NO: 46616 - protein, 67 aa, Zea mays
  Coding DNA Sequence Number=SeqID_3241
MADPGMGANSLREHHNPVTDGDDGKRSQTSSISRPPCGRIPIKGVESITDLPWPWCMQESERRDTNL

SEQ ID NO: 46617 - protein, 101 aa, Zea mays
  Coding DNA Sequence Number=SeqID_3242
MEHRPGLERLLETAHLELDGKLFVNTQQAPTWRANYRRFETEGSLDRRVNCRRVPQPRWVGARRSAKGGGSRRETGVRGGNLAAFVRKERIQVYNGGVAVC

SEQ ID NO: 46618 - protein, 298 aa, Zea mays
  Coding DNA Sequence Number=SeqID_3243
MAPPVDVVGPCPRLGDVEAPPRSRSSLSSEAEVESEPLGRARRRPSAEARAESEPWGRAKRSSSSSGAEPEFEPWGRAERSSSSSRAEPESEPWGRAERSSSSSGAEPESEPWGRAERSSSSSGAEPESEPWGRAKRSSSSSGAEPESEPWVGRNGVRRLSGLSPSPSPGSGGAEFPMAPEAGLGCCQPHSVEWHSSRGDAGGAVLLSDRSVERRSDCGHFGSVDWRACVRIKVSGHLCIKCPCDLVGWRGDLAKVASWRRLGLGRAESVSVAGGGSRARRRSSRVGYPCPRLGSGEA

SEQ ID NO: 46619 - protein, 200 aa, Zea mays
  Coding DNA Sequence Number=SeqID_3244
MDEGTPFGDLEFEDDAEPSHGLHAGLSSLWVRGYLAHRLRIWFPEDKGVRRPEQPDQPRRLTGPAGGGSGHGLTTLGAVSAVPATLPRPRGSVPRPPGGRLGASAMTRRPRAPQAHSSLGGAIHHRQDFEARNIQAGQQTRRGSDISEGSSSILGIDSTFGGIRPGLGQQHGRRISTSKEDVNTAPEPSPPGSPPGTWPE

SEQ ID NO: 46620 - protein, 273 aa, Zea mays
  Coding DNA Sequence Number=SeqID_3245
MVGRSKPGCSLCPALSFKDLHHPCWGGGRAEPELYLPYGPVGHLLLQQSGDRALTGLAEGTDFDNAGPVGRKRRQLQHAWFAGSAGSSTAFGATSHRWAECGHLPTVRAAVAPRASGDYPRRRSLLGRRSCSWAVLPLLRHDASVRRLVLARPGGLEWGSAGGQVAAVVGAEVVAAGEVFVADEIVGAIYGPTSGSLALIACPRPSSGDVGKGLVAAASAPRSSLLLFGRPERRSLSLLQEWAAASHLEFVIPQALQCGGLFVPAGVEPEFHL

SEQ ID NO: 46621 - protein, 64 aa, Zea mays
  Coding DNA Sequence Number=SeqID_3246
MADPGMGANSLRGHHNPVTDGDGGKRSQTSSISRPPCVHSTTELADEIFTAHRPYNSPKLNISQ

SEQ ID NO: 46622 - protein, 177 aa, Zea mays
  Coding DNA Sequence Number=SeqID_3247
MSKGKEQLEMSWLEQPRLCSVWEHRTVRWCTGQCPVRQAGSCELAALGISSAAYDYNSPDCPVCTGLSGEPTVGRANGRLRDLRKTRGRANGREGAPDSVRCANGSQAPTVGFTGKGKKSAPDSVRCAPDCPVRQATEGKICLPGMLSTAPSCLGAIKGTPRRMEEYTKHSLSIPKH

SEQ ID NO: 46623 - protein, 127 aa, Zea mays
  Coding DNA Sequence Number=SeqID_3248
MDEQSANQEQRKEKSAKKFQHVIPAYIEQLAEMFHGIVVDGSSSCIPRDVHRPSQEVYEEQEGEDGYGEEFLNSNLAVESGADKELDEYFVATKLFKDEYNKTIFNRFDTTTQRMKWLQRFCKEYCG

SEQ ID NO: 46624 - protein, 33 aa, Zea mays
  Coding DNA Sequence Number=SeqID_3249
MEASEIQGIVPRTLVKREMKARRVSPGSCLTAW

SEQ ID NO: 46625 - protein, 444 aa, Zea mays
  Coding DNA Sequence Number=SeqID_3250
MEARHRTALGDLAAEVEPELDQSMEAYPEVLKVAAQHPFVRALTEEVPPHCILVLKLEAELLQQQQEERRDRQRQPARDVGGEQNKLPGGEAAEGDGASADPPGERRRASSEQVVHHVECRLGLEEVGLAKRSHGDYGGGKQKNANAKGRGELEGERAQQLGKCESITVARGVNPFSRKTPPLLVCGSTSAEKANHHARSEPPPAVMRLFISATRNNNPVSDTRARAHESYSLGVGSRVQKSRTAARANVAVGVTKGGLAVITSARKWRANRQSSFGPTCRLVSSPEGRHVDGSRAATWPEKTIYSKVSIVGPDPHKKVSDPCIYRPDLRARSRTSMGANQTLGTGPGPPCVGSGPLTTRSRDSETKNSQALIKARRGFGADTCPDHTAYASALRSGGDPMLPRDVSPQHLMSPATPLAARPYCRMHYAHHDSRVTEEAAATYQ

SEQ ID NO: 46626 - protein, 48 aa, Zea mays
  Coding DNA Sequence Number=SeqID_3251
MWGGHQKEGAWAWLAVSSECWGVQVFGEREDVVAVERENGGDCRFRSE

SEQ ID NO: 46627 - protein, 144 aa, Zea mays
  Coding DNA Sequence Number=SeqID_3252
MAERPYVRLRPLAYVTGSRPRGSIGSPPERRAEAYTVWSGHVSAPDPRLALIKAWVFFVLESRDPAVSGPDPTQGGPGPVPGVRFAPMEVLDLARRSGLYIQGSVTFSWGPNPLLIPWSISSSLAKWRPWSRPRDGIGCCSPRD

SEQ ID NO: 46628 - protein, 343 aa, Zea mays
  Coding DNA Sequence Number=SeqID_3253
  Homolog annotation: Hit_ID=Q6QP51; Match level="QueryCoverage=78%, HitCoverage=92%, E-value=3e-38, Identity=48%"; Hit description =Putative growth-regulating factor 1
MSRLLDCGTGAATRGSPAHNPTVPIEHNGHGLASPPEAAREPSPTGKRHLWQAKRASFHLRHDDRVKKGVRRLAPRKGSTAALEHSGSKPITDQGFEGWPLGRVRQPPQSTRAPRSLLIRGSKVGPSEGFDSRPRARRVRDDSGYVRYMAEARATLPRLGGCSRNLATAKPLTASTNQPKNSEPDHAPELQPGCMREQQGRPRPQGLHPAGVPPTLLNTAGNHPQHKPQRLMGTVHVKASSTQGTRSRLARAQPQAGTVIPDEVTSRPRASSGSGRTLGTPEAQLGQASSRSNLGQIASPTDRIAGAFNRRSPHFDCCASHPGKADNNKFSLGRNRKLRLARP

SEQ ID NO: 46629 - protein, 797 aa, Zea mays
  Coding DNA Sequence Number=SeqID_3254
  Gene Ontology: Mol. function=potassium ion transmembrane transporter activity; Cellular component=integral to membrane; Biological process=potassium ion transport
  Homolog annotation: Hit_ID=Q69RI8; Match level="QueryCoverage=85%, HitCoverage=74%, E-value=0.0, Identity=56%"; Hit description =Probable potassium transporter 14
  Pfam annotation: Domain name=K_trans; Domain location=1-692; Score =726.7; E_value=1.6e-215; Accession=PF02705.7; Description=K+ potassium transporter
MAEKVPSVELERSLKIKERLETSSMLKKLLLMLVLFGTSMVIADGVVTSAMSVMSAVNGLKVGIASVNEGEVVMITVAFLIVLFSLQRFGTSKVGLAVGPALFVWFCCLAGIGMYNLRVYGPEVLQAFNPVYIYYYFERNPTEAWMSLGGCLLCATGSEAMFADLCYFSVKSVQLTFVFLVLPCLLLGYLGQAAFLMENLDKSQQVFFLSIPSQAFWPVVFIATLAALIASRAMTTAIFSTIKQATALGCFPRLKIIHTSRKFMGQIYIPVMNWFLLVSCLAFVAVFGSINEIGNAYGIAELGVMMMTTVLVTIIMLLIWQVNIVIVLCFLNLFLGLELFFFSSVLGSAADGSWVLLVFAAVLYLVMYIWNYGTKLKYETEVKQKLSMDLLIQLGCNLGTVRAPGIGLLYNELVRGVPAIFGHFLTTLPAMHSMIIFVCIKWVPVPVVPQNERFLFRRVCPKNYHMFRCIARKGHRLVLFLECAVVLLPPLKFCSAEFALIVNPDAFILIEVISSFHLLIFAGTVIMLLRVLFMKWYGYKDVRKENHQAFEQLLIESLEKFIRREAQERSLERSLESDHNDDKDSEEEIASSSSRVIDESGGADNSALGSSMSLEEGSSMDNELSFIHKAKESGVVYLLGHGDIRARKESFFVKKLVINYFYAFLRRNCRRGIATLSIPHTRLMQQGNKPAAAHTYSSYPDVPGGFCLAACAERREQTLILIAQLRLSGFEIGVLSCACIPQTGPASTLAWLTYTCPPAGAAEAPDHIAIAGLRGGWMDGWQGEALVSPRISGNCET

SEQ ID NO: 46630 - protein, 325 aa, Zea mays
  Coding DNA Sequence Number=SeqID_3255
  Homolog annotation: Hit_ID=A2XFR6; Match level="QueryCoverage=52%, HitCoverage=49%, E-value=6e-11, Identity=30%"; Hit description =Putative uncharacterized protein
MPVVQPAGSHARPPRAPPQDNEQSVVPECVAEDLPEQQPGLSSTFRFPHFDINVEYYGYVLDSVDVLDILIWLVLDARHGIPAAGGDPDGDRDDDDAGGCSSHDTELSEELEPEGWIARPITRDAARECHFHDALNTLLRRAFNRHTWSIEYRCVVYQHRRGLYPDQWEATCLVHRPDDDLRGAEAFSKHYSITERDTAEAAMQDATRRALSQYCSLFRGVADGLDLKYYPRHLTGSAGGVIVSPVGEGNPRLNSMVNLAVVLNTELDHALDELGKVWAEVVELRAECAACHYLDGGSPAPVRIQHPYRSSPRGRFDYGTPNCRT

SEQ ID NO: 46631 - protein, 158 aa, Zea mays
  Coding DNA Sequence Number=SeqID_3256
  Subcellular localization annotation: CTP_CleavageSite=31; ConfidenceScore=5.17e-01
MGQSAAGTRVVVDVTEDGLAVLTIASARKQRANRRSSFGPTCRLVSSLEVGPRATVGTLNQGYPLLHHAVNCTRPLHVGGSRAATWPEETIYSKVATVGPDPNGKVPNPWMRCPDLRARFKTSIGTNQTPRTGPRPFWRGPRYSQWGPGIPRQRIPRP

SEQ ID NO: 46632 - protein, 188 aa, Zea mays
  Coding DNA Sequence Number=SeqID_3257
MEPQLSLLSTPARLMNILEARHRWKSTNSPTARSPRGMPLARITPSKQATHHVEHPLSLDMLGMNLQGHGELRRCKAETLKAKGHSEWERSEGMAATRGMNPVLKADSPARAPKCHKKSPSMHIGPHVMHLACRFLGAMKANHHAKSKPPRLFVSAESSGPASSTGAQARKSYSSSVGLRVRRRRTAV

SEQ ID NO: 46633 - protein, 192 aa, Zea mays
  Coding DNA Sequence Number=SeqID_3258
  Subcellular localization annotation: CTP_CleavageSite=11; ConfidenceScore=5.24e-01
MEWSRPGNAATASMSPHSEGRMFTSLVKVDSGLSYGSNLHAPSSLALMASVPPPMVTAGLATEDAPRGVVQDVRPPGGSLDWDLGLNTASARERLRYGTRLSGYTALDHPRRQRGPKLQAWLFNSDVIISARVGDRMGGLGQQARFMRADLTGLAKRFPFWCGKTDTPGSAYFRHLEGSFPAGGEFEEPFLV

SEQ ID NO: 46634 - protein, 169 aa, Zea mays
  Coding DNA Sequence Number=SeqID_3259
MGWRPASSSNIRGRSAFTSLAEEADFGYAGPVDCRRRRPPCARFPGLDGLGAASDAASCRLVGVWLSVHCTGDGRAVRSEDGSEDLFAHAGAAAIRRYGTGAEVAAVVGAEVVAAAGGWWAMMHNSADLCMRIRELLESGINPINARRARGEQEGQPERSKGRACHLGG

SEQ ID NO: 46635 - protein, 364 aa, Zea mays
  Coding DNA Sequence Number=SeqID_3260
MAERYQLPRSCIPPTTRRKDYGHPPSGSSEGGKTRCIREREDMVAFQGGHPPFKGDSPYLRPQPSWAESSPTRSKVLPLRRGGWVPHVMQAGPEQKKPNRRARCMQPPSGYKWPSTFAQTSGRKGGGSERRFAFAIMTASKKGLGKGDTPKRILPREGTRLRASLLIRGSKAGPSEGFNSRLRARGLHTHYWSERLEGCSRKLGFDQTVDSVNIPAREFGTRSCTWATASSHEGTTRPAKALREALRPRRSQTTPPRPRGLHPAGALARTHRNKTQPRKAGPLAKKCGKSLQASVNTPFEARGLLSGTIIRGTLKAPNSQLKDSAACATPTAVPLDRVRLTGSQARPQTPLETPLRPTQGLDSG

SEQ ID NO: 46636 - protein, 705 aa, Zea mays
  Coding DNA Sequence Number=SeqID_3261
MVRSPAFALNLRNRDPAAFVREAEDEGVRLVGRYVPRTEGQRSWEIRGSNDRLNRVFELNQLSYGGYPGQDDADRRGKKPVVEAKDDPAPAVAPSSKKRRLGTAMGGLGVSDGFARELMRTCAAPGERMSSPELRESSARMLKVTGGCWPRNLPIPRVASGDVFTSRMVRKWRVFPYGRNIAAVVSAVMDKDRQGAAQKRQAAIRIVDARPKRQKRGSATAAAPGGGRPPLAAKSGVPASSKAPEAAAGAGGSKPAKAVPPLSGVAEAAKASRALPPASKRVADFATDICVGDYLGGSDEGQLATVAPDAAVATAAIMPKARGEALGSGGEAAALAVVRDEADAAIRRLKEVSEALSQVADFASRTASGALTAAVSAEVERLRTQHADVVREKSASDSKCRKLADKVAALEREKAELRRQLAAERREANEAVAKEQAAQAEAKLARAEGNLAKELAEHLQERLTVLESRAKGAEAAMRAEAERTRTQLMDTYRELGARTGDFEVPDREPGLRCLQWVQEELLELPAVAGGLMSYASLVTCEGAMNALSREGCRHFEAFDQADEDFDRDIYKVDDPVVKESAGALYDRMWGLYGREVVRERAEAAMAQALRGERVDDLGALNSALPDPEPTPAEAASGVALEPTPETAPTPAAAGEDLPPKVDEGAPDAPAAAVPSAGDPAAEAVETTAGTTAEPAAEAPAASGPS

SEQ ID NO: 46637 - protein, 154 aa, Zea mays
  Coding DNA Sequence Number=SeqID_3262
MEKLDLELTLKKLVDEEGTKLKQKARDKFILDGDEDSRRSEDVLVTSGSSWALGTRLLAFASNQRWRPPSRACDCRLRLLTPQPALEISRSAAQSRLRQCDRPPAPSAHLLPLHPVARPSSVRRHIHLLSLPSTAQIQPLPSLPLTVNHLCGSD

SEQ ID NO: 46638 - protein, 281 aa, Zea mays
  Coding DNA Sequence Number=SeqID_3263
MQGQTVIEGLLAKFQACGLYEFMGQRTDFNELTVKQFLATAEINIDEQLIVWTTGFKRYIATFAEFAATNNLDYALISQGVDLYTEDQFEDIAQYYEHARLGIPRRFEQHKPPPPPPPPQQQGQYWQPVYGYFDPYFNQMHQGLQTHIGGQFQGMMSHVDDRFNHLHSTYDGQFSNLHERFTVVDTRLDGVHTQFNDLRSHIHTIVHDPIMNRMNNMQQSFQDNMGALSCQFENLSTSDSVHALGDRQQQLQNDFSQFTSIFDSFSSHFYSMYPRPPPGAQ

SEQ ID NO: 46639 - protein, 278 aa, Zea mays
  Coding DNA Sequence Number=SeqID_3264
  Gene Ontology: Mol. function=catalytic activity; Cellular component =cytoplasm; Biological process=cellular metabolic process
  Homolog annotation: Hit_ID=B0FYX0; Match level="QueryCoverage=92%, HitCoverage=77%, E-value=1e-133, Identity=87%"; Hit description =NADPH HC toxin reductase-like protein
  Pfam annotation: Domain name=3Beta_HSD; Domain location=8-277; Score=- 103.3; E_value=0.00091; Accession=PF01073.10; Description=3-beta hydroxysteroid dehydrogenaseisomerase family
  Pfam annotation: Domain name=Epimerase; Domain location=7-253; Score =11.4; E_value=5.3e-08; Accession=PF01370.12; Description=NAD dependent epimerasedehydratase family
  Pfam annotation: Domain name=KR; Domain location=4-188; Score=-79.7; E_value=0.01; Accession=PF08659.1; Description=KR domain
  Pfam annotation: Domain name=NAD_binding_4; Domain location=9-237; Score=-42.1; E_value=4.6e-06; Accession=PF07993.3; Description=Male sterility protein
  Pfam annotation: Domain name=NmrA; Domain location=7-263; Score= -110.6; E_value=0.073; Accession=PF05368.4; Description=NmrA-like family
  Pfam annotation: Domain name=adh_short; Domain location=5-140; Score=- 54.7; E_value=0.049; Accession=PF00106.16; Description=short chain dehydrogenase
  Pfam module annotation: Pfam domain module=3Beta_HSD::Epimerase::KR::N AD_binding_4::NmrA::adh_short; Domain location=8-277::7-253::4-188::9- 237::7-263::5-140
MGGGTVVCVTGGSGYLGSWLVRKLLGRGCVVHATLRSLADEKKTGLLRALPGAAERLRLFEADMYDADTFEPAIAGCHFVFLVATPLTHDPTSTKYKNTTEAAVDAARIILRQCALSGTVKRVIHTASVTAASPLKEDGSGYKDFADESNWTPLNLSYEFTNAYLDVRSDRPQALEVVTLACGLVGGDSIQTYLWGSYAAIVAPLTGQAVSHNALLFLQALLGSVPLVHVEDVCEAHVFCMEQESMAGRFLCAAGYPNMRDMVDHFAAKHPDLKIQLT

SEQ ID NO: 46640 - protein, 238 aa, Zea mays
  Coding DNA Sequence Number=SeqID_3265
  Homolog annotation: Hit_ID=Q7XAX9; Match level="QueryCoverage=18%, HitCoverage=9%, E-value=2e-14, Identity=64%"; Hit description=HDA1
MWKTVPHNPEINYNEKSFVCMYKITLEQFNDILFQENWLVLEDGKDRKRCVIEAGMFIQLSAPPASLQDIYAYDCGAEYSSLACISNFKPDQTPCSNPKPSSLFSQQTHLLSAPPPTALCPPKASSGHLALARASKMHRQLSLSASPKQQQPPPDGTSTGGGDAAKAMAAAEDESSASHSSSKASRGWSARDERAIHLVPLLTFLCFLLLFLCSHDPSPAASLEAAAEEEERDLGTGG

SEQ ID NO: 46641 - protein, 143 aa, Zea mays
  Coding DNA Sequence Number=SeqID_3266
MGKNNKRKREPTPPPEEFGDSEYSEEEFSSESEGSPVPIPLCESSDDSDDSQGLAAEVWTYIRAVERSGLEGSDESEFSSDEEDSDGGEDEDDDDDDGDDDDGGDGDGDGGGGSGGKGSTRGGSSTGSTRGGGGKGSSSKASG

SEQ ID NO: 46642 - protein, 87 aa, Zea mays
  Coding DNA Sequence Number=SeqID_3267
  Subcellular localization annotation: CTP_CleavageSite=41; ConfidenceScore=5.04e-01
MKGSDAGGVAPSFVLGVAKTLHGESARGSFLLRGGNGGASSGAAASGTSGGHPKKGINRNIIELQVYLQLEGDDSTSVTQKANAQSA

SEQ ID NO: 46643 - protein, 145 aa, Zea mays
  Coding DNA Sequence Number=SeqID_3268
MASQPLERRAMREAGFTEQRIPSASNGGRITYLGKHYGADGEGNTANNIAWLLAHTSVAWNEWGINQGSGLVMRCQGGCRYFSVIVYQPAWWLAFLVAVVAGLHVCCPRVGGWVKATHGEVHDGQNGVEDIARGPRKSPRMGDNV

SEQ ID NO: 46644 - protein, 123 aa, Zea mays
  Coding DNA Sequence Number=SeqID_3269
MEERVGEGGREREAAQGRLGKTSRGEAAWSSRPIDNILEDALDLWVRTHARFRCATSILLVDVDRIVFIGRLEGANRTGARGKATDRKGRGEEQDVWDRDTSTIKDGVKASIVSDLEKVTTKA

SEQ ID NO: 46645 - protein, 38 aa, Zea mays
  Coding DNA Sequence Number=SeqID_3270
MVGFTDGDKDDGFDYGNGKEQGVEADLQEFQDFDEFED

SEQ ID NO: 46646 - protein, 161 aa, Zea mays
  Coding DNA Sequence Number=SeqID_3271
MAHRIARSTRGRGRPKSGEDDLGSLVRFCRVRELGKLHEPLVKLTEGQAQLGRGWSELAAVAEARAVMAGGGKLAGAKEGRLASEDWIKRYGGVKLGLSHYRAQREDPGFDVSRARVPMPSSVSPTILESNEFVNAPAWAPDTIRCTLDTIRCTPDSPVNP

SEQ ID NO: 46647 - protein, 446 aa, Zea mays
  Coding DNA Sequence Number=SeqID_3272
  Homolog annotation: Hit_ID=Q6QP51; Match level="QueryCoverage=15%, HitCoverage=35%, E-value=5e-08, Identity=50%"; Hit description =Putative growth-regulating factor 1
MEAQAHASCNRRAECFVHATAPPLVPPPRLLDCGTNTATRGDPAHDPAAPAWRGGTGKGGYPEKDPSPGRNQAPSLPTDQRFEGWPPGRVRQPPQIAGSKAGPRRVHSRLRRRARDDHEYVRYITKARAALPRLRGCSRKPGSDRTVDSVNIPARELGTRPYTRAMASSHEGTTRPAEALREALRPRRSETTPPRPRGLHPAGALARTHRNKTQPRKAGPLAKKCDESLQASANTPFEARGLLSGTIIRGTLKAPNSQLPRKTANSAPPDPGLGHGLSPGRRRTPLRPTQGSDTGSAPEDDELRSARPRARTWAQPQKTTNSAPPDPGLGLGLSPRRRRTPLRPTQGSDLGSAPEDDELRLARPRGSDSTSAMEDRLDLGFRGASTSPNLGRRLATSTGGAIITLPRADTSRREQDRLHRSSDGHDITPAGCQNLSGCHNGMYVGR

SEQ ID NO: 46648 - protein, 146 aa, Zea mays
  Coding DNA Sequence Number=SeqID_3273
MNICELTLDVLTTPVGQDQEVESRRHPSSVPQLEAPIAPPHDTPNAGGDPDEDDDSGSSRHITKPLEEQEPKGWVARPITRDAAHSCYFHDVLDTLLRRVFDRHTWSIEYRCVVYQHSRGLYPDQWEATCLVRHLDDDLQSVEAYS

SEQ ID NO: 46649 - protein, 137 aa, Zea mays
  Coding DNA Sequence Number=SeqID_3274
MAALRTLSTQFHNLRTSLAQLVKGVLQLGVEHSDQINHATQPGIALTHKSDNHTPGLYTLEIIVQMAHQADPTQQGVKNIVEITTVSGVTSDGSGDPSFRLLLLQRLRDVPRAATVVVFIGVSSSIWGVVWWCNGRF

SEQ ID NO: 46650 - protein, 162 aa, Zea mays
  Coding DNA Sequence Number=SeqID_3275
  Gene Ontology: Mol. function=carboxyl- or carbamoyltransferase activity; Cellular component=ornithine carbamoyltransferase complex; Biological process=amino acid metabolic process
  Homolog annotation: Hit_ID=Q8SA97; Match level="QueryCoverage=96%, HitCoverage=24%, E-value=2e-25, Identity=47%"; Hit description =Ornithine carbamoyltransferase
  Subcellular localization annotation: CTP_CleavageSite=56; ConfidenceScore=5.10e-01
MAPPVDVAGLRPRLGDVEGPPKPRSSLSSVAEVESEPLGRARRSSSSSGLSPTRVRALGRAERSSLSSGAEPESEPWVGRSGASYGRSVERRSDGGHFGSAGWGARVRIKGLGRAGNMFVAGGGPRARRKSSGLYADGGYQLRIRSLEGTPNFGPRHKVKQQ

SEQ ID NO: 46651 - protein, 235 aa, Zea mays
  Coding DNA Sequence Number=SeqID_3276
  Subcellular localization annotation: CTP_CleavageSite=30; ConfidenceScore=5.10e-01
MSSRSLMHRVFPPSKPSDGGYPPSFRLIVGGTQLRGSWYLSAIVRLQGFSSHIPVAPLRWWSPKTVTSSPWMGRGKPGCDLGPALSVEGVRHPCWGGERGEPGLYLPRGPAGHLFFQLLVVANTLQLCGGDVLQPCRGRRTVAAQLGCNIPPSSLHSRRGRQRGPAGALGSGPLFGFNSWFASLEREREREPSGGRVRPGTMAAAAEVAGGSPGVRRPAGSRLFIPAGTEPEFRL

SEQ ID NO: 46652 - protein, 167 aa, Zea mays
  Coding DNA Sequence Number=SeqID_3277
MACESGSLSAGNLGEPIRSVLIRFSHQLGPSCSVPRSPEGKMDSTDSIADKAIGRMQEIADKIFSVARETIRPGRGLTSFEATKLRVALEDIACMLEQDSLVLQENLDNVNNVNNPGESSYEPSALSSPPPADEFLSPDWDFAEHFENFWGLEYDSDQMPSFSDNEV

SEQ ID NO: 46653 - protein, 69 aa, Zea mays
  Coding DNA Sequence Number=SeqID_3278
MTTKEASFRGHSTPHSLWDSSKAPSGHQLQGAEAAGASEEDMGIRPEKFIAYSVVRTRATLQEPARSLF

SEQ ID NO: 46654 - protein, 706 aa, Zea mays
  Coding DNA Sequence Number=SeqID_3279
  Pfam annotation: Domain name=MAP7; Domain location=369-523; Score= -79.6; E_value=0.054; Accession=PF05672.2; Description=MAP7 (E-MAP -115) family
MAGHWAKVSPPQTLPRGGMLVRSPPFAQDLHICDPVAFVREAEDGAVRIVGRYVPRTEGQRSWDIRGSNDRLNKVFELNRLPYGGYPGQDDVDRRGKKPVAETGDDPAPATAPSSKKRKLGTSMGGLGISDSFAMELMGTCIAPGGRMSSPELRESSARMLKVTGGWWPKNVPIPRAVGEDFFTSRMVRDFRVFPYGRNIAAVVLAVMDKDRQEAAQKRRAVVRLPEARPKRARGTVKAAAPGGSQPTLAAKSAGPGSSKVSDVVKASGAGGAKSTSAEVAKARELPPPGKRIADFGTDISVDDYLTGSGEGQLVVVPPAVATTVSATVPVAKGGALSAGGEISALAGVKDEAGAVSHRLKEALQRLSQAADFANCVASGALTAVVSAEVERLQAQHVEAVREKSATDSKCRKLAEKVAVLEGERTELWRQLAEERREANQALAKAQSTQAEANVARVEGSLARQRAEELEERFNALQARVERVEASTRSEVERTRKQLMDSYHELGARTADFEVPDRESGLRCLEWLQEELLALPTIVEGFMSYASLVTCEGAMNALSREGCRHYEVFDRSDEDFEREIYKVEDPVVKESAGALFDRMWGPHGQEVVRERSDTARGQAARDEKVDDFGALNSVRPEAESKPVAAGPEVATAPPPETVEGAPDAPAATAAGGGSSPTAAPRAEDPPKTAAEPAAEDPAVAGSSQVA

SEQ ID NO: 46655 - protein, 181 aa, Zea mays
  Coding DNA Sequence Number=SeqID_3280
  Homolog annotation: Hit_ID=Q5Z9G5; Match level="QueryCoverage=85%, HitCoverage=63%, E-value=2e-24, Identity=41%"; Hit description =Putative uncharacterized protein P0655A07.24
  Pfam annotation: Domain name=Hin1; Domain location=18-156; Score =56.4; E_value=9.8e-14; Accession=PF07320.4; Description=Harpin -induced protein 1 (Hin1)
MVLAVVVLLGVVAVLVVVLLLQPRAPYVAVRAASLYALVYGQTGALDDVQVTVRVEVCNGNAHSAAYFSRLECCLAFAGATLAVLRAYPFHVPARGVLPLAYVARAQGAPLGDAGSAAMEAALHDGVVPFRVEGEAQTRWKVAGIIGVDQWTRPACQLRFFWPNGTVLPFRCSSKSKFLFF

SEQ ID NO: 46656 - protein, 275 aa, Zea mays
  Coding DNA Sequence Number=SeqID_3281
MEKGPLDMVESSVQVIETHVDIIRSLVTDGVVDTSEPESVYTLKTNLFQIGDVCDMLEKCALSIKNAYRFYWKDLGGEHPKDKPNLSISLFPYGDKQPPGNVLCGYYVCEWCCVTFHYMVNREDVPKSKINVEWFPSAWLRFVRCANGSKSSTVGCTNLGRRSTPDSEHGMSGGAPNCPVRHPTEGKNCLPRMPPTAPSCLRAIKGTPRRMEELSKNTLSILNHSHSVFAHSIDFLSDLSSVLVGERLQVVETPRKRERVKKEEHRGIQVDHWIT

SEQ ID NO: 46657 - protein, 279 aa, Zea mays
  Coding DNA Sequence Number=SeqID_3282
  Subcellular localization annotation: CTP_CleavageSite=45; ConfidenceScore=5.34e-01
MAAFQGGHPPFKGDSPYLRPQPSWAESSPTRSKVLPLRRGGWVPRVMQADPEQKEPNRRARCMQPPSGYEHSSTFAQTSGRKGGQPCRRHATVPSGRTPPTSNAPSMGAHAHASCHRRAGRYAQATAPPLAPLPRLLDCGTSTATRTTQQCQPGTTVNTAKNGPAVMAVAGGQEQRSRRQPSSRPVQGPGKGDTPKRVLPREGNRLRASLLIRGSKAGPSEGFNSRLRARGLHTHYWSEVRRPAPRKGSTAASGYSGSAPTTDQGFVGWPSKGSQPPQT

SEQ ID NO: 46658 - protein, 224 aa, Zea mays
  Coding DNA Sequence Number=SeqID_3283
  Homolog annotation: Hit_ID=A7Q417; Match level="QueryCoverage=54%, HitCoverage=12%, E-value=2e-10, Identity=32%"; Hit description =Chromosome chr13 scaffold_48, whole genome shotgun sequence
NEWCESKLKNTEVGNACVVCHFVAFWQADEVIPIVDKRRTAPLILRKDGGPRGPRYKALLTVPGVLEHQNQYGNQAEGHYNQGPGVQWSQNHYAYQTQPYPQKINSNYSQLSNPEDQLRTVDSNGPSTNLSSNHVSENFKPNLLDSVTMNTSSESKIQVPINPRIAQGFSMVIPKNEKKSSGLDLSRKPAYVSVSMPANDAKASQVGPDAVIFFSLLDIGIDTT

SEQ ID NO: 46659 - protein, 883 aa, Zea mays
  Coding DNA Sequence Number=SeqID_3284
  Gene Ontology: Mol. function=nucleic acid binding
  Homolog annotation: Hit_ID=A3BQI5; Match level="QueryCoverage=28%, HitCoverage=23%, E-value=2e-17, Identity=28%"; Hit description =Putative uncharacterized protein
  Subcellular localization annotation: CTP_CleavageSite=88; ConfidenceScore=5.54e-01
MHKTNRREGMSSPPIPAPPPDPNPSPSSTSHHSPSTAATPAPATTPLPCSLGFCTSQVGRSKFQRWDDNASGSSSGGTVHSYKEALLSSSSATSLELDVHTSTIARPKLCDKERRLCRREDLVPVDKEDGWQAGPLQLKTPGRLRDRLEFDKSYPGGQERLSSQKVSPPQCRAGSAAPPKKKKSVWVRISPAPQTSDQKTNQPSPMLNNCAPDVDQRSFRNKRKRRRSKSKKGKGPAEAAGSGVCSDSPPSSPEAHFSQSRMEFHTASPPTVEASRVLTFTDEMAREEINLRKALFVTIAGTRPVVQGSEVLDEVARSFGVCIDNMSIQHSTPEDFLLFLPDEDTASRIFNGGRLFTGPRFCLMFKRWSRFSHASMSRMSHLVDVQIRGIPEHAWSCSTAEAVLNDSCHIVEIHSDTLMKKSLSSFTVRAWCFDFKKLQRQMTLHIIERGLQSNDKGCLSYKINISATMVNPEDTDLGGLHSSPPDDAHQPEDFEDQDIGNNILAPEHLSILDDGEHAADFLKLGHLNSLDNGKDAAGGNLLCIPEATVLDPRSADEDILAPAAGLNCLGIPEASRLDPRWKTNSTLGMAPTVFMSEARGSLNPPRNISPQSMVTGPLELIGLGSPHAPTPVLPPTGLVPGSPEMVSPSVVSPHIIGPLETHNLRSVSPQGLEFEGDASVFESGPPETVSVHAILTLTGQVETKCAVPVSPQLQLKQSSCKPLLKVYSRRKCGTTQLMERTTDLQDSEEPSQGISDGIINSATDISEQLTIPSSSLINMISRKPSHLLPAPGTGLKRQKDLTVTMPRRSRRVAGIGVEFSMQDWRSKASKKAMRALRIINESDKITSDAIMEYALLFKRPLIQSHVDALAALFGWSTPEDLRS

SEQ ID NO: 46660 - protein, 142 aa, Zea mays
  Coding DNA Sequence Number=SeqID_3285
MNKRPAFKVPSQTELRFRPRGTDAATGRLSFASPLKGCDPAIKAKEPEPARRSKAHRQVLAPVLATKARKRAECCILAGQQQFAFPGMAGGRLLRRAGGWFPPPEAGRGGGQPTRAEVEPRLASLSALARMELVVTVLGDHR

SEQ ID NO: 46661 - protein, 210 aa, Zea mays
  Coding DNA Sequence Number=SeqID_3286
MAVMDSTSEKMYLCQKDAATHKANGTQVNGTNWCASASTAPRHESSSSGSNDPIGDLEARVSRLQAALQHRTDAWVADGDRINELRRDIRHLQDQLADRDLALDWAVQSRLLACAKEARAQARIKELSSTVDNLQVYCNTLHEEVHVLYSQLHPSVPAHPAEAEAGPSHVAGRALGWELDLFEPPPSLRLVDVWTPTPDDEAAKSNGKQD

SEQ ID NO: 46662 - protein, 357 aa, Zea mays
  Coding DNA Sequence Number=SeqID_3287
  Gene Ontology: Mol. function=hydrolase activity; Cellular component =cytosol; Biological process=protein amino acid phosphorylation
  Homolog annotation: Hit_ID=Q6K4D8; Match level="QueryCoverage=81%, HitCoverage=92%, E-value=1e-141, Identity=85%"; Hit description =Hydrolase-like protein
  Pfam annotation: Domain name=Lactamase_B; Domain location=114-320; Score=34.1; E_value=5.2e-07; Accession=PF00753.18; Description =Metallo-beta-lactamase superfamily
  Subcellular localization annotation: CTP_CleavageSite=50; ConfidenceScore=5.87e-01
MAPLASRIARAFPGLATAAATRFAPSSSASSPRLGLVPRLRSARSFSGARASPVSGAVSGSSTSEEGQQLQSELIFLGTGTSEGIPRVSCLTHPTKICPVCTKAAEPGNPNRRRNTSILLRHATPSGTTNIVVDAGNLFGCKVGHAKCLLPLFSLRTIDGVIITHSHADAIGGLDCLRDWTNNVQSSIPIYVAERDYEVMKMTHYYLIDTSVVIPGAAVSALQFNIIKEEPFMVHNLEVIPLPVWHGQGYRSLGFRFGDVCYISDVSDIPEETYKLLENCELLIMDALRPDRSSSTHFGLPRALEEVRKIKPKKTLFTGMMHLMDHEKVNSDLARLIGTDGLDIQLSYDGLRIPVRL

SEQ ID NO: 46663 - protein, 82 aa, Zea mays
  Coding DNA Sequence Number=SeqID_3288
MESAPYFSSVYPEPKQYLQLHHHPSSFGSLLFGFVILYITKRYKVNSSFKEKGTKIAMPSYNFVKSINFALNVFESPGQVFN

SEQ ID NO: 46664 - protein, 127 aa, Zea mays
  Coding DNA Sequence Number=SeqID_3289
  Gene Ontology: Mol. function=helicase activity; Biological process =protein amino acid phosphorylation
  Homolog annotation: Hit_ID=Q8SBB7; Match level="QueryCoverage=96%, HitCoverage=11%, E-value=2e-32, Identity=53%"; Hit description =Putative helicase
  Pfam annotation: Domain name=DUF889; Domain location=1-127; Score= -67.3; E_value=6.5e-07; Accession=PF05970.5; Description=Eukaryotic protein of unknown function (DUF889)
MRKGSRSVEVNASITSSPLWQHATVLKLRTNMRLSNPSLHGKERADMEQFSKWVLDIDDGALSAMTRGDESEPTWVTIPEDLLIHMDGDAAASLISEVYPNLLERYMDPTYLATRAIVCPNNLTSYN

SEQ ID NO: 46665 - protein, 145 aa, Zea mays
  Coding DNA Sequence Number=SeqID_3290
MAVMGSTSDKMYLCQVPNFGIVNDKAETGRYEISERDSAIDWVVNSRSISWDREAKAQARVAELSVALDSLQVYCSTLHEEVHVLYARLHPDVPSNAAAMGARPSGIANEGLDEELDLFKPPTSMNLADERSPAARNEATRDDED

SEQ ID NO: 46666 - protein, 72 aa, Zea mays
  Coding DNA Sequence Number=SeqID_3291
MRIAKYSFSYVERPRVLGPRALLMPIDHHIDFTRIGLHTLFADDMAKVILKGRAVHQDVIEKNKSKLVKYWR

SEQ ID NO: 46667 - protein, 265 aa, Zea mays
  Coding DNA Sequence Number=SeqID_3292
  Gene Ontology: Mol. function=aspartic-type endopeptidase activity; Cellular component=chromatin; Biological process=chromatin assembly or disassembly
  Pfam annotation: Domain name=zf-CCHC; Domain location=239-256; Score =16.6; E_value=0.0047; Accession=PF00098.14; Description=Zinc knuckle
MDMMGSTSEKMYLCQMPSRTRSHDGAGTSRGQEETPNPPLVPPTLAEDIAALVTETADNTCFLREMAGQQLQQQGGRAYPQGPRETSYLDFSETRPPLFVKAEDPLEADEWIQYAIDQVNTDLKKRNCFMRGHNDRLQRKMATCLDLSYSRAISTTLAVEAKYAGPGRSKGYGGDRSNQGLEKRQRLVIRPFNQNRSSPRPPSYPFKQPVFIRSATAPTSTTQPSAPSTRFPALPSSSTGWFNCGKSGHFIKDCPYPRQNNSNNQ

SEQ ID NO: 46668 - protein, 382 aa, Zea mays
  Coding DNA Sequence Number=SeqID_3293
  Gene Ontology: Mol. function=protein serine/threonine kinase activity; Cellular component=nucleus; Biological process=protein amino acid phosphorylation
  Homolog annotation: Hit_ID=A5B812; Match level="QueryCoverage=36%, HitCoverage=49%, E-value=4e-49, Identity=71%"; Hit description =Putative uncharacterized protein
  Pfam annotation: Domain name=Kdo; Domain location=150-330; Score= -86.7; E_value=0.085; Accession=PF06293.5; Description=Lipopolysacchar ide kinase (Kdo)
MVASTTLGRRRKRAPIYVAVATATCEEKKQEGAQALGGCVAGKRKKVATSDVFFVRVGGSGEQGSKRKVACYVRLRHVWWRRATGLGSVGNTLAEGDYLFVPSECQGGIQRVHIIKGCVHGSLLLELFTGDGEGTMIASNKNIWKFSIYSMPWEFPNCTFLMDQTLTTLRFTRNDFTEDDKATFNDFTEDNKATFNEARCMTKARRLGVPTPVLYVVDPVLHTLTFEHVDGLFVKDALLRFGSNGVNEECLNDIATQIGNAIGKLHDGGLVHGDLTTSNMMIKNSNNQLVLIDFGLSFTSTIPKDKAVDLYVLERALISMQSSCGEVQTYVGNSTDLDDEPDGENPCGIQKGFEAMVLYPEQAGSRYGMVLSAHVEAHGLRC

SEQ ID NO: 46669 - protein, 177 aa, Zea mays
  Coding DNA Sequence Number=SeqID_3294
  Homolog annotation: Hit_ID=Q6QP51; Match level="QueryCoverage=15%, HitCoverage=12%, E-value=5e-07, Identity=89%"; Hit description =Putative growth-regulating factor 1
  Subcellular localization annotation: CTP_CleavageSite=38; ConfidenceScore=5.12e-01
MDTIQVKASSTQGKRSRLARAQPREGAEVPDKVTSRPRASSGSGHTLSTPEAPLGQASSRSNLGQIASPTDRSSASPDLGPRPQEEVSASPDPRARPPPRPRKVVSASPNPRARPQPRPRKVVFASPDPRARPQPRPREESRPRPTPASASGGVSTSPDLGLGPTAPLGIHHYPTPS

SEQ ID NO: 46670 - protein, 145 aa, Zea mays
  Coding DNA Sequence Number=SeqID_3295
MARYLHTLDNHYDNLFSHYTRLNSRVESLEQQIKKLKEEKAPLQESLKIAEGEEANTREAYRTLKMDYDKKLKKLAPTKKIRKRTKSQGCQIERKEEAPPTLPPSRIENLSDVEDMFLASLDDLLREFGDTLEREFGSTLESARA

SEQ ID NO: 46671 - protein, 135 aa, Zea mays
  Coding DNA Sequence Number=SeqID_3296
  Subcellular localization annotation: CTP_CleavageSite=51; ConfidenceScore=5.40e-01
MDGGNTLPTTLASQPSSTILSQAGQGLGVTQNKGAAFIREPSLTPKSHKVSSSAKTPSGAHNTPGANTLRLLPLKLANSQVDAYSVLDGSTNKTHKSVTGKRSRTSPSKKAAKKLFKDEDITDDDAAGSTDVDAE

SEQ ID NO: 46672 - protein, 181 aa, Zea mays
  Coding DNA Sequence Number=SeqID_3297
MSLMNRGRYFHLSLLYPCVALTWFGGGKLVDEANKTQLSQVDAEVDIVCCRAEFVIRPYLARWCNLFALRLIGHLMDVPWLVFTSLLSGLVAEVWTYIRAVERSGLEGSDESEYSSDEEDSFEEDGGGDGEDDNDDEDGGGDDGDGGGRGGSSGSKDGDDDSSRGGSGGNGSGKGSNKASG

SEQ ID NO: 46673 - protein, 209 aa, Zea mays
  Coding DNA Sequence Number=SeqID_3298
MDKDRQDAARKRRAVTRVGDPMHEVKQARGGAKSIAPGSSKPPPAAKPAVPRPSKSSAGPRAAASSAGKLPSAEPAKERRPPSPVRTDEAAAGGADFDMDSCVDDYLVGSGARQLAVVPGLVAGYFAYGGGWSEGYFAGPMADAFADHVASSALTSEFAAERQRLEGRIKRLRVQHVDVVRDKSVAENKSRRLSERLVAAEAEKADLRR

SEQ ID NO: 46674 - protein, 56 aa, Zea mays
  Coding DNA Sequence Number=SeqID_3299
MAHSGNGTAWAQCAGDKAPNRAEYVDEMVAENGVAGEVCDTNGGSKEVMVDEASLE

SEQ ID NO: 46675 - protein, 109 aa, Zea mays
  Coding DNA Sequence Number=SeqID_3300
  Subcellular localization annotation: CTP_CleavageSite=22; ConfidenceScore=5.14e-01
MGRNTGQSSVHSRDTISPRPSPASGKNSRPRWIHVSPEGLLKQRAHLRLARGLAREGPQAKSKSTILKASDAGQCLSMHAQREIKLQSLRMGPRKRKAKKVAREKKRHT

SEQ ID NO: 46676 - protein, 512 aa, Zea mays
  Coding DNA Sequence Number=SeqID_3301
  Gene Ontology: Mol. function=oxidoreductase activity; Cellular component=integral to membrane; Biological process=electron transport
  Homolog annotation: Hit_ID=Q8LHV0; Match level="QueryCoverage=96%, HitCoverage=94%, E-value=0.0, Identity=71%"; Hit description =Putative cytochrome P450
  Pfam annotation: Domain name=p450; Domain location=66-507; Score =205.1; E_value=1.7e-58; Accession=PF00067.13; Description=Cytochrome P450
  Subcellular localization annotation: CTP_CleavageSite=33; ConfidenceScore=5.31e-01
MVASAVAAVLASWAFNALVRLVWRPYAVARRLRAQGVRGPAYRFLAGNLAEMKRLRAEGARATLDVGDHDFVPMVQPHHRKWISLYGRTFLYWNGATPNLCLADVNLVRQVLFDRTGLYPKNHINQYVTRLLGRGLLLTDGDEWKRHRKVVHPAFNMDKLKTMTATMSDCALSMISEWEAKLAKGGDAEVVELSSQFEELTADVISRTAFGSSYREGRQVFLAQRELQFLAFSTAFDVQIPALRYLPTRNNLRTRELDRRVRGMLMDIIKARLAVAGKDTAGGGYGHDLLGLMLEAAEHGGEAPTLSMDEIVDECKTFFFAGYDTTSHLLTWACFLLSTHPEWQGRLREEVRQECGADEVPTGDALNRLRLVNMFLLETLRLYGPVSLIQRKAGTDLDLGGVRVPEGAILTIPIATIHRDTEVWGDDAGEFRPERFQNGVTRAAKHPNALLAFSSGPRSCIGQNFAMIEAKAVVAIILQRFALELSPTYVHAPMDVITLRPRHGLPMLLRSL

SEQ ID NO: 46677 - protein, 76 aa, Zea mays
  Coding DNA Sequence Number=SeqID_3302
MAAWQPELVPSTAAVLSGAKRSSRGDARRPIISTPAQIAARKGRRRSAEKCRAIHHQHFVYDDATKPIDQLDLAEM

SEQ ID NO: 46678 - protein, 72 aa, Zea mays
  Coding DNA Sequence Number=SeqID_3303
RIRGVVRFAIVPSMGLGVCGSLCQETFWVIGGDETDGFGYAYGAGCPHCNHCSGEDEVVEGDFQEFQDYDEF

SEQ ID NO: 46679 - protein, 77 aa, Zea mays
  Coding DNA Sequence Number=SeqID_3304
MAPNCQRSAPPKQERNLHQTVSGGAPDCPGERLQVVEIPRKRDIVKQSKTSWYSSGSLDRLKGVECNPHPLGRHNVE

SEQ ID NO: 46680 - protein, 94 aa, Zea mays
  Coding DNA Sequence Number=SeqID_3305
MEFLLGAMEGEETAARKEALCARTGKTEGRDVGGKWRGALASCCWRYKKGGAAQGGMRAPAGLRKKKGLGAIHGSGCSLLAAVCALNRGEESRA

SEQ ID NO: 46681 - protein, 244 aa, Zea mays
  Coding DNA Sequence Number=SeqID_3306
  Pfam annotation: Domain name=zf-CCHC; Domain location=1-18; Score =17.4; E_value=0.0035; Accession=PF00098.14; Description=Zinc knuckle
MDCYNCGEHGHLNHQCNKPKKNKFKGKKDDESDDEKKEKKFFKKKEGKHNRFHKNKNGKAYIVGDWLTDIESSSGSSLSDEEDDEKVVAITCDFSSPPSSPSSTSHLCLMVKGERKSKAKCDKLKYENEFLTAKHDIVDKASKEMKEENKTMSSTKNELKTSLKDAKEKFEKLSEANRELKDRLVKIKEDNTKIKIDYDNLLISNELLSCDTHEAINLVVKLDVATSCDDQSNVDQSSLHDELI

SEQ ID NO: 46682 - protein, 75 aa, Zea mays
  Coding DNA Sequence Number=SeqID_3307
MEALSPAGPNLGESETDRRAVEVGGDSPYLRPQPSWAESSPARSKVLPLRREGWVPHVMQTGPEQKKPNCRARCM

SEQ ID NO: 46683 - protein, 357 aa, Zea mays
  Coding DNA Sequence Number=SeqID_3308
MQAACNRAKWAHLSDFQHAHASCNRRAGRYVQATAPPLAPLPRLLDCGTSTATRGDPAHDPAAPAWRDDGAPVFRSSNGSRTRDGRPANHSPRRINSAAGGASGRGSERRFAFAIMTASKKGNRLRASLLIRGSKVGPSGGFNSRLRARGLHTHYWSEVRRPAPRKGSTAASGHSGSAPTTDQGGNDLVTESHQREASSPRTPTTGDRVWQITHRGSGLLSQTRLRAKSLTASTYQPENLGPDRAPGPTASSHEGTTRSAEALHEALRPRRSQTTPPRPRGLHPAGVLARTHWNKTQPRKAGPLAKKCDESLQASINTPFEARGLLSGTIIRGTLKAPNSQLVTPISTKLQRPDGCD

SEQ ID NO: 46684 - protein, 735 aa, Zea mays
  Coding DNA Sequence Number=SeqID_3309
MNKTPALKVPLQAEPRFHLCRYEQPHMIGGPAEQQKADGWLAVARSDSSDDDDFCSGGPNSSSDDLRADAAAMRPSPMPSLERQGRAEGRRVGGQSVGGTGYLVGGEISSGCRGGRRPRERLRSHSGQRARHAAAASATNSERPSPRSLREGAGRRPRRDRPQLGALPSPALMMKILEAEGGAEAAARLAFPRHRTGDQRVKGRTAMQSACNRAKWAHPFDSNAPSMEAQAHTSCNRHAGCYVRATAPPLAPLPRLLDCGTSTATRGNPAYDPIVPARRIGHGLVSRGRRRDGRCGQKWVGSNGGGRRAEAVVTSLAKLTAYGWRSERRFTFAIMTASKKGTGKGDTPKGILLREGNRPRASLLIRGSKAGPSEGFNSRLRALGLRAHYWSEVRRPAPRKGSTAASGHSGSAPTTDQGGNDLVTESYQREASSPRTPSKGDQLAGDTMFGALQGQHGASPLLLVERRRRGVCKKVESVLDRPLALCRGSGAALANPAPGQTVDSVNIPARELGTRPCTRATASSHEGTTRLAEALREALRPRRSQTTPPRPRGLHSAGALARTHRNKTQPRKAGPLAKKCDKSLQASINTPFEARGLLSGTIIRGTLKAPKTQLPRARAADPGGSTSRPRTPSSNGHTFGSPEAQSSPRSNLGQIATPTDQIAGAFNAKVASHLYPDARPPAKSGPRRHGKLRFARPRCSDSGSAPEVDELRFARPQGSDSGSAPEDDELRFARP

SEQ ID NO: 46685 - protein, 118 aa, Zea mays
  Coding DNA Sequence Number=SeqID_3310
MTSHGSSDEGNAQSHTDELAREGFPRILWEQFEKHRVPRCRVRMTLEPHPLQLGWRSLDSKSFGYWAEDTIEAIALHGLTTFCGFHPLELSTHPIGLFLAEREDDPMWKDRVEHAKDI

SEQ ID NO: 46686 - protein, 101 aa, Zea mays
  Coding DNA Sequence Number=SeqID_3311
MSHLMALLEATKITLDNREELVVDLSTEMVEKDLQVEQLSNEIQELEELVGTRENTIEEIQDMEANEDVDIEGGEEPASSLDTAGSGRPPSPESSVASFAH

SEQ ID NO: 46687 - protein, 209 aa, Zea mays
  Coding DNA Sequence Number=SeqID_3312
MRMEKSRQRGGAYQGLWGTGARPRRYAGNGDRATPTRNPADDRSFPGLNPPQTSSTGLGELPRPPGNTETMAPRRVSGGDGVVTTRRRTEILSAAWTWLGGARSSHGTERPYYMGQPQTSERVLRRPWRRGPSAPRDIRGGDDCDPETGQTAPPVSGTTSLVRARGDFQPADDPGPVGSEWPSTQWADQRGPRGGNSEMGQNEYAGPLF

SEQ ID NO: 46688 - protein, 209 aa, Zea mays
  Coding DNA Sequence Number=SeqID_3313
MAAPCRSMGFAAVDRHRCADQLTPHEEGRAQVWMVARARTGKGRLRASGGSGWSREEYGVQGARRHGEREEILAAGTHGRRGWRRDEAESAMKYELVLPVADAMDGAWWGRGAGRRQEEAGIEGVEEVRGCSLEASARWALRVAVGGAGARGHQEGRESNSLRWGRRGGRHGWPVSLLATVGKKGAMDKSWRRLLQGLGQRPSREVEAP

SEQ ID NO: 46689 - protein, 144 aa, Zea mays
  Coding DNA Sequence Number=SeqID_3314
MGEREEILAAGAHGRRGWRGDEAESAMKYELVLPAADAMDGAWWGRGAGPRAEEAGVEGVEEVSDCSLEASARWALRVAVGGAGARGHREGREPNSLRWGRRGGRHGWPVSLLAAVGKKGAMDKSWRRLLQGLGQRPSREVEAP

SEQ ID NO: 46690 - protein, 289 aa, Zea mays
  Coding DNA Sequence Number=SeqID_3315
MTSHGSSDEENALSHTDRLTREGFPRILWEVLQGVGYTTPPQYVVQQFEKHRVPRCRVRMTLEPHPLQPGWRSLDSESFGYRAEDTIEAIALHGVTTFYGFHPLELSTHPIGLFPAEKEDNPMWKDRVEHAKDIWAIYPGQTAHLIVRCMNALYRLQVMHGEAMSHLMALLEATKITLDNREELVVDLSTEMVEKDLQVEQLSNEIQELEELVGTRENTIEVLEDQLINTQQQLAEANEHLDMHHQEIQDMEANEDVNIEGGEEPASSLDTAGSGRPPSPESSVASFAH

SEQ ID NO: 46691 - protein, 291 aa, Zea mays
  Coding DNA Sequence Number=SeqID_3316
  Subcellular localization annotation: CTP_CleavageSite=26; ConfidenceScore=5.26e-01
MGRITRGPPFWTGSQDETTSSQVFVRWRMRRRTNDCSEGVERRVASLPSPQQTALLSQPTRCRLLPSHDCPVSSSCGEEGGGTNPDAALPPRGKTSSSPPTPGELTTVVVAVALWRKEYHVVAAVEGHELDTPETEQRPGLKRLLETTHLELNRKLFVNTQQAPTQRANCRRFDPVGSLDRRGDALAVGVTSAREGERASLFVSPSSRATTLSHEGPGPSFYRCKERVQGNDVSHVARSVRAQGRARRRLLLRPRSGSGEDAIPPEVEVEAEPQGRARRRPPSEAEGEAES

SEQ ID NO: 46692 - protein, 226 aa, Zea mays
  Coding DNA Sequence Number=SeqID_3317
  Gene Ontology: Mol. function=small conjugating protein ligase activity; Cellular component=synaptonemal complex; Biological process=regulation of protein metabolic process
  Homolog annotation: Hit_ID=A7PLF0; Match level="QueryCoverage=59%, HitCoverage=84%, E-value=3e-52, Identity=67%"; Hit description =Ubiquitin carrier protein
  Pfam annotation: Domain name=UQ_con; Domain location=80-219; Score =171.6; E_value=2.1e-48; Accession=PF00179.17; Description=Ubiquitin -conjugating enzyme
MVAASPEKLHCGAAGSSDKEKEVAGRDDAEVMLPQLSDEPLREKAQRIQVMLTGGMSERLPDRGKKLLATLDAIHREQDRRQAQGDGARAPGFVAKPAMLPDGSVNLMLWNCVVPGKEGTDWEGGYFPVTLHFTENYPSNPPTCKFPRRFFHVNVYDSGDVCLSILGDAWAPSITVRQILIGIQELLENPNPASPAQDFAYDVFAENMPEYKRRVREQAKRYPSLV

SEQ ID NO: 46693 - protein, 579 aa, Zea mays
  Coding DNA Sequence Number=SeqID_3318
MPSSSSSADTTPPTAASSEETLSSLMVEELRAGDSVDFGVSRMTSARVGDMQRLGYFGGGVARAPGTEEVPEPEVMDKDRQGAAQKRQAAVRLHEARPKRQRGAAKAAAPDGGKPPLAAKAGASAPSKAPEATAGAGGSKSTKVVPPASGVAEASKAARALPLSGKHVADFGTDITVDDYLGGPDEGQLAIVAPGAAIATAAIVPKARGEALGAVGEVSALALVADFTSRTASGALTAAVSAEVERLRTQHADAVREKSASDSKCRKLTDRVAALEREKADLRRQLAAERREANEAIAKEQAAQAEAKLARAEGNLAKELAEHLQERLAALESRAKGAETAMRAEAERTRAQLKDTYRELGARTGDFEVPDREPGLRCLQWVQEELQELPAVVGGFMSYASLVTCEGAMNALSREGCRHFEVFDQADEDFERDVYKVEDPVVKESAGALYDRMWGPHGREVVRERAEIARAQAERGERVDDFGALNSALPDLEPTPAEAVTGAALEPTPETAAIATAAPASAAAGEDLPPKVAEGAPDAPAAAAPSVEDPAVEAVETTAEVAAEPTAEAPAASGPSQVA

SEQ ID NO: 46694 - protein, 368 aa, Zea mays
  Coding DNA Sequence Number=SeqID_3319
  Subcellular localization annotation: CTP_CleavageSite=58; ConfidenceScore=5.49e-01
MPSHSPHASHPSTFRAPEWGAPALPSLCCWRSATSQRLTPFSHRSASRIFIRQLSCIPSPMVTQDGDHQFDGGEKQAGLQPLPRPQLQGSSSSLLWWGRAEPEFYLSHGLAGHLFLQHSGERALTGLAEGADFDNAWPVGRKRRQLQHAWLAGSAGSGAASGATSHRWGGAWLSAHRTGGCCAVRTGGPSKTSHVARAAFMFLDCLVLTPARRLRAEAGVATIRWHSADAQVAAVVGAEVVVTRGGFSADEIVGATCGRTSGSSALTACPRPSCGDWSAASQLEFVVPQALLCGGCSYTREWNRSSACNGTLSAGNPRLLYNEPEPETAVSAWKEAESTQKEASSAEEVASQAEEVQQRRPELGQVVR

SEQ ID NO: 46695 - protein, 61 aa, Zea mays
  Coding DNA Sequence Number=SeqID_3320
MTAGGGCLFDGAPDSPPHTAMYVTTATSPVPLESDRWSSDFWPYLDVRWRTEMNCSVSSAP

SEQ ID NO: 46696 - protein, 114 aa, Zea mays
  Coding DNA Sequence Number=SeqID_3321
  Subcellular localization annotation: CTP_CleavageSite=59; ConfidenceScore=5.16e-01
MDRHATCWTGLVAACPLNGTGVARPRGLTSGSAHWLTSRAACHVAALGLRLSGELKRIRVPTVAPGPISGEDTSLQVGPKLDWRLARRFRAFADVITVNPPSVTPTAMSVPAAY

SEQ ID NO: 46697 - protein, 149 aa, Zea mays
  Coding DNA Sequence Number=SeqID_3322
MALPVDVAGPRPRPGDVGVPPKLGSNLSSVAEAEPEPLGRARRKSFGRGQGGVRALGSGEAVTPQPLPPATSPQPASAAREQPPWPTPLPSSSVRFKPPDSFLEPPTIPAACARGQGSSDHLWRRPAHRRDRRDLLNITDHLAGPPSPP

SEQ ID NO: 46698 - protein, 57 aa, Zea mays
  Coding DNA Sequence Number=SeqID_3323
MDYRGVANINSLTSRVHREAVGTTSLRDGRFEDPVSAAEEATFCNVALNITIWLICG

SEQ ID NO: 46699 - protein, 187 aa, Zea mays
  Coding DNA Sequence Number=SeqID_3324
  Gene Ontology: Cellular component=mitochondrion
  Homolog annotation: Hit_ID=Q09EL3; Match level="QueryCoverage=78%, HitCoverage=80%, E-value=9e-51, Identity=73%"; Hit description =Ribosomal protein S1
MAVLPSNYRHIYDSFLPDEAVLRLRLREEMFLVDAGLGTPKICMQDELTGLPIKRATRFENKVGSKNVVAGESLIKKRIFERFFIDLVAGESLIKERAAAGFNDFVGSLDVAAGEPLLLPQRFRQNRAWIELKKIWRTKKKPRKALVIMRDCGAPIALARHSKMLGWASKKTSTRETKNGIEEGSIV

SEQ ID NO: 46700 - protein, 46 aa, Zea mays
  Coding DNA Sequence Number=SeqID_3325
MGVGCSQDGKWSSLEEMVAGITWPSTLPPGWTVEWDPASAEEEHEE

SEQ ID NO: 46701 - protein, 474 aa, Zea mays
  Coding DNA Sequence Number=SeqID_3326
  Gene Ontology: Mol. function=transferase activity, transferring glycosyl groups; Cellular component=integral to membrane
  Homolog annotation: Hit_ID=A2Z865; Match level="QueryCoverage=87%, HitCoverage=90%, E-value=1e-119, Identity=53%"; Hit description =Putative uncharacterized protein
  Pfam annotation: Domain name=Exostosin; Domain location=91-429; Score= 330.9; E_value=2.3e-96; Accession=PF03016.6; Description=Exostosin family
MKPMKPSFQKDGADKVDGGTGGVLWPSRICYLVVLATTLWAVASILFPPSAFPHPLVSSVTVSHHPAPHDSASEDNRTATETADRCAGRYIYVYRLPPRFNDDIARGCRTLRPWMDMCPYMPNCGLGRLLGDEGGVFPGRGWYATDQFMLDVIFRCRMRRYECLTGDPARAAAVFVPAYASLDGGRYLWNSTATRDALALDLVAWLARRPEWRATGGRDHFLVAGRTAWDFLRKTDGDDDWGTKLLSIPAVRNMTALVLEIDPWTRSNNLAVPYPTNFHPATAADLRAWQEKARALDRRWLFSFAGAARPGSNKTVRAQIFQQCGASSRCGMFRCKKGSECEASPGAMMRLFESSTFCLQPRGDTTTRRSTFDAVVAGVHPCVLPPRLGVHARWSVLIMHTDVTDRNVSIEEALAKIPPAAVKAMREEVIRLIPRLVYADARSARADFKDAFDIALDVVLDRVAKRRRRDVDGR

SEQ ID NO: 46702 - protein, 404 aa, Zea mays
  Coding DNA Sequence Number=SeqID_3327
  Subcellular localization annotation: CTP_CleavageSite=86; ConfidenceScore=5.27e-01
MDKDRKDAVQKRRAFTRVGDPNRVVKRARGGAKSTAPGSSKPLPATKAAIPGPSKSSSGARVAASGSGKPTSAEPTRERRPPSPVRTDEAAAGGADLGMDICVEDYYVGGVMMFDAHTGRGLVGEFSLSLFFELVLNKICGAGSDAGQLAVVPAPVAATQATAFADHVVSGALTLEFAAERQRLEGKVERLRAQHADAVRDNGEGGRETEPVLRHRLHKPRPNWHEELEVLPTIMTGLMSFASLITCEGAVNALSREGCGHFEVFDRSDEDFEREIFQVEDPVLKRSAGVLYDRMWGPHGRETVRERFDRAMDQMVHDEEVEDLGDLDGALPEPSSVKEGTGGAGATIRCWCFSSHGEPESLFSWTKESSDEDLDYFAALDVAAAESSPRVEVGKASDLPSART

SEQ ID NO: 46703 - protein, 126 aa, Zea mays
  Coding DNA Sequence Number=SeqID_3328
MGEENQIVSTSTNLTPKSSSNKVESLGRFKCGSDRPGPVEPPPRAVEPPPDTPGDLTASLTGRLQIRGQRVIDQLSCPQDQFSWSRPESFGEKTPAQLPWGKFSWVWSERSTTEVEVQLELKVQLS

SEQ ID NO: 46704 - protein, 168 aa, Zea mays
  Coding DNA Sequence Number=SeqID_3329
  Subcellular localization annotation: CTP_CleavageSite=94; ConfidenceScore=5.39e-01
MTKLQKVVPKGAQRKFSAQKSFLRECRAKSMMKLQKSHSQGSAAFDNNASMSMKKQGYTSLCTKRREGVFRLRLKRYKFRPQQSNSYMDEKVLMGMSTKSDGDRLKFGLFTIFACVQPAFRNVAAVPREASKAQKSPCPAITSSSASTSPSMCSKVLDMFSTEGEFLV

SEQ ID NO: 46705 - protein, 190 aa, Zea mays
  Coding DNA Sequence Number=SeqID_3330
EGDKGAVLGRGALRKAAVFGSKGWVQGLGRCGCSPSRGSLLPHQGKGGRGEQQQGREAGWEEDEQGGARKISGRHPWELLLPALNQIRGELGVCCGRWPAGAEGPAPMEQGNRELGHGKNRERGGRCAGVGRRQGEAAGVAPMGASPTAPGRRWEQRAWAPWLGARWRGQLTGGCCCREEEETGKEEGGV

SEQ ID NO: 46706 - protein, 224 aa, Zea mays
  Coding DNA Sequence Number=SeqID_3331
  Gene Ontology: Mol. function=metal ion binding; Cellular component =integral to membrane
  Homolog annotation: Hit_ID=Q9FNN8; Match level="QueryCoverage=46%, HitCoverage=15%, E-value=7e-18, Identity=41%"; Hit description=Cleft lip and palate associated transmembrane protein-like
MWCQYRIQALVHRFIDGHARIKRSHATGDVEAAGGKNKVIYEDVFMERWTFVAQQADMWMYLLEGDKFNEFANEDTFIWHEANIQYACYDTNFSNINIISCNYGLFVLNFVYLLLQAIKHIASLFPHVYFAILGHPVDLTDREYDQKSIFGRIHSVVVFLPKSKAGKKKSLLGDSEEPEEQAPHKVASKMDECWGLVLKCYESRTRQHKVLNVNFLCPSKHYFP

SEQ ID NO: 46707 - protein, 150 aa, Zea mays
  Coding DNA Sequence Number=SeqID_3332
MGKSNTCKHEPTPPSEDLGDSEYSEEEFSSESEGSPAPVSPPASSDDSDDSQGLAAEVWTYIRAVERSGLEGSDESEYSSDEEDSSDSSVEGSGGDGGDDDDDGSDGDDDDDGGDGVSRGGKGGGKGGHGGSSRGSNGSGSSKGSNKANG

SEQ ID NO: 46708 - protein, 142 aa, Zea mays
  Coding DNA Sequence Number=SeqID_3333
MDIWLPVKGNWLLGSMGGITAADELEAFRLGAISTPTVNRAGAELQKDREDLKAGKQELGHGKQRRLKAQYIWDIPGSDTISKKRLVITRRLLLKTSVCHVITRRLLLKHRSVNVDNNSSTITPKSDDMMTELLSQRNRLHR

SEQ ID NO: 46709 - protein, 338 aa, Zea mays
  Coding DNA Sequence Number=SeqID_3334
  Pfam annotation: Domain name=zf-CCHC; Domain location=241-258; Score =13.0; E_value=0.016; Accession=PF00098.14; Description=Zinc knuckle
  Pfam annotation: Domain name=zf-CCHC; Domain location=31-48; Score =16.1; E_value=0.0055; Accession=PF00098.14; Description=Zinc knuckle
  Pfam module annotation: Pfam domain module=zf-CCHC::zf-CCHC; Domain location=241-258::31-48
MGMIHKINLMGVPLQVEDLLFNIDRKKQRKRGCFACGEKGHFRDNYPTMAEPKKERSKGKALTSVRTWDDSSSEDEPPRTRSHRSSSRSSQSSHKCLMARGNKSIPSSSDESSSDDEGEGKPSLDELAEAVEFFQDVCTKQKAQLKTLKNKLISSQNDYKDASTSCFDLIDDSNPCNQVVVENIVVETCSDEVAKENEQLKQEVARLGKALYDKKGKAKQIRPPQDNTTAGVNKPVEGETVICRLCHMEGHKSFQCKAMTGDKQRQKPSSKISNTYIKKVDKKTATPYLIKKKTNGKVIAIKANKQANKGKGVKRIWVPKEIISTMKSTKKVWIPRGK

SEQ ID NO: 46710 - protein, 463 aa, Zea mays
  Coding DNA Sequence Number=SeqID_3335
  Gene Ontology: Mol. function=cysteine-type peptidase activity; Biological process=proteolysis
  Homolog annotation: Hit_ID=Q8S456; Match level="QueryCoverage=88%, HitCoverage=50%, E-value=0.0, Identity=83%"; Hit description =Putative uncharacterized protein 163K15.6
  Subcellular localization annotation: CTP_CleavageSite=73; ConfidenceScore=5.31e-01
MGILVEPHRVNRRLPRRFPRQRSANPPPLQSSALPFHLTSFNLPALERDSRSSRFIQYLIMKFVDRPPSNPKRLTIESSQEKLNIRCIPYDVIVSSWIMSDRQRDAVARLGFSSIFDLRTDALESRSLIRWLMDKLDPHDMTIRPGAGKELKITKDTVHLILGLPCAGGGREFTDWYGEVDAAAKLRRDLNVGKEEFDVVKLQDKIVLGNDDELSIRCFFLILFNRLLFPSASWGITNNEVLMTSNMARMSDIDWCQLVYTDLCDAAARWHKRNKTNITTTIYGCSLIVLIYYLDHLHHPASPVNKYGTPRIKFFDNETIKELARGDRHPPPFRSRSETCYVIAPERPVSAVFNIYVPRIKNLIGNKLQCLPSQQRPMFQSLFDAHDKEVDKYCDSLQLSHQMIVSKQIELSETFGEMIDEVLRAATQRDSQPEGFSIYVYFFKLIKFTNYFLENNIYLYDLK

SEQ ID NO: 46711 - protein, 63 aa, Zea mays
  Coding DNA Sequence Number=SeqID_3336
MATSGLMVGESEPGCGLFPSLSLKDFHHQGWGGECAELSCSVPGFQARVASEPLTVPASATAA

SEQ ID NO: 46712 - protein, 247 aa, Zea mays
  Coding DNA Sequence Number=SeqID_3337
MPGAGAAGLFPLPQREVESERLPSPAPQPEMPPAPPQGILAAGGDPDGDDADAGGSSSHGTEHSEEPELEGWIVRPITRDAARGYHFHDALDTLLCQDFDRHTWSIEYRCVVYQHRRGLYPDQWEATCLYCSLFSGVADGLDLKYYPRRSIGSARGVIVSPVGEGNPRLSSMVNLVVVLNTELDHALDELGKVRAEVAELRAKCVARHYLDGGSPTPVGIQHPYCSPPRGRFDYGTPDCRTRIDLDP

SEQ ID NO: 46713 - protein, 36 aa, Zea mays
  Coding DNA Sequence Number=SeqID_3338
MESHDLRAEWESRLVGKEEGVEADLQEFQDFDEFED

SEQ ID NO: 46714 - protein, 417 aa, Zea mays
  Coding DNA Sequence Number=SeqID_3339
  Gene Ontology: Mol. function=transcription regulator activity; Cellular component=nucleus; Biological process=regulation of transcription
  Homolog annotation: Hit_ID=Q5JNS0; Match level="QueryCoverage=87%, HitCoverage=100%, E-value=3e-73, Identity=48%"; Hit description =Putative bHLH transcription factor
  Pfam annotation: Domain name=HLH; Domain location=220-268; Score =21.1; E_value=0.00088; Accession=PF00010.17; Description=Helix-loop -helix DNA-binding domain
LPDTRQRSSPSAREKGFAECFRHSAKLLIPVVLVARQANGRAVKHSRTTTTMYHPQCELLTMAHETPDLDAGQPHLTVSGVASIPAELSFHLLHSLDAAAAVNPVTAPPQSTIDYFLGGADPHQQAMQYEPLPPAAGGHHQYTMDMFRDYCDGHYPTAEPYIRGTMTGALVFGATDDDDSAAAYMPGGHFETSPPPPRATGRGRKRGRALGGGFHAVLANGVEKKEKQRRLRLTEKYTALMHLIPNVTKVTDRATVISDAIEYIQELGRTVEELTLLVEKKRRRRELQGDVVDAAPAAVVAAAGEAESSEGEVAPPPPAVPRQPIRSTYIQRRSKDTSVDVRIVEEDVNIKLTKRRRDGCLAAASRALDDLRLDLVHLSGGKIGDCQIYMFNTKIHKGSSVFASAVAGRLMEVVDEY

SEQ ID NO: 46715 - protein, 85 aa, Zea mays
  Coding DNA Sequence Number=SeqID_3340
MPPKSKKSVKGLSKGLGLFQGSSSSSSIRRELLIAVHGDEDEQHTEERHNEEEQHNEEEQHNEEVQHTTWDQATQQHQPWDQWDH

SEQ ID NO: 46716 - protein, 186 aa, Zea mays
  Coding DNA Sequence Number=SeqID_3341
  Subcellular localization annotation: CTP_CleavageSite=62; ConfidenceScore=5.31e-01
MLLLLTLSLTYSLKRRHPRALTVAAVPYLRAGRARPPCPIARRRRPPVRHRRRGSRRRARARAASAPSPPRSRAAARPRRPHARRSRVRRARARRVVARARRAVPLVVSRPRPSSCPSPNPSPLPVPPPRPRPPPPPVPPPHSSSVVTPPFPRRALARQAPRPRPDASPATRRLARAPSPRPCQNL

SEQ ID NO: 46717 - protein, 219 aa, Zea mays
  Coding DNA Sequence Number=SeqID_3342
  Gene Ontology: Mol. function=cysteine-type peptidase activity; Biological process=proteolysis
  Homolog annotation: Hit_ID=Q5NKQ2; Match level="QueryCoverage=100%, HitCoverage=26%, E-value=9e-76, Identity=63%"; Hit description =Putative uncharacterized protein 9C20.3a
MKNVDRPPPNPKRIIIQSTQECFSVDIPRVPANTVSHKPMHAGDEDDEFMLVLKKRNLASSPPRMMKKVVTKRMKAVDPLRQRLNVRCNPQDVIVSIQILNARQRQAIARKGFSSILDMRVDVLGSRSHLSWLMEKLDHNDMTIRAGPGKELKITKETVHLILGLPNAGGGKPLGIDEAVAANNLRVELGLSKEEFGVAALQDRLRKGFDNDLSIRSFF

SEQ ID NO: 46718 - protein, 177 aa, Zea mays
  Coding DNA Sequence Number=SeqID_3343
MTFAFINIHLDIYRIIIIIPQKTDASAMRKTSKKEEMFMLRCVRKEGKMFFAFGSKVKFRSQQSRLYTDKGDKIYYKISPEFFAGKSFIATVKLQPVILQLRHPAHIKKQNKKGSNFKEKPAFRKAVAVPREATRAQKSACPAITSSSASTSPSMYSKVLGRFSAEGVNFSELAPIE

SEQ ID NO: 46719 - protein, 115 aa, Zea mays
  Coding DNA Sequence Number=SeqID_3344
MESHDLRAERESRLVGGNEIVGFGIDSSNASPLQPNRILAEYVDVYSPFALHTKPPHPQVVSIATPAQEKMKPEKETIRSSKILMSSRRGLAATPSRLPVKAAFIYVSFLHFDLL

SEQ ID NO: 46720 - protein, 81 aa, Zea mays
  Coding DNA Sequence Number=SeqID_3345
  Subcellular localization annotation: CTP_CleavageSite=44; ConfidenceScore=5.22e-01
IDNPAGAQGKPGPRGVLGRPYPVQPPTGRFNRPGPSFAARPPVPASPDRGYEIDGFGYDYDAGEDEAVEGDFQEFQDYDEF

SEQ ID NO: 46721 - protein, 24 aa, Zea mays
  Coding DNA Sequence Number=SeqID_3346
MAGGIELAGAKERWQAGEDILQFL

SEQ ID NO: 46722 - protein, 82 aa, Zea mays
  Coding DNA Sequence Number=SeqID_3347
MALGPLGAAPWSPSREAPPPCTRPPALCTRLPIPLRVTPRHPARGCSGPGGDENDGFGYDYGNGEDEVVEEDFQEFQEYDEF

SEQ ID NO: 46723 - protein, 197 aa, Zea mays
  Coding DNA Sequence Number=SeqID_3348
MHWNCSPGSGEDFRPELDDTTALVTPISTKLQRPGGRDSGQGSVHSRDTISPRPNPASGKGSRPRRIHVSPKELGLNLDAGRRTPPRPTPGLELNLDAGRRTPPRPTLGLGFNLDAGRRTPPRPTRGLGLSLDLGRRTQPRPTPGLGLSLDLGRRTPPRPTLGLGLSLDLGGASASPDLGLRPTMSQGWGHHYPTPS

SEQ ID NO: 46724 - protein, 814 aa, Zea mays
  Coding DNA Sequence Number=SeqID_3349
MDGGNHPRGGEPSISQLLQGRQKGLEILLSLARGPIAPVGVGGATGPHRHTKSPLPRRQGKRLHREEMGPQILVGGNPQKPFANRRENGCLRDGVGAEIMQLHPVEMQNRPHEMTRWHSEPPLVERDETQHIPRRRGWGGSARRGHPLWLRVTREGTKQAIGNKGLQIVHRDGRERPRVARLRRPKRKASSRSKELSPDRRHLWQATLHLRLNDRVKKAASEHSGSAPTTGQRSKAGPSEGFDSRLRPLGLRAHYWSKVRRLAPRKGSIAASGHLGSAPTTDQGFVGWPPKGSTAASDHAERGMTLGTSDTWPRLGLRSRGSGAALANPAPAKPLTASTYQPKNLEPDYALGLRPENSAACPPPTAVPLDRVRLTAAKSSLGRHRKLRLARPQSLGSTSTPDDGLRLARPQGSDSTSTPDDGLRLARLQGLDSTSTPDDGLCLARPQGSDSASTSKDGLRLTRPQGSDSASTSEDGLRLARPQGSDSASTSEEPPPRPTSGSDRPRHRGAIITLPLASSCYGEQDRRSIWLAPDNMKATVSPYCFSPLCVLSRADPSGLGHTATIYSSVQGPLGVETSTPRAWGCERGNAFGKQGSARPRRPCRGHASRAGTRAGAAPGSTLPKAGAVHRGWDGRAQGAEGSRSGGRGAASLGARGRAQRAGGRARGGSGSRAEGTRGRIAGGQDGRVGGAREPRARGGRRAGGAGARAAGEGRGRAAGAEAAQGENRWGAQGKKGERERKRERERGAHLGDPNFGDHRLQDLGHHGERERWERERLLRGKNQMRERDQGRGRAQGRARAPGARQTGLSQTRPG

SEQ ID NO: 46725 - protein, 218 aa, Zea mays
  Coding DNA Sequence Number=SeqID_3350
MRTRMVGPPPRSACFVGESAAAIRDDHGDFSGGTELGSVMGEGKEINLTAGSYRSESEERARSRFVGERLEVGGEAPTKIAPFVDAVSSSSSVGGVDGQPASRILLRLVLVDVGDFEVWGPLNGPKAQSECRYSTCVLLSSMMMPVPGRGVVVVVPRPSSGCATSRSRCRLSSGGLTPRRDVVIPVIFFLAPDLVLMSSFARGVDGASCVSPTVDGVS

SEQ ID NO: 46726 - protein, 178 aa, Zea mays
  Coding DNA Sequence Number=SeqID_3351
  Subcellular localization annotation: CTP_CleavageSite=25; ConfidenceScore=5.25e-01
MTTPSPPVGHWLAPAKSSQTLEPPRKSKLQEAAPNSLSYPRFHFSISLLRSQRSRWWGRGSRYGFIDEDEDPHGWPAPRLVHFVGESAAAIRDDHGDFGGGTELGSVMGEGKEINLTGGSYHSESEERAWSHLLCQMRYGYGKYRLWQDVIVDITPQLFTLNQRSKSDKYHKKKHSST

SEQ ID NO: 46727 - protein, 34 aa, Zea mays
  Coding DNA Sequence Number=SeqID_3352
MGKMMKKVKYVSYEQQRGYETSKTNLVKYPGSQV

SEQ ID NO: 46728 - protein, 148 aa, Zea mays
  Coding DNA Sequence Number=SeqID_3353
  Pfam annotation: Domain name=GRP; Domain location=61-138; Score= -25.9; E_value=0.035; Accession=PF07172.2; Description=Glycine rich protein family
MGKSKKGESSSHHSGDKWKREPTPPSEDFDDSEYSKEEFSFESEGLPVHASPPTSSDDSDDSQGIIAEVWTYIRVVERAGLEGSDESEVSSDEENSSDSSEEGGGDGDGEGDDGGNDDGDGDGGEGGGKGGSGDGSKGSSKGSNKASG

SEQ ID NO: 46729 - protein, 71 aa, Zea mays
  Coding DNA Sequence Number=SeqID_3354
MRTRMVGPPPRSAHFVGESAAAIRDDHGDFGGGTELGFVMGEGKEINLTGGSYRSESEERARSPVYMQQQV

SEQ ID NO: 46730 - protein, 262 aa, Zea mays
  Coding DNA Sequence Number=SeqID_3355
  Gene Ontology: Mol. function=cysteine-type peptidase activity; Biological process=proteolysis
  Homolog annotation: Hit_ID=Q5NKQ2; Match level="QueryCoverage=87%, HitCoverage=27%, E-value=1e-49, Identity=48%"; Hit description =Putative uncharacterized protein 9C20.3a
MAARGPALWVAGYQRDDDQPKAAALIMRNVDRPPTNPKRLIIESSQECFSVDIPRSTDIGNPTNTRSDGDPPQHRKRGVAADAKKIPMPNVDDEMTLSHQKRSAISQWMPQIRRRLNIRCNPGDVLASIQISNERQRQAIVRKGFSSILDMTIDAIGCRTLLCWLMQKLDPRDMTLRIGSDKELKITKQTVHQILGLPNLGGGKPLNIDEANAAATLRASLNISKDEFVISKLQDRLRLGQDDDLSIRCFFYSLQPVAIPNS

SEQ ID NO: 46731 - protein, 278 aa, Zea mays
  Coding DNA Sequence Number=SeqID_3356
HTWALGLNEDAPWQDVAAGLRQSAESCEGCPCPLCLRRTSGCSEGLERRVASLPSPQQPPQGAPAPGVAAGGDPDDGGGDDSSSHDTDFSANHELEGWFARSITRDAARGCHFHDALDTLLRRAFDRHTWSVEYRCVVYQHGRGVYPDRWEATCLVRRPENSLQGAEACSEHYSISERDSAEAPCKMLHGVRFRTTARFSVGTVNLAAVLNTELDHALDELSRARAEIALLRAERAERRHLDDGSPAPVGTQHPYRSPQRGHQSYGNPDCKTKINLEP

SEQ ID NO: 46732 - protein, 75 aa, Zea mays
  Coding DNA Sequence Number=SeqID_3357
IPGPLGAITIFGNQQTARNIERDFVPGQRNAVSVWGTGLSGGAPDSVRWCTGQCPVRQAISAEEAALGNLLTTYG

SEQ ID NO: 46733 - protein, 387 aa, Zea mays
  Coding DNA Sequence Number=SeqID_3358
MPSHFPRDGERPRCLRLVAGGAQPRGGWYLSAIARLQGFSSGSLAASPQRWSPKMVTTSSMVGRSKPGCGLCPALSFKDLHHPCLGGGRGEPGPAFAWASVPLLPPASGGGNHPPALRRRRPPAMPGKANCCCPVQGAAFRLPSGRRWPAAPGGLTTRRTLRGRWRKLLRRRDHQRHPRTYLWLFGFNVWFSSLEWGREREPSSGSVRPGTIAAAAEVAGGDGSGAVLTSSFEVEIFRPCCCPRSGRIPPKEWFICSVHMFFAAAEAQTYHRRVVKLRFFSPCFEYQDLFVGSRITCASESYFSRKVMSEDSVIDIFEKARKIISAEKFSSVKTCPVSGIAYPSVSYLSQKVMSEDPTIEVVEKRVRRSDRKTFSEENFDTEGVPPF

SEQ ID NO: 46734 - protein, 123 aa, Zea mays
  Coding DNA Sequence Number=SeqID_3359
MAVRRGISALLFLETLADFLKLVELCKGLVVLPCLASLVEVYGVRSTPWHMGNMTCGYRVQPLQSVKLIRPVTQRRPRRARYNGPDHAWASELNEAALRDDFVAGLRLVPNGAKGVPACSVSV

SEQ ID NO: 46735 - protein, 142 aa, Zea mays
  Coding DNA Sequence Number=SeqID_3360
  Subcellular localization annotation: CTP_CleavageSite=26; ConfidenceScore=5.31e-01
MASSSDAVSRITRKSSTLATTMRPPCLTMDSAVQLLWTASKRRLRGSLSYTAAHATTKNLVGIKDGFVQSKSAQSGCTGLSGVAPDSVRWCTGQCPVRQADSGELAALGKSSATYGYKSPDCPCKGERLQVVEIPRKWDIVK

SEQ ID NO: 46736 - protein, 47 aa, Zea mays
  Coding DNA Sequence Number=SeqID_3361
MRRPPVHALRLSALLLLLCLCAFPAPACLCNIRQVRNLTIYVRLLMS

SEQ ID NO: 46737 - protein, 124 aa, Zea mays
  Coding DNA Sequence Number=SeqID_3362
MPPRSSCLLVVRLLLGHLFFSYGGLYIDCGFIHKNHGGSYEKCAHEGIWCDLSHWIRYERARLDWRGCEPVKSYPYRIKYLEQSLKYEDRSALMQREGRDTLRSIRHQTKTGDEVIPQRGLVQL

SEQ ID NO: 46738 - protein, 219 aa, Zea mays
  Coding DNA Sequence Number=SeqID_3363
FFPPFQKRSSSLDGQDACIGKGSSCLKTTPQSCTSLHTCSPLDVQYDFLARHHRQMIARAEDAEKCNRQLHVDLTTAQARVAALESREAIVVEALKQAKDEHVQKLMEAYLVTHNQQGAIVLEGIPVFPQAMNKQEHPESSQDPPPELFEPLTMKKIPAPSLEVKEEAASTSPAPPPFEELQEPFQLEEEFDPVLPSQSPPEEVINISSLLTHPGDASD

SEQ ID NO: 46739 - protein, 359 aa, Zea mays
  Coding DNA Sequence Number=SeqID_3364
  Subcellular localization annotation: CTP_CleavageSite=20; ConfidenceScore=5.23e-01
MHRVFPPSEPPGGGRPESFRLVVGGTQLRGSRYLLAIVRLQGFSSCSPAASPRRWSPKTVTTSLMAGRSEPGCDLGPALSFKDVHHPRWGGGQTEPELYLPRGFVGQPPLQHPRERALTSPASGADFDNAGPIDGGCRQLQHVGLAGLAPGLSCLCNGTGPPRGGRCSARPGGSEWGSADGLMLHSKAPRWMRPEKSPSPTGSLPPSVLWASGSLYLSSPLERRRGRGQGCSGFRPRAIAAAVGTEPEFRLYWHLECRCLVQCGCRGLNVDPLRRAFDEPKPEVAVSARDGRQSWLRKGARQWPSGCGRAEPPARAGSSMKTLGGRAGVGCSDVAFQRRGPPTRRIEASIREEVICITA

SEQ ID NO: 46740 - protein, 183 aa, Zea mays
  Coding DNA Sequence Number=SeqID_3365
YSSSRKSTSRVDAVILRLHQYCVRSTVVIKVPVDHFERCAASPPSSIRVRQQVTLSNWSLGGQMLGRRQRRHPSLEVFVAATGSTETKRAGTPFAGLGTLTKACGDVLPRRVLVQSQGPRGRLQGKHRGAAPHRLYLLLERERRALLLLSSTFLLLMQAVVQSLQVAGLSGHGTAKRTLSKAG

SEQ ID NO: 46741 - protein, 122 aa, Zea mays
  Coding DNA Sequence Number=SeqID_3366
MKKTLEDLQAEHHAGVQRIAAWADEASTALVPLGVSPIPVLELPTSISDALLVLYSTADRLRRLDQILGACLEAEGKMLYVPGIGKRLSFSCRKADTPGSAYFCHLEGSFPTGGEFVEHFSV

SEQ ID NO: 46742 - protein, 121 aa, Zea mays
  Coding DNA Sequence Number=SeqID_3367
MVLGLPKFHQHEEMVEEGGAGRHPHQHLAEVVKDGRLEDGVGREVLKLEAELLQQQQEERRDRQRQPAGKVGDEEHELPGSEIAEGRGTGADPSGERRRPPSEQVAHQVECPLGLEVLGMS

SEQ ID NO: 46743 - protein, 236 aa, Zea mays
  Coding DNA Sequence Number=SeqID_3368
  Homolog annotation: Hit_ID=O48967; Match level="QueryCoverage=100%, HitCoverage=46%, E-value=6e-56, Identity=54%"; Hit description =Putative uncharacterized protein
MVHIVEHHDFMPEDFPVEEEAASSTSRATNCPAPSATAVHSVRQHTPAQTARARRAAPGALSVARELLRHPPSSTASPGAMKQWCDDVDHLLGMVHSSSARPRPRSSRRQHEASASVRSPSVRDAPTEDMLAELNRRRAGEDAPVSLERSSDLRVELNRRRAGEDARVSLERAREYGQNVEGRNLDYDFAVVAPQTPMGARIQAGVPLAGIGYAALADHLRATTWPSKFRPHLPEK

SEQ ID NO: 46744 - protein, 66 aa, Zea mays
  Coding DNA Sequence Number=SeqID_3369
MKYYLRLVLYLKINEVLFEMMVVYTPRGMKIEYYALHSYAFIEVIFADDVVLYPQRCLLLIKGSGK

SEQ ID NO: 46745 - protein, 37 aa, Zea mays
  Coding DNA Sequence Number=SeqID_3370
TSAPSGQGVALHKIVTDIGGGVSVAKAQHPWKAVVGP

SEQ ID NO: 46746 - protein, 84 aa, Zea mays
  Coding DNA Sequence Number=SeqID_3371
MEKEIHGLEYDPRTKIIDGDILMRVGGGKDMGGTRSRWGQNITDSARRREEAMCGVGGEDDGREDSLLGQLVEDSGYVSLNVEP

SEQ ID NO: 46747 - protein, 53 aa, Zea mays
  Coding DNA Sequence Number=SeqID_3372
MGLGVCGSLCQGGDEDDGFGYAYGNGCPHCNHCSGEDEVVEEDFQEFQEYDEF

SEQ ID NO: 46748 - protein, 230 aa, Zea mays
  Coding DNA Sequence Number=SeqID_3373
MARPSLGRLLWASNSTRPHHVDGSGTATWPEKMIYYKVSTVSSDPYGKVLDPCIYKLGLRVKSGTSTGTNRTPRMGSGPLSVGSGPLTAGSRDSETENTQALIKARRGSGADTCPNLTVYASAPRSGGAPMVPRGMVHMTRSVASAFNETCPFHGQAATSPFRRRRACPFHWQAVRPYCCVHYAHHHSRVTEEAATTYQYYMDYGYNGARRLLRRTRIGYFYNVFPPFCS

SEQ ID NO: 46749 - protein, 277 aa, Zea mays
  Coding DNA Sequence Number=SeqID_3374
  Homolog annotation: Hit_ID=A2XFR6; Match level="QueryCoverage=58%, HitCoverage=46%, E-value=3e-08, Identity=29%"; Hit description =Putative uncharacterized protein
  Pfam annotation: Domain name=Pox_A_type_inc; Domain location=218-240; Score=17.6; E_value=0.046; Accession=PF04508.3; Description=Viral A -type inclusion protein repeat
MARLRHTARKSVIPFLPSRLAERPLRRTVSGGGVREAPSLCSSAGGAPAPPQDAPAVGGATGGGLRGDPDDDDDGSDHNTESSEPQEAFDRHTWSIEYHCVVYQHSCGRYLDRWEATCLVRRPEDDLRGAKAVSEHYSISERDTTKAAMQDAARRALSQYCSLFGGVADGLNLRYYPRRPTGSTESVVVSPIGEDNPRLSSTVNLVVVLNTELDHSLDELSRARTEIVELHAELAERRHQEGGSPAPVGTQHPYRSPPRGHHTYGSPACRTRIDLDP

SEQ ID NO: 46750 - protein, 70 aa, Zea mays
  Coding DNA Sequence Number=SeqID_3375
MREGESERGSGAQVAEGGAVASSTRDVGVEFSGVTITVTGHPFPPPIAHDCVTGDLTAVNTRHRAVDRPP

SEQ ID NO: 46751 - protein, 51 aa, Zea mays
  Coding DNA Sequence Number=SeqID_3376
MVCLQMMMRRMVMFMLMVMVAFGAIYAQVKKKENGVEVDLWEFQDFDEFED

SEQ ID NO: 46752 - protein, 204 aa, Zea mays
  Coding DNA Sequence Number=SeqID_3377
MNSARLRAQKSELAPKGAPDSEHDMSALRAEARAQAQHDARTGLAQALLNGSCLGPARQTRPIWPSIPPHDNVGPRLSCRHLIRHPASFLSHLMPPPSRHPILGRGRGSRRLLPIFVQHQPQHQSAQWLFHVHEDVSQYARTIVFAIVGRPIRLSGLRPILPPQPTAPAYGRSSEPTDALRHGYEASRSCSWPFFVRAAEEVQV

SEQ ID NO: 46753 - protein, 393 aa, Zea mays
  Coding DNA Sequence Number=SeqID_3378
  Gene Ontology: Mol. function=hydrolase activity, acting on glycosyl bonds; Cellular component=beta-galactosidase complex; Biological process=carbohydrate metabolic process
  Homolog annotation: Hit_ID=Q5LJJ2; Match level="QueryCoverage=61%, HitCoverage=29%, E-value=1e-130, Identity=86%"; Hit description=Beta- galactosidase
  Pfam annotation: Domain name=Glyco_hydro_35; Domain location=42-320; Score=302.3; E_value=9.2e-88; Accession=PF01301.10; Description =Glycosyl hydrolases family 35
  Pfam annotation: Domain name=Glyco_hydro_42; Domain location=63-379; Score=-247.9; E_value=0.027; Accession=PF02449.6; Description=Beta -galactosidase
  Pfam module annotation: Pfam domain module=Glyco_hydro_35::Glyco _hydro_42; Domain location=42-320::63-379
MTVRAAAVLVAAAVLVLLLPGWAAAEWNLTKKGSVVTYDGRSLMIDGKRDLFFSGAIHYPRSPPEVWPKLIERAKEGGLNTIETYIFWNAHEPEPGKYNFEGRFDLIKYLKMIQEHDMYAIVRIGPFIQAEWNHGGLPYWLREIDHIIFRANNDPYKKEMEKFVRFIVQKLKDAELFASQGGPIILTQIENEYGNIKKDHATDGDKYLEWAAQMALSTQTGVPWIMCKQSSAPGEVIPTCNGRHCGDTWTLRDKNKPMLWTENWTQHFNFMKQNLTSTRIPDTKKRGDAVVETNINNDAFTKGVTSRTPPSLVREEPNFRSEDTLNKGSVTIAKAFAQDVPATSSGYDPRKKHAASIVVAAAQTSRIHPYTEGEATRRLPQQPHSCIVRHPFG

SEQ ID NO: 46754 - protein, 231 aa, Zea mays
  Coding DNA Sequence Number=SeqID_3379
MAGESKSGCGLCPSLSLKDFHHQCWGGECAELGCRVPGSRTRVASEPLPAPPSATAAGRGSSADEIVGATHGPTSNSTAFYPSLPHEFGHGRGPHGSSIRPEVIAAAVRPSGAEVVVVVAAGAGDGEPFVGLLLLRRPPNRVGLFVPAEGSLGSVDLTVRGFSCLVKGTPRSLFDEPKPGVAVSAWTESGDPRTASPSEAGPDLAEGVVDAEGAAGPFNRQDPSLQDQIIL

SEQ ID NO: 46755 - protein, 57 aa, Zea mays
  Coding DNA Sequence Number=SeqID_3380
MGSSSLRAERESRLVGGYEIDGSGYDYGAGCQHCNHCSGEDEAVEGDFQEFQDYDEF

SEQ ID NO: 46756 - protein, 171 aa, Zea mays
  Coding DNA Sequence Number=SeqID_3381
MARTRKTAHKSTRPIGVPRHQLAPRHEGSSSGSNDPIEDLEAKVEQLQMELRHRNRVWAQDSQCIAELAADVRRLQDELAERDLAVDWAVNSRSIAWDREAKARARVAELSAALDSLQVYCNTLHEEVHVLYAQLHPDVPNDPVAMGARPSGTAGEGPDGELDLFRCGGTA

SEQ ID NO: 46757 - protein, 380 aa, Zea mays
  Coding DNA Sequence Number=SeqID_3382
  Gene Ontology: Mol. function=serine-type endopeptidase activity; Cellular component=chloroplast thylakoid membrane; Biological process=proteolysis
  Homolog annotation: Hit_ID=A2X9I0; Match level="QueryCoverage=80%, HitCoverage=54%, E-value=1e-123, Identity=74%"; Hit description =Putative uncharacterized protein
  Pfam annotation: Domain name=Trypsin; Domain location=106-293; Score =36.5; E_value=9.7e-08; Accession=PF00089.17; Description=Trypsin
  Subcellular localization annotation: CTP_CleavageSite=67; ConfidenceScore=5.65e-01
MDDPSSASNKHKRKRGRKPKASPPSLDRSSASPSVAPAPAGRRGRKPRRHEALAGVDATRPPSPPCRGEPKPVANGRDVVAVAECGPASWDEVVRVVPCMDAVVKVFCVRTEPNISLPWQRKRQYSSSSSVFIISGRRVLTNAYSVEHYTQVKLKKRGSDTKYLATVLAIGTECDIAHLTVNDDEFWEGVSPIEFGTIPVLQDAVTVVGYPIGGDTISVTSGVVSRIEILSYVHGSTELLGLQIDAAINSGNSGGPTFNDRGKCVGIAFQSLKHEDAENICYVIPTPVITHFIEDYKKSGEYTDYCPSLLTFFQAATEYIHSLSRAQPARSLNGAGLCPASRSLSTHATTTSSTPQLKARHVKHPGRHYVKQNRRREELM

SEQ ID NO: 46758 - protein, 171 aa, Zea mays
  Coding DNA Sequence Number=SeqID_3383
  Homolog annotation: Hit_ID=A3A7I4; Match level="QueryCoverage=32%, HitCoverage=13%, E-value=2e-17, Identity=71%"; Hit description =Putative uncharacterized protein
MGMNMVSKGVQNVLDYLQADFSDMDVISISGFPMSAGRFLLAIRYSDSMQYSRSNLFGMQYSRKRYFVLEDAALRCFKSAPSSKGELFFVLQVCAVLQGRGGFFHGVRSISFGVDLQEIRLMGVLQRIAIAYLLTALCEIWIRGDEDVDYAKFFFSSAKFCNLQNIQLFRN

SEQ ID NO: 46759 - protein, 111 aa, Zea mays
  Coding DNA Sequence Number=SeqID_3384
  Subcellular localization annotation: CTP_CleavageSite=25; ConfidenceScore=5.31e-01
MAQPTVGSQRAVGAPDMSGAHRTVRCPLLAVGSATCPAQIARPTVGPADRWLTGQSGAHRTVRSLCDATTPEGFGPEASKWEIWCFGYDKTPEGATSSLLPGKGHSSSPKF

SEQ ID NO: 46760 - protein, 163 aa, Zea mays
  Coding DNA Sequence Number=SeqID_3385
MGEALLGKEIRLQIPNLSSDYEHLQGCPSWLQDMKEAVAAATIQSETSKLKWNNFRQSYVTEIGCGHRTDRKAKARARVAELSAALDSLQVYCNTLHEEVHVLYARLHPDVPADPVAMGAGPSGIVGEGPDGELDLFRPPPSMNLADDRSPAAGNEETKDDED

SEQ ID NO: 46761 - protein, 67 aa, Zea mays
  Coding DNA Sequence Number=SeqID_3386
MTAVGVSEALYAKAIDSAFGNQTPQPNSRMSRGSLEDMVAGVTWPSILPPGWTVEWDPASAEEEHEE

SEQ ID NO: 46762 - protein, 143 aa, Zea mays
  Coding DNA Sequence Number=SeqID_3387
MKLPEQGIGLCLIGEASPRSPDFTRPPVNVDQIAVVKPEHPPPTSSPACARGPTDSDHPRRRAVPRCDRQNLPEPTPPLAGPPSPPHTYSYSLHSIDCNLADGEYVLVPEQGVAQEVASDPAPEPAPEDLPAPALEGKPRFYA

SEQ ID NO: 46763 - protein, 47 aa, Zea mays
  Coding DNA Sequence Number=SeqID_3388
MAMMGSTSDKMYLCQVGKQQTFAVFVLWWCPKKNLSSEAAGGCWPPT

SEQ ID NO: 46764 - protein, 177 aa, Zea mays
  Coding DNA Sequence Number=SeqID_3389
MEAIALHGLSTFYGFHPLELSTHPIGLFPTEKEDDPMWKNRVEHAKDIWAIYPGQTAHLTATKITLDNREELVVDLSTEMVEKDLQVEQLSNEIQELEELVGTRENTIEVLEDQLINTWKLTSTWICTTRRSRTWRPTRMSTTRGERSLPPAWTLLAQGDRLPPSRVLPRLLTRSSR

SEQ ID NO: 46765 - protein, 124 aa, Zea mays
  Coding DNA Sequence Number=SeqID_3390
MTWKPLQLAVVHLPWLTAREREEEIEVTEEKTPPPSESQAGNCFYFDICGSEPDSPVNEGKPRRADQGPFNWSHASSWHTLESLFLSRVRKRQIFVAFAPRWYQMKKNKTEVREDLVLHIGSFA

SEQ ID NO: 46766 - protein, 99 aa, Zea mays
  Coding DNA Sequence Number=SeqID_3391
  Homolog annotation: Hit_ID=Q6J9V9; Match level="QueryCoverage=69%, HitCoverage=23%, E-value=5e-09, Identity=55%"; Hit description =Putative uncharacterized protein
MARGLGPTRHANRLRAEEAKPPRAGPGKGDTPKRILPREGTRLRASLLIRGSKAAPPGGFDSRLRSRGPYTPLLVRGSKAGPSEGYHDHLRLLGLCAHY

SEQ ID NO: 46767 - protein, 219 aa, Zea mays
  Coding DNA Sequence Number=SeqID_3392
MESHDLRAEWESRLVGGYEIDGFGYDYDAGVKDSTKTNRKNKTGFKTKEQKQTEVLPGLAYRTVRCTREDCLRTLHLRVSQAQPTIIHRTVRCTTGQCPVLQSEAALNWPASGKWKAAPLKFTGLSGVHRTVRCASGATATSRQRSTLTANSAQQYTRQKLEQKDRGAPDCPLNSHLVKQLIARENLLSGTIIRGTLKTPNSQLVTPINIKLLRPGGCD

SEQ ID NO: 46768 - protein, 298 aa, Zea mays
  Coding DNA Sequence Number=SeqID_3393
  Subcellular localization annotation: CTP_CleavageSite=52; ConfidenceScore=5.33e-01
MAPPLTWSVRALGWARWRLLQGRGRVCLPRPRSSPSPWVGRGGDRRLRPGLSLSPGVGRSRVRRLPGLSPSPSPGVGQSGVRRLPGLSPSPSPGGRAKRSSSSSRAEPESEPWGRAKQSSSSSGAEPESEPWGRAKRSSSSSGAEPESEPWGRVKRNSLSSRAEPKSEPWGRAKRSSSSSGAEPKSEPWGRAKRSSSSSGAEPESEPWDRAKRSFLWRLRPDLAAVSLTLSSGTIVRAAQAALSSCQARSVEWRSDYGHFGSVNWRARVKIKVSGHLCIKCPCDLVGWHGDLAKVASW

SEQ ID NO: 46769 - protein, 333 aa, Zea mays
  Coding DNA Sequence Number=SeqID_3394
  Homolog annotation: Hit_ID=Q6J9V9; Match level="QueryCoverage=18%, HitCoverage=32%, E-value=4e-07, Identity=43%"; Hit description =Putative uncharacterized protein
MNKTPTFKVPLQTEPRFHLRRYEQPHTIGGPAEQQKADGWLAVARSSSSDDDDFCSGGPNSSSNDLRADAATIRPSPMPSLERQGRAEGRRVGGQSVGDTGYLVGRETSSGCRGGRRRRKRLRSHSGQRARHAAAASATNGERPSSRSLREGAGRRPRRDRPQLGALPSPALMMNILEVKGGAGGSSPARISPPSSWWSPSWVTAGEGMRPGCMMKILEAKRWLKGTNFREVAFLQRQGGRIAGVPHPGARKGPGKGDTPKGILLREGNGPRAPLLIRGSKAGPSEGFNSRLRALGLRAHYWSEVRGPAPRKGSTAASGHSGSAPTTDQGFVG

SEQ ID NO: 46770 - protein, 121 aa, Zea mays
  Coding DNA Sequence Number=SeqID_3395
MANDEQLSLQWAEAVVVPPNRHPLGPMQTIPHQTPAPVATGMQWGVHTPPPAAEPPLSIHGERRSAHFALAHGVQGSRAPVGVQWLAQRTQWQKERQQRQNDRDVLFIAEILFIYMYTKGI

SEQ ID NO: 46771 - protein, 243 aa, Zea mays
  Coding DNA Sequence Number=SeqID_3396
  Subcellular localization annotation: CTP_CleavageSite=34; ConfidenceScore=5.16e-01
MKHQTGSVVHQTGYAEMDRSIRRTRSRLARAQPRARAADPGGSPSRPRPPSSDEPTSGSPEAQSSPRSNPGQIATPTDKIAEAFNAKGSDSGSGPEDGELRSARPRARTQAQPRKTTNSAPPDPGLGLGLSPGRRRTPLRPTQGSDSGSAPEDDELRFARPQGSDSALASADGLRLARPRGSDSTSASEDRLDLDLGGASTSPNLGRGPTTSTGGAIITLPQADSGYGKQDRRPIWLAPPDKQ

SEQ ID NO: 46772 - protein, 486 aa, Zea mays
  Coding DNA Sequence Number=SeqID_3397
  Gene Ontology: Mol. function=hydrolase activity; Cellular component =nucleus; Biological process=metabolic process
  Homolog annotation: Hit_ID=A2YC54; Match level="QueryCoverage=66%, HitCoverage=93%, E-value=1e-96, Identity=55%"; Hit description =Putative uncharacterized protein
  Pfam annotation: Domain name=Abhydrolase_3; Domain location=233-456; Score=265.7; E_value=9.9e-77; Accession=PF07859.4; Description =alphabeta hydrolase fold
  Pfam annotation: Domain name=Peptidase_S9; Domain location=250-481; Score=-68.3; E_value=0.015; Accession=PF00326.12; Description=Prolyl oligopeptidase family
  Pfam module annotation: Pfam domain module=Abhydrolase_3::Peptidase _S9; Domain location=233-456::250-481
MDFMVFEVAELDGAIMICHTNSKMKALETVHWTQPHAAAASEIVDDQGTDAPPNADAPRHQSPMSFAAAVHAIATHRARTRRHTDSSVSNSLPAPLPTRHTSCQLYTPSHVQPQGNTHPRYRRAGQSEGMDSMASDDSNQGAAAKPKPKPPPLPLSVRLQLAGLTAAIDAVERRDGTVNRCLYGVIDRLLSARASPRPDASGVRSYDVTMDASRGIWARVFAPAAADRPLPVVVYFHGGGFALFSPAIGPFNGVCRRLCAALGAVVVSVNYRLAPEHRWPAAYDDGVDALRFLDARGGVPGLDDGVPVDLGTCFLAGESAGGNIVHHVANRWAAAWQPSARALRVAGVFPVQPYFGGVERTPSELELEGVAPVVNLRRSDFSWTAFLPDGATRDHPAAHVTDDNADLADDFPPAMVIIGGFDPLMDWQRRYADVLRRKGKEVLVAEYPGMFHGFYGFPELPEATKVLQDMKAFVDSHIPTPKLADA

SEQ ID NO: 46773 - protein, 279 aa, Zea mays
  Coding DNA Sequence Number=SeqID_3398
MEVQWQTSFCQNEDGFPKLLRACTVRLGIRSQPEYDGREFIEHGTEKCVVTVYIGSSPRHVEWSVTAAGHRFKDTCQVVARKALRALCQIYEEEVADTPLRFFPPFQRDRPAWMARMRALEEQQLLEDDPTVVYLTAYLLTLDAQYDFLARHHRQMIARAEDAEKRNPLKQAKDEHVQKLMEAYLVTHNQRRALRIQEPASSNPVQPIRAEDPRILEGHLVSIRGEKNACELPEGAIVLEGIPVSPKAMDKQEHPESSQDPPPELHEPPHHEEDSSTIP

SEQ ID NO: 46774 - protein, 165 aa, Zea mays
  Coding DNA Sequence Number=SeqID_3399
MNKRPTFKVPLQTELRFCPRGHERPLHRGACGATSSGQLASDLYSSSYGPRTDAATGRLLFASQLKGRGPDIKAKERAALKRTGSNSSPSPAWLEDASSAELGDGFHHQKLEEEVASRPVREVEPRLASLSTPARMVSILEAEGEAGAAARLASPHPGAGGHRLG

SEQ ID NO: 46775 - protein, 87 aa, Zea mays
  Coding DNA Sequence Number=SeqID_3400
MAAQYDVTQEWLDRVKIARKGLRGTKRSCVELSQLQLNFKFNRGLDRFNRGPGQVQPRSREVQPVSRESSAGVFSPDLTSQNQLNRS

SEQ ID NO: 46776 - protein, 265 aa, Zea mays
  Coding DNA Sequence Number=SeqID_3401
  Gene Ontology: Mol. function=binding
  Homolog annotation: Hit_ID=A2X183; Match level="QueryCoverage=88%, HitCoverage=8%, E-value=7e-59, Identity=45%"; Hit description =Putative uncharacterized protein
MSERLFKFPLSDNLCAALFSVLSGTSAQQVPQENSEPDPSRDRNCNILSLPPFSLPQILICIFRFMHSCKDSSARTRILNLLLGLLDSNSSNIEALMEHSWNSWLETSTKLEVFKDYKSVSKGDPDDVKADEISLVRNLYSLVLSYYLRFVRGGWHQLDDTANYFLLKTDQPCCDNVLHFLNLIQELLISQMGIRLLFLSPSISEESSHDNIWKEDIKSTVNDILNTESHGQFTSSNTAGEPPTGTSPKDDQRVKPSSNKTASQV

SEQ ID NO: 46777 - protein, 944 aa, Zea mays
  Coding DNA Sequence Number=SeqID_3402
  Homolog annotation: Hit_ID=A2Y9N4; Match level="QueryCoverage=42%, HitCoverage=17%, E-value=6e-14, Identity=23%"; Hit description =Putative uncharacterized protein
  Pfam annotation: Domain name=zf-CCHC; Domain location=293-310; Score =10.5; E_value=0.039; Accession=PF00098.14; Description=Zinc knuckle
  Pfam annotation: Domain name=zf-CCHC; Domain location=312-329; Score =16.6; E_value=0.0046; Accession=PF00098.14; Description=Zinc knuckle
  Pfam module annotation: Pfam domain module=zf-CCHC::zf-CCHC; Domain location=293-310::312-329
MEGAKSEGGGEHWFQLWYSGTVANKNGVVLNIISAYAPQVGLSESEKRKFWEDLDDNGVVSLKFLERMAKMARASSGPARDPSSPARDPSTAHSTAPPNSPVAYHPTPAAVHSINGGAAAPLRPKSSTSAAQARSVGRHPAPATIHTIYDAATASLRQVASPSAPSSPFPESSTSATQGRSKFQRWNESAAGSPDDGLQPRSWAGRPLFRDTLLHPRVPLVPALTASSPREPSPLETGTLNPHHEHQHRWFRGLESAPETTLGGWTRVESRKAKKRRLRALRARRPVPNDLKGRCFNCFADNHLAAFCHLEPRCFRCKTVGHRSYYCPGPVKADRKVPVHRRLLRGTVWNRLSTVEPTIADRVPQYQLPRVPVWKRLQPFVPLSCKKVCIWRRISPPGIEKGPAHHMMIAGGVDAHVSDSPPREVGAAARSASLGTLPPRPRRRRQRKRKSSSRGGSDPGWMQSDQPGNDEAPLTETGSTHHQQPCVIGWNSLMEKAEEDLKFAVSIFVVSDVPVSDVDIADAVAQKLEVSSDSLILRKLAHGHFLLMLPSLQFADQLTVRWNTIRAGAFSLHCKKWSKFFGSSSASLPIPVEFELRGIPIHAWELTTVQQLLNPFAWVQEVHDDTLQLKNLDVFRCYGWCYDLALIPQTRDLWITDPLGIGPGVGRLALVYHVQIKVLVGQRAVPDPTQVPSDLDDSAWRRRRFCSRSPPGDRDGRRGSADDGDPVDEPGTVEQLAPSTEDSIAVTFIPSANLPLLTWEEDRLGAAVVPDIVSNQGIPHPVERHRSVEPQDAAINRRGGLPSNLQVYFRRKRHSKKCSAPDAPAVSFNDLEKIIKPVVQLLPMPVAKIRSSKTVVAVPRRSRRVAGVKPCSPGPIITEAQKKVIRSLGLAATEEAIDQKAQDNYFKLFEGRLTDSHLAALAAIFGWQAERFDDSSSPVLLAGC

SEQ ID NO: 46778 - protein, 189 aa, Zea mays
  Coding DNA Sequence Number=SeqID_3403
  Gene Ontology: Mol. function=transposase activity; Biological process= transposition, DNA-mediated
  Homolog annotation: Hit_ID=Q69J12; Match level="QueryCoverage=32%, HitCoverage=32%, E-value=5e-13, Identity=54%"; Hit description =Putative uncharacterized protein B1054C11.15
MVKMMGVLLGFRGDREADPRLFGRQPRPSRTFPHHLDRVTTLVPSAWKESALVGGAGGCGGSGTKATAAASTTSTRRQQQDGDGDLVRLAAGIRRHVHSMVTPFYNSPLEIIPAPVRVGEEFPPSWDLKIRSKQVEDEATQLAREREVRGSDDFSIKNCIAVLNTLEVTKEEKVKAYKVFKDSDNRQIS

SEQ ID NO: 46779 - protein, 132 aa, Zea mays
  Coding DNA Sequence Number=SeqID_3404
MQAACNRTKGTHPFDFDASSMGAQAHTSCNRDRERGYSKRDPSPRRERAPSPPTDQRVRLTAAKTGLRRHRKLRLARPQGSDSASTSNDGLCLARPQGSDSASTSDDGLRLARPQGSDSTSTSDDGLRLARP

SEQ ID NO: 46780 - protein, 105 aa, Zea mays
  Coding DNA Sequence Number=SeqID_3405
  Subcellular localization annotation: CTP_CleavageSite=36; ConfidenceScore=5.50e-01
MASIHLVKYSTATKAKFRLPCAVGSGPTISSPQRCSGQLFVDHSEVTTFVFQPFGFALVRGVIMTFKTSHDREILHEDWLFGGAVLFDLAGDYLRISFDYAHCHP

SEQ ID NO: 46781 - protein, 171 aa, Zea mays
  Coding DNA Sequence Number=SeqID_3406
MAGSRDSFDVSPSNIIELTWETLPADKQFQFEEHKEQLIQEAKAKFLTNFKMDRNNKVVRQRATDLASLRPSMTTPKVPKVQLKPIKGPSQGSKRKEQKKPKDALVWRTGLSGVPPDSVRCTRVDQLELATFGFLEKPLHYNSPDCLVWHRTVRCASGAMATTQRSTPTET

SEQ ID NO: 46782 - protein, 151 aa, Zea mays
  Coding DNA Sequence Number=SeqID_3407
  Gene Ontology: Mol. function=DNA binding
  Homolog annotation: Hit_ID=A3AW82; Match level="QueryCoverage=58%, HitCoverage=26%, E-value=3e-07, Identity=34%"; Hit description =Putative uncharacterized protein
  Pfam annotation: Domain name=zf-BED; Domain location=76-128; Score =40.1; E_value=8.2e-09; Accession=PF02892.6; Description=BED zinc finger
MEAQESDGHEGGARGELEVMLSESDDSEFDLDDEFPPSIDGDELSKTEKTKRGGKRSRAGIQLSPSKCKANRVKRVGCWKYFKVVTVASRKELGVMETKAKCKFCHRSYLYHQGGSTTTLNRHLDKCTQYLNKLAQAKKNLAQGRLLKMNA

SEQ ID NO: 46783 - protein, 130 aa, Zea mays
  Coding DNA Sequence Number=SeqID_3408
MVDLTTDQACATALESHEVIAVEALKQAKDEHVQKLMEAYLAMDKQEHPESSQDPPPELFEPLTMKKIPAPSLEVKEEAASTPPASLPSEELQEPVQLEEEFNPVLPSQSPPEEVINISSLLTHPGDVSD

SEQ ID NO: 46784 - protein, 178 aa, Zea mays
  Coding DNA Sequence Number=SeqID_3409
MTSHGSSDDGNALTHTDGLAREGFPRILWELATHPIGLFPAEREDDPMWKDRVEHAKDIWALYPGQTAHLTVMRGEAMSHLMALLEATKITLDNREELVVDLSQEMVEKDLQVEQLSTDIQELEELVGTRENTIEEIQDQEANEDVDIEGGDEPASSVDTAGSGRPPSPESSVASFAH

SEQ ID NO: 46785 - protein, 110 aa, Zea mays
  Coding DNA Sequence Number=SeqID_3410
MDSKGKDKVADEKQTVPIDDEPKGDKTVDSGSGKKNEGKKKCIKKITYYENDTSSAQKDSSYMQKSVKTPFTRTPNYKHISLKQAEMGQPEPLLGSTNEFLFHFISSTFD

SEQ ID NO: 46786 - protein, 50 aa, Zea mays
  Coding DNA Sequence Number=SeqID_3411
MGSRHSACSAEAECRGSFVLFFSHPPAGRGKEEGVEVDLQEFQDVDEFED

SEQ ID NO: 46787 - protein, 134 aa, Zea mays
  Coding DNA Sequence Number=SeqID_3412
  Homolog annotation: Hit_ID=A7PBE6; Match level="QueryCoverage=24%, HitCoverage=2%, E-value=1e-07, Identity=84%"; Hit description =Chromosome chr16 scaffold_10, whole genome shotgun sequence
MERADALRTKIANQLFEKERADALRTKIANQLFEKAVEIFIKDVKVFASFNGELFKEITKLLTLENFSLYISFKLTTLVMLKLMKTSDEERDMLHMHEIDVGSMDKHSTKSDEEYEDLAMRDVMATGPTMNSKL

SEQ ID NO: 46788 - protein, 178 aa, Zea mays
  Coding DNA Sequence Number=SeqID_3413
MVMKKTLQMMLTSTKSNDAPVIFLWKSIHVLSDGVYYPDYPCEHQLYPSTTVGSCLPSGSRGSPYGYSPPSCGEWSDSEGQVRGDSCDTHPVVGVTSLCNWSIIFSIANTSSLSPDPRGNDPDDSGDGGDDEEEEEEEEEEINNEEANNEQEDNFVGIWPVTKHYTSIFETGHFPNLL

SEQ ID NO: 46789 - protein, 795 aa, Zea mays
  Coding DNA Sequence Number=SeqID_3414
  Gene Ontology: Mol. function=transporter activity; Cellular component= membrane; Biological process=oligopeptide transport
  Homolog annotation: Hit_ID=A3A0M3; Match level="QueryCoverage=31%, HitCoverage=72%, E-value=6e-67, Identity=58%"; Hit description =Putative uncharacterized protein
  Pfam annotation: Domain name=HSP70; Domain location=196-763; Score= -245.0; E_value=7.8e-06; Accession=PF00012.11; Description=Hsp70 protein
  Pfam annotation: Domain name=PTR2; Domain location=335-762; Score= -7.2; E_value=1.2e-05; Accession=PF00854.12; Description=POT family
  Pfam module annotation: Pfam domain module=HSP70::PTR2; Domain location=196-763::335-762
  Subcellular localization annotation: CTP_CleavageSite=57; ConfidenceScore=5.44e-01
MAEDPHPPPAPARSADAPTSPPITAAPSLSPHAPTPSLSAPLSSLAAIPALSHSDLRAFAPSLSPPSPLWRSLPPGSARVLPVTLAIRAHHRLIMEAAPDHAPATSALDFHRRRCATWKRISKIVRTSANLAPASNCAPQPHIYLATDRMSRDNPTIGDTHSPPKPTLHLRRDLQPQPPVAPAAGGKREGGRHRPTTNSAVAPMEGGKPTIVTNAEAARTTPSVVAYTKSGDRLVGQIAKHKVVVNPENTFFSVRRYISRKMNEVDEESKQVSYPVIRDDNGNDKLDWPALGKQFAAEEISAQLNLYLVLLPLDGQSVPKLEKPYHNCLPTLSIRHLCQVGSIILLLALINLAYQMNKQRLCAPASFQFVALQLSRQPKEVEIYIRKSKDACLSANYTRKYETKPEQPNGLERLWEENSLSDLYPSLATCQRRSGGVVVDVPLTDSSSATVEEISQPNPKDGSPGVASAIPETDLPEIVQVIRSCRDGIHKVVELLQHKFPNVSKTQLNRKVREISDFVDNHWKVKKEVLDKLGLDSSPVKSKKNKSIAMFLDKAAVEMADDKSRRRLASAWRLCTVTQVEDLKCVLRLLPVWASGIVFAAAYTQMTTTFVLQGDTLDLHVGGGFRVPAAALSVFDTLSVMLWVPLYDRLVVPLARRATGHRRGFTQLARMGAGLLVLAAAMLATGALEVARRHVVARHGVYYDTHTGAARYLPLSIFWQVPQYVVVGASEVSSALVAVVARATARAGQVDGWIPDDINRAHLDYFFWLLAMLCVGNFGVYLLIARWYTYKKTVD

SEQ ID NO: 46790 - protein, 106 aa, Zea mays
  Coding DNA Sequence Number=SeqID_3415
MRKKHGSVPKLRTCSGPDSHNEQKTLAFEVPLQTELRFPLRRASERLHPQTPRKRVTRGPARKEERRLSVAPTPARMMNILEAEGGTKIAARLALPHPETGGHHPG

SEQ ID NO: 46791 - protein, 147 aa, Zea mays
  Coding DNA Sequence Number=SeqID_3416
MNKTPALKVPLQMELRFHLHRYEQPHTIGGPAEQQKADGWLAAARSNSDDDDFCSEGPKSSSDDLKADAAAIRPSPTPSLERQGRAEGRRVGGQSAGGTDYLVGGETSSGCRGGRWHRKRRRSHRTGEPDTRQLPAPRTANALPPDR

SEQ ID NO: 46792 - protein, 195 aa, Zea mays
  Coding DNA Sequence Number=SeqID_3417
MGAIKSRIGPLKGHDLASPEPSLGQGQPTPEDLRLARGPPPATDTPSARPRPSLHREATLAKSPRRPIVSQEHLMQRVRLAAPKSGLRRHRKLRIARPQGSDSGSAPEDDELRFARPQGSDSALASADGLHLARPRGSDSTSALEDRLDLDLGGASTSPNPGLGPTTSQEAPSLPYPKLTQATGNKTGVPSSSPR

SEQ ID NO: 46793 - protein, 428 aa, Zea mays
  Coding DNA Sequence Number=SeqID_3418
MGGSEPGSFAEKDPFRATGAPVARRVGLGPKLACQKSEKRVHLARLHAAFMAARPFCPLVWAKMGGRLNATPWELVPLSHRSASRIFITQPGRTPSPAVTRDGDLQLDGGGKRAGLRPLPLPQPQGFSSPRLGRGECRVGVGPCVGGGPLLHPVMGGEAGIARGVRQLQRAWSSAASGFGASCGVGVCHGSRKRFFRRRGGRDRPRADLQLLRPSARPCLTSFGHGRGPPGSGIHPEVSVAAVRPPRAEVAVVATAGAGDGAPTVGLPLLRRPSPSEWGCSYLRRGNRSSVCNGTSDASEFVHCGCRGLNVYVISARSRVFSSFLSTKSRLFDYLNRFTKHELPRVKVTGEAGGSDISMNRGGVGSRMGNLVGRSLAVSPVSGADAQEPLDLGAARGWVGLCCRRRRCRGCYGSLRREDPSLQDQIVL

SEQ ID NO: 46794 - protein, 275 aa, Zea mays
  Coding DNA Sequence Number=SeqID_3419
MASRRTPLQPCPRPRRRSRGEDKYKEPEARSADGGGDPIGDGDFSSRIHLGTDDRSPQKDYECSPSGGSEGGKTRCMREREDMVAFQGGHPPFKATLPTCVPSRRGLSLLQHAPRSSPYGAGAGSHTSCKLAQGRRSQTAARGACNRPTATSIPPLSPRPAGERADNHAVGTQPRQVRAPLRLPTHPTWRPRPTRHATGAPVATCKQLHRHSHHYHASSTAEPVPQLEATLRMTQQCQPGATVNMAKNGPTVMAVAGGQEQRSRRQPSLRPIQGQ

SEQ ID NO: 46795 - protein, 153 aa, Zea mays
  Coding DNA Sequence Number=SeqID_3420
MGTFPFQLQDNPILQARILTVEGSSSTLGVNCTFGEESGSSRRLGRPPRGLGRLSPEDMSPARGLGNSIPASVPPVDDPVRLRPTKSSFRANSASVRADTATPGFGSSKSGRGVPLTKQEKPRTSRPTEPRDSYASGIRIPHSSPLHGATNAW

SEQ ID NO: 46796 - protein, 88 aa, Zea mays
  Coding DNA Sequence Number=SeqID_3421
MSGVHRTVRCNSGATATSAPTATCRALNARAALDTCPYWHTGQQISTGECTGHPGGPTSQKLQRSESNDSDDVAGAPDMSVSPYSPPL

SEQ ID NO: 46797 - protein, 152 aa, Zea mays
  Coding DNA Sequence Number=SeqID_3422
MAREINDEPTWRWGCARWETRRQRLSERDGSRRDVECGLDGSAAIQNRRLALDRRRGITGGPRSAGVGLQAQQRLQSADCSAQGPRSGQPAMDMHGPGPDQTSEEMNKEVKRKRNKKERLEVANRIGARGKGIDRKGKPIWIKRGKGDHPIT

SEQ ID NO: 46798 - protein, 681 aa, Zea mays
  Coding DNA Sequence Number=SeqID_3423
MELRSSNEEAERRRIPPIRGLGRWEDTTLKGGRRHGCLPKGVALLLKATLPTCAPNRHGLSLLQHAPRPSPATRGLGPACHANRLRAEEAKPPRVVHTTRPAVASDPPLLPRPTGERGGQPCRRHATALSGRASPTPDTPAWRPRPTRHATGAPDAACKQLHRHLRHHRASSIAEPIPRLEATQRTTQQRPPDAAVNAAKSGPAVMTVAGGREQRSRRQPSSRPIRGQQENPLSRREDNAPVIRSSNGSRTRNGRPANRLPRRINSAAGQAALPAGAVGDASPSPFEGWPPKGFDSRLRSRGPYTHYWLAPEGFTSTSDAERGMTRGTFDTKPRLELRSRGTLGHFRDQRERSCNGIPSEGGIEPSDPVARGPGPADHPQLIGDTMFGAHRGQHGAFPPPPCGKATQGRMARTRAQPQKTTNSASPDPRARTPPLPLPNVLRLARPRGSDSASAMEDRLDLGFGGTSTSPNLGRRPATSTRSAIITLPRADSGRREQDRCPIWLAPPDRQSWRPACSVTTAALSSLTKAEGRQQGLNRFDSCPSARFRRSSDDHDITPAGCQNLSSCHIGMALLEKVGRAGTRTGQALSWGRSLPSPAWTLVTPYCKRTRPGRWTNTKAAGFPPLSRRSPAATLLPPFALAHALDPSGLGHAATLTRRPEGPPGLETPTSILYGKQYHIKN

SEQ ID NO: 46799 - protein, 296 aa, Zea mays
  Coding DNA Sequence Number=SeqID_3424
  Gene Ontology: Mol. function=nucleic acid binding; Cellular component= ribonucleoprotein complex; Biological process=translation
  Homolog annotation: Hit_ID=A2YQN2; Match level="QueryCoverage=33%, HitCoverage=35%, E-value=3e-44, Identity=88%"; Hit description =Putative uncharacterized protein
  Pfam annotation: Domain name=KOW; Domain location=255-289; Score =30.9; E_value=4.7e-06; Accession=PF00467.20; Description=KOW motif
MDNGGHVAVKILDKAKVHKNKLAEQNSVCCIGMHVLQVNHFIWIVFPLITGDGKYKATVGAIAQNGYYVAYDGWGNREDHGHHFSIKLILKNVYSAGQMGVSCLGLGVSDRYLDDQDCILSLVFHLHISPHVVDCRMCGDPNSVLRFAFIEFADEEGARAAPNLSRTVLGYYPVNVLPSKTAIAPVNETFLPRSDDEREMCASTIYCTNIDKKVTQADLNLFFESICGELKVCRNGTIKIDLETNKIMDFIKFDIDNVVMVTSGRNTGRVGVIKNREKHKGSFETIHVLHGAFCYV

SEQ ID NO: 46800 - protein, 210 aa, Zea mays
  Coding DNA Sequence Number=SeqID_3425
MSPSPPPGELTIVVAAVALRGEEYHVIATVEGHELETPEAEQRPKLKRLSETAHLELNGKLFVNTQEAPTWRANCRCFDPGGSLNRRVKLSLRAPAQMGWRETEHKEGDETVARVVLRQSGREEPEPYVHANVVVGEVLEPCARGVVAVGGAFEPCRSTAVGAVGTLLTSPCFRKGLRSAVVMDTRGEPSLLVTRASLDGTADLFPRSLS

SEQ ID NO: 46801 - protein, 216 aa, Zea mays
  Coding DNA Sequence Number=SeqID_3426
  Homolog annotation: Hit_ID=Q6J9V9; Match level="QueryCoverage=32%, HitCoverage=31%, E-value=2e-09, Identity=45%"; Hit description =Putative uncharacterized protein
  Subcellular localization annotation: CTP_CleavageSite=73; ConfidenceScore=5.19e-01
MQVACNRTAGTHPFDFDASSMKAQAHTSCDRRAGKQKQQSNRLQAHVPSWGSRGTLSHGAKTTRPCSIPRTARATTAPRTTRPVALTSRQGKRHLWQAKRATFHLRHNDRVKKGTGKGDIPKGILLREGSGPQALLLIRGSKAGPSEGLAPRRVRQPPQRTQTRDDSGYVRYMVEARAMLPRGSGTALANPAPAKPLTASTNQPENSNLTVHPDYD

SEQ ID NO: 46802 - protein, 151 aa, Zea mays
  Coding DNA Sequence Number=SeqID_3427
MAPQPAPADPHSSPRGWADIDLRAEASCRSRDKTIQEHERRPSGVRRLGRSPGAHGATAARTMGEQPRSTPAVGGGTGSSVRASWASGPGMLELTTLAADRPRVVEVRPLRKAGERPSPPITVGRSGSPAPVGGRTPARPALLPSKDDEDP

SEQ ID NO: 46803 - protein, 74 aa, Zea mays
  Coding DNA Sequence Number=SeqID_3428
MAPYTSHELPPLMVNTRKGGGIDLPANHHNKRIVRQPQPEMNPLNPPPARTYSVVAAQMQMLQQMANLMNEMQA

SEQ ID NO: 46804 - protein, 237 aa, Zea mays
  Coding DNA Sequence Number=SeqID_3429
MTRGLGPTRRASWPRTEEAKPPRAERVTAQRLQALLHFRPNQRVKGQTVMQAACNRTTGMHPFDFDASSMAPQAHTSCNRHAGYYVRKTAPPLTPMLRLLDFGTGAATQGNPAHGPTVLARRVSHGSLSHGRRRDDRYGQKWADSNGGSRRAEAAVKSSAGSRPLLEQQESPLPRDRERGYSERDPSLRRKRAPSPPTDQGFEGTVDPGRFTPRSRASSSNGRTFDSPKAQLGQVSQ

SEQ ID NO: 46805 - protein, 274 aa, Zea mays
  Coding DNA Sequence Number=SeqID_3430
MVAPPPPPAAGKVTGQTRMLLFRYAGKTSSIPLWAGGLTAAIVDVARWRKEYHVVAAVEGHELETPESEQRPGLERLMETTHLELDGKLFVNTQQAPTWRANCRCFDPGGPWTDEVDALAVGGYKRSRGRERGRESLPVSPFSRVATFSYEGPGPSFYRRKEKAQPELARGRVIMFPLRRGRSKPKVGRGEDSSEVRAESEPWGRARRRPSSEVEVESEPWGRARRRPSSEVEVESEPWGRARRRPSSEVEVESEPGGRARWRPSSEVEVEFEP

SEQ ID NO: 46806 - protein, 128 aa, Zea mays
  Coding DNA Sequence Number=SeqID_3431
  Gene Ontology: Mol. function=carboxyl- or carbamoyltransferase activity; Cellular component=ornithine carbamoyltransferase complex; Biological process=amino acid metabolic process
  Homolog annotation: Hit_ID=Q5NKP3; Match level="QueryCoverage=28%, HitCoverage=14%, E-value=2e-10, Identity=86%"; Hit description =Putative uncharacterized protein 9C20.7
MSCAFDDYYIKDCGFILAPEVTQRRTDNNDYSPSSGLGDVEAPPRSRSSPSSVAEAESEPLGRARRRPLAEARAEFESWGRAKRSSSSFGVEPKSEPWVGRSGVRRLLGLSPSPSPGSGGAEFAVFRG

SEQ ID NO: 46807 - protein, 858 aa, Zea mays
  Coding DNA Sequence Number=SeqID_3432
  Gene Ontology: Mol. function=sequence-specific DNA binding; Cellular component=nucleus; Biological process=regulation of transcription, DNA-dependent
  Homolog annotation: Hit_ID=Q5D1M2; Match level="QueryCoverage=98%, HitCoverage=98%, E-value=0.0, Identity=65%"; Hit description=Class III HD-Zip protein 5
  Pfam annotation: Domain name=Homeobox; Domain location=16-76; Score =64.9; E_value=2.7e-16; Accession=PF00046.20; Description=Homeobox domain
  Pfam annotation: Domain name=MEKHLA; Domain location=708-858; Score =283.8; E_value=3.4e-82; Accession=PF08670.2; Description=MEKHLA domain
  Pfam annotation: Domain name=START; Domain location=164-374; Score =225.4; E_value=1.3e-64; Accession=PF01852.10; Description=START domain
  Pfam annotation: Domain name=bZIP_1; Domain location=56-116; Score =12.6; E_value=0.015; Accession=PF00170.12; Description=bZIP transcription factor
  Pfam module annotation: Pfam domain module=Homeobox::MEKHLA::START::bZ IP_1; Domain location=16-76::708-858::164-374::56-116
MVTAKEAAAAAAAMDASKYVRYTPEQVEALERLYYECPKPSSLRRQQLVRDCPVLASVDPKQIKVWFQNRRCREKQRKESSRLQAVNRKLTAMNKLLMEENDRLQKQVSQLVYENGYYRQQTQSAGLATTDTSCESVVTSGPQNVAAVLPQAQPRDAGPAGLMSIAEETLTEFLSKATGTAVEWVQMPGMKPGPDSIGIIAISHGCPGVAARACGLVGMEPAKVAEVLKDRPLWLRDCRSMEVVNVLPAGTSGTVELLYMQLYAPTTLAPARDFWLLRYTSILDDGSLVVCERSLGANQGGPSMPLVQPFVRGEMLPSGFLVRPSDGGGSVIHIVDHMDLEPWSVPEVVRPLYESSAMVAQKMSMAALRYLRQVAHEDTAHSVVTGGWGRQPASLRALSQKLTRGFNEALNGLADDGWSVVGSDGVDDVCVSVSSSPSRVVSCNATFSNGPVVGTGSSSVLCAKASMLLQDVSPPELLRFMREQRSQWADSNLDAFFASAMKPDFCSLPIPPRLGGFGGQVILPLAHTFDPEEFLEVIKVGNAGNYQDALLHRDLFLLQMYNGVDENMAGTCSELIFAPIDASFSDDSPLLPSGFRIIPIDAPLDTSSPKCTLDLASTLEAGTPRSRTSGSGGPGTAAAACAGSKAVMTIVFQFAFESHLQDSVAAMARQYVRSIVASVQRIALALSSARLVVPHGSGVSHGAPAAGPEAATLARWICQSYRFHFGAELIKSADGSGCGEAVLKTLWHHAGAILCCSLKALPVFTFANQSGLDMLETTLVALQDIALERVFDDQGRKNLCAELPGVMEQGFACVPGGMCVSGLGRPVSYEKALAWKVLDDGSGGVHCVCFMFVNWSFV

SEQ ID NO: 46808 - protein, 141 aa, Zea mays
  Coding DNA Sequence Number=SeqID_3433
MAAPWGNKSISEYTTPTSVHRPNQCLDIVTMVQEEQQGGNQLASDGITHTKSATAVDAITPPAALRAPGVDDQTIFEASRMTVNQGGQRIKLAPEFGGKNFIAHTRKFRCNSLFSLFPHLLFLISFSKEGDNPIWNYKLKG

SEQ ID NO: 46809 - protein, 40 aa, Zea mays
  Coding DNA Sequence Number=SeqID_3434
MVVAPWVKYLSQEYDPMLTWAASTYRSPSCPSFRLNKEYR

SEQ ID NO: 46810 - protein, 89 aa, Zea mays
  Coding DNA Sequence Number=SeqID_3435
MEVATATEASAPAASGGAAGQGHPFPWLDAAISEPYYFLHLLAFFSYFAARSAALSADDGGELHDRLLRREIQAVLVFLVLFVVKHLQQ

SEQ ID NO: 46811 - protein, 69 aa, Zea mays
  Coding DNA Sequence Number=SeqID_3436
MEWINQSSQEVVLPLGIRVDIDEDITMSTTTPAAPPHQAPLPSLAGPITRAHARDLNFVMLLKNEGLEE

SEQ ID NO: 46812 - protein, 177 aa, Zea mays
  Coding DNA Sequence Number=SeqID_3437
MPPRMRKTARKSTGPIGVPQHQLALRHEDSSNGSNDPIGDLEAQVEQLRIELHHRNSVWIEDGQHINELRTDIRHLQDELAERDLALDWVVNSRSIAWDREPKLEPVYCNHEEVYELYSRLHPDVAANPVGMGAGPSGTAGEALGGELDLFKPPPSMNLADEWSPTPDNKATKDDKY

SEQ ID NO: 46813 - protein, 138 aa, Zea mays
  Coding DNA Sequence Number=SeqID_3438
MGSRLRVWELHRVLRKVPMAETGWRGHHGGPNGSPELGGQHGTAPCGGQISTLPKSSVGCPCRSLLDLCYVFLSSVDELVTDRGICWGAGRCAAAGNRWRRPGLAGWGKERTRGLSDPSRMAEIRCWLANRWIRNGCL

SEQ ID NO: 46814 - protein, 470 aa, Zea mays
  Coding DNA Sequence Number=SeqID_3439
  Gene Ontology: Mol. function=transporter activity; Cellular component= integral to membrane; Biological process=transport
  Homolog annotation: Hit_ID=A2Y9Z4; Match level="QueryCoverage=97%, HitCoverage=95%, E-value=0.0, Identity=75%"; Hit description =Putative uncharacterized protein
  Pfam annotation: Domain name=DUF340; Domain location=259-433; Score= -95.7; E_value=0.1; Accession=PF03956.4; Description=Membrane protein of unknown function (DUF340)
  Pfam annotation: Domain name=MFS_1; Domain location=23-425; Score =98.9; E_value=1.6e-26; Accession=PF07690.7; Description=Major Facilitator Superfamily
  Pfam annotation: Domain name=Sugar_tr; Domain location=21-466; Score=- 167.1; E_value=0.019; Accession=PF00083.15; Description=Sugar (and other) transporter
  Pfam module annotation: Pfam domain module=DUF340::MFS_1::Sugar_tr; Domain location=259-433::23-425::21-466
MEAAAPAPARGLGRQEYAVLALTFASYASFHASRKPPSIVKAVLSADWVPFSGPRGPHRLGELDVAFLSFYALAMFAAGHLADRADLRCLLGTAMLASGAACAALGAAYFLDIHALAFFAAAQVSSGVVQSAGWPCVVAVVGNWFGHASKRGTIMGVWNSHTSVGNIAGSVLAAAALEFGWGWSFLLPAVVIAALGVVVLVFLVAHPSEAGLDVEVMEVEMNGDGGEEVGLLGEDKKEVQGNEDNEFELEMGSQLPRAIGFVEAWKLPGVAPYAFCLFFSKLVAYTFLYWLPFYIRNNAVAGQFLSHKASGILSIVFDIGGVLGGISAGFLSDAIGARAITSVLFLLLSIPSLVVYRTYGSISMHHNIALMFLSGYFVNGPYSLITTAVATDLGTQDAIKGNSRALATVSAIIDGTGSVGAALGPLLTGYISTRGWNSVFFMLIVSISLAILFLIRLAKGEIVAKLSTWN

SEQ ID NO: 46815 - protein, 139 aa, Zea mays
  Coding DNA Sequence Number=SeqID_3440
MTFVKEGKKPTDTLRWPGASEEDFTLGMSGRSITPVQATIGGIIPKRNNIAHNHQGHNNVLSGHQLQEAEGAETLEEDMEISLGNCFVCFAVKIKGIPQGRAKLRFRSRKKLLKLKYDRINRSRFCIPLRATLLMSRSM

SEQ ID NO: 46816 - protein, 73 aa, Zea mays
  Coding DNA Sequence Number=SeqID_3441
MSRAFDDYYIEDCGVILAPEVTQRRIDNSDQFVILATVRPQKSLAPYNPCQISLRLRPLNQVPKQEFVLSQIP

SEQ ID NO: 46817 - protein, 93 aa, Zea mays
  Coding DNA Sequence Number=SeqID_3442
MDLVFVLLHLSEGFSKYDISCTACINQNIMDQKSFDHTRDNHSIIVWVILELKILLREADSEHEPPVIGRISFGAEAVPAWFLNEAIVSGKWK

SEQ ID NO: 46818 - protein, 212 aa, Zea mays
  Coding DNA Sequence Number=SeqID_3443
  Pfam annotation: Domain name=HR1; Domain location=133-203; Score=5.0; E_value=0.071; Accession=PF02185.7; Description=Hr1 repeat
  Subcellular localization annotation: CTP_CleavageSite=34; ConfidenceScore=5.17e-01
MVPAGEGAAGVDVLVLVLMSSSQLVVVPPAVATAAAAVVPRAKGSALSAGGEIPALTAVRDEASAVSRRLKELKEALSQAADFADRAASGALTVVVSAEVERLRTQHADVVREKSAADSKCRKLADKVAALEGERTDLRRQLAEERKEANEALAKAQSAQAEANLARAEGSLARQRAEELEGRLNALQTRVERAEASTRSEAERTRKQLMDS

SEQ ID NO: 46819 - protein, 310 aa, Zea mays
  Coding DNA Sequence Number=SeqID_3444
  Homolog annotation: Hit_ID=Q8H8K3; Match level="QueryCoverage=42%, HitCoverage=10%, E-value=2e-07, Identity=31%"; Hit description =Putative retroelement
MYSCLNLVINELNSIGINKLGDADIVRKIIFLLPEQSYGSIITILHNLEDLSQMTPTIVIGKIAAFEMSWKMSQQEEPTSSKPYAFACDGHKKMKGKKKAPSSCEDEESRIFSLTLTGKSKEREDASHAGRRVTSGTTVQIWLNPQSGGAKARHSQVSRLGMTLQAKMILQGLVATALHHALHGYATRKATSLTNARQRSRISKSQQAKSPTPTSTRWTKGRYTIFDQEEKEWKGDSNQGQQAKQQRKRGQTHLGAKGDYLNHEKHQEGLDPKREVRSLKDFGKFGDLAKLGCISWDASYWIKSPPMTKI

SEQ ID NO: 46820 - protein, 147 aa, Zea mays
  Coding DNA Sequence Number=SeqID_3445
MGKSKKSGGSSHHSGDKRKREPTPPSEDFGDSEYSEEEFSSESEESPVHASPLASSDDSDDSQGIAAEVWTYIRAIERSGLEGSDESEISSNEENSSDSSKEGSDGGDGGEGDGDDGGDDDGDDDGGKGDGKGGSGSGKASGKAPLA

SEQ ID NO: 46821 - protein, 123 aa, Zea mays
  Coding DNA Sequence Number=SeqID_3446
  Homolog annotation: Hit_ID=O48967; Match level="QueryCoverage=88%, HitCoverage=23%, E-value=1e-35, Identity=70%"; Hit description =Putative uncharacterized protein
  Subcellular localization annotation: CTP_CleavageSite=38; ConfidenceScore=5.25e-01
MKQWRDDIDRLLGMAHSTSARSRPQSSRRQHEASVSVRSPSVKGTQIDDLRAELNRRRAGEDARVSLERARKRRQNIEGRNLDQDFAAVAPQAPMGTRSQAGVPLAGVGLECFGGIGEGVNPQ

SEQ ID NO: 46822 - protein, 97 aa, Zea mays
  Coding DNA Sequence Number=SeqID_3447
MGKPVPSLLMLLLSRGRIPLDCPTRWQDGRPSHSSNHVLQRTCKIMPQARYNGSSSLISCEKQTIRIEFLSLQVWVLPRDKHSGLKLRFPLDVLVGI

SEQ ID NO: 46823 - protein, 97 aa, Zea mays
  Coding DNA Sequence Number=SeqID_3448
  Subcellular localization annotation: CTP_CleavageSite=25; ConfidenceScore=5.22e-01
MAQSTVGSLGAVGAPDMSGAHRTVRCPLLAVGSATCPAQIARPTVGPAAVGSPDSPKLDEHAFLFVIQAGADDGSLAFISEPEREMCLWAISKYFGD

SEQ ID NO: 46824 - protein, 73 aa, Zea mays
  Coding DNA Sequence Number=SeqID_3449
MKNQGCASSKVTLTKENDKQQASCQVERRFCYKCGEQGHRSKSQGGKEKMSMKWSNQDLGTSVSQVIGILSHE

SEQ ID NO: 46825 - protein, 275 aa, Zea mays
  Coding DNA Sequence Number=SeqID_3450
  Subcellular localization annotation: CTP_CleavageSite=18; ConfidenceScore=5.52e-01
RRGAASCLAMVAPPPPPSAGKVTGQTRMLFFRHAGKTSSILPPAGGLTAAIVVVARRRKEYHVVAAIEGHELETPETEQCPGLERLLETTHLELYGKLFVNTQQAPTWRANYRHFDPGGADVLAVGGYKRLRGRERESLLVSPSSHAATFSYEGPGPSFYRRKERAQVESEPWGWARRRLSSGVEVESEPWGRARQSFLWRPRLDLAAVSLTLAGGTTVGAVQATILALNAPVMRSVGVAIWPRLLHCEACPSWASGESKLCTDGGYQPSLGALE

SEQ ID NO: 46826 - protein, 124 aa, Zea mays
  Coding DNA Sequence Number=SeqID_3451
  Gene Ontology: Biological process=cell redox homeostasis
  Homolog annotation: Hit_ID=Q10M18; Match level="QueryCoverage=27%, HitCoverage=12%, E-value=4e-09, Identity=76%"; Hit description =Thioredoxin-like 1, putative, expressed
MTRAVPESNNNQHHSPLEGRMRHTPAADKRLDGPKNLPPLAMQRRSDGKGTRVNRRCRRSSCARSASPFFTFYRGAKGQLCNFSCINATIEKFRDTLAKHRLLTPTTPLARQGSDDMSLVSSVI

SEQ ID NO: 46827 - protein, 1207 aa, Zea mays
  Coding DNA Sequence Number=SeqID_3452
  Gene Ontology: Mol. function=binding
  Homolog annotation: Hit_ID=Q10L20; Match level="QueryCoverage=69%, HitCoverage=96%, E-value=0.0, Identity=65%"; Hit description =Expressed protein
  Pfam annotation: Domain name=Arm; Domain location=1034-1075; Score =0.3; E_value=10; Accession=PF00514.14; Description=Armadillobeta -catenin-like repeat
  Pfam annotation: Domain name=Arm; Domain location=726-769; Score=1.3; E_value=7.6; Accession=PF00514.14; Description=Armadillobeta-catenin -like repeat
  Pfam annotation: Domain name=Arm; Domain location=946-988; Score=1.2; E_value=7.9; Accession=PF00514.14; Description=Armadillobeta-catenin -like repeat
  Pfam annotation: Domain name=Arm; Domain location=991-1031; Score =21.9; E_value=0.0024; Accession=PF00514.14; Description =Armadillobeta-catenin-like repeat
  Pfam annotation: Domain name=HEAT; Domain location=996-1033; Score =17.5; E_value=0.049; Accession=PF02985.13; Description=HEAT repeat
  Pfam module annotation: Pfam domain module=Arm::Arm::Arm::Arm::HEAT; Domain location=1034-1075::726-769::946-988::991-1031::996-1033
  Subcellular localization annotation: CTP_CleavageSite=19; ConfidenceScore=5.11e-01
MKTLLMFCPSDSRKAQRPKAEVFGSGSQQAARPHGRPAFFPPDSTPSPFAELLCWRLETDGAGVAAEETGEHAHAVRVCRSAGGPSRVHELERSRSVRRPGFLPALCVSAAININRERSPYVQHHASCKKDQQRKVSLRSTPRSPCVVFAYCVPCLGQHGPMEARRALGPCWALLLLTRPEKSRQVGSVRYCAVPTTLVPVSVSRASPSGAAVKKSGSASAVDVWIRKDERSGRGPCPQVGTSRDVRAAGELTVGAESLIQSASTVLDSSLPKFPIPVLERKRRAVQRNWVALLFDFLSRPFRPLVVGVARGIPPSFPPPPFSGSASLGLAEVLAPASMKYKKSRDATGLGSNGDGGWQKGGGDVPPSIQLDIMEHRGAAATTGLGTGGTAGSASFFEPWRERTPGSSGSGRGSSGGGGDGREPPEKRLTLFALRLAVLEKAASGLGKLDFVWATVVLLGGFASTLSITDFWCVTVILVGEGARVFGRSHELEWQQHATQTSTAGGALRSSSRFFRHIVHALVDPAAAAAGGRRNDDDDARARAALFQRQIVAFMRRRAWHAPDVSLLPYTGWVFVSRKIGRLLNWMQVLSALACVVLSVMRLWKQDFGGRDSRNMRPALLLFYTLALVEASLFLFEKAYWTWKVSVCKLLHQVSAECELGPYGLVSLKRFFYDAYSRCIAGSIFDGIKMDLVTFAEDLILSDFLDEQIIGVRILQQFANSERSASDTLRKVGTTPRSIDRLVEMLNWKRTEEDEVRLCAAEIVSKLASKRQNALRVSGIPGAIESVTSLLYTATSPPVSGTHPQLPGAPAEHGASPPAASRGYDHLQFNLLGLLILKRLARDHDNCGKIGNARGLLAKVINFTQASRALLQNPHVTDSQVRAMKRALKVVKMLVSTTGSTGKALRESVAENVFTVSNLRGILRYGQQHRELQKLATDVLTGLAMHDSGKEAIVATGGVVKLLLSIFFNVQDTELGREAGEALAMLALESEAGCAAILRQTDVLDQLVSALQDGDARRRLNAARVLRNLCAYSGQQQRERLRVVTKALPAVLNATKVDKDRILEVSVGLSTEICQFIDGEQFAAELRGAGVADERAYVELLASILKQYRYPDIRVPRMRRFVVQQVIWLMTSSGGGGDHSGGYVQLLREVGMKRLLESIADTTSELECYHVFSGSVGISKHRESFSAIVDSALELIAGSGDGARAED

SEQ ID NO: 46828 - protein, 888 aa, Zea mays
  Coding DNA Sequence Number=SeqID_3453
  Gene Ontology: Mol. function=binding
  Homolog annotation: Hit_ID=Q10L20; Match level="QueryCoverage=98%, HitCoverage=99%, E-value=0.0, Identity=56%"; Hit description =Expressed protein
MMYRKGRDSNGDKSQEGGGDVPPSIKLDITDHPASGGGKTASFSEPWTPTPGSGSCRGSSSSSSGRSDPPEKQLTLLALRVAILEKAASGLGKLDFVWATVVLLGGFVSTLNITDFWCITVILVGEGARVFSRSHELEWQHHATETSTAGGGLLRSSSRFFRRILHAFVDHTGGGGRNEEEPHQHATPTTDAGGVLPLPPLRSCRRFFRRAVHALAHPGAGGADVGGDAITTSAMFQNQIVAVVKKRTGHAPNDVSLIPYTGRMFTYRNIGRLLNCLQVLSAFACVALSLMRLWKHDFGSGGNMRPALLLFYTLALLEALLFLLEQAYWTWKFSFCKLLRHVSEDCQLGAYGHVSLTRFFYDAYSRCVTGSIFDGIKMDLVTFAEDLILSDFLDEQLIGVRILEQFAMKVNSAGDTLRKVGTSPRSVERLVEMLNWKRPDEVEVRQLAAEVVCKLAGERQNALRLSAIPGAIESVMSLLYTGRSAAVSGMHPQPNHAAGEGRDFDNDYLPLNLLGLSILEKLAKDQDNCGKISNARGLLAKIIDFTQTSKDLLGSQCVSDSAVSAVKCALQVVRMLVSTTGNTGHALRQGVAENVFAVCNLRGILRYGQRHKELQMLTIDVLTALALDDSGKEAIMGTGGLVKLLLSIFISAEEGELGHGAGEALAMLALESETGCAAILKRADVLQLVSALLDGDDARRLHAARVLRSLCAYSGPEYRERLRVVTKLLPVVLGITMTKSNKVLEVCIGLTTQICTFIDGDRFAAELRGAGVEEGAYVHRLATILGENEYPKVKIPRMRRFVVQQVIWLMACSGGGSYMELLRGVGMERLLESIADTTSELECYHVFSGSVGIGKHRESFPDIVDSALELIKGGGDRAPAPAPAPAEK

SEQ ID NO: 46829 - protein, 40 aa, Zea mays
  Coding DNA Sequence Number=SeqID_3454
MALLSTVETCSVSNLSWCCLTVLLETAFETAAAEVDASSA

SEQ ID NO: 46830 - protein, 153 aa, Zea mays
  Coding DNA Sequence Number=SeqID_3455
MYKIHGSNHTEEEATWETEDFLRSRFPDFLPKGVVSLAPHEAPCALGLNSTTVSRPEHTLPTSPPACARGPTDSGHHRRRAVPRRDRQDLPKLTPPFTGPPSPPEKYCNLADGEYILVPEQGAAQEVAQEPASEPAIEDLPAPALEGKPRFYA

SEQ ID NO: 46831 - protein, 95 aa, Zea mays
  Coding DNA Sequence Number=SeqID_3456
MSPLACARGPTDSRHHHRRAVPRRDRQDLPKLTLPFAGPPSPSEKYCNLADGEYILIPEQGAAQPAQEVAQEPAPEPAIEDLPAPASEGKPRFYA

SEQ ID NO: 46832 - protein, 87 aa, Zea mays
  Coding DNA Sequence Number=SeqID_3457
MEPGGGTAVGAVESLLTSSCFRKGAESRRRHRVESEPLGRARRSSSSSGAEPKSEPWVGRSGVRRLPGLSPSPSPGSGGAEFAVFRG

SEQ ID NO: 46833 - protein, 117 aa, Zea mays
  Coding DNA Sequence Number=SeqID_3458
  Gene Ontology: Mol. function=carboxyl- or carbamoyltransferase activity; Cellular component=ornithine carbamoyltransferase complex; Biological process=amino acid metabolic process
  Homolog annotation: Hit_ID=Q8SA97; Match level="QueryCoverage=100%, HitCoverage=23%, E-value=2e-13, Identity=42%"; Hit description =Ornithine carbamoyltransferase
MAPPVDVAGLCPRLGDVEAPPKPRSSLSSVVEVESEPLGRARRSSSSSGAEPKSEPWVGRSGVRRLPGLSPSPSPGSGGADPSPSPGSGGAEFAVFRDLARVRALGRAERSSSSSGT

SEQ ID NO: 46834 - protein, 560 aa, Zea mays
  Coding DNA Sequence Number=SeqID_3459
  Gene Ontology: Mol. function=exonuclease activity; Biological process= DNA metabolic process
  Homolog annotation: Hit_ID=P15032; Match level="QueryCoverage=97%, HitCoverage=72%, E-value=0.0, Identity=80%"; Hit description =Exodeoxyribonuclease 8
LLDPLEIRELHKLVRDTDKVFPNPGNSNLGLITAFFEAYLNADYTDRGLLTKEWMKGNRVSHITRTASGANAGGGNLTDRGEGFVHDLTSLARDVATGVLARSMDLDIYNLHPAHAKRIEEIIAENKPPFSVFRDKFITMPGGLDYSRAIVVASVKEAPIGIEVIPAHVTEYLNKVLTETDHANPDPEIVDIACGRSSAPMPQRELRAELHEARKNIPSKNPVDDDKLLAASRGEFVDGISDPNDPKWVKGIQTRDCVYQNQPETEKTSPDMNQPEPVVQQEPEIACNACGQTGGDNCPDCGAVMGDATYQETFDEESQVEAKENDPEEMEGAEHPHNENAGSDPHRDCSDEPGEVADPVSKSQLDDIADTPALYLWRKNAPVDTTKTKTLDLGTAFHCRVLEPEEFSNRFIVAPEFNRRTNAGKEEEKAFLMECASTGKTVITAEEGRKIELMYQSVMALPLGQWLVESAGHAESSIYWEDPETGILCRCRPDKIIPEFHWIMDVKTTADIQRFKTAYYDYRYHVQDAFYSDGYEAQFAVQPTFVFCCQHNYWNADVIC

SEQ ID NO: 46835 - protein, 81 aa, Zea mays
  Coding DNA Sequence Number=SeqID_3460
MEFGLRRRSGLDWWIESFVKLSESGVGSSNLGAIACITGTAHRRKNTVADPCDAVGDPVAASITGEKLFNQIRMTLLVWPL

SEQ ID NO: 46836 - protein, 696 aa, Zea mays
  Coding DNA Sequence Number=SeqID_3461
  Gene Ontology: Mol. function=transporter activity; Cellular component= membrane; Biological process=transport
  Homolog annotation: Hit_ID=P31827; Match level="QueryCoverage=100%, HitCoverage=95%, E-value=0.0, Identity=81%"; Hit description =Uncharacterized protein yddB
  Pfam annotation: Domain name=Plug; Domain location=5-135; Score=61.2; E_value=3.6e-15; Accession=PF07715.6; Description=TonB-dependent Receptor Plug Domain
  Pfam annotation: Domain name=TonB_dep_Rec; Domain location=191-696; Score=19.2; E_value=0.002; Accession=PF00593.15; Description=TonB dependent receptor
  Pfam module annotation: Pfam domain module=Plug::TonB_dep_Rec; Domain location=5-135::191-696
MTVYAPVPVPVNGNTHYTSESIERLPTGNGNISDLLRTNPAVRMDSTQSTSLNQGDIRPEKISIHGASPYQNAYLIDGISATNNLNPANESDASSATNISGMSQGYYLDVSLLDNVTLYDSFVPVEFGRFNGGVIDAKIKRFNADDSKVKLGYRTTRSDWLTSHIDENNKSAFNQGSSGSTYYSPDFKKNFYTLSFNQELADNFGVTAGLSRRQSDITRADYVSNDGIVAGRAQYKNVIDTALSKFTWFASDRFTHDLTLKYTGSSRDYNTSTFPQSEREMGNKSYGLAWDMDTQLAWAKLRTTVGWDHISDYTRHDHDIWYTELSCTYGDITGRCTRGGLGHISQAVDNYTFKTRLDWQKFAVGNVSHQPYFGAEYIYSDAWTERHNQSESYVINAAGKKTNHTIYHKGYNRYYGGNILDMGLRDIRNSWTESVSGNKTLTRYQDLKTPYNDELAMGLQQKIGKNVIARANYVYREAHDQISKSSRTDSATKTTITEYNNDGKTKTHSFSLSFELAEPLHIRQVDINPQIVFSYIKSKGNLSLNNGYEESNTGDNQVVYNGNLVSYDSVPVADFNNPLKISLNMDFTHQPSGLVWANTLAWQEARKARIILGKTNAQYISEYSDYKQYVDEKLDSSLTWDTRLSWTPQFLQQQNLTISADILNVLDSKTAVDTTNTGVATYASGRTFWLDVSMKF

SEQ ID NO: 46837 - protein, 432 aa, Zea mays
  Coding DNA Sequence Number=SeqID_3462
  Gene Ontology: Mol. function=transporter activity; Cellular component= integral to membrane; Biological process=transport
  Homolog annotation: Hit_ID=P31224; Match level="QueryCoverage=53%, HitCoverage=21%, E-value=1e-110, Identity=93%"; Hit description =Acriflavine resistance protein B
DGSRVLLRDVAKIELGGENYDIIAEFNGQPASGLGIKLATGANALDTAAAIRAELAKMEPFFPSGLKIVYPYDTTPFVKISIHEVVKTLVEAIILVFLVMYLFLQNFRATLIPTIAVPVVLLGTFAVLAAFGFSINTLTMFGMVLAIGLLVDDAIVVVENVERVMAEEGLPPKEATRKSMGQIQGALVGIAMVLSAVFVPMAFFGGTTGAIYRQFSITIVSAMALSVLMFNRNAERYEKGVVKILHRSLRWIVIYVLLLGGMGSDSGSAPEDDELRLARPQGSDSGSAPEDDELRLARPQGSDSGSAPEDDELRLARPQGSDSGSAPEDDELRLTRPQGSDSALASADGLRLARPRGLDSTSALEDRLDLDLEGASTSPNPGLGPTTSWESPSLPYPKLTHATGDKTSVPSGSLCYTRTPRVRNADTRKNGN

SEQ ID NO: 46838 - protein, 74 aa, Zea mays
  Coding DNA Sequence Number=SeqID_3463
  Subcellular localization annotation: CTP_CleavageSite=28; ConfidenceScore=5.26e-01
MASSTNRPMASTIPNIVSVFIEKPKAARTAKVPSNTTVLTTQLNLRDVTQQHAGTILIHFQQDFAELSLEVRRV

SEQ ID NO: 46839 - protein, 683 aa, Zea mays
  Coding DNA Sequence Number=SeqID_3464
  Gene Ontology: Mol. function=transcription factor activity; Cellular component=nucleus; Biological process=regulation of transcription, DNA-dependent
  Homolog annotation: Hit_ID=A9JQY7; Match level="QueryCoverage=65%, HitCoverage=88%, E-value=1e-101, Identity=49%"; Hit description=AP2 protein
  Pfam annotation: Domain name=AP2; Domain location=320-377; Score =44.6; E_value=3.4e-10; Accession=PF00847.11; Description=AP2 domain
  Pfam annotation: Domain name=AP2; Domain location=419-471; Score =62.0; E_value=2e-15; Accession=PF00847.11; Description=AP2 domain
  Pfam module annotation: Pfam domain module=AP2::AP2; Domain location =320-377::419-471
MWAERVVGERRMRQIQRFARNAKLTVVCLLLTVVVLRGTIGAGRFGTPQQVLIELRQHFVSHPHRALAEHHDARSRASTTTTSSSSSSGRRDEPDPPPRSLRDPPYTLGPKISDWDEQRAAWHRRHPETPPFLNDIKPRVLRDGPAHLPRPTAEVLADCETAVAAVLLLVTVAAGTAAGPVHLPRHGCSGCETAARALFSWSLARQGSTPARGDLEEEERGAAAELAAIAGAAPPPKLEDFLGGGVATGGPEAVAPAEMYDSDLKFIAAAGFLGGSAAAAATSPLSSLDQAGSKLALPAAAAAPAPEQRKAVDSFGQRTSIYRGVTRHRWTGRYEAHLWDNSCRREGQSRKGRQGGYDKEEKAARAYDLAALKYWGSSTTTNFPVAEYEKEVEEMKNMTRQEFVASLRRKSSGFSRGASIYRGVTRHHQHGRWQARIGRVAGNKDLYLGTFSTEEEAAEAYDIAAIKFRGLNAVTNFEISRYNVETIMSSNLPVASMSSSAAAAAGGRSSKALESPPSGSLDGGGGMPVVEASTAPPLFIPVKYDQQQQEYLSMLALQQHHQQQQAGNLLQGPLVGFGGLYSSGVNLDFANSHGTAAPSSMAHHCYANGTASASHEHQHQMQQGGENETQPQPQQSSSSCSSLPFATPVAFNGSYESSITAAGPFGYSYPNVAAFQTPIYGME

SEQ ID NO: 46840 - protein, 127 aa, Zea mays
  Coding DNA Sequence Number=SeqID_3465
  Subcellular localization annotation: CTP_CleavageSite=82; ConfidenceScore=5.41e-01
MSRARLRLVYGLPYMTSLPASKVSSSSSWKAGKLALKSSKSSQVADDTGSPCHCIRTCLTPRARRPARTREGVDTTAPLSVAGSAGGSVGGAPTNFLRMPTWKTSWILASDGSCRRTAASLMISLTR

SEQ ID NO: 46841 - protein, 265 aa, Zea mays
  Coding DNA Sequence Number=SeqID_3466
  Subcellular localization annotation: CTP_CleavageSite=42; ConfidenceScore=5.58e-01
MAAITPAAVSPPFRNASKALRRGSRFFCCNTLNLGPRLLRVTAARAVRCRGLRAHVARGARNRPAPGHLSPEPHSPSPPPSFAHQQTPLPPLPRCAHARAPPPQIPAVPSSFPGRRWSSAVSVATVSFAPASATRDAPQFPLPLPISLCPRSPAVPRAAAEVRHRRPGPPSRQCRRRGVPGARLEVKPNPGHPPEIQRPRPASPTPRLPAVWAPPVSPPARSLCPPAPPVSLPAPRAARPVPPVSRPGRRALARPPAGSNPGRSL

SEQ ID NO: 46842 - protein, 609 aa, Zea mays
  Coding DNA Sequence Number=SeqID_3467
  Gene Ontology: Mol. function=electron carrier activity; Cellular component=endoplasmic reticulum membrane; Biological process =electron transport
  Homolog annotation: Hit_ID=Q9FVM7; Match level="QueryCoverage=75%, HitCoverage=69%, E-value=0.0, Identity=85%"; Hit description=NADPH -cytochrome P450 reductase
  Pfam annotation: Domain name=FAD_binding_1; Domain location=159-385; Score=389.0; E_value=7.3e-114; Accession=PF00667.11; Description=FAD binding domain
  Pfam annotation: Domain name=NAD_binding_1; Domain location=421-533; Score=114.5; E_value=3.1e-31; Accession=PF00175.12; Description =Oxidoreductase NAD-binding domain
  Pfam module annotation: Pfam domain module=FAD_binding_1::NAD_binding_ 1; Domain location=159-385::421-533
MASGYDTKLMDGVVPGWGGMYRLPTQILPFEPHSDFCAFIGHVWCRLRGDHWIKMSNRLVCQGSPDMSGMPPDMPRQIAVEAFTQSTVEHCTLGAEFSVPLDWKELVWPELDQLLRDEDDTTGASTPYTAAIPEYRVVFIDKSDLSFQDRSWTLANGTGVIDIQHPCRSNVAVRKELHKPASDRSCIHLEFDISGTGLVYETGDHVGVYAENSVQTVEEVERLLDLSPDTFFSIHADAEDGSPRKGGGSLAPPFPSPCTLRTALLRYADLLNPPKKAALLALASHASDPAEAERLRFLASPSGKDEYSQWITASQRSLLEVMAAFPSAKPPLGVFFAAIAPRLQPRYYSISSSPKMAPSRIHVTCALVYGPSPTGRIHQGVCSTWMKNTIPLEYSEECSWAPIFVRQSNFKLPADPSTPIIMIGPGTGLAPFRGFLQERLALKQSGAELGTSILFFGCRNRNMDYIYEDELQTFLEEGALSELIVAFSREGPTKEYVQHKMVEKATDIWNIISNGGYLYVCGDAKGMARDVHKMLHTIVQEQGSLDNSKTESYVKSLQMEGSRNVASKVQLASAPVGMQVLIIQGSWVDQAASSNWAENMEMSDHSPLV

SEQ ID NO: 46843 - protein, 135 aa, Zea mays
  Coding DNA Sequence Number=SeqID_3468
MSIVHTVLICRGCFLGNARVMKSVRPYVRLRPLAYVTGCMPCGSIGALPERGAEAYTDPAVSGLDPTQRGPKPILGVRFAHVEVPDLSRSSGAVHVVGSGAVYHATRDSRAGWEGGSATMALEVGRWRPGSGGHG

SEQ ID NO: 46844 - protein, 48 aa, Zea mays
  Coding DNA Sequence Number=SeqID_3469
MPLLHLPCSPTRTPHSIFVAVGGKRGRPWGVAAGATAPGPTKLVAPSP

SEQ ID NO: 46845 - protein, 293 aa, Zea mays
  Coding DNA Sequence Number=SeqID_3470
  Gene Ontology: Mol. function=3'-5'-exoribonuclease activity; Cellular component=nuclear exosome (RNase complex); Biological process=RNA processing
  Homolog annotation: Hit_ID=A2X5Y3; Match level="QueryCoverage=66%, HitCoverage=47%, E-value=8e-83, Identity=77%"; Hit description =Putative uncharacterized protein
  Pfam annotation: Domain name=RNase_PH; Domain location=1-79; Score= -12.6; E_value=0.012; Accession=PF01138.12; Description=3' exoribonuclease family, domain 1
  Pfam annotation: Domain name=RNase_PH_C; Domain location=121-189; Score=35.1; E_value=2.6e-07; Accession=PF03725.6; Description=3' exoribonuclease family, domain 2
  Pfam annotation: Domain name=Rtt106; Domain location=172-284; Score =6.6; E_value=0.00063; Accession=PF08512.3; Description=Histone chaperone Rttp106-like
  Pfam module annotation: Pfam domain module=RNase_PH::RNase_PH _C::Rtt106; Domain location=1-79::121-189::172-284
MADLSFEPGRPGESTIELGRVIDRGLRESRAVDMEFLCVVAGKHVWSVRVDLHILDNGGNLIDAANIVALAALSTFWRPECTVGGDDGQQVTVHDPEIDVHSQCALLSSKVRDLLPLTIHHMPIVVTFAYFGEGNIVVLDPTYKEEAVMGGRMTAIVNSNGDVCAIQKAGGEGPVSSVTMQCLRIASVKAAVITSKIKKAKFKFAFLIFDILFSGNNIKIMNLGGDGQGASGVITDVLRNTDDDAVDPHLERIKNQAGDEESDEEDEDFVADKDDSGSPTDDSGDEECTDVLS

SEQ ID NO: 46846 - protein, 158 aa, Zea mays
  Coding DNA Sequence Number=SeqID_3471
MPQKIAPDAHQSNPAYDTGAWAHKSYNWCTGPQVILLGCRFLGEERVNRRSRQYCASSGPPQKTEKVIFQNQCSGIEAPRAWPGETIRRGGHGGTPYYSMKTRYRAAISSRVTGPPGEVRDLHGCKPDPLGWVPDPSVWGPGHSQQYSGIPGQRVPRP

SEQ ID NO: 46847 - protein, 107 aa, Zea mays
  Coding DNA Sequence Number=SeqID_3472
  Gene Ontology: Mol. function=transcription factor activity; Cellular component=nucleus; Biological process=regulation of transcription, DNA-dependent
  Homolog annotation: Hit_ID=Q6ETB0; Match level="QueryCoverage=55%, HitCoverage=23%, E-value=7e-17, Identity=72%"; Hit description =Putative AP2 domain-containing transcription factor TINY
  Pfam annotation: Domain name=AP2; Domain location=39-90; Score=72.5; E_value=1.4e-18; Accession=PF00847.11; Description=AP2 domain
  Subcellular localization annotation: CTP_CleavageSite=47; ConfidenceScore=5.27e-01
MPADSDDVASPASPLGLGSVHKRGGGGGGKSGGRRRPGPAYRGVRMRAWGKWVSEIREPRKKSRIWLGTFPTAEMAARAHDAAALVVKGRGAVLNFPEMAARLPCWE

SEQ ID NO: 46848 - protein, 202 aa, Zea mays
  Coding DNA Sequence Number=SeqID_3473
  Homolog annotation: Hit_ID=Q2R860; Match level="QueryCoverage=59%, HitCoverage=26%, E-value=6e-47, Identity=71%"; Hit description =Expressed protein
  Pfam annotation: Domain name=DUF231; Domain location=2-125; Score =12.6; E_value=9.1e-09; Accession=PF03005.6; Description=Arabidopsis proteins of unknown function
MYLRGAPNSNRNITVIWKAKNFTVHSVVRWVDTQLPRHPKLKAFYRSISPRHFFNGDWDIGGSCDNTSPLAKGGSGVHLDRSEDADAKGAVRGTGVRLLDVTALPRLRDEGHISRFVLSSLVSPLFMVQVESSGLERLMEFVFKIRVPAALARAKYSGPVSGLAVSPISPSPARTVRIGTRNPAPAVQVTTASQASPSKGPG

SEQ ID NO: 46849 - protein, 116 aa, Zea mays
  Coding DNA Sequence Number=SeqID_3474
  Homolog annotation: Hit_ID=O48967; Match level="QueryCoverage=70%, HitCoverage=12%, E-value=3e-12, Identity=52%"; Hit description =Putative uncharacterized protein
MSTVSSAWHILARPGLGLGHSDVNARRRHLCTHPSMRGARTDDLRVELNRRRVGGDARISLERADDLRAELNRRRVGEDARVSLERARERRQNFKGHNLDQDFAPVSPQTPRDARI

SEQ ID NO: 46850 - protein, 132 aa, Zea mays
  Coding DNA Sequence Number=SeqID_3475
MVLHPKIPTCSGLDSHNEQTPALKVSLQTELRFCPRRYEQPPTLEGLRGDKTPGSSLTPAPVAATTTPAPKRPNSSSDDLRADAAATSSSPTPPLEGREQAGGRRVGGQSAGGTGYPIGRETSSGCLGGRWH

SEQ ID NO: 46851 - protein, 57 aa, Zea mays
  Coding DNA Sequence Number=SeqID_3476
MESHDLRAEWESRLVGGYEIDGFGYDYGAGCQHCNHCSGEDEVVEGDLQEFQDYDEF

SEQ ID NO: 46852 - protein, 86 aa, Zea mays
  Coding DNA Sequence Number=SeqID_3477
  Subcellular localization annotation: CTP_CleavageSite=55; ConfidenceScore=5.30e-01
MGAIKVKAQSTQGTRSRLGLSLDLGRRSPPRPTPGLGLSLDLGRRCPLRPTLGPRLDLDLGGASASPDLGLGPTTSQGGHHYPTPS

SEQ ID NO: 46853 - protein, 133 aa, Zea mays
  Coding DNA Sequence Number=SeqID_3478
  Subcellular localization annotation: CTP_CleavageSite=42; ConfidenceScore=5.19e-01
EQRLLQRQRSPATAFNWLQCAQKSGTRQKAHQTVYRTCPVTVGAEVAVAPLAHRTVRGPSREPRRRDVEGTVAEGAKADGVAAGTGLVAGGRLPEGCFGLQHRTVRWCTGQCPVRQAASAEEAALGNLLTAYG

SEQ ID NO: 46854 - protein, 54 aa, Zea mays
  Coding DNA Sequence Number=SeqID_3479
MGNSQLSNWVERKGRLLKDKFKEVIGKQQITTDVQNKMTAHGSLRNKGGQGHVN

SEQ ID NO: 46855 - protein, 370 aa, Zea mays
  Coding DNA Sequence Number=SeqID_3480
MERAEASTCSEVERTRKQLMDSYRELGARTADFEVPDREAGLRFLEWLQEELLALPTIVEGFMSFASLVTCEGAMNALSREGCSHYEVFDRCDEDFGREIFKVEDPVVNDSAGALFDRMWGPHGREVAARAEVVEDFGPLNSVRPKAEANPVVAEAEVDPAPPPETGEGSLAAPAATVSSGGSSPTAVPRAENPPKTATEPAAEDPTAAAGPSQVQDFGHAHATATANFVAASTVDAGNESDESASKFSDFGDSGSSVEWTEESSDEDLDYFAALDVAAAEASPRVADAEVVPGPSVGRRQRRAVAKRRVSEMDGGRLRVGRAGKQELLSLPAGASVGEGELRSLFEGEELRIMLFNYREMGIIPKVEPM

SEQ ID NO: 46856 - protein, 342 aa, Zea mays
  Coding DNA Sequence Number=SeqID_3481
  Subcellular localization annotation: CTP_CleavageSite=45; ConfidenceScore=5.34e-01
MQPGRTPPPAVTQDGDLQLDGGGKRAGLRPLSRPQPQGFSSSRPRWRMRRVGGLPSRGPVTLFFPWRLGENGILQLRGDFLQPRRDWWAAVTQSGRSTTPSVRTTVATRTARAAPHALGGSGQSEDLPARFEASAAGDGFSTDEIANSASSPGSPPPGLNGWLSSSAGESPSAVAPAPKPLLKLLRCPRRGWLSLLPDQAAAGRPSARDRSAVSPILWGRSYPRGRNRSSVCNGTWNASVFVHYGCRGLNIRGLGSGWRPWKMVGRGPRGDRPSRLLGPDSRRRSWQRWPGRGDDIVLRSGGLRTASPFEARSNLTEDVVDAEGAAAPFQRKDPSLQDQIVL

SEQ ID NO: 46857 - protein, 76 aa, Zea mays
  Coding DNA Sequence Number=SeqID_3482
MAMVNTRRGGGIYLPPNQHTRRIYRQPQPQPAGMNPPNPPPGGVDPLVAAQMAVMQQMADTMADMRAQMQQENESS

SEQ ID NO: 46858 - protein, 51 aa, Zea mays
  Coding DNA Sequence Number=SeqID_3483
MYGLQVVMRRMVMIMTMVMVAFGAIYAQVKKKENSVEADLREFQDFYEFED

SEQ ID NO: 46859 - protein, 360 aa, Zea mays
  Coding DNA Sequence Number=SeqID_3484
MAPPVDVVSPCPSLGEVEAPPRLRSSPSSKVEVESEPPGRTRRIPSTDARAESGSEPWGRAERSSSSSGAETESEPWGRAKRSSSSSGAEPESEPWGRAKRSSSSSGAEPESEPWGRAKRSFLWRLRPDLVAISLTLSSGTAVGAAQAALSSCQTGQWSGELCADGGYQLRIRSLEGARVPARVRRSLGPAAQQPRPHNPSARSSRSAAAACEWAPHVIPYNCLLAMCAPIFPHRPKTGTGAPVAPFLAPVIARCAQPRRPVALVNAVVRARLVNLVVRAEPLTIAVVHAPSSHALAISVELQGEDPQRVPLTMASFSSLSRSALSAKAAPCSLGVALSTVALALSPLPPRSKPQQQAGR

SEQ ID NO: 46860 - protein, 51 aa, Zea mays
  Coding DNA Sequence Number=SeqID_3485
MYGLQVVMRRMVMIMTMVMVAFGAIYAQVKKKENGVEADLWEFQDFYEFED

SEQ ID NO: 46861 - protein, 120 aa, Zea mays
  Coding DNA Sequence Number=SeqID_3486
  Subcellular localization annotation: CTP_CleavageSite=53; ConfidenceScore=5.60e-01
MCAPIFPHRPKTGSGAPVAPFLAPVIARCAQPRRPVALVNTVVRARLVNLVVRAEMLTIAVVHAPSSHALAISVELQGEDPQRVPLTMASFSSLSRSVLSAKAAPYSLDKDKLQMYLRLE

SEQ ID NO: 46862 - protein, 175 aa, Zea mays
  Coding DNA Sequence Number=SeqID_3487
MTCGAHSQAAVALLLLRALGLRGPRLLRCWAERAPRASWDAGAWAARSSSTIFIFVTASYIKVFGAKASCFGIHLCKPCIRMKLHNFLTSDSQLILTKAAKRRVSEVSRSDGRHCGEVEGCRLRVDGAGKRELLSSPAGASVGEEELRNLFEGAELRIMLFNYREMGIIPKVEPL

SEQ ID NO: 46863 - protein, 127 aa, Zea mays
  Coding DNA Sequence Number=SeqID_3488
MEHKNIIKECDFLQNLKDENCNLADREYILVLEQGVAKEVCIVHLSVGVVWNLSCMNSGFSLVMDTSMLGRVAALLLRDLGRSRVIFPALARGSLEDMVARVTWSSILPLGWIVEWDPTSAEEEHEE

SEQ ID NO: 46864 - protein, 124 aa, Zea mays
  Coding DNA Sequence Number=SeqID_3489
MSILSGVTIQQKKLHGRLRIFYALASPTFYPKESLDPGTRVTGIAQSCSPEFKNPPAHVDRLLVHPNRSMPPWFGRSRSRRRLPPPVLVARVAPTTSDTDPHIGVTVATSRTSLTTPPELYCRR

SEQ ID NO: 46865 - protein, 53 aa, Zea mays
  Coding DNA Sequence Number=SeqID_3490
MGIGCLRDEIGIRIKVWYRSLEEMVAGITWPSTLPPGWTVEWDPASAEEEHEE

SEQ ID NO: 46866 - protein, 348 aa, Zea mays
  Coding DNA Sequence Number=SeqID_3491
  Subcellular localization annotation: CTP_CleavageSite=53; ConfidenceScore=5.35e-01
MHKGSAKTWLPFKGVTLLFKGNSPHLRPQPSRAESSPTRSKVLPLRHGGWVPRVMQADPGQKKPNRRARCAQLPAVTSIPPLSPRPAADPRGSTSRPRTPSSNGHTFGSPKAQSSPRSNLGQVATPTDRIAGAFNAKGSDSGSAPEDDELRLARPRARTRARPRKTTNSASPDPGLRLGLGLSRWSPSRPTQGLGLDLDLGRQTRPRPRRSLRLAQPRARTDHVTGGGIITLPLASSGYGEQDQRPIWLAPAPALSDSHDITRTGCQNLSGCHDGMALLQRVGRAGKDGTARISLSLSPTRTLVTPYCKRTRPGRGTNTKAAGFPFYACLPPAPFPPFALRLALTHLG

SEQ ID NO: 46867 - protein, 128 aa, Zea mays
  Coding DNA Sequence Number=SeqID_3492
MGRRDHEALYLFTGAQVVADTAAKTPPEHHGPGELAKSVEPRRFCWERIADRRDPQRSEEERGERFTERGQASPGKWVPRRSGSARRGARETDRWDVIVDITPQPIALNQRSKSNKYHKTNIQIHRHL

SEQ ID NO: 46868 - protein, 453 aa, Zea mays
  Coding DNA Sequence Number=SeqID_3493
MSPTVAKWFVPDARGSMDNVYRGQAEPELYFPRRFVGHLLPQHSRERALTGLAGGSDFDNVGLVRGERRQLQRVGLAGSAGSGSAPGAPSRRKSGCRAARTGGPPKTSRAARAAFVFWGCPAFAPVWRLCTEVGAPLVRDPSGDLPVGRRLLSSVLRWRRLKKSSSPTGSPPPSALRASGSLALIACPRPSSGDVGKGIVAAAFALRPSLLQFGHPERRSLSLLPERAAVGDLEPCRPAGPPMIPRPLFDEPKPKAAVSARTEAELARKGDFVGRSLAGLSTGRTDAGVELPRPRAGLMSSGDSWLRLRGGRPNRLLGPDSWRRPWRRWPGRGADVVLRSGDPPTASPSEARSDFAEGVVDAEGAAAPPPSRSKPAGLVYLVVIVCPSESYFSRKVMSEKVMSEDPTFEAVEKHERRSGRKDLFRGKNLRQRGFPLLAPEGGSGFAEARLTLP

SEQ ID NO: 46869 - protein, 49 aa, Zea mays
  Coding DNA Sequence Number=SeqID_3494
MVVGSVLSHGAPDTIRVAPTTSDTDPHTDVTVATSRTSLTTPPELYCRR

SEQ ID NO: 46870 - protein, 217 aa, Zea mays
  Coding DNA Sequence Number=SeqID_3495
  Gene Ontology: Mol. function=kinase activity; Cellular component =ornithine carbamoyltransferase complex; Biological process=amino acid metabolic process
  Homolog annotation: Hit_ID=Q6QP54; Match level="QueryCoverage=41%, HitCoverage=21%, E-value=7e-10, Identity=52%"; Hit description =Putative kinase
MSSWLSERCCCHVHFEPKVGRGGDSSEVEAKSEPWGRARRRPSSGVKAESEPWGRARRRPSSGVKAESEPWGRARRRPSSEVEVESEPWGRARRRPSSGVEVESEPWGRARRSFLWRSRLDLAAVGLTLASGTAVGAGQAALFSCQAILALNAPAIRSVGVVIWPRLLLREACPSWASGESKNRSCWSRKSPRVPRERSPSLGHVSDPEWPEAVKVA

SEQ ID NO: 46871 - protein, 69 aa, Zea mays
  Coding DNA Sequence Number=SeqID_3496
  Subcellular localization annotation: CTP_CleavageSite=55; ConfidenceScore=5.10e-01
MEPGGGTAVGAVESLLTSSCFRKGAESRRRHRVGRCGSSSEAEVESVFRGRGRVRAPGSGEAEFVVFWG

SEQ ID NO: 46872 - protein, 207 aa, Zea mays
  Coding DNA Sequence Number=SeqID_3497
  Subcellular localization annotation: CTP_CleavageSite=27; ConfidenceScore=5.51e-01
MQAACNRAKWAHFSDSQHARHGGPGPRVMQPARRILRACNCTATYATTAPPRLRNRYRDSRRPRARPSGASLARRRSGRRFAFAIMTASAKAPSLPTDQRFEGWPPEGFDSRLRSRGPYTHYWSEVRRPAPRKGSTAASGYSGSAPITDQGGSDLVTESHQREASSPRTPSPGDRVRQITRSSPETPCSAPIEGNMALSPPPVRNMP

SEQ ID NO: 46873 - protein, 214 aa, Zea mays
  Coding DNA Sequence Number=SeqID_3498
  Homolog annotation: Hit_ID=A2XZX6; Match level="QueryCoverage=80%, HitCoverage=76%, E-value=4e-46, Identity=58%"; Hit description =Putative uncharacterized protein
  Subcellular localization annotation: CTP_CleavageSite=17; ConfidenceScore=5.36e-01
MALLRALRRALPALSSPAAVLPRRAPHPLPPPPAPRRFLDPIGLRSFSAAAATASQAPPMGATLFGGLMDTRFPKRRPGFANRRKRASLRPKGPYYWVKCKPDEPIPVSQPNQGSVRGRKEKKRIKQRKDFIMVNALCILYSRYCRFTVDLLLRYSVLCYAEKKKRRAQYSAAVKRKEAERTERKMAAVARERAWAARLIELKQIEEDVKAVMA

SEQ ID NO: 46874 - protein, 113 aa, Zea mays
  Coding DNA Sequence Number=SeqID_3499
  Subcellular localization annotation: CTP_CleavageSite=83; ConfidenceScore=5.17e-01
MAQWLTRSTFAGGRRDSSDRGLASPAKQTSIPRSGSFIEVCSVFSEGRTGLGKAWLAGLRWQGLGWPRTRRARANDARPSRKRANLGKNPARVFSWHLGMSLIRQSPWQICPR

SEQ ID NO: 46875 - protein, 74 aa, Zea mays
  Coding DNA Sequence Number=SeqID_3500
MGKPVPSLLMLLLSRVTTLVPTITGMGDHVSGRVRRAIYRQVHSDNASPWIVAHRPSSLRYKNGYNQFLTSREC

SEQ ID NO: 46876 - protein, 91 aa, Zea mays
  Coding DNA Sequence Number=SeqID_3501
  Subcellular localization annotation: CTP_CleavageSite=33; ConfidenceScore=5.43e-01
MTAVGVSEALYAKAVKAVSTQGTRSRLARAQPRAKVADPGGFTSLPRVPSGNGRTFDSPEAQLGHASWRSNLGQIATPTDRIAGAFNAMID

SEQ ID NO: 46877 - protein, 501 aa, Zea mays
  Coding DNA Sequence Number=SeqID_3502
MEKDRQDASWKRRAFATVGDPRRKVKMAQASVKHAAPGASMPPPGAPGASVPLPAAPTHERRPPSPPHADEAAMGGADVSMDISVDDYLVGGVAIFDAHIGRGPTEPVVQFCASGEVASSAVAKDVAASVSQQLRHMSKQCFWSLFLFHGSEFDVRDKSAAENRSHNLLEKLSVAEAEKEDLSHRLAVEKEDAEKARAEAQAARAEANLALKRATDAESGKRSLRGYVDRAKATTRTGVDRAHALLVDVYRQLGARTAPFDTSGKEVGLCFLGWLQEELELVPSIMTGLMSFASLITCEGAANALSREGCRHFEVFDRANEDFDRGIFQVEDEVLKRSAGALYDRMWGPHGRDTVRERSDRPLEQMANDEEVDDFDGLETSVTRAEDARTGVEQPATQTGPGEDPPVAAAPEGEDPPAAAAPAGEDPAASAAPSQVPTSEPTQATPTDDINFVASANTVPDSGNLSGSETESWSSDGGEFGSSFSWVEESSDEDFTAESLL

SEQ ID NO: 46878 - protein, 343 aa, Zea mays
  Coding DNA Sequence Number=SeqID_3503
MEFGTSRISSVHMLEMQWLGYFGDGVGHALGAEEVPEPKGELVVFEAFFVSGLCLPTHRFVVEKRKIGNKIAQFGSCTFTPRTGKTSAEVVEIAPCARNKWGNWWDFWFYVAPSDVEDLPSFPPAILCSHFYVAFPQFEVAEEDEDEGALQYAARLSSGRDLVEEFIAYGVWPLAHGWLLGEVCPHHIPTLGDRLAEATKIVGKYVSKTETLRSWDIRGSNVRLNRVFELIRLPYAGYPGDDDVDAVVRRGKKVMTTADEGPSRGTSPSTTAKNRKLGTTAEGSRASNRFAVDLLKTCTVPGETMSSPELRESSARMLKVIGGRWPKNDRFSRLSARKCLHLD

SEQ ID NO: 46879 - protein, 227 aa, Zea mays
  Coding DNA Sequence Number=SeqID_3504
MAERYQLPRSCVPPTMRRKDGGYPPSGGLEGGKTRCMREREEMVYFQGGHPPFKGDYPYLRPQPSRAKSSPTRSKALPCGAGAGSRMSCKPAQSRRSQTAARGGASGRRSGRRFAFAVITAPKKGPGKGDTPKRILPREGTRLRASLLIRGSKATPPKGSTAASDRVGPTPTTGQRFEGRPPEGFHGRLRLLGLRAHYRSGVRRLAPEGFTAASDAERGMTMGTFDT

SEQ ID NO: 46880 - protein, 185 aa, Zea mays
  Coding DNA Sequence Number=SeqID_3505
MVTSSLMVGESEPGCGLCPSLSLKDFHHQGWGGECAELGSAPAWAVARSFTQLSEGRAVVVRGAGSCTVPGSRTRVASEPLAAPASATAAGRGYSADEIARAAHGPTSNSTAFYPSLPHKFGHGRGPPGSSTHPEYLDFFVGNRDVCASESCFSRKVMSEVSVSRRRGSPSARSALPLTRTFTRP

SEQ ID NO: 46881 - protein, 323 aa, Zea mays
  Coding DNA Sequence Number=SeqID_3506
MSDIKIIKLSGSTNLQSIVFFPRGSSTGWGFDWAGKGQGQGLGNAGRLAWASSGDELTAREEEDGGFGCRGESSWAWLSYLQRRRGKGRGRRGGRRNGRLASKPLMASITSIKVQREWGEAKRHRRFGSGVYDEGYLPLSPIEWDGQGFPGLGEGLRCWLSRVRCEHEGSSPHIRTGLSSFTTCTHGKYNHLRLYGQSLNLNLYGLNPRVMMAVEYREDKEGESFVRFGHGGGLTPSGIIVKMEGTFVLKTSYCSEVEGFPHLLRSCVLRMGIRKKPEYVWKEYCENGIEKCSMAVYLGESRSYPNHPPFQITAIGHRFPDTC

SEQ ID NO: 46882 - protein, 51 aa, Zea mays
  Coding DNA Sequence Number=SeqID_3507
MGKPVPSLLMLLLSRAHHISTCYSMQYNGSSSLISCEKQTIRIEFLNLARI

SEQ ID NO: 46883 - protein, 129 aa, Zea mays
  Coding DNA Sequence Number=SeqID_3508
  Subcellular localization annotation: CTP_CleavageSite=38; ConfidenceScore=5.33e-01
MARARAYKAHSGVDHSLPHTLNLTGAQTHRRLPVHGVSAATRAPANVDRPSQAFPNPVRPLEKTEHTSVKLPERGIEVCFARDEASPRSPESLRPPANVDRVSHYAIFRFNAQIASTSPREAHRAKGLN

SEQ ID NO: 46884 - protein, 104 aa, Zea mays
  Coding DNA Sequence Number=SeqID_3509
MSPIPVLELSVSISDFLLVLDSIVDGLQHLDKILDARLEAEGSKLCRAVVDYVLTCFRSHDPAISLTPVIDGPVAATEDAARESVQDAVEMVVVRFQRDPADTE

SEQ ID NO: 46885 - protein, 817 aa, Zea mays
  Coding DNA Sequence Number=SeqID_3510
MPSSSSSAATTPPAAASSEETLSSLMVEELRAGDSVDFVAEEDADEGALRCAAGQSSGRDLVEEFVAYGVWPLAYGWALGEVCPRQMPFHGGRVVRSPAFALNLRNRDPAAFVRDAEDGAVRLVGRYVPRTEGQRSFDIRGSNDRLNRVFELNQLPYDGYPGQDEADRRGKKPAVETGGDPALAAAPSSKKRKLGTAMGGLGVSDSFARELTRTCAAPGERMSSPELRESSARMLRVTGGCWPRNVPVPCAAGEDCFTSRMVRRWRVFPYGRNIGAVVWAVMDKDRQGAAQKRQATVRLHEARPKRQRGAAKAAASGGGRPPPAAKAGASAPSKAPEATAGVGGSKSTKVVPPASGVAEASKAARALPLSGKRVADFGTDITIDDYLGGSDEGQFAMAAPGAETATAAIVPRARGEALGAEGEVSALAVVRDEASAATRRLKGVTEALSQATEALSQVADFASRTASGALTAAVCAEVERLRTQHADAVREKSASNSKCRKLTDRVAALEKEKADLRRQLVAERREANEAVAKGQAAQAEAKLARAKGNLAKELAEHLQERLTALESRAKEAEAVMHAEAERTRTQHMDTYRELGAWTGDFEVPDREPGLRCLQWVQEELLELPAIAGGLMSYASLVTCEGAMNALSREGCRHFEAFDQADEEFERDIYKVEDPVVKESAGALYDRMWGLYGREVVRERAETSRAQAERGERVDDFEALNSALPDPEPTLAEAVTGVALEPTPESAAIATAAPTSAVVGEDLPPKVVEGAPDAPAAAVPSAEDPAAVVAETTAEAAAEPTAELTAEAPAASGPSQVA

SEQ ID NO: 46886 - protein, 198 aa, Zea mays
  Coding DNA Sequence Number=SeqID_3511
  Pfam annotation: Domain name=zf-CCHC; Domain location=106-123; Score =13.0; E_value=0.016; Accession=PF00098.14; Description=Zinc knuckle
MNMCELTLVVSHPPTGQDQVSLEEKDASTSCFDLIDDSNPCNQVLVKNIVVETCSDEVAKENEQLKQEVARLGKALYNKKGKAKQIQPPQDNTTAGVNKLVEGETVICRLCHMEGHKSFQCKAMTGDKQMQKLKQKPSSKISNTYIKKVNKKDGTPYLIAIKANKQANKGKGAKRIWVPKEIISTMKNTKKVWIRKGK

SEQ ID NO: 46887 - protein, 89 aa, Zea mays
  Coding DNA Sequence Number=SeqID_3512
MATYIRAVERSGLEGSDESEYSSDEEDSDGGGEDEDDDDDDDDEGGGGGDGDGDCSGRGGSSGGKDGDGGGSKGSSRGGSSGGSNRASG

SEQ ID NO: 46888 - protein, 66 aa, Zea mays
  Coding DNA Sequence Number=SeqID_3513
MDVLRIRNLGEDQQGLAKGLGVEEEQQGRPQQEGDQVRVSCDSISGISLRGKVIRVSRVITNGAVV

SEQ ID NO: 46889 - protein, 199 aa, Zea mays
  Coding DNA Sequence Number=SeqID_3514
  Subcellular localization annotation: CTP_CleavageSite=59; ConfidenceScore=5.06e-01
MGVGKGRLGERLPSPSINNAVVSLAFSHLFAVLCCFPLFSPFCFRMGKNNKRKREPTPPSEEFGDSEYSEEEISSESEGSPAPVPLRESSDDSDDSQGLAAEVWTYIRAVERSRLEGSDESEYSSDEEDSDGDSEDEDDDDDDGDDDDDGDGDGDGSGRGSGGGSKDGDGGGSSRGSNRGGSSRGSTRGGGGGSNRASG

SEQ ID NO: 46890 - protein, 60 aa, Zea mays
  Coding DNA Sequence Number=SeqID_3515
MAVAPERARRWTPNRWPQLHDLDTRWQRSRTVSTTVAKWFVPNARGTVDKFYRFGPLKDA

SEQ ID NO: 46891 - protein, 246 aa, Zea mays
  Coding DNA Sequence Number=SeqID_3516
  Homolog annotation: Hit_ID=A2XFR6; Match level="QueryCoverage=36%, HitCoverage=25%, E-value=6e-08, Identity=35%"; Hit description =Putative uncharacterized protein
MGSYSWLRWFVLFQTTRINTSYVPQPRQISVYPVVVEEVSADLPPIRVENVVNLEDSSEEQLPTPTPLAESLAFAAGSSTSAPPAPAFQAPATGGDDPDDSGDDDDEDDDDEEGGDEHVHEEADYAQQDYFMGFGPVIEHYTSMFETSHFPNLLQEVLHALGTYVRPLYETRRVSEPPRACYYITRIHVRVMDAGDRGFRTLSAHESLTPLSTYAASVSDAACRTLWSLNHTYRQQLQNTRFRHLP

SEQ ID NO: 46892 - protein, 408 aa, Zea mays
  Coding DNA Sequence Number=SeqID_3517
  Gene Ontology: Mol. function=oxidoreductase activity; Cellular component=endoplasmic reticulum membrane; Biological process =electron transport
  Homolog annotation: Hit_ID=A2YPI3; Match level="QueryCoverage=42%, HitCoverage=15%, E-value=2e-74, Identity=79%"; Hit description =Putative uncharacterized protein
  Subcellular localization annotation: CTP_CleavageSite=37; ConfidenceScore=5.19e-01
MGSEAALLVAATTELFLGSLTAGGHTATTRQFQHAVRAVHVWSAARRGGSPLSSSMLVFGYATKEADEAMLFRHMVPSKLWKVLSWLNVGTEKKLANVKVVVDQFIYEEIYKRKAWGSNKSQADVLSMYTKLSLDPSMSEQQKTDFLREMVVGFIIARKDLIVVKLTWFFYMMCKHPKVEAMILEELKDLQSLRMRLMALLVDGCRGLSGGAMAERFSKKFEFSADNIEPLVQTCMTTLSSKRSDEERETWGFLRVMFEDGDFARTKLLAHLGFEPPQAPPASSTDELSQILADTLNIDHAAVTDNADAQFLIDNGDDFFKNPQPSEASLAEESVSTNGQHIEQEVSGDAVPSDPSIDKSIQHALVVGDYKGAVNQCLASNRMADALVIAHAGGSALWESTRNHYLKN

SEQ ID NO: 46893 - protein, 357 aa, Zea mays
  Coding DNA Sequence Number=SeqID_3518
  Gene Ontology: Mol. function=protein dimerization activity; Cellular component=nucleus; Biological process=regulation of transcription, DNA-dependent
  Homolog annotation: Hit_ID=A2WTQ5; Match level="QueryCoverage=67%, HitCoverage=88%, E-value=1e-61, Identity=55%"; Hit description=Auxin- responsive protein IAA5
  Pfam annotation: Domain name=AUX_IAA; Domain location=40-255; Score =206.9; E_value=4.8e-59; Accession=PF02309.7; Description=AUXIAA family
  Subcellular localization annotation: CTP_CleavageSite=58; ConfidenceScore=5.47e-01
MSPPLEPHDYIGLSAAAAAAPPTPTSSSSSSSSPAPRLTLRLGLPGSESPDRDRDRDRCEDVAAALSLGPLPATPKAPAAVSAKRAFPDPAQRPGAAKASDDKQASPAAPPAAKAQVVGWPPVRNYRKNTLAASASRSKAPAAEDAASAARPMYVKVSMDGAPYLRKVDIKMYSSYEDLSVALQKMFSCFIAGQSGLHKSSSKDRLTNGSKVDALKDQEYVLTYEDKDADWMLVGDLPWDSKNHRADRRNWCCTQLPARLTLVLTVHFTQNWGSLGSLGSCSASSGLRSIKTGTAVTEEIVESAVPGNSGLVLFCFLPSIGRVLAVSEDFPCRRGRVNALAVGLLDGNGFENFRCEL

SEQ ID NO: 46894 - protein, 574 aa, Zea mays
  Coding DNA Sequence Number=SeqID_3519
MAERYQLPRSCVPPTARRKDCEHPPSGGLEGGKARCIREREDMVAFQGGHPPFKGDSPYLRPQSSWAESSPTRSKVLPYGTGAGSHTSCKPAQSRRSQTAVRGACNRLAVTSGSPLLPRPAGERAGSHAGGMQPRQVGALLRLPTRPAWRPRPTRHATGAPNASCMQLHRHLRHHRASSTVEPIPRPEATQRTTQQRQPSATVNAAKNGSAVMAVAGGQEQRSRRQPSLRPIQGQRENPLSRREDNAPVFHSSNGSRTRNGHLANHSPRRINSVAGQAVPLAGEAGPSEGFDSRLRSRGLYTHYWSEVRRLAPRKGSTTASGYSGSAPSTDQGGNDLVTESHQREASSPRTPSPGDRVRQITRSSPETPCSAPTEGNMALSPLLLAERRRRGRLGGCSRKPGSGRTVDSVNIPARELGTRPYTQATASSHEGTTRSAKALREALRPQRSQTTPPRPRGLHPGGCARAHPPEQNATEKAGPLAKKCDESLQASANTPFEARGLLSGTIIRGTLKAPNSQLVTPISIKLQRPDGARTRAKSRKTANSAPPDPGLGLGLSPGRRRTPLRPTQGSDSG

SEQ ID NO: 46895 - protein, 161 aa, Zea mays
  Coding DNA Sequence Number=SeqID_3520
MVLDDLDHGVEQENMQKPNAKRRHTACQWNGQEARLILNKCGGRVAQRPYVRLCRLAYVTCSRPRGSIGSPTGRGAEAYTIRSGHVSALDPRLDLIKAWVFSVQESWDPALSGLDPTQRGPDPILGVRFAPVEVLDLTRRPVILFKFFQKYCPNIPLIYLK

SEQ ID NO: 46896 - protein, 90 aa, Zea mays
  Coding DNA Sequence Number=SeqID_3521
MTIVSVTRQPSTDFWNWVDRWLESVADLAQQHCIISRRACSPTIVVASLSMLANRILICQWSRTTRVSIRWAKVTACTDIEYQSWEAKLI

SEQ ID NO: 46897 - protein, 91 aa, Zea mays
  Coding DNA Sequence Number=SeqID_3522
MAGGMSSPELKDGGCREGECGRERETLGDTGVSQPSPLKGISSRDSGQSPSEIRKAGGGVGGDYIPASLGRQSGKLDLRNSSVSQVASSSE

SEQ ID NO: 46898 - protein, 151 aa, Zea mays
  Coding DNA Sequence Number=SeqID_3523
  Homolog annotation: Hit_ID=Q6QP51; Match level="QueryCoverage=32%, HitCoverage=22%, E-value=4e-15, Identity=81%"; Hit description =Putative growth-regulating factor 1
MQAACNCTTGTHPFDFDASNAEAQAHTSCNRRAGYYVRKTAPPLAAVPRLLDCGTGAATRGNPVHGPTVPTKHIGHRDRERGYSERDPSPQRKQAPSPPTDQRFEGWPLGRVRKPPQSTRALRPLLIRGSKAGPLEGFDSRLRALGLRAHY

SEQ ID NO: 46899 - protein, 357 aa, Zea mays
  Coding DNA Sequence Number=SeqID_3524
  Homolog annotation: Hit_ID=A2WW19; Match level="QueryCoverage=73%, HitCoverage=84%, E-value=4e-80, Identity=53%"; Hit description =Putative uncharacterized protein
MWEKNFCTDACAIPWAKLCETKRLMSLYKSVVDWDDSAALEAFNDAKARFCAIYHGQHYDIPLPDPDMFIDIINPDEYVDPELVADLEKSRRRVPRKDDGVPDVWESFIFSDKPVPVIGWVTRRPVSLMASSQATCSNNWSAKLRETAGSNQQPGEQTNSCISLSIMRDGSQDAWKHDYGWDPTAIQTDLWDNHQGSYEVPDGQGVPYGHWTHWRRRNNDSGRRNTRNSGGPISSKPMKSKDQTDEHNVAINGWRNCRVRNVLSANHHQQKNLQPAWSRMNNIVTDYLCHNNNKSKGHDNEDQGSIAGLNIPRSQILSYGFLQSFLLLHVTFLKHNYMGFTIQPFGSTADGVKLLLY

SEQ ID NO: 46900 - protein, 298 aa, Zea mays
  Coding DNA Sequence Number=SeqID_3525
MGAIKSRIGPFKGRDCASPEPSLGQGQPTPEGLRLARGPPTATSAPSARPRPSLHQEATLAKSPRQPTRSQGHLMQRWPDTFILTAAKPGPRRHRKLRSARPQGSDSGSAPEDDELRFARPQGSDSGSAPEDDELRFARPQGSDSGSAPEDDELRFARPQGSDSGSAPEDDELRFAPTPGLGLGLSPGRRRTPLRPSPGLGLGLSPGRRRTPLRPDPQGSDSAWPQPTVSRLARPRGSDSTSASEDRLDLDLGGASTSPNPGHGQTTSTGGAIITLPQADSGYGEQDRRPIWLAPLYE

SEQ ID NO: 46901 - protein, 194 aa, Zea mays
  Coding DNA Sequence Number=SeqID_3526
MNAVVTSHLPVCLYSDAGKKASRQDFYTRRTAADEGILAAGQATTPPCPSLSSGDLRAQRNDAAKGRGEMGFSWCVGGAFLPRRTAEQRESATVLHCIAAGWLDLDLEYCCLLVVVGWGTNSTLFGCAGPSSHVRGRGQRHGQGSRLAVADRNRMGARARIAASVAYAHVSARRAVAFVNSILPLSAVHPAIVV

SEQ ID NO: 46902 - protein, 363 aa, Zea mays
  Coding DNA Sequence Number=SeqID_3527
MGSARVAFVLLLLEERNFAEEGDHRFDGGEKQAGLRPLPRPQLQGSSSTLLGWGASRGPAFAWAGVPLLPPASGGGNHPPALRRRRPPAMRGKANCCCPARMQHSVLCPGYCGRPHRRVSQHVVRREGGTRVLGRSSSRFCGEDGGEDLPVRFGANGARWCGVGGQVDAAVGAEVVAAGEGFSAVEIVGAICASGLRLFGFNIWFSSSARGREREPSSGSVRPGTITAAAEVAGESPGESLGSVGLATQGFSCLVKETLGRSAMSRSQRQRCQRGQRRSRLEKKLHRPKSRGLPRPRRRSSGGWKLARSSTGGTNPGVGLPRRGADIFLRGGDPPTVSLSEAGSDSAEGGVDAEGATAPPVDV

SEQ ID NO: 46903 - protein, 135 aa, Zea mays
  Coding DNA Sequence Number=SeqID_3528
MDVLMIRNLGEDQQGLGKGQAFPELQLSLEQNRYSFAITPTLIGQSHRSPFATCSAGPKNQMDKDKGPKLNDDECVSQMELKEMMRVMTEAFKNTRTLPRHPMSSLIDELMNLLHAWTYWRLVPHHQLLPHLTLR

SEQ ID NO: 46904 - protein, 184 aa, Zea mays
  Coding DNA Sequence Number=SeqID_3529
MTAAEEKGGGAYRRRGCSGEGSGEVRESLVITSRYGSPAMEASPENKEDVCARNLRMAHRIARSTRGRGRPKSGEHDLGSPVRFCWVRELRKLHGPLAKLTEGQAQLGRGWSELAAVAEARAVMAGRGKLTGAKEGRRASEGFADWIKRYGGVKLGLSHCRAQREDPGFDVSRACAPMPSSGMR

SEQ ID NO: 46905 - protein, 142 aa, Zea mays
  Coding DNA Sequence Number=SeqID_3530
MEENEVNTTVEDLPEIGVVEDLTTASNGFAAARRSTARNCSSPIVAHARDARREPPRRPKEAPRHGPRTFRWCMGAIDGGGANDSLAVVMAAQSFCGVVKYERRGKWGGLVSMPYNPELGCTGEKEEVGQNGYSRPRSFTFG

SEQ ID NO: 46906 - protein, 200 aa, Zea mays
  Coding DNA Sequence Number=SeqID_3531
MTSHGSSDDGNALTHTDGLAREGFPRILWEVLQGAGYTTPPQYAVQQFEKHRVPRCRVRMTLEPHPLQPGWRSLDSESFGYRAEDTIEAIALHGLTTFCGFHPLELATHPIGLFPAEKEDDPMWKDRVEHAKDIWAIYPGQTAHLTVRCMNALYRLQEIQDQEDNEDVDIVGGDEPASSVDTAGSGRPPSPESSVASFAH

SEQ ID NO: 46907 - protein, 145 aa, Zea mays
  Coding DNA Sequence Number=SeqID_3532
  Homolog annotation: Hit_ID=A7QH52; Match level="QueryCoverage=66%, HitCoverage=34%, E-value=2e-31, Identity=66%"; Hit description =Chromosome chr3 scaffold_95, whole genome shotgun sequence
  Pfam annotation: Domain name=Methyltrans_RNA; Domain location=1-141; Score=-56.7; E_value=8.8e-05; Accession=PF04452.5; Description=RNA methyltransferase
MKFLSPTCFHRVELFNGAGGLAEGFIHKVDKGGSDVELLEDVRIIAPQGIQWHVFAAFGGCADWLIEKCTELGASSVTPLLTERCHTIAENRVDRLQRLVLAAIKQCMEFGYHLRSWHVKQCMEFGSLKTRGYKWRHHNPYKLVP

SEQ ID NO: 46908 - protein, 102 aa, Zea mays
  Coding DNA Sequence Number=SeqID_3533
MSKLKSWSVRELRISAVEDSKKLWTKEPTLNIVAHEIVCKGMLSQVQPKYKAMRAKVIGETVGEIQGENLLRNFVKQFVNNFVNNSFAHIDDFYCFLCFWVG

SEQ ID NO: 46909 - protein, 266 aa, Zea mays
  Coding DNA Sequence Number=SeqID_3534
  Homolog annotation: Hit_ID=Q5Z9G5; Match level="QueryCoverage=58%, HitCoverage=63%, E-value=2e-21, Identity=37%"; Hit description =Putative uncharacterized protein P0655A07.24
  Pfam annotation: Domain name=Hin1; Domain location=107-241; Score =57.0; E_value=6.4e-14; Accession=PF07320.4; Description=Harpin -induced protein 1 (Hin1)
MHSVKRRALGKEPDSSSEVLPAAAVPSGVRAGAREQESPGRRGALQPADWRTWRGREEEEPQRPRRYSFRRHRSGAAEWAAVVLFKVLVVVVLLGAVAVLVVVVLPQPRAPYVAVRAASLYALVYGQTGALDDVQVMVRVEARNGNAHSAAYFSRLECRLAFAGAALAVLRAYPFRVPARGVLPLAYVAHAQGAPLGDAGSAAMETALRDGVVPFRVEGEARTRWKVAGIVSADQWTRLACQLRFFWPNGTMLPFRCSSKSKFLFF

SEQ ID NO: 46910 - protein, 129 aa, Zea mays
  Coding DNA Sequence Number=SeqID_3535
MVKNFGRKTVQIAMNAVVTSHLLVCLYSAAAFENKFPTYTEWGIILWDHINRVFGAAATCTRGNEAHDVSARSSIVKTVGSIREEAGRRSPLARGEGLQLSTGYSAMVLGPRVVYPLHRGSMRISQDLA

SEQ ID NO: 46911 - protein, 81 aa, Zea mays
  Coding DNA Sequence Number=SeqID_3536
  Homolog annotation: Hit_ID=Q5NKP3; Match level="QueryCoverage=69%, HitCoverage=22%, E-value=2e-17, Identity=80%"; Hit description =Putative uncharacterized protein 9C20.7
MAATFAIDLLPCSRVLKHEGVDKEALALASLIDDEKKLGDYQFDFWKQYYVVACVAVFGKLRRSRRLNAVQSCCTMLSIFK

SEQ ID NO: 46912 - protein, 159 aa, Zea mays
  Coding DNA Sequence Number=SeqID_3537
MWRLGDGRYPGEGSGSRGGEKSGRAVLPSLATSIHLGEGASRRCSSAEPAKLGSKRSCSSGSGGGPLSVVGGKEVARDETKIEGSGATVGVRRRRTAIAKKLRRSTAPTKEGAEKRKRISSPPSSSSSSRSGAPDPKRKRVQSSRSKKDTSQNPHTKKI

SEQ ID NO: 46913 - protein, 426 aa, Zea mays
  Coding DNA Sequence Number=SeqID_3538
  Gene Ontology: Mol. function=RNA binding
  Homolog annotation: Hit_ID=A2YCL5; Match level="QueryCoverage=63%, HitCoverage=73%, E-value=1e-117, Identity=52%"; Hit description =Putative uncharacterized protein
  Pfam annotation: Domain name=KH_1; Domain location=186-252; Score =28.8; E_value=2.1e-05; Accession=PF00013.20; Description=KH domain
  Pfam annotation: Domain name=KH_1; Domain location=350-412; Score =44.5; E_value=3.7e-10; Accession=PF00013.20; Description=KH domain
  Pfam module annotation: Pfam domain module=KH_1::KH_1; Domain location=186-252::350-412
MRVNLSKDLLRYSLVENKVLKASLRLGDKVLTGDKVPLMPSQKSGVRKEGPQRRAGGELSDYLQQLSYLIFCPKLHSKCKRAICTATYTTCWTASGSMTIFPPRPMVFGSSTGTALLTNQCNCLCSRADLPPLNCGGGVRDWRSSAPGGVDSRRGPDHELFPAQEAVLHIQTHIVDLGPDMDNIITTRLLVPASEIACFDGREGSLSDIQRQTSANVQILPREDLPSCALESDELIQIVGEIKAARNALIQVTTKLRSFLYREMPDPIQVGNINLHGAISPVAGSPRGPYQGNDIPMGAYHQASQLATSWHSKDSGGSASGSFEQGSNINDDIRQSATKRFAVPLVTRSTLEIVIPNSAVASLTMRAGSKLAQISEISGAAVTLAEDRSDILQKVVRISGTPEQASKAENLLQGFILSIPDDIPSG

SEQ ID NO: 46914 - protein, 249 aa, Zea mays
  Coding DNA Sequence Number=SeqID_3539
  Gene Ontology: Mol. function=nutrient reservoir activity; Biological process=RNA-dependent DNA replication
  Homolog annotation: Hit_ID=Q651V3; Match level="QueryCoverage=74%, HitCoverage=41%, E-value=5e-18, Identity=33%"; Hit description=NAM -like protein
MGTDWNQVMAQYGTFLSEDDGTQFQNTAFAPPPEIPAQGSPVPPPVKKAPQSTKLANFTSEEDMRVCQAWLAVSCDPIVNTGQKRQGFWNRITEAYNSRRGSMPERSTKSLMSRWDSIKTQCSTFAGYMMVVLRQNPSGMTDADKDQPKWMDQHMGNQNPPPNPIGTQSNTIDLDGGEDSAPSSFTSKRPLGRDSAKEKANKQRSENTSSTDSEYLTRMGELSLERLSVYKSVASNEEKKLELMKKQER

SEQ ID NO: 46915 - protein, 59 aa, Zea mays
  Coding DNA Sequence Number=SeqID_3540
MQAACNRTKGAHPFDFDASSMEAQAHASCNRRAGYYGSGKGILRKGSFSAKEAGPEPPY

SEQ ID NO: 46916 - protein, 168 aa, Zea mays
  Coding DNA Sequence Number=SeqID_3541
MAISICASLRTSTSIERLAFSMQNTGSGEARSAEGIRGRCFGLAPLRSEVGRQGCEQGLLAAAQGEKEGGGRAELLLGHGDVVGEGAGLREKGWDNKGAEEVGSHGRNSSSLFAAAADSRGRRKTQLLLLLGAGHGEASARREEAFPAGETREEEKKGADCCCAREKE

SEQ ID NO: 46917 - protein, 170 aa, Zea mays
  Coding DNA Sequence Number=SeqID_3542
  Homolog annotation: Hit_ID=Q6J9V9; Match level="QueryCoverage=37%, HitCoverage=32%, E-value=5e-07, Identity=43%"; Hit description =Putative uncharacterized protein
  Subcellular localization annotation: CTP_CleavageSite=28; ConfidenceScore=5.41e-01
MQSACNRAKWAHPFDSNAPSMKAQAHTSCNRRAGCYVRATAPPLTPLPRLLDCGTSTATRGNPAYDPTVPARRDGTGKGDTPKGILLREGNGPRAPLLIRGSKAGPSEGFNSRLRALGPRAHYWSEVRRPAPRKGSTAASSHSGSVPTTDQGFVGWPSKGSQPPQTQSEG

SEQ ID NO: 46918 - protein, 501 aa, Zea mays
  Coding DNA Sequence Number=SeqID_3543
  Subcellular localization annotation: CTP_CleavageSite=5; ConfidenceScore=5.39e-01
MSSPSLMRRVFPSSKPPDGGYPPSFRLLVGGTQLHGSWYLSAIVRLQGFSSAGPAAPLRRRSPRMVTTSSWVGKSKPGCDLGPTLSFKDVHHPRWGGGRAEPALYLPCGSTGHPLPRRSGVEALAGPAGGADLDNAGLIDGGRRHLQRVGVVGRAPGGPSCRRAAAAPGRCPTRLGGSEWGSAGGWCPPPSAPRRRRLEKSPSPTGSPPPSALRASGSSHLSSPLERRRGRGQDRGSAHPEACTAAGVVGVAVAVVGAGGGEPLVGLLSLRRPFPMEWGRSYLRRGNRSSVCNGTSNASSSSLVKGTPWPLFDEPRPGVAISVRTEAELARKWEPGWPEPGRVARQRGPTSESMTRGLGSGWHPRKMLGRGPRGNRPSRLLGPDSRRSPRTASPSEVGSDLAEGVVDAEGASGLSVGNGDVCASESCFSRKVMSESLYPNASYLSQKVMSEDPLSEAVKKHERNSAEKRSFFEEKFDAEGVSPLLAPEGGSGFAEARPTLP

SEQ ID NO: 46919 - protein, 183 aa, Zea mays
  Coding DNA Sequence Number=SeqID_3544
  Subcellular localization annotation: CTP_CleavageSite=32; ConfidenceScore=5.48e-01
MRGWSAASVVSFSALSLLAQLALARLPVPPPAARAVVAPRAPEDRPRRRALLGRRSCSWAVLPLPRYDASARKSVFARLGGSEWGSAGGQMASIVGAEVVAAEEVLVADGITATIRALGLRLFGFDSLSSPLEWGCGRGPCCSSVHHEAIAAAVWPPGAEVVVAAAGVGVGLACRLTEPLHQV

SEQ ID NO: 46920 - protein, 350 aa, Zea mays
  Coding DNA Sequence Number=SeqID_3545
  Gene Ontology: Mol. function=hydrolase activity, acting on ester bonds; Cellular component=cellulose and pectin-containing cell wall; Biological process=lipid metabolic process
  Homolog annotation: Hit_ID=A2ZQN3; Match level="QueryCoverage=91%, HitCoverage=79%, E-value=2e-75, Identity=46%"; Hit description =Putative uncharacterized protein
  Pfam annotation: Domain name=Lipase_GDSL; Domain location=28-336; Score=120.1; E_value=6.4e-33; Accession=PF00657.13; Description=GDSL- like LipaseAcylhydrolase
MQHVILCLQISLLLSSFSYSMQAQYTSIFSFGDSYTDTGNKARIISLFAPYLDVGNAAPIPEYLIDRLIRCPLVVRCMYTAQALGLPLLPPSLAKDQSFKQGANFAVAGATALKTSTTSSALYPQLAVAGSAVPPPNNISLADELGWFDAMKPALCSSPQACKDYFAKALFVVGELGWNDYGVMVKLINDGATTVVVSGISPMGCAPGNLVLLASQDPADYEPDTGCLKGMNELSRDHNAQLSQALTTLGGRYPGARVTYADLYGPVIAFAAAPARFGFDSALRDCCGGGGGKYNFNLSAACGMPGVAACPNPSAYVNWDGVHLTEAAYHRVADGWLRGPYANPPVLATA

SEQ ID NO: 46921 - protein, 218 aa, Zea mays
  Coding DNA Sequence Number=SeqID_3546
  Homolog annotation: Hit_ID=Q7XBD1; Match level="QueryCoverage=17%, HitCoverage=10%, E-value=1e-08, Identity=76%"; Hit description =Putative retrotransposon protein
MQGTLALHQVADRLAPGRGPPIEIGPQWPGSKDSSEVSASNIITPTWETLPAEEQLLFEERQEQLIREAKAKFLADFKVDRNNKVVQQWAKYLASLRPTMNTPNVSSINELQSLKAYIDEQTRANATKVVAEKTPDGGETLKVTITTSGSGGKRRQGDMRENQYCASQTVRFGILATIVQMADVKKIIDPTLAGFYEAMEKTNMEKIANEMLAGISED

SEQ ID NO: 46922 - protein, 214 aa, Zea mays
  Coding DNA Sequence Number=SeqID_3547
MERAEASMRSEVERTRKQLMDSYRELGARTADFEVPDRESGLHCLEWLQEELLALPTIVEGFMSFASLVTCEGAMNVLSREGCSHYEVFDRSEDFEREIYKVEDPVVKESAGALFDRMWGPHGREVVRERSDRARDQAARDEKVEDFGALNSVRPKAESSPVAPPPETVEGTLAAPAATVSGGGSSSTAVPRADDPPKTATEPAAEDPTAAGPS

SEQ ID NO: 46923 - protein, 227 aa, Zea mays
  Coding DNA Sequence Number=SeqID_3548
MDKDRQEAAQKCRAVIRLPEARLKRARGTAKAAASGGSQPTLATKSAAPGSSKVPDVMKAAGAGVAKSASAGAAKARDLPSPAKRVADFGTDISVDDYLTGSGEVQLVVVPPAVATMVSATVPGAKGSALSAGGEISALTTVTDEAGTVSHRLREASQWLSQHADAVPGKSRPPIAKCRKLTKKVAALEGERTDLWRQLAEERREANQALAKAQSAQAEAQSGVGGG

SEQ ID NO: 46924 - protein, 106 aa, Zea mays
  Coding DNA Sequence Number=SeqID_3549
MPSSSSSAAATPADASSEETLSNVAAEELRAGDTVEFDVSWMSSVRVQDMQQLGYFGGGVARVPRTEEVPEPEGELVVFKAFFAVGLRLPAHRFVGEVLCRVPPSH

SEQ ID NO: 46925 - protein, 52 aa, Zea mays
  Coding DNA Sequence Number=SeqID_3550
MARVACTLCGKRLDDGVSVLSVKKQQIFVASVPRWCLKKKIKTEATGGSVLL

SEQ ID NO: 46926 - protein, 125 aa, Zea mays
  Coding DNA Sequence Number=SeqID_3551
MDEGCTQPLSSDPMINLNTMTFFLIVFLPFARNLHKLEPLALTIKITEKGPFYSPKAARSHWRPTWKANLAFYRVAHRTVRYLRTRIREGEAQKIRRLTQRRSCEAGKLRHVRRKGNRLEDEKAI

SEQ ID NO: 46927 - protein, 1890 aa, Zea mays
  Coding DNA Sequence Number=SeqID_3552
  Gene Ontology: Mol. function=translation initiation factor activity; Cellular component=eukaryotic translation initiation factor 4F complex; Biological process=regulation of translation
  Homolog annotation: Hit_ID=A3BL20; Match level="QueryCoverage=86%, HitCoverage=96%, E-value=0.0, Identity=51%"; Hit description =Putative uncharacterized protein
  Pfam annotation: Domain name=MA3; Domain location=1759-1873; Score =63.2; E_value=9e-16; Accession=PF02847.8; Description=MA3 domain
  Pfam annotation: Domain name=MIF4G; Domain location=1333-1556; Score =208.9; E_value=1.2e-59; Accession=PF02854.10; Description=MIF4G domain
  Pfam module annotation: Pfam domain module=MA3::MIF4G; Domain location=1759-1873::1333-1556
MRTGPHQAGPRHMSAPDPCLSKAWVFSALESRDPTVGSPDPTQRGSGPDSGGSGCTRGGPGPCSKGLVYMYRGPTLFHGIRTHYWHLGMYRFLWPHDDPGAIHMAESGAVHHGCRREEKEEEIGEERRGFMSQRGDRGEGHARRPGRSSSFGGHRGGGVGGAGKGGAGSSGQPPLSSNRSFRKPGNGHGGHQRVVNQPDTTGFQPAPAPGTHQTPARPPPAPQNAAVHVPVSASRPQHQDPHVSSSLSASEKPANPPLPLPKATHAAPRALPKNSNTALPQGGSQGEPSKGFNFQFGSINMNGLPQFPARTSSAPPNLDEQKRNQALVEELKVTPAPVQPALKQQQLQQQPQLPPQLPPQQVPQQPQQQSARKEAVGSSQHNSINPHITSQLKRDVHPSPSVPNVTSLRPTVQIPGVQMPIPFHHQPAQVSLQFGGHGAQLQPQVVPSSYQMSMGLTGSSTQVPQQLYAPTLQHHQLQQQAMMHPGQGMGYVPSVAHQFPQLGNIPMNIASQYAQQQPNTHAAARKTTVKITHPDTHEELKLDKRMDSSGQRAAPSLTQQSQPVGNYAPHIGFFHQPQSSYNQSGMYYPTTAGVNQVATGSSGPRYNYPVTQSGQAMTYISPSAVPPVSAQSQYTVKPHPIGLVTEKSSTHVTISAPPAKSEPPKLRAAEDSASSRQKDNEIVSGIAVSSKSILEKEESNDPLVTVKHSTVISPSLPIHGAKSQTSVTSSPVVNSVSPVAGVDGKSIESIQRTGSFNDNKKIVTKKDVRISSEPPNSASSVEDKVQTVKAGGSDHQETNNLNNELDLASSSSCSTVPLAGCLLFFSNSFTLAAADVPGTDRSSRRPSPEGTGEPAVESFTVLAVECDKRKRTDEVATDPSKDNISSDATKHELPDACAVDPTEQASAVTSNTDDSYASPIVNNQEQLLKESAPSASEEQAMMNNFSKNSETSHFLDSNAVEVRTGTSEPTVQSSNDEGDSDISPETDLAVCNVPLVSSEGQLKSESRADDQQAAEPTVSVRSVSREKPSVEIARSKSAAGKRKKKKEMLAKADAAGSSDLYNAYKGPEEKSEMVGTADGADSSSIVDTTHVLLDEAERDVSTFADDCKKKVELDDWEDAADMSTPKLAPDSGNQAGTTQVLDSDTSEANSRKKYSRDFLLTLQHHCTGLPVGFQMNEAVNAIMNNLVGKSYVVDREPYPSPGRGLDRPTSRGDRRGAAMTDDRWTKTGVPLSPGRDVHMDLPNGTSVVNYRSSGGNHGVLRNPRGQPSNQYGGGLLAGPVHSVGPQVPRSGSDSDRWQQKGLMPSPVTPMQTMHKAERKYVVGKVSDEEEAKQRQLKGILNKLTPQNFEKLFEQVKEVNIDSVATLTGVISQIFDKALMEPTFCEMYANFCFHLAGALPDFSEDNEKITFKRLLLNKCQEEFERGEREEAEADKTEEEGEIKQTKEEREEKRIRARRRMLGNIRLIGELFKKKMLTERIMHECIKKLFGNCDDPDEENIEALCKLMSTIGEMIDRAKAKEHMDAYFGMMHKMSTSQKLSSRVRFMLRDSIDLRRNKWQQRRKVEGPKKIEEVHRDAAQERHAQSSRLGRGPAVSSVSRRGAPSMDYGSRGSSALASSSSQQGSIRGMPPHSRGSQDIRYEERNQFDNRTVLPQRVVKDEAITLGPQGGLARGMSIRGLSPASNTELPSVIDHRRILSGSNGYNSVTDWTSSSGREDSSSIIPDRTSGRTSASSQSAGPSQRPASQEGRPGSKSYSEDELREKSVLAIREYYSAKDEKEVALCIEELNAPSFYPSVVSLWVNDSFERKDMERELLAKLLVSLCSGRHNLLSKQQLSDGLSSVLTLLEDTLSDAPRATEYLGRLFARFTNGCGRQAVYFVRTQIPIGLFDVL

SEQ ID NO: 46928 - protein, 322 aa, Zea mays
  Coding DNA Sequence Number=SeqID_3553
  Gene Ontology: Mol. function=protein binding; Cellular component =nucleus; Biological process=cell division
  Homolog annotation: Hit_ID=Q69S43; Match level="QueryCoverage=95%, HitCoverage=93%, E-value=7e-89, Identity=58%"; Hit description =Cyclin-D6-1
  Pfam annotation: Domain name=Cyclin_C; Domain location=175-304; Score= -4.2; E_value=0.085; Accession=PF02984.10; Description=Cyclin, C -terminal domain
  Pfam annotation: Domain name=Cyclin_N; Domain location=32-173; Score =23.8; E_value=9.4e-07; Accession=PF00134.14; Description=Cyclin, N -terminal domain
  Pfam module annotation: Pfam domain module=Cyclin_C::Cyclin_N; Domain location=175-304::32-173
MATEEWELREEDAYAYEFEFDLENPFTSPADEPIASLLDAEGHHAPSISAAASATRRAAAAFISKVRFGGELAVHPRVAYLALNYVDRFLSKRQLAVRTRHSRAMGLLSVKCEQQPWAPRLLAISCLSLAAKMQRVATFSTADIQRDEDFMFDAVTIRRMERVVLGALEWRARSVTPLAFLGFFLSACYPPPQHPPQVAAVKARAVDLLLHAQPEVKMAEFSPSVVAAAALLAAAGEVAAANLHAFQASLAACPFVNSEKLRECGEVLAAAGGVGRGRAAPSADTPVTVLGHQRSASSASETDWINGGDAKKRCMGPPSQWG

SEQ ID NO: 46929 - protein, 28 aa, Zea mays
  Coding DNA Sequence Number=SeqID_3554
MATVQKPKDEGIKFSVALTHAVTCAAPL

SEQ ID NO: 46930 - protein, 309 aa, Zea mays
  Coding DNA Sequence Number=SeqID_3555
  Homolog annotation: Hit_ID=Q6J9V9; Match level="QueryCoverage=31%, HitCoverage=34%, E-value=5e-35, Identity=80%"; Hit description =Putative uncharacterized protein
  Subcellular localization annotation: CTP_CleavageSite=18; ConfidenceScore=5.23e-01
MGSRSSNSSKKKATRRLKAALRMTQQCLVSATITGRSAAVIGMTVDLIRGGPTVIAATGVQKPRSNHLQDKRHLRQAKRAPFRLRHDDRIIKGTGKGDIAKRILPSEGNGPRALLLIMGSKVAPFGVKQPPQSTRAPSPLLIRGSKAGPSEVFDSRPRARRVRDDPEYVRYMGEARATLPRDRLTPYPDTRASVDKENSAVHPRSGNCASNQGKADNGKSRPPSSSASGATGSSASPDPDLGLSFGLGRRSPPRPTLGLGLNLGLGRRSPPRPTLGLGLSLSLGGVAASPDLGLVSATLRGIHHCPTLS

SEQ ID NO: 46931 - protein, 202 aa, Zea mays
  Coding DNA Sequence Number=SeqID_3556
  Homolog annotation: Hit_ID=O48967; Match level="QueryCoverage=42%, HitCoverage=18%, E-value=5e-21, Identity=60%"; Hit description =Putative uncharacterized protein
  Subcellular localization annotation: CTP_CleavageSite=91; ConfidenceScore=5.32e-01
MRQWRDDVDRLLGMAHFGSTRSRPQTSRRQHEASTYVRSPSWVPGSKRVSPWPAWAAPLSRNISARRPGHPSSGRTCRKSTTTGGSGAVPRDGKKKKKGHGHEKSRSTALVVAAATGGRGNHNKRLRPQKGNSGSCHVHPNSRHSAAECREIIELTKRVSGQREQSSWDGSPPRRRPGKERVDDGEVAAAERDLGYQSPEGT

SEQ ID NO: 46932 - protein, 50 aa, Zea mays
  Coding DNA Sequence Number=SeqID_3557
MGTNGHLNLDIGRKCIDQKGERLQLVEIPCKWEKNSKEKDRGIQVDHWIT

SEQ ID NO: 46933 - protein, 450 aa, Zea mays
  Coding DNA Sequence Number=SeqID_3558
  Subcellular localization annotation: CTP_CleavageSite=64; ConfidenceScore=5.00e-01
MSLRSLHVSRLSTFRAPDGEHSQSFRLVVGGTQLHGSWYLSAIVRLQGFSSASPAASPRRWSPKTVTTSSWVGRSKPGCGLCPSLSFKDVHHQCWGGECAELGSVSTRAAARSFPQRSGGRAFAVRGAGSCRVSGSPVRAASALLPVPPSAAAAGRGFSADEIVGAARGLTSNSTAFCLSSPLEWGRGRGPYGSSIRPEVIAAAVRPLGTEVVVAAVGAGGGEPSVGLLLLHRPSNRGGLNPRPLFDEPKPEAAVSAWTEAELARKEDFVSRSLAGPSTGGTDARVELPRLRARLMSSGDSWLRLRGGRPSCLLGPDSWRRPWRRWPGRGADVVLWSGDPSTALPSEARSDFAEGVVDAEGVAAPPPSRIVCPSESYFSRKVMSEDSAIDIVEKARKIVSAEEFSRVKTCSVRGITYPSVSYLSQKVMSEDPTLEIVEKHERRSSRKDLF

SEQ ID NO: 46934 - protein, 133 aa, Zea mays
  Coding DNA Sequence Number=SeqID_3559
  Homolog annotation: Hit_ID=A0EVJ2; Match level="QueryCoverage=39%, HitCoverage=4%, E-value=8e-08, Identity=51%"; Hit description=CACTA TnpD transposase
MAATQNSGVITRATDMEGHEACYYRKIKNIFEITFAGNKPLALVFFECKWMTPKSKKSVKGLLKGLSLFQGSSSSSSRRRELLSTAHGYEDEQHTEEQHNEDMLHNEDVQHNEEATTWDQVVQQHQPWDQWDH

SEQ ID NO: 46935 - protein, 103 aa, Zea mays
  Coding DNA Sequence Number=SeqID_3560
  Subcellular localization annotation: CTP_CleavageSite=46; ConfidenceScore=5.02e-01
MQAACDRTKEAHPFDFDASSMEAQAHTTGGTFGGRSRRRFTSAIMTASKKGPGKGIPRKGSFSAKELGPEPPTDQRFEGWPLGGVQQPPQSARAPRPLLIRGS

SEQ ID NO: 46936 - protein, 89 aa, Zea mays
  Coding DNA Sequence Number=SeqID_3561
MVCTGHFAECDTRQRGALPSVRTIALGKERSLGHQYRVFAECSGSGTRQRTTLCRVPYKALGKEPDMWTPLADSLPSAGRQTLGKGRRS

SEQ ID NO: 46937 - protein, 79 aa, Zea mays
  Coding DNA Sequence Number=SeqID_3562
MEEAMINLNEESSSRPKHRRRYINRDHSIDEYLKLARSTADSIDEYLKLARSTSLEWVSFIVMGRSSNVDQKSRILSVC

SEQ ID NO: 46938 - protein, 120 aa, Zea mays
  Coding DNA Sequence Number=SeqID_3563
MGGVCTSLRADISVMPYFYAFEVMIAQSIRVYGRVSLEHHLPINCNTTSMPGPRKNGLTNYWALGPFVRPFTSLVDPGDIYPPQAPDLWVDLERLAFWIVRLWTSLGAPEVHPMGVAPDF

SEQ ID NO: 46939 - protein, 242 aa, Zea mays
  Coding DNA Sequence Number=SeqID_3564
MIRKINLMDVPLQEKAKKERMLRIWGEGPLQGQLSNYGRTQKGEEQGKALTSVKTWDDSSSEDEPPRTCSHQSSSRPSRSSRKCLMARGLLEKFEAFANLNYELSTKIEQLESSATSTATDDDLIKKNEKLKANLASSQEAIENLLGKMEILSIHNNELTIKLENIGSTLEVSLVEIPEIIKKDASTSCFDLIDDSNPYNQVLVKNVIIETCLDEIAMENEQLKQEVARLGKALYDKKGKAK

SEQ ID NO: 46940 - protein, 332 aa, Zea mays
  Coding DNA Sequence Number=SeqID_3565
  Homolog annotation: Hit_ID=Q6J9V9; Match level="QueryCoverage=23%, HitCoverage=36%, E-value=2e-22, Identity=61%"; Hit description =Putative uncharacterized protein
  Subcellular localization annotation: CTP_CleavageSite=78; ConfidenceScore=5.60e-01
MATAQGIDPFLKAALPTRILKRHGQSLHRRAPGFSLSGAGAGSHTSCKLTRNRRSQTAARGACNRPAVISTPPSSPKPAVERADRHASGVQPHRDCAPFRLRCIRRTSMEARAHMSCNRRAGYYVQKLHRHLRQCRVFSTAEPVPRLEAALRVTQLCQLSAMITGQSAAGGGAAVDMAKSGPTGKRHLWPAKRASFHHHHDDRVKKGTGKRDISKGILLSEGNGPPSPPTDQGGSKAGPSEGFDSRPRARRVRDDSGYVRYMAEAWATLPRYPRTFPRPARTIFVTESHRREASSPRTLSNGSGFGKSPAEARGLLSQPSYGQTVDSINKPA

SEQ ID NO: 46941 - protein, 246 aa, Zea mays
  Coding DNA Sequence Number=SeqID_3566
MASPLSSASRTFIVYAEEEGRGEDLPVRFGAAAARRCGVGGQVAAVVGAEVVAARGGCLRRRDRRRHLRSDLRLFGFDGLSSHLVWGRGRGPFHSSVCPEDLRPLCDELKPEAAVSARIEASSAKEQVASQAEEVQQRWLELGQVVCERDQSRSHAAKAVSLAEVLGGQLAKATERLARESARVGALAESLAVRAQARCWRPPLRWRSFRLCCRLRLGQVPPRVETSPRVLLLPLLMSEPAGTTCL

SEQ ID NO: 46942 - protein, 694 aa, Zea mays
  Coding DNA Sequence Number=SeqID_3567
  Gene Ontology: Mol. function=nucleic acid binding; Cellular component= cytoplasm; Biological process=mRNA metabolic process
  Homolog annotation: Hit_ID=P93616; Match level="QueryCoverage=25%, HitCoverage=43%, E-value=2e-41, Identity=45%"; Hit description =Poly(A)-binding protein
  Pfam annotation: Domain name=RRM_1; Domain location=380-448; Score =3.6; E_value=0.069; Accession=PF00076.13; Description=RNA recognition motif. (a.k.a. RRM, RBD,
  Pfam annotation: Domain name=RRM_1; Domain location=469-539; Score =93.4; E_value=7.1e-25; Accession=PF00076.13; Description=RNA recognition motif. (a.k.a. RRM, RBD,
  Pfam module annotation: Pfam domain module=RRM_1::RRM_1; Domain location=380-448::469-539
MTLDVKLMLDEFNRRFDEWETRWDRRFSPPPVMELQDDPSSVVLARANSRAADDSVNALITSTDSDVLFDAIITDNWGGCFDDDEQYCVAPFVIAGNWGGFFGGEDLDSPDGPTRFVTAELDGYDEIKLDATTILDVLPGAHTVGKARCASYADHLYASASCTTPDQALNGHYTDKLLMLCSSNTTSTMPTSVSAAARKTPDDLELGLPDYYGARRQHPLTSRVVTLSYRVPELLLSYNSLEAKALLEAALMEANKERKKNITGTLTTKPNDDLDKDDDEFCLRGICLELACTMEVQDCGHQMYVAFMLALCFNISMPITIAPSAILKMAQQDGELLVSVGVPGNALVFKISIQGVVAALHRETLQGTSLNEEQMKQDSVADICHRQLNKILVDLDQDHIIVRSSCLDLDSSGESRDYGFVQFEMDESAQSAIDKLYGMLLNDKKVYIGFFVCMQDWKNAWNSIKFSNVYVKNLSDTVTDDELKEMFEKYGTITSDVVMRDNVGNSRCFGFVIFENADAAAQAVQKLNGKIFNDKELYVGRVQQPMMPVNLYASKFVVFGDKVFSLEEISAMIFGKMKDTAEAYLGKKINDAIVFVPAYFNNAQRQTTKDAAFTEVDIFRDAAAIICHDQERCDEIFQLAASFLGFKIKNQRSILHLQWDPGGIGVMYRLEGKPNFKKGRMLGTVGPNSPCQPR

SEQ ID NO: 46943 - protein, 245 aa, Zea mays
  Coding DNA Sequence Number=SeqID_3568
MSDDLVVPVHFEVGQELCFRLLDHPLLVLLELELLVNRQGVKGSHLANKKIKLLDSTKEQRGNRRHLWSGGTGLSGVHRTVSGAREDSNSNSSPSGNSRGDSAIIHRTVRCTPDSVRCSKGKPPQELASLGNSLQPLHYNSPDSPRAQMSDSPILAHRTSNSTCSVYTGHPGGPTNQKLQRSESNGSDDVGGGHRTVPVCTGTVRCAIEQTTSPTAIFGGWGYKYPNHPTIHCIQVFHFSTTYKS

SEQ ID NO: 46944 - protein, 316 aa, Zea mays
  Coding DNA Sequence Number=SeqID_3569
MAEVKRRPPRLPEVAVRIFACRNRRAGYMTCGPASFALVHRMWSKPKGRTVVVRLDACHVAVHPFGHRFLRRWESAYNRGAVACLARGGSPSSRFGSARMTWGSQPPGRRGRTLERFDEDFARDARGASEEERGLMEIGAVQPSLGFKDFRRAARLHSLTNGQFGGEKQARLRPPPRPQLQGSSSSGLRRRASRAGVGLCVGSDPLLPSVIWGRGRSPPVALGSCRASGSLARAALALLPMPPPPLALTVPLAVGGSPNMSYAARAAFVFWDGPSLVLVARTGVRTYRCASGRPLFADAVLEGRWPLSSMLRWWSP

SEQ ID NO: 46945 - protein, 508 aa, Zea mays
  Coding DNA Sequence Number=SeqID_3570
  Homolog annotation: Hit_ID=Q6QP51; Match level="QueryCoverage=37%, HitCoverage=90%, E-value=6e-41, Identity=50%"; Hit description =Putative growth-regulating factor 1
MGQSAAGIGTTVGMAKSGPTVIAVADERKQRDRERGCFGKDPSRRRKQAPSPPTDQGFEGWPLGRVSTAAPEHSGFKPITDQGFEGWPLGRVRQPPQSTQAPRPLLIRGSKASPSEGFDSRPRACRVRDDFGYVRYMAEARATLPRYPRTFPRPAGTICNGIPPEGGIEPADLVEGVWVRRITCSVARPAPTAVPTTQAKTDNKSRSTTEFGLGRNRKLHLARPQAPASGGGLRLARPPDLASTSASGGIVSSPDPGLGIKRSLRLARPWARTDRANRGYIITLSLASSGYKKQDRRPIWLTPATGNDGASRATMTPVALSPLRQQGDVSRILAALPAVLLQGSGASLTATLSRVQGSGSPPTAMLACTQGLGVSLPDKLAHSYTPHWLQAVITSMPLQIRPVTQRRPRRARYNGPDHTWASELNEAALRDDFVAGLRLVPNRAKGIPACSVCLTSGYQRRPRAKGGIFAFAPTFALRGTSSTKSPGAEDVARRRRRCPCSKWFREGF

SEQ ID NO: 46946 - protein, 399 aa, Zea mays
  Coding DNA Sequence Number=SeqID_3571
MAERYQLPRSCVPPTTRRKDCGYPPSGGLEGGKARCIREREDMVAFQGGHPPFKGDSPYLRPQSSGAESSPTRSKVPPLRRGAGSHMSCKPTQSRRSQTAARGACNCPADYKRLSTFAQTSGRKGGQPCRRHATAPSGRTSPTSSTPSMEAQAHASCNRRAGCFVQATAPPLAPLPRLLDCGTDIATRGDPAHDPAAPAWRYDDAPVFRSSNGPRTRNGHPANHSPRRINSAAGQAAPSGRRSERRFAFAIMTASKKRLGGCSRKLGSGQTIDSVNIPARELGTRPYTRATASSHEGTTRPAKALREALRPQRSQTTPPRPRGLHPAGALARTHRNKTQPRKAGPLAKKCDESLQASANTPFEARGLLSGTIIRGTLKAPNSQLVTPISIKLQRPDGCD

SEQ ID NO: 46947 - protein, 162 aa, Zea mays
  Coding DNA Sequence Number=SeqID_3572
MVTSSSMAGESKLGRDLCPSLSLKDFHHQGWGGDCRVPGSRTRVASEPLSALASATAAGRGSSADEIARAAHGPTSNSTAFCPSLPHEFGHGRGPPGNSIRPEVIAAAVRPPGAEVVVVIAAARAGDGAPFVGLPLLRRPPPSSGVVRTCGGGTGVPFVMAL

SEQ ID NO: 46948 - protein, 220 aa, Zea mays
  Coding DNA Sequence Number=SeqID_3573
MSSGDSWPRPRGDQPRRLLEPDSRRRPWRRWPGCGDDAVLRSGDPRTASPPDARSDLAEGVVDAEGAAAPSTVWIRSCRIGLPCSYLDFFVGNRIVCASESCFSRKVMIEVSVSRRRRSSSARSALPLTRTLTRPWGSVTNVVEKARRIAPAEELPNVKNCSVRGITYPNVSYLSQKVMSEVSVSRRRRSPSARSALAAYMYSVVFRIHFRSSRKARKTF

SEQ ID NO: 46949 - protein, 93 aa, Zea mays
  Coding DNA Sequence Number=SeqID_3574
MGSKTLSTECTFASLTHLRKKTLKDMLAFGNQAFGLTLVQAIVLKFIHQHHLVKKLTLNDIFLSTQLWSSASRDQLAYPIKCIMHMYEHKQTQ

SEQ ID NO: 46950 - protein, 79 aa, Zea mays
  Coding DNA Sequence Number=SeqID_3575
METCEVTFYETLPSPSPIFELVSPDQMTIFMEEEHDDTDWGDPELSPPAAPVKPASTTSVDGLDITSDEYITPIQIMHG

SEQ ID NO: 46951 - protein, 151 aa, Zea mays
  Coding DNA Sequence Number=SeqID_3576
MAPLVDVAGPRPRLGDVEAPPRSRSSLSSVAVVESEPLGRARRRPSAEARAESEPWCRAKRSSSSSGAEPNPSPSPESGGAEFAVFRGLARVRALGRAERSFLWRLRRGLTTCQPHSVKWHRSRSGAGGAVFLSGRSVERRSDGGHFGSVD

SEQ ID NO: 46952 - protein, 114 aa, Zea mays
  Coding DNA Sequence Number=SeqID_3577
MGKSKKGGSSSHHSGDKWKREPTSPSEDFGDSEYSEEEFSSESEGSPVRASPPASSNDSDDSQGLATEGGGDGDGGDNDDGGDDDGGGDGCEGDGKSGKGDGEGGSKGSNKASG

SEQ ID NO: 46953 - protein, 289 aa, Zea mays
  Coding DNA Sequence Number=SeqID_3578
MEKLHPLPLPAAEAAWACQALLTVGEAVEAGTRRVLDCVHLLAGPLLPTPVRLLVRATLWRGWRGFRTSNEVLGLFIRGDVEVCLPEQLFGGNGCFLEYGSDGGRVIGSPIEVFNHRRLGDFGNAVPHGLKPLEMSEPLQCILPQDNGQVRSHHVLRRPGGPGDSCVDGRPTARVLLGLVLVDVGDLEVGGPLDGTETWTEIENSACVFLSAFVLSVLGRGVGSVSSRPSPERATSRGCNRLNAGGATSCWDTMIPVILLSAPYLTFVPSVALSVDGALRVLPVVDGVV

SEQ ID NO: 46954 - protein, 35 aa, Zea mays
  Coding DNA Sequence Number=SeqID_3579
MKLPSPQTQCNLIGNPESPSPDFSRSSENVDQQNS

SEQ ID NO: 46955 - protein, 168 aa, Zea mays
  Coding DNA Sequence Number=SeqID_3580
MIFTLSNHTFENQYCVPFLGPQFSLFQIILPKINIVSPSWAKCNMMYDAYAMQNDVMMLCYVDDICSERYTHIPHNIFVSALILRCKLCIPLGTSLELLRLLLRRYKLCIPLGTSLELLRLLLRRYKLCIPLGTSLELLRLLLRRYKLCIPLGTSLELLRLLLRRYQR

SEQ ID NO: 46956 - protein, 90 aa, Zea mays
  Coding DNA Sequence Number=SeqID_3581
SETTDQAKDGGKKSFEVPSAREKVKEAEEPKAKGEEEGLQSQGQGSAQSECTGLSGGAPDSVRWCTGQCPVRQANSGEKTALGNSSATFG

SEQ ID NO: 46957 - protein, 99 aa, Zea mays
  Coding DNA Sequence Number=SeqID_3582
MGQIKAIEIKETAEKGRNRKSETAEKKRNINHGFVGILCWNSDPVANPPSTELLRRKDPDGHEMEKDVGAKKCQSRSSQADLMIYESNIKAQACEMLWM

SEQ ID NO: 46958 - protein, 134 aa, Zea mays
  Coding DNA Sequence Number=SeqID_3583
MAIHGVHWRYSLHALHGCDSFEKYTDNSWASPQWAWARDGLVWTYIRAVKRSRLEGSDESEYSSDEEDSSDSSEEGGGGDGGDDDDDGGDGDDGDDGGDGGSRGGNSGSRGGNGGSSRGSNGGGSSKGSNKASG

SEQ ID NO: 46959 - protein, 110 aa, Zea mays
  Coding DNA Sequence Number=SeqID_3584
MHGQALGDMLMDSWSAAMRRQQHAGSSIRVVERASMRAPSDELEGKHRRPAASCGVLHCCVWKAGVEDFLFLKYTEYMDVRQARYRFESPCTSLERHAGGYNSQSAQKQR

SEQ ID NO: 46960 - protein, 258 aa, Zea mays
  Coding DNA Sequence Number=SeqID_3585
  Subcellular localization annotation: CTP_CleavageSite=52; ConfidenceScore=5.43e-01
MPRSTSGLGLGRRSPPRPTSGLGLERRSPPRPTSGLSLGLGRSHNLARPQPRPQEKSPPRPTSASDRLRHRGYIITLPLASCLRLRRNKTDVPSRLLRQQTNVLCLSARNRRNNFGEVGCVQPKGCSVWVHRTVRCCTGQCPVRQVGVCQLAALGTSTTVYDYNSPDCPVSQQSAGPTVGSVIRARRVAVPMVRRGHRTVRCAPDSVRCANGSEPPTVGFAKEGKKFAPDSVRWCTGLSGAPGDRRQELPSWNALNGS

SEQ ID NO: 46961 - protein, 49 aa, Zea mays
  Coding DNA Sequence Number=SeqID_3586
MNVCELTLAVSHPPTGQEQIYLNQDTNTKKINLIKERIRVTVKEGNRQG

SEQ ID NO: 46962 - protein, 276 aa, Zea mays
  Coding DNA Sequence Number=SeqID_3587
MEARAHMSYNRRTGYCVQKNRIATCANGTSSRDYRTSATTRGNPAHDPTVPIKCDGHGARDTSGRRSGRRFASVMMSASKKGSGKGIFRKAPSQRRKRALSPPTDQGFEDCALRGSTTALEHSGSEPFTDQGIEGRPLGREKDTIHRVPTTVPTTKVKLTTVSHDLPRVQPRAQQGAPPRPTLGLGLSLGLGRRSPPRPTSGLGLSLSLGRRSPPHPTSSFGLSLGLGRSHNLARPQPQPQPRPREESQPRPTSASPDLGLGPTAPQGIHHYPTPS

SEQ ID NO: 46963 - protein, 106 aa, Zea mays
  Coding DNA Sequence Number=SeqID_3588
  Subcellular localization annotation: CTP_CleavageSite=22; ConfidenceScore=5.46e-01
MDGDATALASPSAGTFPDKHPRSKNSVQRAPGDSIATSTPPEKEVVDPRTAAIPFYWSVRRRRRLSSLSAGSASAGRRSTGVRRFADRSTLTRSASLELQVPSQLS

SEQ ID NO: 46964 - protein, 345 aa, Zea mays
  Coding DNA Sequence Number=SeqID_3589
  Gene Ontology: Mol. function=phosphoprotein phosphatase activity; Cellular component=cytoplasm; Biological process=embryonic development ending in birth or egg hatching
  Homolog annotation: Hit_ID=P22198; Match level="QueryCoverage=91%, HitCoverage=99%, E-value=1e-180, Identity=96%"; Hit description =Serine/threonine-protein phosphatase PP1
  Pfam annotation: Domain name=Metallophos; Domain location=55-250; Score=155.4; E_value=1.6e-43; Accession=PF00149.19; Description =Calcineurin-like phosphoesterase
MMDPALLDDVIRRLLEVKNLKPGKNAQLSESEIKQLCAAAKEIFLHQPNLLELEAPIKICGDVHGQYSDLLRLFDYGGYPPQANYLFLGDYVDRGKQSLETICLLLAYKVKYPENFFLLRGNHECASVNRIYGFYDECKRRFSVKLWKTFTDCFNCLPVSALIDEKILCMHGGLSPELNKLEQILNLSRPTDVPDTGLLCDLLWSDPSNEATGWAINDRGVSYTFGPDKVSEFLEKHDLDLICRAHQVVEDGYEFFASRQLVTMFSAPNYCGEFDNAGAMMSVDETLMCSFQILKPARKVLGGSTNNKSGFKPVMGIIGSGHHHAVRTRRKGKNKIEMSWDKARE

SEQ ID NO: 46965 - protein, 100 aa, Zea mays
  Coding DNA Sequence Number=SeqID_3590
MRIRLKTMKMKINRMSHPQEEDNDQGGYDHDKDNEDEQRSPGSKTATPQESTQAISKRSPPHTGWKDAFKRFRNGVLGQARGNSTPSPRNGGYDHLVPPS

SEQ ID NO: 46966 - protein, 56 aa, Zea mays
  Coding DNA Sequence Number=SeqID_3591
  Gene Ontology: Mol. function=binding; Biological process=hypusine biosynthetic process from peptidyl-lysine
  Homolog annotation: Hit_ID=Q2QXB3; Match level="QueryCoverage=92%, HitCoverage=16%, E-value=4e-13, Identity=71%"; Hit description =Deoxyhypusine hydroxylase-A
MTATSAFESSPEMERFLCERLLNTEQPIAERFRALFSLRNLRGDAPRRALLQELIE

SEQ ID NO: 46967 - protein, 23 aa, Zea mays
  Coding DNA Sequence Number=SeqID_3592
MAVTRYAGGSTNRIETSAMNPRG

SEQ ID NO: 46968 - protein, 245 aa, Zea mays
  Coding DNA Sequence Number=SeqID_3593
  Gene Ontology: Mol. function=DNA binding; Cellular component =chromatin; Biological process=regulation of transcription, DNA -dependent
  Homolog annotation: Hit_ID=Q6K709; Match level="QueryCoverage=99%, HitCoverage=92%, E-value=3e-74, Identity=65%"; Hit description=DNA -binding protein-like
  Pfam annotation: Domain name=DUF296; Domain location=62-179; Score =193.0; E_value=7.6e-55; Accession=PF03479.6; Description=Domain of unknown function (DUF296)
MKDPEPSSPAVGAPGDHGADETNESGGAVVAAPSRRPRGRPPGSKNKPKPPIFVTRDSPNALRSHVMEVAGGADVADAIAQFSRRRQRGVCVLSGAGTVANVALRQPSAPTAVVALRGRFEILSLTGTFLPGPAPPGSTGLTVYLAGGQGQVVGGSVVGTLIAAGPVMVIASTFANATYERLPLEEEDEGPAPPMASGGGADPLMGGGLGIADPSALPMFNLPPSNGQLGGGDGFPSWAHPRPPY

SEQ ID NO: 46969 - protein, 56 aa, Zea mays
  Coding DNA Sequence Number=SeqID_3594
MTFMRTRAVSRVPLCGDEDDGHDYVYGNGCPCCNHCSGEDEVVEEDFQEFQEYDEF

SEQ ID NO: 46970 - protein, 105 aa, Zea mays
  Coding DNA Sequence Number=SeqID_3595
MKTSVPGGRTAAAMTSGRMLLLGGPRPCPNSRGKDGQKAVELEGPGKGDTPKGILPREGTRLRAFLLIRGSKAGPPEGFNSRLISRGAYTHYWSEGRNADPPIGS

SEQ ID NO: 46971 - protein, 126 aa, Zea mays
  Coding DNA Sequence Number=SeqID_3596
MGKSKKGGSSSHHSGDKRKHEPTPPSEDFGDSEYSEEEFSSESEGSPVHASPPVSSDDSDDSQGIAAEVWTYVQAVERAGLEGSDESEVSSDEENSSDSFEEGGGDGDGDGDGDEGGGKGSSKASG

SEQ ID NO: 46972 - protein, 97 aa, Zea mays
  Coding DNA Sequence Number=SeqID_3597
  Subcellular localization annotation: CTP_CleavageSite=31; ConfidenceScore=5.14e-01
MASSPSSPAQGARLLPYHGRDAPNRPPSSPSAGAREPCPLCPENAELEHTPLLPRWTPGRPPLAHGRQIRRAEQHLCSCFLPPMSTDAMELNLSPPL

SEQ ID NO: 46973 - protein, 48 aa, Zea mays
  Coding DNA Sequence Number=SeqID_3598
MSEEKKMTEEKKITEEKKLYEEKKAVDPFIADFYESMAKTNTEKYMRK

SEQ ID NO: 46974 - protein, 221 aa, Zea mays
  Coding DNA Sequence Number=SeqID_3599
MPPRTRLTARKSTGPIGVPRHQLAPRHESSSSGSNDPIGDLEARVSRLQAALQHRTDAWVADGDRINELRRDIRHLQDQLADRDLALDWAVQSRLLMCAKEARAQARVKELSSTVDNLQVYCNTLHEEVHILYSQLHPSEPAPPAEAEAGPSHVAGRALGGELDLFEPPPSLRCRPGLEDRTQQELLGDGMLPQNPTSSSSHVSRGDRCLGECHRRQYPLP

SEQ ID NO: 46975 - protein, 216 aa, Zea mays
  Coding DNA Sequence Number=SeqID_3600
  Homolog annotation: Hit_ID=A2YGC2; Match level="QueryCoverage=75%, HitCoverage=69%, E-value=1e-10, Identity=28%"; Hit description =Putative uncharacterized protein
MERSEEPEPEGWIARPITRDAARGCYFHDALDTLLCRAFNQQTWSIEYHCVVYQHHRGLYPDQWEATCLVHRPDDDLRGAEAFLEHYSITERDTVETAMQDAARRALSQYYSLFSGVADGLDLKYYPRRSSGSAGGVIVSPVGEGNPRLNSMVNLAAVLNTELDHALDELGKCAARYYLDGGSPAPVGIQQPYRSPPCGRFDYGTPDCRTQIDLDP

SEQ ID NO: 46976 - protein, 317 aa, Zea mays
  Coding DNA Sequence Number=SeqID_3601
  Subcellular localization annotation: CTP_CleavageSite=28; ConfidenceScore=5.07e-01
MNRSCRLRHRWRGSSSTLGVNSTFGEVRPSLGRQHGRRISAPKDDVSATPGLSPPGSPPGIRPEQMARPAALKLQPAVPRGHQPGSWPRQLDSGAGPASGRPGQAPADEVFFSSQLCLCPHCHRCLRLWLIEERPRVPLTKQEKPRAARPTEPRDSYASGIRIPHSSPLHEATHTWLSGPDSHNEQTPAFKVPLQTELRFRPRGYEQPPHRRACGATSSGRLASDLCSSSEGPRTDAVAGRLSFASPLKGREPDIKAKELEELKEEVASRLVREVELWLTSLSAPARMMKILEAEGGAEAAAQLASPHPGTGGHRLG

SEQ ID NO: 46977 - protein, 249 aa, Zea mays
  Coding DNA Sequence Number=SeqID_3602
MWPTSSYESPGPSFYRRKERVQGNDGPSCDVVGPSPRLGEAEAPPRSRSSLSSEVEVESEPQVGRGGDRLPRPRLSPSLGVGRGGVRRLLEPRLSPSPVVGRGGVRRLLEPRLSLSPGVGRGGVRRLPEPRLSPSPRFGRGGVHRPRPRRGPSPGVERGRASYGARGPVLAATILALNAPAIWLVGVAIWPRLLLCKDWASGEPKLCADGGYQLRLGVLGVPLIMVPDKTYTEIGAKWPRSWAVNWVRH

SEQ ID NO: 46978 - protein, 94 aa, Zea mays
  Coding DNA Sequence Number=SeqID_3603
MRDSEKQRDMGVRDLFKDLRSGRVHQMAASTVGSLDTSSRTVPIQSRINLIFNRLLGAHLKEREMWPTLQRAKIQGKLGESTTLKWLPPRKENQ

SEQ ID NO: 46979 - protein, 37 aa, Zea mays
  Coding DNA Sequence Number=SeqID_3604
MDSSTPTPATKSPTIPPTVFQGFGGGCVLGGGRGRIF

SEQ ID NO: 46980 - protein, 860 aa, Zea mays
  Coding DNA Sequence Number=SeqID_3605
MEVVELVPCARNKWGNWHEFWFYVAKGTVEDHPGLPVAEMCSHYYSPYLSFEVAEEDADEGALRCAIGLSSGRDLVEEFVAYGVWPLAHGWALGEVCPRQMPSHGGKLVRSPAFALDLHSRDPAAFVREAEDGAVRIVGRYVPKTEGQRSWDICGSNDRLNRVFELNHLPYGGYPGQDDVDRRGKKPVVETGDDPAPAAAPSSKKRKLGIAVGGLGVSDGFARELMRTCAAPGGRMSSPELRESSARMLRVTGGWWPKNVPIPRAAGEDFFTSRMVRDWKVFPYGRNIAVVVSAVMDKDCQGAAQKRQAVVRLHEARPKRPRGTAKAAAPGGSQPPLAAKSAAAPESSRVPEATKVARGLPPPGKRVTDFATNISVEDYLVGSDEGQLVVVPPAVATVAAAVVPRAKGSALSADGEIPALTAVRDEAGAVSRRLKELKEALSQVADFADRAASGALTVVVSAEVERLRTQHADAVREKSATDSKCRKLADKVATLEGERTDLRRQLAEERKEANEALAKAQSAQAEGSLARQRAEELEGRLNALQTRVERAEASTRSEAERTRKQLMDSYHELGARTADFEVPDREPGLRCLEWIQEELLALPAIVEGFMSYASLVTCEGAMNALSHEGCRHYEVFDQADEDFERDIYKVEDPVAARGERVDDFGALNSAQPDSESNPMVAASETAPELPPEAVEGVPDVPATTAVGGGPSPTAAPGAEDPGKMAAEPAAEDPTTAGSSQVQDFGPTHATATTNFLAASTVDDGNKSDGFASKFSDFGDSRSSVEWTEESSDEDLDYFAALDVAAAEASPHAADAKVVPGSSAGRRRRRAVAKRRVSEADSGRFRVSRAGRQELLSLPAA

SEQ ID NO: 46981 - protein, 78 aa, Zea mays
  Coding DNA Sequence Number=SeqID_3606
MATAATKADRPKWGGERLGQRLGDRGREGARPRHGGELGGMGAWRKELTAGKAGSHGGIRRGLLPCEKKIGKKWWLGG

SEQ ID NO: 46982 - protein, 186 aa, Zea mays
  Coding DNA Sequence Number=SeqID_3607
MGERAQRAWSPWKEMSQRPGKEEPCARTGKTEGRDGGGKWRGALASCCWRYKKGGGRANMGAGRELVHAMDVPAAKPEGGAPMGASPTAPGKPGRRELTGRGTEHREQRSGHGRSSACQRRWAPCCSRGEEGHCCCAREKKTGRKKVAARGMLEGREGVVHQLVMEGVNQSSLEAILPLGIRVDIF

SEQ ID NO: 46983 - protein, 121 aa, Zea mays
  Coding DNA Sequence Number=SeqID_3608
MGLAIIPQVLFPPRAPCRGSNYHWRRRRLSLHQGLLQQPGCPMVVQGASLAEVQGKAASQTPPPAEARGRSPAPGVGKPSPSAGDDAVSPGDWTDLASCDAVDAPPDEKAKRGSQTYEQCT

SEQ ID NO: 46984 - protein, 298 aa, Zea mays
  Coding DNA Sequence Number=SeqID_3609
MRSSTSPNENFECEIFKVEDPVVKDSAGALFDRMWGPHGREAVMERSDRAREQMARAEDVEDLGDLNDARPEAEVNPVLPEAEVDPALRSEAVEGSSAGPVSTVSGEGSLPAPAPTAEDPPKAVAELAAEDPMAAPGPAQVQDFGPAHATATDTANFVTASTVVAENESDDSVSKFFESDDSGSSVVWTEESSDEDLDYFVALDAVATEASQRVMDAEVFPGPSAGRRRRRAVAKRRVSEVEGGRLRVDRAGKWELLSSPVGVSVGEGELRSLFEGEELRIMLFNYREMGIIPMVEPM

SEQ ID NO: 46985 - protein, 46 aa, Zea mays
  Coding DNA Sequence Number=SeqID_3610
MVVCMEAGTRAGGTGFKGKLLGIFLGKGSGQSEEKLHYPMHAEDWV

SEQ ID NO: 46986 - protein, 276 aa, Zea mays
  Coding DNA Sequence Number=SeqID_3611
  Subcellular localization annotation: CTP_CleavageSite=2; ConfidenceScore=5.44e-01
MSSSSLKRRVFPSSKPPDGGYPPPFRLLVGGTQLHGSWYLSAIVRLQGFSSGSLVAPFRRWPLKTVTSSSWMGRGKPGCDPALSIGCVRHPCWGGGRGEPGLYLACGSANHLLFQLLVVAIVLPRYNGVVLQSCRGRGNRLSRLLGPDSRRSPWSAAPPEAGSGFAEDVVDAEGATAPFSVKTRACRIRSSCSVCFLRPPRPEENTLAALAKLRLFSSCFEHLGSVGNRDVCVSESCFSRKGRVRYPYPRGVGIPRLGRPCRLRVLSPVHEALSPT

SEQ ID NO: 46987 - protein, 263 aa, Zea mays
  Coding DNA Sequence Number=SeqID_3612
MTGPKNQTYQEKCPKLNDDECFLARIEGDDARCDRSFKKYQDSAVTSYEHLDRRVGELVTHMDMLETRPPPQAPAPAIGAVVFSPAEDDDDGDRGVDASLRRCLTYNDSYVKIKFSIPSFIGSYDAEAYLFWEMMMERVKKRNCELALFPLLIDVIFKKLQRLDQGDMSVHEYYQELQKELKDCQQRRSNTFVPQQPAALAKASSSLGIWTSTPPSTGGTHSAAPSASQGHNNNEDTIGANIAGANDGNEEVLGTTAIETYKA

SEQ ID NO: 46988 - protein, 107 aa, Zea mays
  Coding DNA Sequence Number=SeqID_3613
  Subcellular localization annotation: CTP_CleavageSite=38; ConfidenceScore=5.07e-01
MARARAYKASRDLDRTPPHALDLTGAQPHRRLPVHSVSAATRSPCYRRPANRTLPNPVQPSEKTEHTSVKLPEQGIGVCFAGEASPRSPDSTRPPASVDQVILYSIL

SEQ ID NO: 46989 - protein, 386 aa, Zea mays
  Coding DNA Sequence Number=SeqID_3614
MMHGYPELPLFIEQLLGTGVLSEIAPLLDCDQALHQSFYFQAPGAATVACSAAVAPSPAPSARCAPSLLPLHVSTIVGIEHAATAVDPRRHHGSSFGGVPGNFAGPWGAHWWEVVVELEFKAWIWGIRVLAGMAAPPSQCATALPAAGARKRSAPDFCKDSHVCDLWRHLNTGRNKPPRVRRRLPRHSTPARAPAPRPSQASALVRVRDYKTPRSLGRTPPHALKPHRSSVRRRLPIRDVPAATRAPCHRRPASPAIPNPVQPSERTVHVSVKLPERGIGLCFTGEAGPRSPDFNRPPATVDQGTPCTSLRFLARLDSLDLHEAPYALGLNYAAVDRPEHTPPTSSPACSRGPGDSGHPRRRAVPRRDRQTLPEPTLHFAGTPSPP

SEQ ID NO: 46990 - protein, 160 aa, Zea mays
  Coding DNA Sequence Number=SeqID_3615
  Subcellular localization annotation: CTP_CleavageSite=20; ConfidenceScore=5.22e-01
MAAPRPGPSPARRGPAPPFPCSRGAAPPLPYPAWRLAPAHPCAAAPVPAPPRRGVAALPLPFPVRQCAPPLPSSPRCGAAPPLPSPARAARRLTPAPVRRRSPRLRRGPPRPCSLPHGGSTPAWPRRGGDEDDGFGYDYGNGEDEAVEGDFQEFQDYDEF

SEQ ID NO: 46991 - protein, 719 aa, Zea mays
  Coding DNA Sequence Number=SeqID_3616
MPSRGGMLVRSPAFALDLHSRDPAAFVREAEDGAVRIVGRYVPKTEGQRSWDIRGSNDRLNRVFELNRLSYGGYPGQDDVDRRGKKPAAETDDDPAPAAAPSTKKRKLGTAMEGLGVSDSFAMELMGTCVAPGGRMSLPELRESSARMLKVTGGWWPKNVPIPHAAGEDFLHLAWIIRKLRKSAGRSSGCPEARPKRVRGTAKAAAPGGSQPTLVVKSAGPRSSKVSDVVKAAGAGGAKSTSVGAAKARELPSPGKRIADFGTDISVDDYLTGSGEGQLVVVPPAVATTVSATVPGAKGSALGAGDEISALTAVKDEAGAVSRWLREASQWLSQAADFADRVASGALTAVVSAEVERLRAQHADAVREKSAADSKYRKLAEKVVALEGERTELQRQLAEERREANQALAKAQSAQAEAKLAWVEGSLASQRAEEWEEWFNALQARMERVEASTRSEVERTRKQLMDSYHELGARTADFEVPDRESGLRCLEWLQEELLALPTIVEGFMSFASLVTCEGAMNALSHEGCRHYEVFDRSDEDFEREIYKVEDPVVKESAGALFDRMWGPHGREVVRERSDRARGQAARDEKVEDFGALNSVRPEAESNPVAAGAEVAPAPPPETVEGSLAAPAATASGGGSSPTAVPRAEDPPKMATEPAAEDPTAAGSSQVQDFGPAHATATANFLAASTVDTGNESDESASKFSDFGDSGSSVEWTEES

SEQ ID NO: 46992 - protein, 144 aa, Zea mays
  Coding DNA Sequence Number=SeqID_3617
MDKDHQGAAQKRQATVRIHEARPKKQRGTAKAAASGGGKPPLAVKAGASAPSKGAGGNGGRRRLQVNEGGRPRPAEWAEASKAARALPLAGQNVLPDFGTDITVDDYLGCRTASGALTAAVSAEVERLRTQHEDAVEEKSASHS

SEQ ID NO: 46993 - protein, 88 aa, Zea mays
  Coding DNA Sequence Number=SeqID_3618
MHGEGGCSYQSARGRQPALAALGLGDDGARHSGSGTAALGLGLGDGSARPRGRQRSASGLRTVAHGLGDGDTVDQPGGATVSARSGVS

SEQ ID NO: 46994 - protein, 83 aa, Zea mays
  Coding DNA Sequence Number=SeqID_3619
MNPPCAVAKLHPHLNAAPFNLTVVADGELGLRWALSVNAAAVACLVTWSAPPSKGYEGEDDTRQCGPSDREWVVTIKSRYLFT

SEQ ID NO: 46995 - protein, 174 aa, Zea mays
  Coding DNA Sequence Number=SeqID_3620
  Subcellular localization annotation: CTP_CleavageSite=52; ConfidenceScore=5.29e-01
MAVILGKLGSARTWSFKPRPEAITSNHRRGLRVGSSAAPSLLPRDGREERVRATKVGGRPVQESRRFGEVAARFGCNDPRARFVAIRPAELGMTRAGLPSGAHTSVVCHDALTTGTHKAEVCWGRRPDEAAPFARDCERTRRKPTADTDGTGPRHSGSRGRTGLRGSGPRGREK

SEQ ID NO: 46996 - protein, 137 aa, Zea mays
  Coding DNA Sequence Number=SeqID_3621
MVRERRTQTNTMSKNTRDTRFIPRFGHTTKVPYFLVEAPTKSRVSFNPNPPFADHKGQAHTLIFAQTSGLTGRLQIRGQRGQRPAELPSGPVQPVLTNEFRRENPSSTARRQVQLVYGQRGSQLKLSSAEVEKAQLS

SEQ ID NO: 46997 - protein, 398 aa, Zea mays
  Coding DNA Sequence Number=SeqID_3622
  Gene Ontology: Mol. function=nucleic acid binding; Cellular component= intracellular; Biological process=regulation of transcription
  Homolog annotation: Hit_ID=A2WLN2; Match level="QueryCoverage=99%, HitCoverage=85%, E-value=7e-99, Identity=65%"; Hit description =Putative uncharacterized protein
  Pfam annotation: Domain name=RS4NT; Domain location=68-105; Score =12.5; E_value=0.053; Accession=PF08071.3; Description=RS4NT (NUC023) domain
  Pfam annotation: Domain name=zf-C2H2; Domain location=110-131; Score =15.7; E_value=0.17; Accession=PF00096.17; Description=Zinc finger, C2H2 type
  Pfam annotation: Domain name=zf-C2H2; Domain location=6-28; Score =27.9; E_value=3.8e-05; Accession=PF00096.17; Description=Zinc finger, C2H2 type
  Pfam annotation: Domain name=zf-C2H2; Domain location=83-105; Score =15.5; E_value=0.2; Accession=PF00096.17; Description=Zinc finger, C2H2 type
  Pfam module annotation: Pfam domain module=RS4NT::zf-C2H2::zf -C2H2::zf-C2H2; Domain location=68-105::110-131::6-28::83-105
MATNRYVCEVCGKGFQRDQNLQLHRRGHNLPWKLKQRNPKEAVRKKAYVCPEPGCVHHDPARALGDLTGIKKHFSRKHGEKKWKCDRCAKRYAVHSDWKAHSKVCGTREYRCDCGTHFSRRDSFITHRAFCDALAEESARAVTAAAAVVVGQQQAAGGGDGSAGLHLPPDVLDPSQTLGGGHGMSLQELCLKREQQQQFAPSSWLTAHHQQELPGSARLLEQHEYIGSSTPESTAGLSGFVGLSPSAAGEAAASAHMSATALLQKAAQMGATLSRPSNQEQMASTHSHSSTTNAGTGSASAAAAAAINVPGTGAGAFGFGAPHHFGAEERTTTSADRDACGNAAAVSVVGANDGFTRDFLGLRAFSHGDILTMAGFDPCMSSAAYEQGHHQSSKQWHV

SEQ ID NO: 46998 - protein, 690 aa, Zea mays
  Coding DNA Sequence Number=SeqID_3623
  Gene Ontology: Mol. function=DNA binding; Cellular component =chromosome; Biological process=regulation of transcription, DNA -dependent
  Homolog annotation: Hit_ID=Q9LEF5; Match level="QueryCoverage=100%, HitCoverage=100%, E-value=0.0, Identity=81%"; Hit description=FACT complex subunit SSRP1
  Pfam annotation: Domain name=HMG_box; Domain location=608-676; Score =94.3; E_value=3.8e-25; Accession=PF00505.10; Description=HMG (high mobility group) box
  Pfam annotation: Domain name=Rtt106; Domain location=409-554; Score =189.3; E_value=9.8e-54; Accession=PF08512.3; Description=Histone chaperone Rttp106-like
  Pfam annotation: Domain name=SSrecog; Domain location=234-486; Score =480.5; E_value=2.2e-141; Accession=PF03531.5; Description=Structure -specific recognition protein
  Pfam module annotation: Pfam domain module=HMG_box::Rtt106::SSrecog; Domain location=608-676::409-554::234-486
MTDGHHFNNILLGGRGGTNPGQFKVHSGGLAWKRQGGGKTIEIDKADVTAVTWMKVPRAYQLGVRIKAGLFYRFIGFREQSFLKIRFYLSVKMNGEDVSNLTNFIQKNMGVTPDEKQLSVSGQNWGGIDIDGNMLTFMVGSKQAFEVSLPDVAQTQMQGKTDVLLELHVDDTTGANEKDSLMDLSFHVPTSNTQFVGDESRPPAHILWETILKFADVGSSEEPVVTFEGIAILTPRGRYSVELHLSFLRLQGQANDFKIQYSSIVRLFLLPKSNNPHTFVVITLDPPIRKGQTLYPHIVIQFETEAVVERDLALSKELLVEKYKDRLEESYKLIHDVWLSKHLGPVWFVAKCATLCLRYFTITWTVTGLIHEVFTKVLRGLSGAKVTRPGSFRSCQDGYAVKSSLKAEDGLLYPLEKGFFFLPKPPTLILHEEIEFVEFERHGAGGASISSHYFDLLVKLKNDQEHLFRNIQRNEYHNLFNFINGKNIKIMNLGGDGQGASGVVTDVLRDTDDDAVDPHLERIKNQAGDEESDEEDEDFVADKDDSGSPTDDSGDEESDASDSGGEKEKSSKKEASSSKPVQKRKHKGRDDEGQEKKKPKKKKDPNAPKRAMTPFMYFSMAERGNMKSSNPDLPTTEIAKKLGEMWQKMSGEEKQPYIQQAQVDKKRYEKESAVYRGEATVDVDSGNESD

SEQ ID NO: 46999 - protein, 80 aa, Zea mays
  Coding DNA Sequence Number=SeqID_3624
  Subcellular localization annotation: CTP_CleavageSite=46; ConfidenceScore=5.33e-01
MPAAGPARPSIAPRSAVRLIIVYRGLVLGLPAARCSSSRAGAVDVSLGSGSGSSISINLPPCRSGCGQRNWFSGTEPCVR

SEQ ID NO: 47000 - protein, 299 aa, Zea mays
  Coding DNA Sequence Number=SeqID_3625
  Gene Ontology: Mol. function=protein disulfide oxidoreductase activity; Cellular component=cytoplasm; Biological process=cell redox homeostasis
  Homolog annotation: Hit_ID=Q5SMY5; Match level="QueryCoverage=39%, HitCoverage=94%, E-value=7e-40, Identity=75%"; Hit description =Monothiol glutaredoxin-S2
  Pfam annotation: Domain name=Glutaredoxin; Domain location=214-272; Score=30.6; E_value=5.9e-06; Accession=PF00462.15; Description =Glutaredoxin
MKQSENRSEQFAKSSRAGAAHSTVVHHRIRAGTANTCGGTQQGEVEVEATTGQLEENTITAHHGSSWTVNGKDDTGTPVNRDRDASTNGLAHGEAGLEFSLGRAGENSAHCAVRTATATRSVEWRTWRRVELMASLPIRFRPGHVTVTQPPAPRIPRQAVTGPPDVTFPVTPPGPPVESMQAVGIRRRGLTIDPAGEEEAPAARVGRLVRESPVVIFARRGCCMAHVMRRLLAAVGAHATVIELGSAEEEEEELAAAEGGGVPALFVGGDPVGGLEGLMRLHLSGRLVPRLRELGALCA

SEQ ID NO: 47001 - protein, 178 aa, Zea mays
  Coding DNA Sequence Number=SeqID_3626
MEALGSSVGWSRETTVGLVDAASRAAGHSDHERPPDSDELLIADERAGIAYGTRIRRYFHGPSRCADAKTATCAPRSGRVARPRSGRASGLGQRAPQVRLLSGGGRVRPRPRGRDPAAGSGAGHGGAGTTRPRAVQQRLGAVELPGTRIDSAAAASVLPDSSGLAAGGAYDVVAVVCG

SEQ ID NO: 47002 - protein, 263 aa, Zea mays
  Coding DNA Sequence Number=SeqID_3627
MSRPSSRRQPHQWVAQHVVCREGGAHVLGDSGEGKDLPVRFEASGARWRGAEVVAAGEGFSVNEIANSARTPGPPSSGLNGWFSSSVNESPRAVAPARKPLLKLLRRPGRRSSLLLPERATASHPSAFCCSAGPPIAWGCSYLRRWNRSSVCNGTSNASVFVHCGCRGLNITVCASESCFSRKVMSEVSVSWRRRSPSARSALPLTRTLTRPWDSVTDAVEKARRIALAEKLPNVKTCSVRGITYPNVSYLWQKVMSEDPLSK

SEQ ID NO: 47003 - protein, 349 aa, Zea mays
  Coding DNA Sequence Number=SeqID_3628
MPGGILRGAGRCLSPPDVGGIKGLPTHAEAASRLASPSAPARSCVPPTTKRKDGGYPPSGGLEDGKTRCIREHEDTVAFQEGHPPFKGDSPYLRPQPSWAESSPTRSKVLPLRRGGWVPHVMQAGPEQKKPNRRARCVQPPSGYKRLSTFAQTSGRKGEQPCRRHATTPSGRASPTPNTPGMEAQTHASCNRRAECFVHATAPPPTPPPRLLDCGTNTATRGDPAHDPAAPAWRDGGASGRRRERRFAFAIMTASKKGPGKGDTPEGILPCEGTRLRASLLIRGSKVGPSEGFNSRLRARGLHTHYWSEVRRSAPRKGSTAASGYSGSAPTTDQGFEGWPPKGSQPPQT

SEQ ID NO: 47004 - protein, 201 aa, Zea mays
  Coding DNA Sequence Number=SeqID_3629
  Subcellular localization annotation: CTP_CleavageSite=45; ConfidenceScore=5.31e-01
MQPGCTPPPAVTQDGDLRLDGGGKRAGLRPLPLPRPRGFSSSRPRWRMRRVGGLPPRGSAALFFPWRLGKNGILQFRGDFLQPCRGRRTVAAQLGCNIPPPPSHSRRGRQRGPAGALRSGPLFGFNSGFASLEREREREPSGGRVHPGPWLLLQRSLAGLPTLVAPQARGSSSLVKETPWLLFDESKPGVAISARTEAELA

SEQ ID NO: 47005 - protein, 149 aa, Zea mays
  Coding DNA Sequence Number=SeqID_3630
MGKNNKRKREPTPPSEEFGDSEYSEEEFSSEPEGSPAPVSPPASSDDSDDSQGIAAEVWTYIRAVERAGLEGSDESEYSSDEEDSDGGEEGEDDDDDDDDDDDGGSSGGGDGDGRGGTKGGSGGSGDSTRGSSMGSTRGGGGGRGRASG

SEQ ID NO: 47006 - protein, 268 aa, Zea mays
  Coding DNA Sequence Number=SeqID_3631
MVTSSLMVGESEPGCGLFPSLSLKDFHHQGCGGDCTVPGSQTRVASEPLAAPASATAAGRSSSAGEIAKAGHRPTSNSTAFCPSLPYEFGHGRGPPSSSIRPEVSAAAVRPPGAEFVVVAAAGAGDGVPFVGLLLLRRPSPMEWGCSYLRRGNRSSVCNGTLNASVFVHYGCRGLNIRGLGSGWRPWKMVGRGPRGDRPSRLFGPDSRRRPWRRWPGRGDDVVLRSGGLRTASPSEARSNLAEVVVDAEGAAAPFQRQDPSLQDQIVL

SEQ ID NO: 47007 - protein, 85 aa, Zea mays
  Coding DNA Sequence Number=SeqID_3632
MQFFEFHKIEDPEHLFGEGNDTLPDHLGSDQWGVMIPGQNGNHGSWVKDGWFTDDDDDGYDYGNGKEEGVEVDLQEFQDFDEFED

SEQ ID NO: 47008 - protein, 119 aa, Zea mays
  Coding DNA Sequence Number=SeqID_3633
MWQNAKKSFAQMNVNGNLQNRIRIQMGQVKAIEIKEAAEKGGNRKSETTEKKRNVNHGFMGILCRNSDPVANPPRTELPRGKNPDGHEVEEVRLGDNIHMVTCERQLAVGVDGGNHHSG

SEQ ID NO: 47009 - protein, 166 aa, Zea mays
  Coding DNA Sequence Number=SeqID_3634
MERGRRPSTCADRNPSTQIDDGPEYGSGGRSTHQPYSRPWRCCREVVVEANSMGDERRGEASGFSHYLPLAAPSFCSSLRKLPVRPWRRAMRGFQGARLSFYSTTMDRIPKSALIWGDRLEEREVRATRGIRAAGPLKPTSAAEEDDMQGPPLSGRAWSGQRRLAQ

SEQ ID NO: 47010 - protein, 127 aa, Zea mays
  Coding DNA Sequence Number=SeqID_3635
MAPKRDSSKAAPSIDEAAKEALLAEKKGKALADNIPHEVFEDEVVSKKQCQDHPTLEGTLRTCSSGGVPQAPPPGFAPTEGEDAIEDGEVIGISAEDQLQLQALRIKNHNLQKQKDIFEAKRQHVTA

SEQ ID NO: 47011 - protein, 170 aa, Zea mays
  Coding DNA Sequence Number=SeqID_3636
MAKSFIIALEGLALTWYTRYLGEDQQGLGKAKVSRRSSKGVHNRKEIKDKPSWRGHSCVMGDNQRNRGVVIERNRSLGALDHQRRDLHSIKLSYLMEDRAASTINWYQISRLPMRYSFAITPTLIGQSHRSPFATYSAGPKNQMDKDKGPKLNDDECLSDGIEGDDAQDD

SEQ ID NO: 47012 - protein, 49 aa, Zea mays
  Coding DNA Sequence Number=SeqID_3637
MAVMGSTSENMYLCQVRKQQTFAIFVQRWYPRKSPNSEDDCGRMLASHL

SEQ ID NO: 47013 - protein, 45 aa, Zea mays
  Coding DNA Sequence Number=SeqID_3638
MCITQRQQIKPRMEARRASRYRVHGRRKILPKVEVKRRKNGGKST

SEQ ID NO: 47014 - protein, 66 aa, Zea mays
  Coding DNA Sequence Number=SeqID_3639
TQSDLVRSKPQGYEGWGADEDIIMSTTTPAAPPHQAPLPSLAGPNTQARAKDLNFVMLLKNEGPEE

SEQ ID NO: 47015 - protein, 70 aa, Zea mays
  Coding DNA Sequence Number=SeqID_3640
MAQALSELLDEETRLKSMSSITGVLDSGASFHVTSDQSRLASTAPVTEGTSVQTADGSTHRGCDWDLPSP

SEQ ID NO: 47016 - protein, 31 aa, Zea mays
  Coding DNA Sequence Number=SeqID_3641
MPNHLAKLTSSAGVRGPGAADELCRLSPWLD

SEQ ID NO: 47017 - protein, 170 aa, Zea mays
  Coding DNA Sequence Number=SeqID_3642
  Gene Ontology: Mol. function=microtubule motor activity; Cellular component=microtubule associated complex; Biological process =microtubule-based movement
  Homolog annotation: Hit_ID=Q2R2P7; Match level="QueryCoverage=54%, HitCoverage=14%, E-value=2e-29, Identity=76%"; Hit description =Centromeric protein E, putative, expressed
  Pfam annotation: Domain name=Kinesin; Domain location=9-156; Score= -176.3; E_value=0.0013; Accession=PF00225.14; Description=Kinesin motor domain
  Subcellular localization annotation: CTP_CleavageSite=53; ConfidenceScore=5.73e-01
MAITKPQPPPHTSLHPSPAASPPSGATLQGPARAAASAAGTHRTANRHFGETNMNMRSSQSHTIFRMVIESSGKDQTDGGDAIHVSVFVCTLHCILRSERIIKTGAEGVRLNEGKYINKSLMILGNVINQLSENGKQSMGSVGILVCVWLEAIDLIAVIGTQLQRLQSVQ

SEQ ID NO: 47018 - protein, 152 aa, Zea mays
  Coding DNA Sequence Number=SeqID_3643
MEKEPLDMVESSVRVIETHVDIIRSLVTDGVVDTSEPESVYTLKTTLFQIGDVCDMLEKCALSIKKYADSKRAKIIQDEALQYAEDDEATDDLEELPSPDLLTQADILEKYFGIEIRISPAVSVRVTLMKPSPVGVFNVAPACLADVEAGYE

SEQ ID NO: 47019 - protein, 194 aa, Zea mays
  Coding DNA Sequence Number=SeqID_3644
MARVACTLRGKRLDGGVSVLSVGVNPIFPSYGDMARTRKTARKSTGPIGVPCHQLASRHEGRSSGSNDPIGDLEDKVEQLQTELHHQNRVCAQDGQHIAELAADVRRLQDELAERDLAVDWAINSRSVAWDCEAKARARVAELSAALDMRKYMYYMRDCTQTCLPTLLQWEPDHRGQQVKDLMGSWTFLGLLLP

SEQ ID NO: 47020 - protein, 640 aa, Zea mays
  Coding DNA Sequence Number=SeqID_3645
MPSSSSSAAATPPADASSEETLSTVAAEELRAGDTVDFGASRMSSVRVQDMQQLGYFGGGVARVPGAEEVPEPESELVVFEAFFAAGWALGEVCPRQMPSRGGMLVRNPAFALDLHSRDPAAFVREAEGGAVRIVGRVFELNRLPYGGYPGQDDVDRRGKKPAAETGDDPAPAAAPSSEEARLPEARSKRARGTAKAAAPGGSQPTLAAKSAGPGSSKVPDVMKAAGAGGAKSTSAEAAKARELPPPGKRIADFGTNISVDDYLTGSGEGQLVVVPPAVATTVSATVPVAKGGALSAGGEISALAAVKDEAGAVSRRLKEASQRLSHAADFADRVASGALTAVVSAEVERLRAQHAEAVREKSAADSKCRKLAEKVVVLEGERTELRRQLAEERREANQALAKAQSAQAEANVARVEGSLARQRAEEWEERFNALQARVERAEASTRSEVERTRKQLMDSYHKMGARTADFEVPDRESGLRCLEWLQEELLALLTIMEGFMSYASLVTCEGAMNALSHKGCRHYEVFDRSDEDFEREIYKVEDPVVKESAGALFDRMWGPHGREVVRERSDTARGQAACDEKVDDFGTLNSARPEAESNPVAAGPEVAPTPPQETVEGAPDAPAATAAGGGSSPTAAPRA

SEQ ID NO: 47021 - protein, 89 aa, Zea mays
  Coding DNA Sequence Number=SeqID_3646
  Subcellular localization annotation: CTP_CleavageSite=67; ConfidenceScore=5.32e-01
MATARGIDPFLKAALPTRILKRHGQSLHRRALGSSPYDTGAGSHTSCKLTRNGRSQTTAREAARTVKASSEGWRLRLRPNICPPRDQFD

SEQ ID NO: 47022 - protein, 416 aa, Zea mays
  Coding DNA Sequence Number=SeqID_3647
MMTTGSVVWRSKSGCDLCPALSFKDLHHPCWGGGQAKPGFYLPHGPAGRLFLQHSGERALTGLAEGANFDNAAPVGRKRRQLQRVWLAGSASSVAASDAASSRLIRAWLSIHRTGDNRAARRSGITAPPRGGRCWSVREDLSGDLPVQAGAAAIRRRGAGAQVAAVVGVEVMAAREGFSADETVGATCSRTPGSLALMACPRPSCGGVGEGLSTAALALRSLLLFSRPKRRSLSLLVQWSPASHLEFVVPQALWCGGSSYPHLWNRSSVCNGTLSMGVCSLWSSRPEYLGIWNLRPLCDELEPEAAMSAWTEAESARKEASSAREHVASLAEEVQRRRLELGQVPSRVETTPRVLLLPLSTSEPAGTDLFVGSRIAYPSESYFSRKVMSEDSVVDIVEKARKSLWQKSFRVLGLVR

SEQ ID NO: 47023 - protein, 153 aa, Zea mays
  Coding DNA Sequence Number=SeqID_3648
MGKSKKGESSSHHSCDKRKREPTPPLEDFGDSEYSEEDFSSKSEGSPVHASPPVSPDDSDNSQGIVAEVWTYIRVVERSGLEGSDESEVSSDGENSSDSSEEGSDGDDDGEGDGDDGGDGDGDDDGGKGDGKGDGGKDDGKGDGKGGSGKASG

SEQ ID NO: 47024 - protein, 121 aa, Zea mays
  Coding DNA Sequence Number=SeqID_3649
MTDLTGKQRRSPRSDCRATHQGETDNSQVQPRARQETPPRPTLGLGLGRRSPPRPTLGLSLNLGLRRWSPPCPTPGLSLNLGLGRNRVLARPRLNLRRSLHLARPWAQTDRATGDTSLPYP

SEQ ID NO: 47025 - protein, 68 aa, Zea mays
  Coding DNA Sequence Number=SeqID_3650
  Homolog annotation: Hit_ID=Q6J9V9; Match level="QueryCoverage=61%, HitCoverage=23%, E-value=2e-07, Identity=52%"; Hit description =Putative uncharacterized protein
MQEVCNRTTVVHPFSFIASGTGKGDISKGILLREGSGPRALLLIRGSKAGPSEGFDSRPRALGLCAHY

SEQ ID NO: 47026 - protein, 82 aa, Zea mays
  Coding DNA Sequence Number=SeqID_3651
MTFSEPSVAHRSYCHVVGHSKKKKKKFVKKGYHPPLILKRITTFILISVDPSKTPLITKASPGAFATSLVILKSFSLDCCIR

SEQ ID NO: 47027 - protein, 51 aa, Zea mays
  Coding DNA Sequence Number=SeqID_3652
MAQSTVGSLRAVGTPDMSGGYEIDGFGYDYGAREDEAVEGDFQEFQDYDEF

SEQ ID NO: 47028 - protein, 249 aa, Zea mays
  Coding DNA Sequence Number=SeqID_3653
  Homolog annotation: Hit_ID=Q6JAD6; Match level="QueryCoverage=99%, HitCoverage=71%, E-value=3e-21, Identity=47%"; Hit description =Putative uncharacterized protein
  Subcellular localization annotation: CTP_CleavageSite=33; ConfidenceScore=5.05e-01
MDSWLPVQRDPTAAPLFSTRTQESFFRVQLSARIALRAHRLLDLPAFLSAAGAESEGHLSYLPCLLSLLTSGEFDVVDFLICEIEDTVLDGLRARPIDPALATILRSLTQQQAHMAAEQASKAEEQARQDVIQQQLFERMLLMFQTIHNRQDTLQQQLLEDRSEHRAFMTHILQHTGVQVPPVQPITLDFSTPVVGPVSAQPPVPPAAAVTTADVAVSMTALAPADSAPHPMSESVPAPASTADPRSMT

SEQ ID NO: 47029 - protein, 87 aa, Zea mays
  Coding DNA Sequence Number=SeqID_3654
MARAGIGRVNDVEAAKSAGSTSFSAETVKLNFRLELQATPTHNLDNGLCLELQVLREWVSLEVMTSTWLPVVPFSGGAYTSYSKVSS

SEQ ID NO: 47030 - protein, 200 aa, Zea mays
  Coding DNA Sequence Number=SeqID_3655
  Subcellular localization annotation: CTP_CleavageSite=41; ConfidenceScore=5.36e-01
MARAPFPLAPSPRHGVPALARLPGMAGLACACPAHGAPVVMRMMVLVLTMVMMACLRHTTQKSVIPFLSSRLAERPLRSPVTGQSSHLERLHHRLHEEQERRRQELEQQGSSFSLQQEIEFVRSYSSVLPLEAPSTPPLSALAAGVAVEGDPDNGGGDDSSSFSIDLSADQEPEGWVAQPITRDAARGCHFHDALDTLLR

SEQ ID NO: 47031 - protein, 66 aa, Zea mays
  Coding DNA Sequence Number=SeqID_3656
  Subcellular localization annotation: CTP_CleavageSite=26; ConfidenceScore=5.38e-01
MPQPATAPARLLLPVQQPASARRGAPAPARGARLARPGACAPASVHKFIYNYSNSTVRNTVDYFGQ

SEQ ID NO: 47032 - protein, 43 aa, Zea mays
  Coding DNA Sequence Number=SeqID_3657
  Homolog annotation: Hit_ID=Q9XEJ4; Match level="QueryCoverage=62%, HitCoverage=2%, E-value=3e-07, Identity=96%"; Hit description=Copia -type pol polyprotein
MTTDRPLELLHMDLFGPIAYISIGGRKISNPRDFERILGMSSK

SEQ ID NO: 47033 - protein, 78 aa, Zea mays
  Coding DNA Sequence Number=SeqID_3658
MTAVGVSEALYAKAVSPDLLPGNRQGRLMYTFSLKSVTLKLDKGSLEDMVAGVTWSSILPPGWTVEWDPASAEEEHEE

SEQ ID NO: 47034 - protein, 84 aa, Zea mays
  Coding DNA Sequence Number=SeqID_3659
MEDLSVQDDLTYTEYPIKILDTLTRSDNRADRRDPLVGRFSRGMHLACGTHLSYLTSIWGERAAVGIFRHCHRSDLGDESRAIL

SEQ ID NO: 47035 - protein, 197 aa, Zea mays
  Coding DNA Sequence Number=SeqID_3660
MVSHSGYGGYKCGHCTTAVGVSEALYAKATQLVLLANQTPQPNSCMSRGRGVDSSHRMTSQESSEGGNAHSHTDGLAQEGFPRILWEVLQGAGYATPPQYAVQLFEEHRVPRCRVRMTLEPHPLQPGWRLLDSESFGFRAKDTLESTALHVLTTFCGFHPLELSTHPIGLFPTEKEDDPMWKDRVEHAKDVWALYPR

SEQ ID NO: 47036 - protein, 43 aa, Zea mays
  Coding DNA Sequence Number=SeqID_3661
MTTNRPLELLRMDLFGPIAYISIGGRKIPNPRDLKGILEMSSK

SEQ ID NO: 47037 - protein, 241 aa, Zea mays
  Coding DNA Sequence Number=SeqID_3662
  Subcellular localization annotation: CTP_CleavageSite=7; ConfidenceScore=5.59e-01
MGAIKVKAQSTQGTRSRLARAQPQAKAADPGGFTSRPRVPSSNGRTFGSPEAQASRRSNLGQIATPTDPSGAIGSSASPNPRARTQPRRRMTDSASPDPRARTLPRPRTTDSASPDPRARTLPRPRTTDFASPDPRARTLLRPRTTDFASPDPVSVWTYIRAIERSGLEGLDESEYSSDEEDSSDSSEEGGGGDGGDDDDDGGDGDDGDDGGDGGSRGGNGGSSRGSNGGGSSKGSNKASG

SEQ ID NO: 47038 - protein, 144 aa, Zea mays
  Coding DNA Sequence Number=SeqID_3663
MEDEEEAGFSTYGGTPNKAKVVVEDEEEAGLEDEEEATVTLSMEKDALECDICCLPFQSEVFMASQITMHVYIQYILIGRLQHDALLCVKSVQERAFWMCKVLHLHRRELYARSQLPLEAILEVQISQKYKGGGFGLHFLEEGG

SEQ ID NO: 47039 - protein, 131 aa, Zea mays
  Coding DNA Sequence Number=SeqID_3664
MAQAKAAFSIDDTKDPSAEASLMGGRFSLQETDKCSWEQQAATLSARERTGPSRDDDASLKRADKDYSIGKELVRYRVRQVSTQKVSCSNRTPPGSDVKIEIEDSDEVALRLMIPTPPPPSNFFVWSSENY

SEQ ID NO: 47040 - protein, 53 aa, Zea mays
  Coding DNA Sequence Number=SeqID_3665
MAMMGSTSKKMYLCQVRKRQIFVASIQRWYPKRAPRLELREGRPSVKNFLLSI

SEQ ID NO: 47041 - protein, 463 aa, Zea mays
  Coding DNA Sequence Number=SeqID_3666
MNVTEASCIWLQSLAPHGPYKDPHFNDSFGSELMKVLPPNQTVPAAEERAEGLTGGETVPAGELVGGEESGLSRAQLTNQTGQRASPGIKEGGRPKSGEDDLGFPVKFCRVRELGKLHKLLAKLSERLARLGSDRSGLVTVAEAQVAMAGGKELAGVKEGRLAGEDDAALGVLAITCIQSPVKGYEVCKRARPRAEASYRRGLRHGRGVEHVIELTRARGVRGAHLRTSPQHWRPPPVNSLPRFEFRTPSASIDLLLELALSSKEANRGEQWRQQGYVLGGNSSVNLASHGHCAGAVITSMPLQIRPVTQRRPRRARYNGPDHTWASEPNEAALRDGVAAGLRLVPNRAGCPRPFCLCQTSDLSEGLERRVASLPSPQHLPSEGPVRQSHLVPKMSLDGGDAALARSGSAGVFDVTVDGRRTVGLRVSRSVAPCRIAGFPKSRALPIKGGGGWRCLNFAFRAP

SEQ ID NO: 47042 - protein, 77 aa, Zea mays
  Coding DNA Sequence Number=SeqID_3667
  Gene Ontology: Cellular component=mitochondrion
  Homolog annotation: Hit_ID=Q5MA28; Match level="QueryCoverage=40%, HitCoverage=28%, E-value=9e-09, Identity=90%"; Hit description =Putative uncharacterized protein orf108
MEGPKSSTVVPRNGVVEPATIAKDSIQPQVPLRLPCYDFTPVEDPTVRGAYYYHYVPHHRAAGLHAESSSAANSTSS

SEQ ID NO: 47043 - protein, 441 aa, Zea mays
  Coding DNA Sequence Number=SeqID_3668
MGRIRVAFVLLLLEEHDLAGVGALQPSLGFKDFHHTVWLHSLTNGWGGGQGELGPTSAWAGDPLLPPVFGGEGHPPAVWRRRPPAMRGKANCCFLDMVQLSVLHPGRRSCCERVAAVTDLAEGANFDNAGLVGRERRQLQHAWHAGSAGSGAASDVASCRLVRAWLSVHRTGDCRVAHRSGMSAALPVSPTAPGDRLRRPAIRRRGAGAQVAAVVGAEVVAAREGFSADETVDATCGRTPGSLALMACSRSSCGGVGEGLSTAASALRSSLLLFSRSKRRLLSLLVQWSPTSHPKFVVPQALWCGGCSYPREWNRSPICNGTLSMGVCSLWLSRPEHLGILSAEEVQQRRLELGQIVRERDQSWSHAAEAGSRAEVLRGQPAEATERLAGPESPSEAGPGSAKGGNVAEGAAAPPADVRTYRNSLSEGSAIEAVETARKSF

SEQ ID NO: 47044 - protein, 97 aa, Zea mays
  Coding DNA Sequence Number=SeqID_3669
MSKNTRDTRFIPRFGHTIKVPYFLVEAPTKSRVSFNPNPPFADHKGQAHTIIFAQTSGFKIRLNQFSKNLHTTFSDRTDWQTGSDRGEQCRNRLNRF

SEQ ID NO: 47045 - protein, 111 aa, Zea mays
  Coding DNA Sequence Number=SeqID_3670
  Subcellular localization annotation: CTP_CleavageSite=37; ConfidenceScore=5.14e-01
MGTVARTSSSVAATVDRCWVDAGTSRHLDASTTPRIAASPGMGATGLPATGGLSAISSVDGTATDGGSASHAHGSEGGVNVQDFLVHGAGGSGHLPGGGGGSGQNSHSPPE

SEQ ID NO: 47046 - protein, 174 aa, Zea mays
  Coding DNA Sequence Number=SeqID_3671
MAEARATLPRYPRTFPRPAGVIFVTESHQREASSPRTLSNGSGSGKSPAGPRKNDLTVYWALGPFVRSFTPLVDPGDIYPPQAPDLWVNLEVISPKIRGPTCGCFEEERLPAVFSCSDHSFDRSLVSCLCLREIGMKLFALRFGGQHYVINILLQRRVEVLIECLRLFNDHGWR

SEQ ID NO: 47047 - protein, 287 aa, Zea mays
  Coding DNA Sequence Number=SeqID_3672
  Gene Ontology: Mol. function=hydrogen ion transporting ATPase activity, rotational mechanism; Cellular component=proton -transporting two-sector ATPase complex; Biological process=proton transport
  Homolog annotation: Hit_ID=Q2L9B8; Match level="QueryCoverage=16%, HitCoverage=23%, E-value=5e-15, Identity=81%"; Hit description =Vacuolar ATP synthase subunit E
  Pfam annotation: Domain name=vATP-synt_E; Domain location=42-175; Score=-74.3; E_value=0.027; Accession=PF01991.9; Description=ATP synthase (E31 kDa) subunit
MELRNKTLNSNEVINRFYQRRSTSRISKGSLPTREPLSYLINERIEVTLSKLEASSKTLMISLTSSKFLSARIEYSMQLNASRIKVLQAQDDLVNKMKDDAMKELLHEYKNLLKDLIVQEKPAAEKTTAGKKPKAEKRVPAGKSAGKEDGESKRGRKKGKKSVETSRPHLSSSKWREWSSSERDRGGIAAGSCNGDRGARGWGALAMTARGDGPRGARGWGALETTARQGGAEEWAEGDGARGGLWRRTARWGGLLWATSRWASCVVNKYKLKIIPYCALNCAHTCL

SEQ ID NO: 47048 - protein, 128 aa, Zea mays
  Coding DNA Sequence Number=SeqID_3673
MGKSNKRKREPTPPSEDFGDSEYSEEEFSSESEGSPAPTYIRAIERSGLKGSDESEYSSDEEDSDGGEDEDDDDDDGDDDDGGDGDGDGSGSGGGSGGSGGGKGSTRGGNSKGSTRGGGGGSSSKASG

SEQ ID NO: 47049 - protein, 192 aa, Zea mays
  Coding DNA Sequence Number=SeqID_3674
MSSRSLMHRVFPPSEPPDGEHPQSFRLVVGGTQLRGSWYLSAIVRLQGFSSGSPAAPPRRWSPKTVTTSSWVGRSKPGCGLCPSLSFKDVHHPCWGRGRAEPELYLPHRFVGQPLLQHSRERALTGLAGGADFDNAGPIGGECRQLQRVGLASSAGSGLAPSASSRRKGGCCATCTGGPPKRSRAARAAFVF

SEQ ID NO: 47050 - protein, 111 aa, Zea mays
  Coding DNA Sequence Number=SeqID_3675
MVAALGFEWWKNTMQPATRKRESTQIQQCRLLKESARLKREKKTLDKLTDQPGNLIPIDVAEVPDLSASRDNSDLAEVDPCDPTTTSKPEAPMQSLNQLLVVTDLADARSA

SEQ ID NO: 47051 - protein, 323 aa, Zea mays
  Coding DNA Sequence Number=SeqID_3676
MAPGEAVELGGWRNHSRAADSAPGAALDALDASTGRGRRAAGRAISTQQSCTVLWDVDAGVGRPSTGRAVAGSRALDAAVAAAGMWTTTTARLDGSRQRPAGSGCWEPEPGMWTAGDVLDAPCAAAGLAGLLDGEFEMEGATAGHSPPDLNHLMGLLFNSGTGFGLIGFGFGFFGFGIRVSGFMPRPMLDDVDHGVEQKNKQKPKAYPPTWRAKCRRGNSPAGGKTKGIHREVSNASVAQKISERHNVRTTHSIDIPRCFLGNARVMMSTVYAAVRAYCLPMEWTGTPPTGCLVAACQQSGQGTLNAEAAHRLPVEWTRRIKC

SEQ ID NO: 47052 - protein, 73 aa, Zea mays
  Coding DNA Sequence Number=SeqID_3677
MATAHPKATHGHGYTATAYGEATGIIIMDRLVHEHDRPGPESRCKCNGSTRSTKATLATQDSPRLDLDAERTA

SEQ ID NO: 47053 - protein, 51 aa, Zea mays
  Coding DNA Sequence Number=SeqID_3678
MSRMFDDYYIKDCGVISALEVTQRRTDNNDHSPSSSNNPLLPARLGSAKPP

SEQ ID NO: 47054 - protein, 207 aa, Zea mays
  Coding DNA Sequence Number=SeqID_3679
  Homolog annotation: Hit_ID=A2ZA06; Match level="QueryCoverage=93%, HitCoverage=9%, E-value=8e-66, Identity=66%"; Hit description =Putative uncharacterized protein
  Pfam annotation: Domain name=Med12; Domain location=31-92; Score =91.7; E_value=2.2e-24; Accession=PF09497.1; Description =Transcription mediator subunit Med12
MVKSLPSVGVISTGQVYGVPLYGSLLIKPGVYPEQRPCNEDTRRKWIEALAQPNKRLCSLSEHVPHGYRRKSLFEGLIRYNVLLLRATWFIKVTYLNQLQTRQTPNSISVAGSDNQRSQWTKDVVEYLQHMLDEFCSKEGAFVHPSFREQSSPGPTAGTNQIKMKTKASPAAGDIEEHLVHFKWWYMVRLIQWDLTEELLVPSVLIE

SEQ ID NO: 47055 - protein, 30 aa, Zea mays
  Coding DNA Sequence Number=SeqID_3680
MEARRASMYQVHGRRMLELRNDNLDQVKLT

SEQ ID NO: 47056 - protein, 145 aa, Zea mays
  Coding DNA Sequence Number=SeqID_3681
MAAAAVRLQLRRSGSRTNPDGNVCVSRIEFSHIQPTSSVNKTMYYKWLTIDGQCRWGGERMRAHSMEWLAVAKETTCTCWQLDVSRSVRVASVRMENTIKRRQLSDIFATMGLFPNPNYIVWHAHGESAQRDLEMNEHTDNDMRC

SEQ ID NO: 47057 - protein, 105 aa, Zea mays
  Coding DNA Sequence Number=SeqID_3682
MFERQNKLRADHELKAKEKERVLEEKERTLGERILGTRLEAESGRLYRAVVEYILTCFWSHGPAISLEPVIAGLVADTKDAAREGIKDAVELVVERFQRDLTDDK

SEQ ID NO: 47058 - protein, 165 aa, Zea mays
  Coding DNA Sequence Number=SeqID_3683
MLKGYIACQRGSQAARPFRNKCRGSTAQRSYIRPIPQAYIMHDMPFGSTRSLPGQGIEALCGQVHSKLGLDTCRLRTLLSRAWAFSGPESPGSGGEQSGPPRRRVRDPSRRFVLHVWGSGAFPAVGPDPLRVSWGTSCSGATWQPRSGRCGMELFPAQPETSLPA

SEQ ID NO: 47059 - protein, 71 aa, Zea mays
  Coding DNA Sequence Number=SeqID_3684
  Subcellular localization annotation: CTP_CleavageSite=36; ConfidenceScore=5.62e-01
MADKQAGRKLSSCGWGSQEMMSKKMRSFARSLLGTRSSSRSSSRGEDSVFQGTGSTMSRQRALAEHLPPHD

SEQ ID NO: 47060 - protein, 405 aa, Zea mays
  Coding DNA Sequence Number=SeqID_3685
  Gene Ontology: Mol. function=DNA binding; Biological process =regulation of transcription
  Homolog annotation: Hit_ID=Q10PU3; Match level="QueryCoverage=41%, HitCoverage=19%, E-value=1e-51, Identity=60%"; Hit description=No apical meristem protein, expressed
  Pfam annotation: Domain name=NAM; Domain location=218-348; Score= -16.9; E_value=6.7e-06; Accession=PF02365.6; Description=No apical meristem (NAM) protein
MTRIDLNTVEEEDEVEAEALPLPQASARGTVSLELWHACAGPVPPNSQVEEETGIKLNIEDMVDLMTLLDPATGGRMLPSLQDEWYDPAALAASSAWDVAKLRSRFCVPSTPVEDTQCRDLHAGARLCVSCSLDDVNLKFYDAVLDSKLPSLPESKRLTTDQKTLQAQLSVSYRAPAQTSTFDIFGDWQDISQPNFEANPPDGVLAVPLLRHQSWPGLPRGVEFNPSDSDLLWHLAAEVGNALAERHPFINEFIKFVDDVREFICTHPQHIPGVRQDGRASYFFHRSFEPYINENDVNNCLKKIGSHRSIILDGTLMGCKEVFALYADMPSDKRSQETDWRLHQYHLQNTVKAESEIVASKIFLASRNSLCELAEETHIESEWVLLSYQCPFVYIRLEIPIIFVL

SEQ ID NO: 47061 - protein, 446 aa, Zea mays
  Coding DNA Sequence Number=SeqID_3686
  Homolog annotation: Hit_ID=O40947; Match level="QueryCoverage=38%, HitCoverage=18%, E-value=1e-08, Identity=20%"; Hit description=ORF 73
  Subcellular localization annotation: CTP_CleavageSite=64; ConfidenceScore=5.11e-01
MWAPELLLRPPVPRTRARGPQATPLLRAPPGGLGRAEGPEPSATTTFGSATTVTATSVRPTIVTAGAAAATTAGAAAAAAATAAGIPLPGSLEGLGPQQTSAGSVAGDPPAAIAALPASALSTPLVVAEEVPAATTPTVQGDVGAEVAPSGPRDPPASVEGTPLGSQVLAGGPEAAAPPTATADPMAAISSNTPSAEGAGGASSFIPPPTPEEPEALQETEAAILREWEALKTEHQRLGDWCTQLEERTKAASCQFAFERAKLEREREDFKGDLRKVSDREQEVTRKEKGLAKKKEHLDQREEVITAFHEKLKSYNAMLEKQRGEQAATEAKLQKLHRELDDKASNIARAEENLKAKDVSMEKLATDLSWQEKDLAFGEEIGKGGTSCWPSLSSRQRRKRSNWRRRSGHWRSRSAGSRRRRQPRQHRRPRPPGGGGDEEDARRPPG

SEQ ID NO: 47062 - protein, 282 aa, Zea mays
  Coding DNA Sequence Number=SeqID_3687
  Gene Ontology: Mol. function=kinase activity; Cellular component =ornithine carbamoyltransferase complex; Biological process=amino acid metabolic process
  Homolog annotation: Hit_ID=Q6QP54; Match level="QueryCoverage=30%, HitCoverage=24%, E-value=4e-14, Identity=55%"; Hit description =Putative kinase
MGRREAEREGGKSSWRETGVGGGTRGLRGNDGASCDVAGLSPELGEVEAPPRSMSSLSSKAEVETEPRGQAKRRPSAEARAESEPWGRAKRSSSSSGAEPESEPWGRAKRSSSSSGVEPESEPWGRAKRSSSSSGAEPESEPWGQAKRSSSSFEAEPESEPWGRAKRSSLSSRAEPESEPWGRAKRSFLWRLRPDWVADSLTLSSGTAVGAAQATLSPLSGRLVEWRSDYGHFSSVDWRARVRIKVSGHLCIKCPCDSVGWRGDLAKLCADGGYQLRFRSLE

SEQ ID NO: 47063 - protein, 943 aa, Zea mays
  Coding DNA Sequence Number=SeqID_3688
MIGDEVAQFGSCTFTSKTGKTTKQVVELVPCARNKWGNWNEFWFYVAEGTVEGHEGLPVSEMCSHFYSAYPPFEVAEGDVDEGALQCAAGLSSGRDLVEEFVAYGVWPLAHGWALGKVCPRQMPSHGGKMVRSPAFVQNLQNRDPTAFVREAEDAAVRLVGRYVPRTEGQRSWDIRGSNDRLNRVFVLNQLPYDGYPGQDDVDRRGKKPAVEIGGDPAPAAAPSSKKRKLGTVMGGLGVSDGFARELMRTCAAPGGRMSSPELRESSARMLRVTGGCWPRNVPIPCAADEDSFTSRMVRKWRVFPYGRNIAAVVSAVMDKDRQGAAQKRQAAVRLIEARPKRQRGAAKAVAPDGGKPPLAAKSGAPASSKAPEPPPLAAKSGAPASSKAPEATAGAGGSKSTKVVPPAGGVAEVVKAAGALPLPGKRVADFATNISVDDYLGGSDEGQLAIVAPAAATTTAAVVPKAKGGALSAGGEASAFAVVRDEAGAASRRLEEVTEALSQASRRLKEVADFANRTASGALTAAVSAEVKRLRTQHADAVREKSAADSRCRKLTDKVAVLEKEKADLRRQLAGERRETNEALAKEKAAQAEAKLARVEGNIARERAEQLQERLTALESRMERAEAVSRAEAERTRKQLMDTYRELGAGTGEFEVPDREAGLRCLEWVQEEMQALPTVVEGFMSYASLVTCEGAMNALSREGCRHFEVFDQADEDFERDIFKVEDPVVKESAGAIYDRMWGVHGREVVRERAETARAQVARGERVDDFGALNSAPPDPEPTPAEAVPGAALEPTPETAKDAPDASASAAVAEGAPDAPAAAAPSADDPVAVAAETTAEATAEPAAEAPATSGPSQVQDFGPAHATATTKFLAASTAEGGNECGGSSSEFSDFADSGSSVEWTEESSEDLDYFAALDAAAAEASPHAADAGDVPGPSTGRRR

SEQ ID NO: 47064 - protein, 170 aa, Zea mays
  Coding DNA Sequence Number=SeqID_3689
  Subcellular localization annotation: CTP_CleavageSite=38; ConfidenceScore=5.12e-01
MQSACNCAKWARPFDSNASSMEAQAHTSCNRRAGCYVRATAPPVAPLPRLLDCGTSTATRGNPAYDPTVPAWRIGHGPRPGKGDIPKRDPSPRRKRAPSPPTDQRFEGRPLGRVQQRLRALGLRAHYWSEVRGPAPRKGSTAASGHSGSVPTTDKGFVGWPTKGSQSPQT

SEQ ID NO: 47065 - protein, 134 aa, Zea mays
  Coding DNA Sequence Number=SeqID_3690
  Subcellular localization annotation: CTP_CleavageSite=18; ConfidenceScore=5.09e-01
MGHGRPLGLPVSSSLETPCSAPSKGNMALPPLLAERRRRGGSDSGSAPEDDELRFARPQGSDSGSALEDDELRFARPQGSDSGSAPEDDELRFVRPQGSDSGSAPEDDELRFARPQGSDSGSASEDDELRFARP

SEQ ID NO: 47066 - protein, 29 aa, Zea mays
  Coding DNA Sequence Number=SeqID_3691
MERLRSPARNVADHKTDVPDHKQEQNGGR

SEQ ID NO: 47067 - protein, 119 aa, Zea mays
  Coding DNA Sequence Number=SeqID_3692
MGVREVEIPRPSCSSRAQVGRKERIQVYNGRVMMAPPVDVAGPRPRLGDVEAPPRSRSSPSSVAEVESEPLGRARRRPLAEARAEFESWGRAKRSSSSSGLSPSPSPGSGGAEFVVFWG

SEQ ID NO: 47068 - protein, 496 aa, Zea mays
  Coding DNA Sequence Number=SeqID_3693
MAERYQLPWSCVPPTTRRKDGGYPPSGGLEGGKTRCIREREDMVAFQGGHPPFKGDSPYLRPQPSWAESSPTRSKVLPYGAGAGSHTSRKPAQGRRSQTAVRGACNRPAVTSGSPLLPDQRAKGRAAMQAACNHAKWAHFFDSQHTQHGGPGPCVMQPARRMLRACNYTATCATTAPPRLRNQYHDSRRPSARPSSASLARRTGGASGRRSERRFAFAIMTASKKAGPSEGFNSLLRACGLHTHYWSEVRRLAPRKGSTAASGYSGSAPTTDQGNDLVMESHQREASSPRTPSPGDRVRQITRRLGGCSCKLGSGQTIDSVNIPARELGTRPYTRATASSHEGTTRPVEALREALRPRRSQTTPPRPRGLHPAGALARTHRNKTQPRKAGPLAKKCDESLQASANTPFEARGLLSGTIIRGTLKAPNSQLVTPISIKLQRPDGHHRKLRFARPRARTRAKPRKTVNSAPPDPGLGLGLSPRRRRTPLRPTQGSDSG

SEQ ID NO: 47069 - protein, 174 aa, Zea mays
  Coding DNA Sequence Number=SeqID_3694
MAYRRVDPEPFLPPGFSASVVLHREVMASYLSARNRKRKGLEESACVQPRHSTVWHTGLSGGALDSVRCAGLVCGELATLEKTSAVYGYNSPDCPVVHRTVRELVVLHFELKSWLVYCCGFVCVVSHPYSCAFTVIFIVRARDSNLWRFLANGKRDKQRKAVVFKLIIGSLERG

SEQ ID NO: 47070 - protein, 246 aa, Zea mays
  Coding DNA Sequence Number=SeqID_3695
  Subcellular localization annotation: CTP_CleavageSite=34; ConfidenceScore=5.02e-01
MEETHLHVFDASCPRQSTLACAPARPAPRLSQASAMTRACAYKTLPDFDCTLPRTLKPHRSLARRRLPVRSVSAAAQSLCHRRPASGAIPNSVQLSEKTVHTSVKLPEQGIGVCFAGEASPRSPELSTPPEYVDRVNHSTILRFLVHTVATLPREAHHALGLNQFAVVWPVYSPPTRTPACTRGPGDSGHPRRQAVPRRDRQSLPEPTPPFTGPPSPPEVAPDPAPEPAPEDLPATALEGKPRFYA

SEQ ID NO: 47071 - protein, 200 aa, Zea mays
  Coding DNA Sequence Number=SeqID_3696
MGKPVSSLLMLLLSRGRVPLDSPTRWQDGRPSHSSNHFLQRTCKNYATSKAEYTYTQLDLPGYNGSSSLISCEKQTIRIEFLSLQGLTALAYNAPLTPTGRRAVTALVPTKTGMGDLVSGRVRGYVCGQVHSGTRLTDLPYFSVMHKTGACLPKQWLAGPLVQARVLDPGLPPEQLLAPARGCTLRQQDYSLSKCNEHGF

SEQ ID NO: 47072 - protein, 383 aa, Zea mays
  Coding DNA Sequence Number=SeqID_3697
  Homolog annotation: Hit_ID=Q6J9V9; Match level="QueryCoverage=29%, HitCoverage=46%, E-value=1e-07, Identity=37%"; Hit description =Putative uncharacterized protein
MNKNTGIQSAITNGTPVPPSQVRATTLDGGPAEQQKTDERRVVARFGSGDDDDFCSGGPNSGSDDLRADAAARRPPPMPKLVRQGWAEGRRVGGRSVGGPGYLVGGRTSSSCRGRRRRRERLRSHSRPRARHVAAASATDNNRPSPRSLREGAGRRPRRGRPQLGTLPSPALVMKILEAEGGAEAAARRSGRRFTFAIMTASKKGPGKGDTPKRILPREGTRLRASLLIRGSKAGPSEGFDSRLRSRGLYTHYWSEVRRPAPRKGSTAASGYSGSVPITDQGGNDLVTESHQREASSPRTPSPGDRVRQITRSSPETPCSAPIKGNMALSPSSLRKGDTGAARTRAKPRKTANSAPPDPGLGLGLSPGRRRTPLRPTQGSDSG

SEQ ID NO: 47073 - protein, 125 aa, Zea mays
  Coding DNA Sequence Number=SeqID_3698
  Gene Ontology: Mol. function=kinase activity; Cellular component =ornithine carbamoyltransferase complex; Biological process=amino acid metabolic process
  Homolog annotation: Hit_ID=Q6QP54; Match level="QueryCoverage=66%, HitCoverage=29%, E-value=1e-17, Identity=59%"; Hit description =Putative kinase
MSECRRVPQPRWVDARPSAKGGSEVAGDGRERGGNPAAFVFVPHPGRGRVMMAPPVDVAGLRPRLGDVEAPPKPRSSLSSVAEVEFEPLVRARRRPSAEARAESEPWGRARRSSSSSGAEPKSEP

SEQ ID NO: 47074 - protein, 26 aa, Zea mays
  Coding DNA Sequence Number=SeqID_3699
LIRDTVRWCTGHCPVYTGNSPVPPDQ

SEQ ID NO: 47075 - protein, 71 aa, Zea mays
  Coding DNA Sequence Number=SeqID_3700
  Subcellular localization annotation: CTP_CleavageSite=30; ConfidenceScore=5.65e-01
MAASPTPRARSARRPRLSAARAPRCPPGPRLSAARARATRLAPPVSRSGRRALARPPADLISGVDPRSNGY

SEQ ID NO: 47076 - protein, 661 aa, Zea mays
  Coding DNA Sequence Number=SeqID_3701
MLVRSPAFALDLHGQDPAAFVREAEDGAARIVGRYVPKTEALQSWDIRGTNDMLNRVFELNRLPYGGYPGEDAADRRGKKPMGGTEEGPSQEAVSATKKRKLGTIVGERGVSDNFVVELMGTCVAPGGRMSSPELRESSARMLEVTRGRWPKNLPIPWAEGEDMSTSRIARGLRIFSYGRNIAAIVSAVMNKDRQDAAQKRRAVVRLPDPRREAKRARGSAKAAAAGVSQPTLAAKSAAPGSSKVSESAKAVATGGTKSTQGEAAKVRELPSPGKRVADFGTNISVDDYFVGSGEGQMVVIPPAVATTASTAVVGAKGSAFCASGEISSAAAVKGEAGTMSRRLREASLQLSQQLSQQLSQHADAVREKSVTESKSHRLAEKVAALETERTDLRRQLVEERREANQAIAEAQATQVAAKLAWAEGSLASQRAEEWEEWFNALRGCVEKAEASTRLEVERTRAQLVESYRELGARTADFEVPDREAGLRFLEWLQEELQVLPTLVEGFMSFASLVTWEGAMNALSREGCRHFEVFDQADESFEREIFKAEDPVVKQSVGALFDRMWGAYGREVVRERSDRAREQMERVEDVEDFGSLAGAPPEAAEGKPALPSDAGEGPSDAPVPAAAGEDPVLAAVPTAEGSQEVVVEPAVEDPMAVAAPS

SEQ ID NO: 47077 - protein, 412 aa, Zea mays
  Coding DNA Sequence Number=SeqID_3702
  Subcellular localization annotation: CTP_CleavageSite=37; ConfidenceScore=5.51e-01
MAASPTPRARSARRPRLSAARARAARLAPPVSRPRPRCPPGPACTVLALPRLGAEVLSFCFLVTLLRGEMARLRHTARKSVIPFLPSRLAERPLRHTVSGQSSHLERLHHRLREEQERRRQHREQQGSSSPPQQEVESVRRRSSVAQLEAPPAPPRDVPAVEGATGGGPGGGPGGDPDDDDLDHSTESSEPQEAEGWVARPITRDAARGCHFHDALDTLLRQAFDRHTWSIEYRCVVYQHSRGRYPDRWEATCLVRRPEDDLRGAEAVSEHYSISERDTAEAAMQDAARRALSQYCSLFGGVANGLNLRYYPRCPTGSTESVVVSPIGEGNPRLSSTVNLVAVLNTELDHSLDELSRARTEIAELRAELAERRHQEGGSPAPVGTQHPYRSPPRGHHTYGSPACKTRIDLDP

SEQ ID NO: 47078 - protein, 108 aa, Zea mays
  Coding DNA Sequence Number=SeqID_3703
MKGVIAEQGEIQKWKPEVEAKMNLIARALKDIQGQVEYLGKRSLINQPAVEEQGGLGGAVLQEIPSVEIPSAQGSLHPAGHSHQKPGANMEGQRLFSSFGVNFGNEMF

SEQ ID NO: 47079 - protein, 231 aa, Zea mays
  Coding DNA Sequence Number=SeqID_3704
  Subcellular localization annotation: CTP_CleavageSite=68; ConfidenceScore=5.40e-01
MSSRSLMHRVFPPSKPPDGGYPPSFRLIVGGTQLRGSWYLSAIVRLQGFSSGGPAAPLRRRSPNMVTSSLMVGESEPGCGLCPSLSLKDFHHQGWGGDCSVPGSRARVASEPLTAPASTTAAGRGSSADEIARAAHGPTSNSTAFCPSLPHEFGHGRGPLGSSIRPEVSAAAVRPPGAEVVVVAAAGAGDDLRAASPSEARSDLAESVIDAEGAAAPFQRQDPSLQDRIVL

SEQ ID NO: 47080 - protein, 406 aa, Zea mays
  Coding DNA Sequence Number=SeqID_3705
  Gene Ontology: Mol. function=hydrolase activity, acting on acid anhydrides, catalyzing transmembrane movement of substances; Cellular component=integral to membrane; Biological process=calcium ion transport
  Homolog annotation: Hit_ID=A2Q409; Match level="QueryCoverage=71%, HitCoverage=72%, E-value=1e-103, Identity=64%"; Hit description =ATPase, E1-E2 type
  Pfam annotation: Domain name=Cation_ATPase_N; Domain location=93-171; Score=50.7; E_value=5.1e-12; Accession=PF00690.17; Description=Cation transporterATPase, N-terminus
  Pfam annotation: Domain name=E1-E2_ATPase; Domain location=185-354; Score=-1.6; E_value=1.8e-08; Accession=PF00122.11; Description=E1-E2 ATPase
  Pfam module annotation: Pfam domain module=Cation_ATPase_N::E1-E2 _ATPase; Domain location=93-171::185-354
MSKQLSKMQAALVLNASRRFRYTLDLKKEEQKEEIRRKIRAQAHVIRAAFRFKEAGRIHVQSEETKVPCADGALGFGIKEDQITALTRDHNYSGLQQYGGVSGVAHMLKTDTQKGISGDDSDLLARKNAFGSNTYPRKKGRSFLAFVWDACKDLTLIILMVAAAVSLALGITTEGIKEGWYDGASIAFAVLLVVFVTAISDYKQSLQFQNLNEEKQNIRLEVVRGGRRITVSIYDLVVGDVVPLKIGDQVPTDGILISGHSLSIDESSMTGESKIVHKDQKSPFLMSGCKVADGYGTMLTHLLRCFQISQATNIIRELTSTKPLGDSSNFSSTNLRTETLRAEVPTAAAPTVEGSWSKFGEQKHSQPTSDAPSHPSGHKTNKTLDGVGSSAQDDQRSKPDYDTPTI

SEQ ID NO: 47081 - protein, 76 aa, Zea mays
  Coding DNA Sequence Number=SeqID_3706
MAKDELRSGSLCLRRRLQFPFNIPMTWCEMDLKNTLVIAYERDMIKAKEIARIKNIELMPKFGKSLFIKRLGKDIG

SEQ ID NO: 47082 - protein, 185 aa, Zea mays
  Coding DNA Sequence Number=SeqID_3707
MQEACNRTKGAHPFDFDASSIETQAHTSCNWRAGYYVRETAPPLAPVPHLLDCGTGATTRGNPTHGPTVPTEHTDHRRHLWQAKQATLHLRHDDHVKKGTGKGDTPKGILLREGSGPRALLLIRGSKAGPSEGFDSHLRALGLRAHYWSEVRRLAPRMDSIAASGHSGSTPTTDQGFVGWPRRVR

SEQ ID NO: 47083 - protein, 301 aa, Zea mays
  Coding DNA Sequence Number=SeqID_3708
  Homolog annotation: Hit_ID=Q6QP54; Match level="QueryCoverage=15%, HitCoverage=16%, E-value=2e-07, Identity=68%"; Hit description =Putative kinase
  Subcellular localization annotation: CTP_CleavageSite=74; ConfidenceScore=5.74e-01
MTSSKFDSRPNSSNNSDEKFLSTRSSFGATQNIAVTSSTRVSLSCFWIVDRISGSSSKTETTNSNARLKGLIVRCKERVQVYNGEHSNVLTCLAEESQSPMYMPLWLSERFWRPVHVMSWPSEERLSPVEPEVGRGGGSSEVEAESGPGGRARRIPSSEVEAESEPRGRARRRPSSEVKAESEPRGRARRRPSSEVEAESEPKGRARRRPSSEVEVEFEPRGRARRRPSSGVEVESEPRGRARRSFLWRLRPVLAAVSLTLTGGTAVRAAQAALFFCQVGQWSGEVTAVTSALSTEERASG

SEQ ID NO: 47084 - protein, 207 aa, Zea mays
  Coding DNA Sequence Number=SeqID_3709
MVTSRLMVGESEPGCGLCPSLSLKDFHHQGWGGDCTVPGSRTRVASEPLAAPASATAAGRGSSAGEVARADHGPTSNSTAFYSSLPHEFGHGRGPLGSSICPEVSAAAVRPPGVQVVVVAVAGAGDGVPFVGLLLLRRPSPMEWGYLPVGCLNRFTKRESPRVKVTSEKVMSEKRSFFEENFDAEGVAPLLAPEGGSGFAEARPTLP

SEQ ID NO: 47085 - protein, 171 aa, Zea mays
  Coding DNA Sequence Number=SeqID_3710
MTAKQPRLPTEVPGCWKDSAACAAPTAVPLDRVRLTGSQVLQKAPQETPLRPTQGSDSGSAPEDGELRSARPRARTQAKSRKTANSAPPDPGLGLGLSPGRRRTPLRPTQGSDLGSAPKDDELRFARPQGSDSTLASADDLRLARPRARTRPRPRKTDSTSTSEELPHRPT

SEQ ID NO: 47086 - protein, 93 aa, Zea mays
  Coding DNA Sequence Number=SeqID_3711
MNGGREIAYEAIRQSEEESHLASGEARKAEEVAERKRRIAELPPPPSSEPYDPDTDPALKVTFDECKIVNAAIDEAVEKLLNEAAERVLKEDD

SEQ ID NO: 47087 - protein, 318 aa, Zea mays
  Coding DNA Sequence Number=SeqID_3712
MRLDREVETNLRPNKVQRGGDAENPNVTASDTLADEVQVDLHMLRAVMLHGISGEVDRGDVVAVDEGGTLERAVELLEKLAQLGGLCYAVGHSVVLGLCAGAGDDGVPFGGPGNEVWSRACSRTSRLLQDVNGVLALEKEETLRLALGGEAEEVVKRPQVLRRELPLKGVDFMPPVTYVIPGKFPSQGLVITGHYSMIRYNTDGHTINSTQTVAYKWDQAAQGGFTRAHRLNNAQVATEAFVLHALGLRQSLRPSPFLALTGNGKAFACFVRSLRLRAFASSVFVCLHFSSVMINLCPETVERGGRYTFAPTPVGWLQ

SEQ ID NO: 47088 - protein, 117 aa, Zea mays
  Coding DNA Sequence Number=SeqID_3713
MERVKIGGWGGVGKGKHIFVENNVTRDEYAVGDKAKLGRDPGEEVGMAGKGIGLKPEWKSPKKGKVGDRRGPEVTVDKIKGLINPGRGSGEWKTRVTVELAGMTEALRGGSAATGDI

SEQ ID NO: 47089 - protein, 282 aa, Zea mays
  Coding DNA Sequence Number=SeqID_3714
MMTGDDAVGEEVKASIPLVVNDSEWSCKRACVEQWRKYWDCRHNKRREGGHRRGLCHIGRSGGGVILRLGGKAVEEMSSSVQILCPIAGMKRRLKEEVADHVSGCAELDGDPSEEVGEGVKGVGFEPQRKSPEKMREITQDDQIVFVTREAEEGRWPKITMNKMKDLSSFGRGNRKRKTRMATKLTCMTKALRGAPLLQDISELLESLDMMSGWRGTNALVTGRKGRESRPGTFMQCGEAATLGRSWSAPRRNEVGVPRSPWKKAEPADIDLGHVAVPARFG

SEQ ID NO: 47090 - protein, 97 aa, Zea mays
  Coding DNA Sequence Number=SeqID_3715
MEALSVSWNGLLALVLNVEGWNAWVSLGAQAVQPQLGRSGQERRSGLDWWRLGGAGRLGVATGAWGAGRWAQTQGQGDGGWRVTGGGLAGWVAEKGT

SEQ ID NO: 47091 - protein, 66 aa, Zea mays
  Coding DNA Sequence Number=SeqID_3716
  Gene Ontology: Mol. function=catalytic activity
  Homolog annotation: Hit_ID=A3B342; Match level="QueryCoverage=80%, HitCoverage=16%, E-value=1e-09, Identity=56%"; Hit description =Putative uncharacterized protein
MSRAFDDYCIMDCDVISAPEVTQRRTDNNDQFIILAIVRAWNMLSNDETMEIVVYIEVCMILMVAM

SEQ ID NO: 47092 - protein, 73 aa, Zea mays
  Coding DNA Sequence Number=SeqID_3717
MTVGGGCLSYGAPDSPVHTRHVRCASHVTKAVAIRPLEFWLLGPPGCDRWREVAVVPQLHRTVRCTPDMSGEL

SEQ ID NO: 47093 - protein, 126 aa, Zea mays
  Coding DNA Sequence Number=SeqID_3718
  Subcellular localization annotation: CTP_CleavageSite=18; ConfidenceScore=5.09e-01
MKIRRSGAASDQRVWRASGSAAAPAVWICDRATRRGATGSSASPDLRPRPRKEVSAPGLGLNLSLRRRSSPRPTPGLGLNLGLGRRSPPRPTPGLGLNLGLRRSLRLARPWARTDRAMGDTSLPYP

SEQ ID NO: 47094 - protein, 717 aa, Zea mays
  Coding DNA Sequence Number=SeqID_3719
MEVVELVPYARNKWGNWWDYWFYVSEAKVEDHPRLPAAIMCSHYYVAYPPFEVAEDDENERALRIAARTSSGRDLVEEFIGYGVWPLAHGWALGEVCPREMRSLGRDPAAVVREAEDRAVRIVGRYVPKTEALRTWDIRGSNDRLNRVFELNRLPYGGYPGEDVVDSRRKKPAVVTEEDPAPEAAPATKKRKLGTAVGELGVSDSFAMELMGTCAAPGGRMSSPELWESSARMLEVTGGRWPKNVPIPRATGEDFFTSRMARDLRVFPYGRNIAAVVSAVMNKDRQDAAQKRRAVVRMVDPDKSAAESKNCRLAEKVAALEAEKTDLRRRLAEERREANQAIAEAQAAQAEAKVALAKGSLASQRAEEWEARFNALRSRVDKAETSVRSEVVRTHAQLTEAYRDLGARTADFDVPDHEASLRFLEWASCPTPPSSHARGPMNALSREGCKHYEVFDQSDENFEREIFKVEDPVVKDSAGALFDRMWGPHGREAVRERSDRAREQMARAKDVEDFGHLNGVRPEAEANPVLPEAEVDPALPSETGEGSFAAPASTVSGEGSLPAPAPMAEDPPKAVAELAAEDPMAAAGHSQVQDFGPAHATATANFVAASTVVAGNESDESVSKFFEFDDSGSSVVWTKESSDEDLDYFAALDVAAAEASPRVTDAEVFPGPSAGRRRRRAVAKRRVSEVEGGRLRVDRAGKRELLSSSAGASVGKG

SEQ ID NO: 47095 - protein, 212 aa, Zea mays
  Coding DNA Sequence Number=SeqID_3720
MDDGDWAAGFCPPLRLAEAAAPVPAAGNSPETRGVEALRVLRATGVAWEVGEGAGNLLAGLGRVRDIGGGRPTAERLGGGANRLRRGIKRSREQQKGREGAEEVPYLKANPRVLSVAAMARRRPGSTVADLCGCTEDGGGHGGAPTSTEKRARDGGGLMAAALWPVRSVGEVREGSAARGGGYAGRKVLTAGTHGQRERGSERGCGESGRAD

SEQ ID NO: 47096 - protein, 130 aa, Zea mays
  Coding DNA Sequence Number=SeqID_3721
MRSEETTYSKVATVGPDPHGKCQTPGCTARTSGRGSRHPQPQPPKQPLGRAAVDGRTGQSGAPDSTVRQPCHPTVRVLTVSTIGALTAWTTGQSLFTVRCAFWRCSDSARNVCALFSCQPTVEVDRCAWE

SEQ ID NO: 47097 - protein, 840 aa, Zea mays
  Coding DNA Sequence Number=SeqID_3722
  Homolog annotation: Hit_ID=Q6J9V9; Match level="QueryCoverage=10%, HitCoverage=30%, E-value=2e-33, Identity=86%"; Hit description =Putative uncharacterized protein
MPRLLDCGISAAARGSPARDPTVPIECNDHGSVSRGDRRDGRYGQKRTGRTGKGDILKRILPSEGNGPRALLLIRGSKVVPSGVRQPPQSTRAPSPLLIRGSKAGPSEGFDSRPKACRVRDDPGYVRYMAEARATLLSDVRPAPTTVPVTRIRLATASRDLSRVRPRAQQGAPPRPTSGLGLSLGLGRRSLPRPTPGLGLSLGLRRRSPPRPTPGFGLRKKSPPRPTSASGRLCYRGYIIALVLASCLRLRRNKTGVPSKVTPVTGNDGSPRAPMTSDCSQPPTEAREHQQDPCRTASYASTGLNAPLRWARLYLYRAQGAPPIATLAHRAQGEASYRRDDEYCAPLGMGALFTNRLAARTLRNKYKDCTAGQAWTRVGTGPLPVSGSSPSRDLAKARTSLGGDLGPTKGARHAFFGAPDLYVQGSDVPLRRSKPDGVVRVQRLHTVEEDTPDSGYRQWLPDFRDGLEKSWHWRKRRCSFSALSNRWGAPVFSGGIRVRAVSSGDLIVEELALAVVPPIFPAATPHRWSSRGMTTSLVVERSEPGCGLPLPSASRMFIIRAGEKGGKLRVRRAGRLRRRQLPRAWLFGLDGFGAASGAASCRLDGAWLPVHRTGDGCAVRRSATSTASPAPPALPGDVQDVVRHGGGGSILGWSCPHSRVRTGARTSSRALGWPPFAGTTLVRRWPLSSVLRWSPPLVRLPTAEVVASAGETISATCHRAPDSLALMASLSPPVGRRERGPFRSGARAEAVATAGESLGAEVIVATGAEVVAVAGDPSMQRWSPPLVRLPGASFQHDSCWCSVVHSCRNGARAPLGDGACRPTVRDQAERLHGLGTTPGD

SEQ ID NO: 47098 - protein, 69 aa, Zea mays
  Coding DNA Sequence Number=SeqID_3723
MTTDRPLELLHMDLFGPIAYISIGERKISNPRDFKGILEMSSKRVRIKNQENKKRQWDGVQELSNRRLS

SEQ ID NO: 47099 - protein, 246 aa, Zea mays
  Coding DNA Sequence Number=SeqID_3724
MDGGDWAAGFCPLFRLAEAAAPVPAAGNSPETRDAEALRVLRATGVAWEVGEGAGNLLVGLGRVRDIGGGRPTAERLGGDANRLRRGIKRSREQQKGREGAEEVPYLKENPRVLSVAAMARRRPGSTVADLCGCTEDGGGAPTSTEKRARDGGGLMAAALWRVRSVGEVREGSAGAQMREGEKASGVLGSSDRGRGGCELHARRGRGVRGTRSSGRRLRGEEGADSRDPRAERAGERARVRGKRPR

SEQ ID NO: 47100 - protein, 162 aa, Zea mays
  Coding DNA Sequence Number=SeqID_3725
MTPPRGRLRGRHAVRRDDILQGGDSGSGPPREVPDPWMHSPDLRARFKTSTGRAVSAFNAEKTRRLSNPLTGDVPLQHLMRPAALLTDGDQTTPQAACLSTPGAGSISGRKEMALATSVSCSKAGAFRHPAGDFLSDKNLLPVEVVTKTGSLSTLSLSQTIT

SEQ ID NO: 47101 - protein, 156 aa, Zea mays
  Coding DNA Sequence Number=SeqID_3726
  Subcellular localization annotation: CTP_CleavageSite=69; ConfidenceScore=5.40e-01
MDAPDSPVRQPRHPTVRVLTVSTIGALTAWTTEQSLFTVRSRRRPPPPVLVARVAPTTSDADPHTDVTVATSRTSLTTPPELYCRRFKLNKKTTQNSILEGKIGILFDQDCNLADGEYILVPEQGAAKEVAPDPAPEPAPEDLPATALEGKPRFYA

SEQ ID NO: 47102 - protein, 164 aa, Zea mays
  Coding DNA Sequence Number=SeqID_3727
  Gene Ontology: Mol. function=binding
  Homolog annotation: Hit_ID=Q69NX2; Match level="QueryCoverage=54%, HitCoverage=6%, E-value=1e-14, Identity=58%"; Hit description =Putative fanconi anemia, complementation group D2
MASSSTLVKVVEPVVGDTTVGMLGDVGAIPDPVEEEVPVDTPTKCLMRVLNRDDYYGPDASSAVDAAVVLLAEAGCTLLIPPHHPTALPSLHSFVAHLSRKLFAGGDASSTLAPAPCLLEGLAAFAASSPARLHQMLLPTSLHMPSLAHALLSFPALHCSLEHS

SEQ ID NO: 47103 - protein, 203 aa, Zea mays
  Coding DNA Sequence Number=SeqID_3728
MNKNTGIQSAITNGTPVPPPQVRTTPLDWGGPAEQQKTDERRAVARSSSGDDDDFCSGGPNSGSDDLRADAAARRPPPMPKLVRQGRAEDRRVGGRSVGGPGYLVGGRTSSSCRGRRRRQERLRSHSRLRARHAAAAGATDNNRPSPRSLREGAGRRPRRGWPQLGTLPSPALVMKILEAEGGAEAAARLAFPHHQTGGHRLG

SEQ ID NO: 47104 - protein, 87 aa, Zea mays
  Coding DNA Sequence Number=SeqID_3729
MSARRTHKVPCVQLASYDVTVLSESVGRAAITQFYPNRIRCTILGKTHRKEVYQQVVTPSFIGQLQVSQNQLVELLLTLSKSSQYHW

SEQ ID NO: 47105 - protein, 170 aa, Zea mays
  Coding DNA Sequence Number=SeqID_3730
MSSPRIHLQHCQPGRCVLAGCPPPRRPSLPAGFKLENGMVTVPATEAAVVDKKADAKEITGLEVKEEKAVKGCVFGTKRKFPSRQVLEESPYLMNFMRRGSCEGEERWDGSRRRQQQQQAQGYGNQHQEERINDGGWQTVGEKKRHGRPQQACLGAMIEEEIEGSVSSAH

SEQ ID NO: 47106 - protein, 436 aa, Zea mays
  Coding DNA Sequence Number=SeqID_3731
  Homolog annotation: Hit_ID=A2X1I5; Match level="QueryCoverage=70%, HitCoverage=66%, E-value=4e-76, Identity=51%"; Hit description =Putative uncharacterized protein
  Pfam annotation: Domain name=Extensin_2; Domain location=1-341; Score= -136.3; E_value=0.058; Accession=PF04554.4; Description=Extensin-like region
MDSLLASYASSDDDADEAPPAPPPAHSPAIATSSGGGAGGFFSSLPQPKSAPAPLFSSLPAPKSTPTPLFSSLSAPKSSPAPNPTFSSIPPPKSSGGNPKRVVQYRPQPIRQPTGDSSDDEEDDPKKRRASNNEARLPPVSAGSGPVSSFLPPPKHSLGLGAGSGAGARRSAIDTAAPEKLNLGTALPSSSVANTGAPERPDTGATDDDDSEDSGSDGDMPAPELEEEHENQQAFNAATGEQQQSYDAGAGSTSGYETYAWDPNHYAQHGAYGWDPSASANYEDGTQYAAYERGQSAGYVHAHGGEHASGYDHVAAVPYGVDYTAGGYGHEVAATLPPVHEPILPPEMGRSGGKRGRNDTPVQILEVNQAELMKNRPKQDKSKLTGLAFGPSYQNGSAETIMCYGYAVSSQAMILEKYATVFSFSSQLPFITNQVK

SEQ ID NO: 47107 - protein, 235 aa, Zea mays
  Coding DNA Sequence Number=SeqID_3732
  Subcellular localization annotation: CTP_CleavageSite=20; ConfidenceScore=5.03e-01
MGVWTEHFLFLLSPLGHLRRCFAPSAPTLEPPLACLAFCTALSTDPPPPPPTKVRALVAGPVALGSVRRPSRAVVMCLRRRAIQMLLDVSFAYALDVLFLESPSLSPGRPRWIPRLSLADAQVADVVHGELGLNFVLEQNTLKSIEIELTEEMAPNLLQTDMVMQFGLLGELVRCRQNEFLNFSLERKLYIFLVNLTVLTDSTEALEFVQEKMSSFMKLGDGSQKLLILSWAGDP

SEQ ID NO: 47108 - protein, 603 aa, Zea mays
  Coding DNA Sequence Number=SeqID_3733
  Homolog annotation: Hit_ID=Q6J9V9; Match level="QueryCoverage=13%, HitCoverage=37%, E-value=1e-07, Identity=40%"; Hit description =Putative uncharacterized protein
  Subcellular localization annotation: CTP_CleavageSite=28; ConfidenceScore=5.05e-01
MHSACNRAKWAHPFDSNAPSMEAQAHTSCNRRAGCYVRATAPPLAPLPRLLDCGTSTATRGNPAYDPTVPARRIGHGPAGGSSGHIVGQAHVPSWDSERTLSHGVKTARPYSVPRTARARATAAPRTTRPVALTPRRDRRHLWQEKRATLRLRHNDRVKKGTGKGDTPKGILLREGNGPRAPLLIRGSKAGPSEGFNSRLRALGLRAHYWSEVRRPAPRKGSTTASGHSGSTPTTDQGIPSEGGIEPSDPVKRGPGPADHPQLVTPISTKLQRPDGCDQVKDRSTQGTRSRLARAQPRARAADPGGFTSCPRTPSSNGHTFGSPEAQSSPRSNLGQVATPTDRIAGAFNAKGLDSGSAPEDDELRFARPQGSDSGSAPEDDELRFARPQGSDSGSGPEDDELCFARPQGSDSGSASKDDKLRFTRPQGSDSGSTPEDDELRFARPQGSDSGSAPEDDELRFARPQGSDSGSAPEDDKLRFARPQGSNSALASADILRLARPRGLDSTSALEDRLDLDLGGASTSPNPGLGPTTSHEAPSLPYPKLTQATGNKTDVPSGSSRLQRSSDGHDTTRTGCQNLSGCHDGMALLQRVGRAGKDGTAPA

SEQ ID NO: 47109 - protein, 349 aa, Zea mays
  Coding DNA Sequence Number=SeqID_3734
MPSRSLMHRVFPPSEPPDGEHPQSFRLVVGGTQLRGSWYLSAIVRLQGFSSGSPAAPPHRWSPKTVTTSSWVGRSKPGCDLGPALSFKDVHHPCRGGERGEPGLYLPHGSPGHLLFQLLVVETILQLCGGGVLQPCRGRRTVAAQLGCNIPSSSLSWRGRERGPATGGSFPTVEAVSAAYGPASGSLALMSEVVGESPGACRPAGSPVWRDPRPLFDEPKPKAAVSARTEAELARKEDLVGRSLAGSSTGGTDAGVELSRPRAGLMSSGDSWLRLQGGRPSRLLEPDSWRRPWRRWPRHGADVVLRSGDPPTVSPSEARPDLAEGAVDAEGAAAPFNCQDPSLQDRAIL

SEQ ID NO: 47110 - protein, 109 aa, Zea mays
  Coding DNA Sequence Number=SeqID_3735
MTARNRAFARALQLGPASEPCLRYLRTQVGITADQNITKVDTAPKVNSTPVLFTLIWHLLLRHTCTFIYFQAEGMSFITFVQKSLYPKGNNVPKDEGHYKLTFSVLPCS

SEQ ID NO: 47111 - protein, 114 aa, Zea mays
  Coding DNA Sequence Number=SeqID_3736
MTSHDSPNLASDIGIEPRTATSNALMDEVKVDLNMLCALVLDGVDREVDSVDVVVIDKCALDEAVVKHLEELTQPACLIHPISDNPILSLDTGAGDHMLTLRGPRYEVAPKNIA

SEQ ID NO: 47112 - protein, 104 aa, Zea mays
  Coding DNA Sequence Number=SeqID_3737
  Homolog annotation: Hit_ID=A2WQX2; Match level="QueryCoverage=84%, HitCoverage=47%, E-value=2e-20, Identity=56%"; Hit description =Putative uncharacterized protein
MAEMFQYIQSLGAAQGFAPPHPLFPPVDPTQFHTPVRSSDPGARLELRFRPEDPYCHPAFGQSRASTGLLLRLSKRKGAAAPCAHVVARVRTAYYFEVPYLKFL

SEQ ID NO: 47113 - protein, 282 aa, Zea mays
  Coding DNA Sequence Number=SeqID_3738
MAERYQLPRSCVPPTTRRKDCGCPPSGGSEGGKTRCIREREDMVAFQGGHPPFKSDSPYLRPQPSWAKSSPTRSKVLPLRRGGWVPCVMQAGPEQKKPNRRARCMQPPRSAGERAGSHAGGMRPRQVGAPLRLPTHLAWGPMPTRHATGAPVATCKQLHRRSHHYHASSTAEPVPRLEATLRTTQQCQPGATVNTTKNGPTVMAVAGGQEQRSRRQPSLRPIQGQREKPLSRCEEGAPVFRSLNGSRTRNGRPANHSPRRINSAAGQAAPLAGEASDASPSP

SEQ ID NO: 47114 - protein, 274 aa, Zea mays
  Coding DNA Sequence Number=SeqID_3739
  Homolog annotation: Hit_ID=Q2QZI0; Match level="QueryCoverage=41%, HitCoverage=5%, E-value=6e-08, Identity=30%"; Hit description =Retrotransposon protein, putative, unclassified
MDPNLKSMFEEMMRLMRTEVSKEIAKGFADHDAILNQRFIDLSVAEENRNIRIEALEEAATEFDRSFTAWKPEIESSMSNIRLEISKLNKFFEHDARVNSASQPGILGTESDPSRQPAGSRADGPIGHRTDSHTRDDESGSLGPQTHHPVKEGLAARWFQSMKRRLTHAPWDTFCTLLMDRFGHDEHEEEEFISTKKPEYKTQVDPFYSAKSEYRPTAKPVYPLPSPPSLDDHKVMESAKPTPTGNKLDALKAYRMAKGLCKICAEKLFKGVTL

SEQ ID NO: 47115 - protein, 92 aa, Zea mays
  Coding DNA Sequence Number=SeqID_3740
MRPCHRFSREGLKDRLGRRASEREDLFGPRPRGAVFQVSGQDGLGPVDQEERRETRGSAWRCPQALDHRGEFLHPSLTELVEVVVNPGLEPL

SEQ ID NO: 47116 - protein, 117 aa, Zea mays
  Coding DNA Sequence Number=SeqID_3741
  Gene Ontology: Mol. function=carboxyl- or carbamoyltransferase activity; Cellular component=ornithine carbamoyltransferase complex; Biological process=amino acid metabolic process
  Homolog annotation: Hit_ID=Q8SA97; Match level="QueryCoverage=69%, HitCoverage=24%, E-value=1e-23, Identity=49%"; Hit description =Ornithine carbamoyltransferase
MAPPVDVAGLRPRLGDVEAPPKPRLSLSSVAEVESEPLGRARRKPSAEARAESKPWGRLYADGGYQLRIRSLEGTPNYGPRHEVTDKGKGKGKNIVIGDPRTSNISQDEIARKASDR

SEQ ID NO: 47117 - protein, 19 aa, Zea mays
  Coding DNA Sequence Number=SeqID_3742
MADGGDASLVCAWCEVLIF

SEQ ID NO: 47118 - protein, 244 aa, Zea mays
  Coding DNA Sequence Number=SeqID_3743
NEQSVFPEEVAEEVPDQQFGEGKGTRGVVASPSCRQWGPGTVLALPRLSAELRSDTLPDHLGSGQWGLALPGQKGNHDSWVKWFEIQGLCYGFGSTMMVLFLNEEMEKAKPWKETSRSSKTTTNSRCGLAATPTPTIVKTETALLAPRSRSNRACVRVAVQRACPWHLAVPEKPALNAATPALHRTELALPRRSTTIQASFQVRAGELIAGSLLQALPLVVAPGKEEGVEVDLQEFQDVDEFED

SEQ ID NO: 47119 - protein, 419 aa, Zea mays
  Coding DNA Sequence Number=SeqID_3744
  Gene Ontology: Mol. function=ARF GTPase activator activity; Cellular component=cytoplasm; Biological process=regulation of ARF GTPase activity
  Homolog annotation: Hit_ID=A3BV99; Match level="QueryCoverage=30%, HitCoverage=17%, E-value=3e-46, Identity=70%"; Hit description =Putative uncharacterized protein
  Pfam annotation: Domain name=ArfGap; Domain location=293-400; Score =50.8; E_value=4.8e-12; Accession=PF01412.9; Description=Putative GTPase activating protein for Arf
  Pfam annotation: Domain name=Pkinase; Domain location=1-327; Score= -54.7; E_value=2.4e-05; Accession=PF00069.16; Description=Protein kinase domain
  Pfam module annotation: Pfam domain module=ArfGap::Pkinase; Domain location=293-400::1-327
MALERSVGYSGRVEAARATLDQVRVEDIDTNVAVLQDLIVQVNLKLKLWHMAESKLPIELLYQIAVHIFSMCHPGNRQKVARFGWVGRALQVLCLLVMFPLHGLQNFLFSTREEHSPMKIIDFGLSDFIRPVFLAADQCPIGYSLKMVELELLRFLCERIVKREKVKKILFSTREEHSPMKIIDFGLSDFIRPDERLNDIVGSAYYVAPEVLHRSYSTKADMWSIGVITYILLCGSRPFWARTESVVGRGDLCMSPVEFEPSVSEDLVLEKKYENGQHDVRGTHHHRTSMKPEKPIDLLRKVDGDNMCADCGASEPDWASLYLGALLCIECSEVHRNLGVHISKVTNSQHCFFCSADGSDTSQYLSVSKPKHKDVFSAKEKFIHAKDSGSHQVTPPPHADFANRCLNSSGGATNNNPMF

SEQ ID NO: 47120 - protein, 130 aa, Zea mays
  Coding DNA Sequence Number=SeqID_3745
MDLWRRAGAAAPVCGVADVSCTSPTRRPTKKLFVNDVDKKDGGADCAAAKARLIRKSDTALAMSSSTCAVSYVIDPKGTSSGQESLRPLLSTSNWCIRLQHCLVEGVLDKESLYLKTGGYKKLEWLSEDF

SEQ ID NO: 47121 - protein, 33 aa, Zea mays
  Coding DNA Sequence Number=SeqID_3746
MAGGVKPDAQITGSELYNFAILTLSKNFKNPEI

SEQ ID NO: 47122 - protein, 292 aa, Zea mays
  Coding DNA Sequence Number=SeqID_3747
MAVMGSTSEKDVPLSGLSEVRWTRTTVGGPNDLGGSVTADMPLRTRKSARKSTGPIGVPRHHLAPRHEDSSSRSNDPIGDLEAQVEQLRTELRHRNSVWVEDGQRINELRTDIRPLQDKLAKRDLALDWAVNSYSIAWDRDAKARAHVEELSTTVDNLQTLSEWELALLEQQMSSRTRAHDGAGTYRGQDDTPNPPLVPPTLAEAIAALVTATADNTHFLCEMVGQQLQQQGRRAYPQGPRKTSHLDLLETCPPLFVKAEDPLEADEWIQVIEQKFGLIRCTETQKPLFAAQ

SEQ ID NO: 47123 - protein, 180 aa, Zea mays
  Coding DNA Sequence Number=SeqID_3748
MSVSEYRDRFLQLSRYAPKGFNTDAKREEVQGDGGSQAQDWWTSAWEQQSPPFLRQPTSTIQVESAPASAAVLEAVPLASAAVSLEQSHRRKSVPEAESAGTSSSCPSNQPEQSSSPSARRTQSMFLLWRARPLGNALSKEGSSAVVRPQYPSKAECVSARSRQSHPDTLQPWETKPFGG

SEQ ID NO: 47124 - protein, 24 aa, Zea mays
  Coding DNA Sequence Number=SeqID_3749
MAGGAELAGVGVLLGEVRRVFKSS

SEQ ID NO: 47125 - protein, 486 aa, Zea mays
  Coding DNA Sequence Number=SeqID_3750
  Gene Ontology: Mol. function=catalytic activity; Cellular component =integral to membrane; Biological process=metabolic process
  Homolog annotation: Hit_ID=A2YBG0; Match level="QueryCoverage=98%, HitCoverage=97%, E-value=1e-151, Identity=56%"; Hit description =Putative uncharacterized protein
  Pfam annotation: Domain name=ACP_syn_III; Domain location=201-296; Score=-13.7; E_value=0.02; Accession=PF08545.1; Description=3 -Oxoacyl-[acyl-carrier-protein (ACP)
  Pfam annotation: Domain name=ACP_syn_III_C; Domain location=376-458; Score=23.7; E_value=5.2e-08; Accession=PF08541.1; Description=3 -Oxoacyl-[acyl-carrier-protein (ACP)
  Pfam annotation: Domain name=Chal_sti_synt_C; Domain location=313 -460; Score=3.6; E_value=0.00092; Accession=PF02797.6; Description =Chalcone and stilbene synthases, C-te
  Pfam annotation: Domain name=Chal_sti_synt_N; Domain location=44-276; Score=-74.6; E_value=0.0092; Accession=PF00195.10; Description =Chalcone and stilbene synthases, N-te
  Pfam annotation: Domain name=FAE1_CUT1_RppA; Domain location=68-356; Score=606.6; E_value=2.3e-179; Accession=PF08392.3; Description =FAE1Type III polyketide synthase-lik
  Pfam module annotation: Pfam domain module=ACP_syn_III::ACP_syn_III _C::Chal_sti_synt_C::Chal_sti_synt_N::FAE1_CUT1_RppA; Domain location= 201-296::376-458::313-460::44-276::68-356
MNTLLHVKFLKTMYRLVVNNLVAIVVFAATAGVVARTSPEEVQARAREIRPVHCLLALLLAAAVAKLRRVGRPKDVYLVEYGCFRPKPWFRAPFATCLEHAHLMPYLVDEESVSFAIRLLERSGLGEETCVPDAYHYMPPDRSLSASRDETELVIFSAVDEVFARTSVKAEEIDVLIVNCSIFTPTPVFADMVVNRYKLRPDVQNVNLSGMGCSAGLVSVGLAKNLLQTARPGTHVLIVSTEILSSQYYVGTERAMLLPNCLFRMGAAAMILSNSPERARYRLTRLVRTVTAARDADYRCVFQEEDDKGNTGIRLSKDLAATAGHALKSNIAAFGPLVLPASEQLLVALSFLKRKLLLLRGRAKVRLYRPDFRTAFEHICIHAGGRGVIDEVQHGLGLSDEDVEASRMTLHRFGNTSSSSVLYELAYIEAKGAMKKGDRIWMISFGAGFDCNSVAWECVKPPADADGPWVDTIHRYPVQLPEIVNK

SEQ ID NO: 47126 - protein, 346 aa, Zea mays
  Coding DNA Sequence Number=SeqID_3751
  Homolog annotation: Hit_ID=Q6QP51; Match level="QueryCoverage=61%, HitCoverage=79%, E-value=2e-09, Identity=33%"; Hit description =Putative growth-regulating factor 1
MAERYQLPRSCVPPTTRQKNCECPPSGGLEGGKTRCIREREDMAGGSSVQVVSQAHVPSRDSERTLSHGVKTAERHLWWAKQATLRFHHNDRVKKGTEKGDTPKGILLREGNGPRAPLLIRGSKAGPSEGFNSRLRALGLRAHYWSEVRRSAPRKGSTAASGHLGSAPITDQGFVGWPSKGSTAASDAERGMTLAAKSGLGCHRKLRLARSQGLDSGLAPEDDELRLARSQGSDSGSAPEDDELRLARSQGSDSGSAPEDDELRLARPQGSDSALASADGLRLARPRGSDSTSASEDRLDLDLGGASASPNLGLGPTTSQEAPSLPYPKLTQATGNKTGVPSGSPQ

SEQ ID NO: 47127 - protein, 74 aa, Zea mays
  Coding DNA Sequence Number=SeqID_3752
MGKPVRSLLMLLLIRVTALVPTITGMGDHVSDHVRGKVCGQVHSGHASPWTRVHRPLSFRYQNGYNQFLTSREC

SEQ ID NO: 47128 - protein, 890 aa, Zea mays
  Coding DNA Sequence Number=SeqID_3753
  Subcellular localization annotation: CTP_CleavageSite=26; ConfidenceScore=5.03e-01
MPSSSSSAATTPTIQASSEDLSCTVAAAELRPGDTVEFGVSRMSLVRVQDMQRLGYFGGGVGRVPGAEEVPEPEGELVVFEAFFIAVLRLPAHRFVSEVLQKFEVQAEVEDHPGLPAAIMCSHYYVAYPPFEVAEDDENERALRIAARMSSGRDLVEQFIGYGVWPLAHGWVLGEVCPRKIPSLGGRKGLRVELFAVWWLSRGGRRRPPREKPAAVTEDDPAPEAAPSTKKRKLGTVVGELGVSDSFAMELMGTCAAPRGRMSSPELRESSARMWEVTGGRWPKHVPIPHAAGEDFFTSRMARDLRVFPYRQNIAAIVSAVMNKDRQDAAQKRQAVIRLPEARPKRVRGTVKGTVPVGSQPTLAAKSAAPGSSKVPESAKAVGAGGTKSAPDRAAKVRELPSLGKRVADFGTNISVDDYLVGSGEGQLVVVPPAVATTTSTAVLGVKGSAGGEISAATAVKDEAGAMSHRLREASQQLSQQLSQAADFADRVVSGALTDDVSAEVERLRAQHADAVREKSAADSKSRKLAEKVAALEGERTDLQRQLVEERREANQAIAKAQAAQAEAKLAWVEGSLASQRAEEWEVRFNALQARMERVEASTCSEVERTRKQLVDSYRELGARTADFEVPDREAGLRFLEWLQEELLALPTIMEGFMSFASLVTCKGAMNALSREGCSHYEGFDRSDEDFGREIFKVEDPMVKDSTGALFDRMWGPYGREVVRERSDRARDQMARAEDVEDFRPLNSAQPEAEVNPVVAEAEVQDFGPAHATATANFVAASTVVAGNESNESTSKFSEFDDSGSSVMWMEESSDEDLDYFAALDVAAAEASPCVTDAEVLPGPSDGRRRRRAVAKRRNSEIQTLSQRSGMFTLIPNSNPNGPIDKIVSN

SEQ ID NO: 47129 - protein, 251 aa, Zea mays
  Coding DNA Sequence Number=SeqID_3754
  Gene Ontology: Mol. function=aspartic-type endopeptidase activity; Biological process=proteolysis
  Homolog annotation: Hit_ID=Q7XBD4; Match level="QueryCoverage=58%, HitCoverage=13%, E-value=7e-12, Identity=34%"; Hit description =Cinful1 polyprotein
MPKVCEGDASDAEPGWLGFGISIDFKMSLENPVMVDYIMLNKSEAEALQQAFGARKRHQLNRVFDAIGFFYTDYPIMVQDSKKRKKKVTTRRIKIPKVHARSIPQASEEISAAPEAKTATAVTPSVAIAAKDKGSSKPALAKEKGKGPAEVEEAKNTIKDDTPLGEGPFDQVLGGQRYQVHHAAGKVMGAKQLGEAVGFAEQLGYSSGSTIFWGRQDDYLYCYPDNMEIEVCHYMVDNVGFLKLEAKLNRR

SEQ ID NO: 47130 - protein, 249 aa, Zea mays
  Coding DNA Sequence Number=SeqID_3755
  Gene Ontology: Mol. function=carboxyl- or carbamoyltransferase activity; Cellular component=ornithine carbamoyltransferase complex; Biological process=amino acid metabolic process
  Homolog annotation: Hit_ID=Q8SA97; Match level="QueryCoverage=18%, HitCoverage=8%, E-value=7e-09, Identity=68%"; Hit description =Ornithine carbamoyltransferase
  Subcellular localization annotation: CTP_CleavageSite=94; ConfidenceScore=5.57e-01
MWKLLRSRGRVCLPWPRSSPSPWVGRGGDRRLRPGRSPSPGSAKRSSSSSGAEPKSEPWVGRSGVRRLPGLSPSPSPESGGAEFAVFRDLARVRALGRAERSSPSSGAEPKSEPWVGRNGVRRLPGLSPSLSPGSGGAEFAVFRDLARVRALGRAGRSFLWCLRPDLTACQPHSIKWHRSRSGAGGAVFLSGRRSNMKSINTWHKTPKDYLFTTEGPKALMCISFRIVLQFQQGPTYERYSLPIIIGLR

SEQ ID NO: 47131 - protein, 83 aa, Zea mays
  Coding DNA Sequence Number=SeqID_3756
MTHLFSGFVNLLLKLFLLKSRAGGLSLLAPGLSQGECLLICVQCKEAYILKVKLHVIAYAKSKWLIMFLRTFGRRRPPTMIEP

SEQ ID NO: 47132 - protein, 851 aa, Zea mays
  Coding DNA Sequence Number=SeqID_3757
  Gene Ontology: Mol. function=nucleic acid binding; Cellular component= nuclear speck; Biological process=ubiquitin cycle
  Homolog annotation: Hit_ID=A2XZW3; Match level="QueryCoverage=69%, HitCoverage=66%, E-value=0.0, Identity=63%"; Hit description =Putative uncharacterized protein
  Pfam annotation: Domain name=SAP; Domain location=8-41; Score=19.8; E_ value=0.0085; Accession=PF02037.18; Description=SAP domain
  Pfam annotation: Domain name=zf-MIZ; Domain location=161-201; Score =20.0; E_value=2.8e-06; Accession=PF02891.11; Description=MIZ zinc finger
  Pfam module annotation: Pfam domain module=SAP::zf-MIZ; Domain location=8-41::161-201
MASVADKLAYFRIKELKDILNQLGLPKQGKKQGELVICPYIIVGSVSCRADLVDRVLAILSDEQGQHHHGWGRKNALTREAVAKVVDDTYRPKEEAPDFYHVDTKVRCLCNSTLLNDNMIKVLNLIPKEGEGESFEDALARVRRCLGGGGATDNADSDSDLEVNSGSRMRIAGRFKPCVHMGCFDLETFVELNQRSRKLHNCSEDVNELDVKPDGSWRVKGDAATRDLSQWHMPDGTLCDSKEDTNPGVVSVNEFKREGTSDGHRTLKLGIKKTPNGLWQVSSKPDDKKPVVRNHIQNNTGYSIPNIVPMISSPTGSCRDGEDVSVNQEGGGIQFDISLNQEFDSFAHNFGQTYNTEDRQQEPQHNAADVIVLSDSDEENDPIVRLPAVYANTPTNGDSFPFVTDAAVSGYPEGYQEDAGVGTSGLGLLSNNTGDFEINNWQMHSYPQPEQGFQFFGTDTDVGNPFVGPHNSFSITPEDYSLDCNVGIEDPSAAHDVSICRNSNDVHGSLVDNPLALAGDDPSLQIFLPSQPSTVPLQEELSERANTPNGVHPDDWRISLTLAAGGGGNEEPTSVDGLKSQPKVPSKEAGVEPLLDAAGNPHQHKIVKAGAIIRGTLKTPNSQLGSDSALASADGLRLARPRARTRAQPRKTANSAPPDLGLGLGLSPGRRRTPLRPTQGSDSALASADGLRLARPRGSDSTSASEDRLDLDLGGASTSPNLGRGPATSTGGTIITLPQADSGYGKQDRPLTEARGRQQGLNSSDSCPSARLQRSSDGHDTTRTGCQNLSGCHDGMALLQRVGPRGEEDGTGARGPPGLETPTVGTPGRGLLRVDEQLPVKLQMGSLQQPF

SEQ ID NO: 47133 - protein, 280 aa, Zea mays
  Coding DNA Sequence Number=SeqID_3758
MGSTRIAFVLLLLEERDLVGVGALQPSLGFKDFHHAVVLHSLTNASRMFIIQDGEGAHRVGPCLRVGWRPAFGGEGHPPTVWRRRPPAMQGKVNCYCLDRVQLSVLQPEQRSCRARAGYVQALPTLSAAQHVVRREGGTRVLGRSRSRSCSENGSEDLPVRFGAAAACWCGVGGQVAAVVGAEVVVAIGEAASAEAVAPADETVSATCALGLRLFGFNDWFLSPMRGPVADEPPGVCCPAGPLNLRPLCDELEPEATASAWTEAESAQKEASSAREHVAS

SEQ ID NO: 47134 - protein, 153 aa, Zea mays
  Coding DNA Sequence Number=SeqID_3759
  Homolog annotation: Hit_ID=Q6QP51; Match level="QueryCoverage=83%, HitCoverage=61%, E-value=3e-56, Identity=81%"; Hit description =Putative growth-regulating factor 1
  Subcellular localization annotation: CTP_CleavageSite=68; ConfidenceScore=5.09e-01
MQVACNRTAVAHPFGFVASGMEAQAHTSSAPEHSGSVPTTDQGFEGWPLRRVRQPPQSTRAPRPLLIRGSKAGPSEGFDSRPRTRRVRDDSGYVSYMAEARATLPSHFALSLTDLTGKQRRSPRSDCCASHPGKADNSNFSLGRNRKLRLVRP

SEQ ID NO: 47135 - protein, 200 aa, Zea mays
  Coding DNA Sequence Number=SeqID_3760
MGITGMCGRASRGGYGQGGYRLGVEIRAKEGGMRWHGSVCGLEERGQGWKGRARTGATAMLGCGLLLLRLRPQRPRPFSGLRGRGHRGRSRAGHGAWDPGPPHPPPSPIRHQHRSRRWKVNGAATLTAGSRDRGALMAGSVDCGSRISDRGCVGRAARAPVRRIGVDGGSASHGWQGAEGRWVGRGNRQNKHLCTPTLHN

SEQ ID NO: 47136 - protein, 31 aa, Zea mays
  Coding DNA Sequence Number=SeqID_3761
MAPTRDLLLFLFSLLLMSFKLNCCKYTLLSF

SEQ ID NO: 47137 - protein, 154 aa, Zea mays
  Coding DNA Sequence Number=SeqID_3762
MQEENGSYLLGAPSRSTAVVVAIAVDALFTMESCEARGRDGERRKYQEERVRKVESCCWAAHPPEISLGFTLLAGAPAPDLAQCPGRRIGVETSQAELGSARLVAARSRNELGSARLAHPASSEKRLGSARSRLASRLAEPTSPTINLNLFSKL

SEQ ID NO: 47138 - protein, 183 aa, Zea mays
  Coding DNA Sequence Number=SeqID_3763
  Gene Ontology: Mol. function=catalytic activity; Cellular component =membrane
  Homolog annotation: Hit_ID=Q75HI8; Match level="QueryCoverage=51%, HitCoverage=20%, E-value=1e-31, Identity=72%"; Hit description =Putative phosphatase
MNGLAKDVPTVNGMHEEPTTAHPRLLMQPTVHLKSLSPVDASAGREDVETLAQCQRMIACGEWLPLAVAYDHVEGSTMEAGGMQVLVDQKLEHKMLDNFFSVLSCVIFVPFYTGFLPLLFWSGHGRLARQMTLLMAFYDYLGNSVKVLPSACIQLKDMVSAPRPCSLPIRRVTTIEDEKENAI

SEQ ID NO: 47139 - protein, 467 aa, Zea mays
  Coding DNA Sequence Number=SeqID_3764
  Gene Ontology: Mol. function=cysteine-type peptidase activity; Biological process=proteolysis
  Homolog annotation: Hit_ID=Q5NKP7; Match level="QueryCoverage=94%, HitCoverage=73%, E-value=1e-115, Identity=72%"; Hit description =Putative uncharacterized protein 9C20.3c
MKQVDRPPNNPKRITIQSSQECFSVDIPSAEQPNPCLEVENPPNVDSENLTNETVQIDSDEDDFMPALKKRNVSEGHTRVLRKVVTKRIKHEELPRQRLNVRCNPQDVIASINILNERQREAIRRKGKELKITKDIVHLILGVPNHGGGKPLGIDEAVAASNLRAELGVAKDEFNVTFLQDRLRKGEDDDLSIRSAAPQNKTGTPCIKFFDKNSIKALTKADKRKPECRTNIFDAPRPAPMPRPTFNIKLPSIKEMMSSKINDLPHRHRSKFTDILAAYDLEVDKSCVAIKDSIDKIIEKQYYIADKFIELIDEVLRAESENLENETDEPQQQGNSADSADQQRGEMATEEMEHNDSGPVFDQTPTPHDDTLKGTTNSGSDPPLTEQECVRSLWDLICSKDIDQSRVVIDYGEYGANCMDIYESFAEGKCLENVFMQCFIETIPETYVLMPFINSHSIASTRRCHFH

SEQ ID NO: 47140 - protein, 223 aa, Zea mays
  Coding DNA Sequence Number=SeqID_3765
  Subcellular localization annotation: CTP_CleavageSite=41; ConfidenceScore=5.69e-01
MALSLSLSSSARSRASLSPWTHAQCSVVPRRAEFASARSSPCSMVDSQRLGAAPVGRLGVKSPSRPGFWHVSSRRHPKSRIRLTVYDVHQVLDKRFERVVLPLSSSNEKSSRWHVDVVDHHPPLRQAPSREDALVLATRHQLDKKESMGIWSRIETVCFARQTCVIKDVNRKPSSCFRLSRRISHGTLIDRVMRKTSQVDLKMVLGVDISARRRRQSDEPEDG

SEQ ID NO: 47141 - protein, 132 aa, Zea mays
  Coding DNA Sequence Number=SeqID_3766
MDVYGYTDMGILRSVMYTNLKNICVVDQLAKYRESHKYATDIERYFHIMLAKCVRVNRTSMHPNCCILFLTCARKSYSHLYSSSRNLQTRDEVVHNMESRVRTKVEPAPKLCARKLRLNSRKRNRLKKEKAI

SEQ ID NO: 47142 - protein, 47 aa, Zea mays
  Coding DNA Sequence Number=SeqID_3767
MVGTSAITARRQPGSVEHCLPCKDKNQIRIVCFSQLMRLLDPLYYIE

SEQ ID NO: 47143 - protein, 107 aa, Zea mays
  Coding DNA Sequence Number=SeqID_3768
MGRRTLPYLLLSTLTSSSFRGDWSHRPSPTMILLGRGRNLPSVMPGDGETDAEMCGDIMKPEDGIRRNLYLGTKPRKWGKLPMNENTEKDATPVAAIADRLRSESEN

SEQ ID NO: 47144 - protein, 23 aa, Zea mays
  Coding DNA Sequence Number=SeqID_3769
MGKPVPSLLMLLLSRVQWIKQSH

SEQ ID NO: 47145 - protein, 327 aa, Zea mays
  Coding DNA Sequence Number=SeqID_3770
MPRAARAAFVFWGGPAFAPGWRPPAEAGDPLAWEDLSGDLPGGRWPPPSAPRRRRLEKSPSPTGSLPPSAPRASGSSYLSSPLERRRGRGQDCSSAHPEACAAVARPSGAGVVVVVIRMGGGEPLVSLLLLRRPSPWSGVVRTCGGGNRSSVCNGTSNAGTPWPLFDEPRPGVAISVRTEAELARKWEPGWPEPSRVAHQRGSSSESMTRGLGSGWRPWKMLGRGPRGNWPSRLLGPDSRRSPWTASPPEAGSDLAEGVVDAEGATAPFSVKTRACRIRLSCSSKHQVANLEVSGPDPSGVVASKGLLALVLGEPYSRSVGKIASAP

SEQ ID NO: 47146 - protein, 90 aa, Zea mays
  Coding DNA Sequence Number=SeqID_3771
MAHRIARSTRVGGRPKSGEDDLGFSVKFCRVQEHGKLHKLLAKLSEQLAWLGSDWSGLATVAEARVVSPELRRGVWPAKKYRAPKSAPFN

SEQ ID NO: 47147 - protein, 163 aa, Zea mays
  Coding DNA Sequence Number=SeqID_3772
MARARAYKAPRDFDRTPPHALDFTGAQNHRRLPVHGLPAAARFLRHHRPANRTLPNPVRPSEKTVHTSVKLPERGIGVCFAGEASPRSPDFARPPVSVDRDPAPEPTPEDLPATALEGKPRNPFEMNTSSLEDMVAGVTWPSILPPGWTVELDPASAEEEHEE

SEQ ID NO: 47148 - protein, 192 aa, Zea mays
  Coding DNA Sequence Number=SeqID_3773
  Gene Ontology: Biological process=primary shoot apical meristem specification
  Homolog annotation: Hit_ID=Q5NBT9; Match level="QueryCoverage=84%, HitCoverage=16%, E-value=2e-47, Identity=55%"; Hit description =Putative CTV.2
MPVALAECSRAALAKSDQHAKAEATGVGENEQLSNYGDTKSARTVMLVELKKLIKANPLLQEKLVFPTLKASRLRTLINQSLNWQHQHCKNPRPNPDIKTLFTDHTCTLPNGAPASRPLQLPPPSPSLARWLTNTAVPSSVQSAVVAASSIPVPPNQVVSMLKRPTITDYQSAVPEQLMKRLRPGGHGIGET

SEQ ID NO: 47149 - protein, 126 aa, Zea mays
  Coding DNA Sequence Number=SeqID_3774
  Homolog annotation: Hit_ID=Q6J9V9; Match level="QueryCoverage=34%, HitCoverage=15%, E-value=4e-11, Identity=79%"; Hit description =Putative uncharacterized protein
MAVRLLANKDSRMSKCEKIKDIKHYMDMRFWVLMPWKFNECYTLFVIDHGKKHMTFIDFTPTQDWSTSFYKLWSCGEMIGDWEFVRDAKILRRNFVIDLLSYEDNSCRYAIPANIQQRPINISTKK

SEQ ID NO: 47150 - protein, 59 aa, Zea mays
  Coding DNA Sequence Number=SeqID_3775
MAPSPAGIVNKLLVLLQQAAALLGEQPVYHAVHRSIGCGAAMPPVALPDKEAKYLGDYR

SEQ ID NO: 47151 - protein, 201 aa, Zea mays
  Coding DNA Sequence Number=SeqID_3776
  Homolog annotation: Hit_ID=Q6QP51; Match level="QueryCoverage=37%, HitCoverage=34%, E-value=6e-33, Identity=88%"; Hit description =Putative growth-regulating factor 1
  Subcellular localization annotation: CTP_CleavageSite=65; ConfidenceScore=5.85e-01
MVDRSDPIAASAYSRSSSRDCSSRSSSRTKRGFEAPRVQNRSVCPRHSLGSRRAGIRSPLPKTSRGSARPSTKASGPPAVDASDTITGDGKRHLWQAKRASFHLRHDDRVKKAALEHPGFKLITDQGFEGWPLGRVRQPPQSTRAPRPLLIRGSKAGPSEGFDNRPRACRARDDSGYIRYMAEARATLLLGAFGFRRSSKA

SEQ ID NO: 47152 - protein, 60 aa, Zea mays
  Coding DNA Sequence Number=SeqID_3777
  Homolog annotation: Hit_ID=Q5NKP3; Match level="QueryCoverage=96%, HitCoverage=21%, E-value=8e-15, Identity=74%"; Hit description =Putative uncharacterized protein 9C20.7
MERPTSHLFYLRFKSPTQESSVLAMSYAFDDYYIKDYGVILAPEVTQRRTDNNDHSPSSG

SEQ ID NO: 47153 - protein, 224 aa, Zea mays
  Coding DNA Sequence Number=SeqID_3778
  Homolog annotation: Hit_ID=Q6JAD6; Match level="QueryCoverage=88%, HitCoverage=27%, E-value=2e-49, Identity=56%"; Hit description =Putative uncharacterized protein
MGYREAVIHIQLWLLGVLVSHSEFDVVDFLICEIEDTVLDGLRARRQLPYAHYLCHIFAQLIQPPQFQGTLEASRLLFGSYRRAPEDPVLAPDPVIDTQAEDTTFHQFETQGAAVPDDDDDDFGILPPPLPPRSRGHEAESSSAAPTAPPAVDPALAAILHTLTQQQALMASEQARLAAEQARQAAVQQQMSERMLSLSFRLFRTGRTLCSSSFWQIGLSTGPS

SEQ ID NO: 47154 - protein, 378 aa, Zea mays
  Coding DNA Sequence Number=SeqID_3779
  Gene Ontology: Mol. function=nucleic acid binding
  Homolog annotation: Hit_ID=Q60EK4; Match level="QueryCoverage=74%, HitCoverage=54%, E-value=8e-20, Identity=27%"; Hit description =Putative uncharacterized protein OSJNBa0032D15.11
MARRRSQKNKKTPPTNATQKEVTLEILCDDCSNYDLWSTSVINAFRTIHPQLEQIIDKSIFPSSFNGKINSEEDQRYYRLNYLAFDILNNSLSKEDYRAFISNYDESIPDAHDIWTRIKIKFDESKHNNSFDASTSFSFCDTNPCKEEGENERWRPNDESTSPKGLSSHFDSHMCCVANENDSGSTNEDEEEERSFVHLYARLSQEDKAVMLKLLERAREQSEARQRLEDILSIKMQHFDELTKEHEELKCSHVDLVQSKSSFELEFAGTNDDSYQKLKEENERLKKSLTQLKGKCIAQPSQDNRDHMVKKLETGTTVACTTSLEENVKDLRITMRREQNMKFNTSSKSLNHASTKGNIQGNPKLQLVLESHIEIEST

SEQ ID NO: 47155 - protein, 210 aa, Zea mays
  Coding DNA Sequence Number=SeqID_3780
  Subcellular localization annotation: CTP_CleavageSite=47; ConfidenceScore=5.19e-01
MYSRNSPTATGLQESAGPQHPVRLARMPSHGPTSQPASPTSQVPPLRAAVDPQTGEKAAPQPHTLLEPEFFLLPSILSRLPLSLSTAPPSFPLPLPWQVTVLPLRTEAVDMSLSEKLEAARVALGKRKERERELQAAQAQPLPVPAKAEPRKPAPACAAAAAGGDNKLLAGHLAHEFLVHGTLLGRRIEPSRGAPAPAQAPARAEPDPKR

SEQ ID NO: 47156 - protein, 234 aa, Zea mays
  Coding DNA Sequence Number=SeqID_3781
  Homolog annotation: Hit_ID=Q6J9V9; Match level="QueryCoverage=27%, HitCoverage=33%, E-value=6e-08, Identity=44%"; Hit description =Putative uncharacterized protein
MAERYQLPRSCVPPTTRRKDCGCSPSGGSEGGKTRCIREREDMVAFQGGHPPFKGDSPYLRPRPSRAESSPTRSKVLPLRRGGWVPRVMQAGPEQKKPNRRARCIQLPSGYEHSSTIAQTSGTFGRRSERRFTFAIMTASKRDRERGIPRKGILLREGNGPRASLLIRGSKAGPSEGFNSRLRALGLHAHYWSEVRRPAPRKGSTAASGHSGSAPTTDQGFVGWPSKGSQPPQT

SEQ ID NO: 47157 - protein, 114 aa, Zea mays
  Coding DNA Sequence Number=SeqID_3782
MTREQTKFGLSNVPRRRSHGVGLGSSNQWRWSQAARIERQTTIDIDGDLRGKLERRTVVQRAVGWVPAARAREATGSDASRSRWMPRPHKTLRSKRGQQLALAFLAVVLSSDRV

SEQ ID NO: 47158 - protein, 115 aa, Zea mays
  Coding DNA Sequence Number=SeqID_3783
  Subcellular localization annotation: CTP_CleavageSite=65; ConfidenceScore=5.14e-01
MAGMAHRSYSGPPEAFSPPFSPLCSWIHGPFPAIEFTVAPSSSMLNSGDPGTPLAHACLNSGDLTAAERSSTARSRSPLPDDEQSEVLECVVGDLPEQQPGEGKCPLTYYVLHTL

SEQ ID NO: 47159 - protein, 201 aa, Zea mays
  Coding DNA Sequence Number=SeqID_3784
  Gene Ontology: Mol. function=voltage-gated potassium channel activity; Cellular component=voltage-gated potassium channel complex; Biological process=potassium ion transport
  Homolog annotation: Hit_ID=A2YIN0; Match level="QueryCoverage=42%, HitCoverage=46%, E-value=1e-32, Identity=74%"; Hit description=Non -specific lipid-transfer protein
  Pfam annotation: Domain name=Tryp_alpha_amyl; Domain location=34-111; Score=47.5; E_value=4.7e-11; Accession=PF00234.13; Description =Protease inhibitorseed storageLTP f
  Subcellular localization annotation: CTP_CleavageSite=63; ConfidenceScore=5.56e-01
MGSASASVMTTSLLALALAALAFVSRAAAQGNGCSSVMMTLAPCMDFISSKASEPGISCCSVLAGVVQTDPRCLCMVLDGTATSFGIAINQTRALELPGVCKVKAPPLSQCTGMSCVSKWSLKLHKLKECSELTASHLRIAELGLSLSPDYVLTHDSRQIFCMVWYGFLMCHIKQHCFSPNEKDQFSPIVSAELLVIGTTW

SEQ ID NO: 47160 - protein, 129 aa, Zea mays
  Coding DNA Sequence Number=SeqID_3785
  Subcellular localization annotation: CTP_CleavageSite=58; ConfidenceScore=5.30e-01
MAAERTWWAVSFSPAKSLRLRKPKKGARSGAKNRRQTLPRVYKDQGETHSTFRPDLPRDSKTQSETTVPRTTRARATAAPRTTRPIALTPRRDRPRFWQRKRATLRLRHNGRVKKGTGKGGYPENDPSP

SEQ ID NO: 47161 - protein, 75 aa, Zea mays
  Coding DNA Sequence Number=SeqID_3786
  Subcellular localization annotation: CTP_CleavageSite=47; ConfidenceScore=5.28e-01
PIKRSSFGFNKGAKRQPKAPLVWGHRTVRCRRAIIHRTVRCTPDSVRCSKEARPPELASLGNAQQPLRYNSPDMS

SEQ ID NO: 47162 - protein, 225 aa, Zea mays
  Coding DNA Sequence Number=SeqID_3787
  Gene Ontology: Mol. function=catalytic activity; Cellular component =Golgi apparatus; Biological process=cellular metabolic process
  Homolog annotation: Hit_ID=Q10N67; Match level="QueryCoverage=99%, HitCoverage=56%, E-value=1e-124, Identity=96%"; Hit description=NAD -dependent epimerase/dehydratase family protein, putative, expressed
  Pfam annotation: Domain name=Epimerase; Domain location=1-150; Score =41.4; E_value=3.1e-10; Accession=PF01370.12; Description=NAD dependent epimerasedehydratase family
MYKTNVMGTLNMLGLAKRVGARFLLTSTSEVYGDPLEHPQKESYWGHVNPIGVRSCYDEGKRTAETLTMDYHRGAGVEVRIARIFNTYGPRMCLDDGRVVSNFVAQALRKQPMTVYGDGKQTRSFQYVSDLVDGLVTLMESDHIGPFNLGNPGEFTMLELAQVVKETIDPGASVEFKPNTADDPHMRKPDISKAKSLLNWEPQVSLKQGLPRMVSDFQKRIMDEK

SEQ ID NO: 47163 - protein, 145 aa, Zea mays
  Coding DNA Sequence Number=SeqID_3788
MALPVDVAVCALGRATWGAESEPWGRAKRSFVVFRVLARVRALGSGGAEFAVFRPESEPLGSGGAEFAVFRVLARVRALGSGGAEFAVFRVLARVRALGSGGAEFAVAPLARPDCLSDSLCRVTLQSEWRRRRCPSVRLASGAVE

SEQ ID NO: 47164 - protein, 159 aa, Zea mays
  Coding DNA Sequence Number=SeqID_3789
  Gene Ontology: Mol. function=GTP binding; Cellular component =intracellular; Biological process=small GTPase mediated signal transduction
  Homolog annotation: Hit_ID=A2XN99; Match level="QueryCoverage=43%, HitCoverage=19%, E-value=1e-32, Identity=98%"; Hit description =Putative uncharacterized protein
  Pfam annotation: Domain name=Arf; Domain location=5-81; Score=3.9; E _value=9.1e-10; Accession=PF00025.12; Description=ADP-ribosylation factor family
MAITNFCNIRHLAGAAADELRDAVLLVFANKQDLPNAMNAAEITDKLGLHSLRQRHWYIQSTCATTGEGLYEGLDWLSSNIASKELRMYHGNLGQNRLCNLLGVFYRHNISSKPTVWGSKDIFSLCLVRQSPSTRQRKQQFGFDGQNKRKLYSTADGVY

SEQ ID NO: 47165 - protein, 157 aa, Zea mays
  Coding DNA Sequence Number=SeqID_3790
MALEDVVDLPVTSMESPLLYPRLLELLALRLSSWRLRWLDEVSGSFIGGDVHVGFLEELLGCCGGLLKDGPHEDLVLRSSVEGLDHRYVKYVREAISHCNTPLVTHNGYHQKPHPPNLLHTRGVIRKENIAKSGSTSFETNITRRGKHEVHTGYKDI

SEQ ID NO: 47166 - protein, 135 aa, Zea mays
  Coding DNA Sequence Number=SeqID_3791
MVLSSNSYHLMQQSSEKDFEIAREVANAPGLAFVYRGPPTSVSSHWEVPDDGSARRNSGEPLYRPNGAVTGAPERWTPNRGLPEHFPSLNCANGELPSSVRVNRMGGGQLIVFPKIGGGIIQLGGPVSLRRIQEC

SEQ ID NO: 47167 - protein, 119 aa, Zea mays
  Coding DNA Sequence Number=SeqID_3792
MGKNNKRKREPTPPSEEFGDSKYSEEEFSSESEGSPAPIPLRESSDDSDDSQGLAAEGSDESEYSSDEEDSDGGGEDEDDDDDDDDDEGDGGGDGDGSGRGGGSGSKGGDGGGSNRASG

SEQ ID NO: 47168 - protein, 164 aa, Zea mays
  Coding DNA Sequence Number=SeqID_3793
MSGAPEDSNFELVTFGNFQRRLRYNSPDCPVYTGHVRCSKEERPPELASLGNSLRPLRYNSPDCPVYTGLSGVTTGQRLLRRQRLPAGAINARQRAQRSDTPMLAHRTIYSTCPVRHRTSRRAQKTELQRSNPTAFGDVAVAPDMSGVHRTVRCAIEQTASPND

SEQ ID NO: 47169 - protein, 99 aa, Zea mays
  Coding DNA Sequence Number=SeqID_3794
MQVAYNCTTGTHPFDFDASSMEAHTSCNRRAGYYVRETAPPLAPMPRLLDCGSSAATRGNPAHEALRYNSPDCPVHHRTVSGAPRESDSELASFGNPLR

SEQ ID NO: 47170 - protein, 161 aa, Zea mays
  Coding DNA Sequence Number=SeqID_3795
MAHRTVRCTPDMSGAPATSSVSLESDRWSYDFWARLDVRWRTGHALFTVRCASMGDSDSCARCARNKCTAAEQPSRIPETGEFLSRAFFGAPDIVRCTPDSPVNYSAPALDFPEREELESETSGAPDTVRWHTGQSGAPDQRSLRLPLCPLLNPTLGLFIG

SEQ ID NO: 47171 - protein, 49 aa, Zea mays
  Coding DNA Sequence Number=SeqID_3796
MESDYLFEVDPGKGGSSKDSFFQSSRKLVPLIPNGFRLRASATTLAFPG

SEQ ID NO: 47172 - protein, 107 aa, Zea mays
  Coding DNA Sequence Number=SeqID_3797
MAQRRSQKNKNTTRKEVTLEILFSDCSNYDSWSTSVLNAFRTIDPRLEQIIDKSIIPSDYDASEEDQRCIRLNHLALDILVLVILTLARKKKKMTDGDQTMNPPLQK

SEQ ID NO: 47173 - protein, 781 aa, Zea mays
  Coding DNA Sequence Number=SeqID_3798
MCSHYYVAYPQFEVAEDDKNEGALRCAARMSSGRDLVEEFIGYGVWPLAHGWALGEVCPREVPSLGGQRVRSPAFALDLRGRDPAAFVREVEDSAARIVGRYVPRTEGLRSWDIRGSNVRLNRVFELNYLPYGGYPGDDAADRRGKRPVDVIEEGPSQEAAPTTKKRKLGTTVGGVGVSDSFAVDLMGTCATLGGRMSSPEILESSARMLEVTGGRWPKNVLIPRVAGEDFFTSRMAHDLKDRGSYARGEEGAGSTKAAASGSSKPVPTAKPAVPGHSKASVSVKAAASGGSKPPPGGLVKGRRPPSPARHIADFGTDISVDDYFVGSGEGQLTVVLPPVATTSPTAVVGAKGTARDPWATFCASGEILSAAAPKDMAGSMSQRLREVSQQLSQQLKQAADFADLVASGALTADVAAEVERLRAQMRMLLSKKVASMEAEMTDLCRQLAEERREVNKAIADAQAAQAKAKVALAEGSLAHQHTEELEARFNALRSRVDKAKASTRVEEELLVLPTIMTGFMSFASLITCEGAMNALSREGCRHYEVFDQADENFEREVFKVEDPVLKQSVGALFDRMWGPHGREAVRERSNRAIEQMAHAEDVEDLGGLDSVLPEAAEVDPVPPSDAGEGPSVTPAPTAAGEDPASAPAPTGEDALKVVAEPAVEPTVEDPTAAVGPSQVLGFGPVHATATDNAIFVAALTVAADDDSFGSVSKCFESDDSGSSIAWAEESSDEDLDYFSALDVAAVEPSPREEGSEALPGASTGYRRRRAVEKRRVSGLS

SEQ ID NO: 47174 - protein, 40 aa, Zea mays
  Coding DNA Sequence Number=SeqID_3799
LYADGGYQLRIRSLEAPGHDVARFPNSGEKSLVAPHTTRA

SEQ ID NO: 47175 - protein, 131 aa, Zea mays
  Coding DNA Sequence Number=SeqID_3800
MAGWFLKSGGALLKNNHGNERVVAPDRWIRDQGPISTHEGATDTFLGAVEAPKAEVVLLAATGTRSHGGGFFLSICSDPGNPPGRSGVWLGKKIELPKRAHLSHQVLEGPYGEALRKEPESPKVITRTPSG

SEQ ID NO: 47176 - protein, 111 aa, Zea mays
  Coding DNA Sequence Number=SeqID_3801
  Gene Ontology: Mol. function=nucleoside-triphosphatase activity; Cellular component=chloroplast; Biological process=protein metabolic process
  Homolog annotation: Hit_ID=A3ATJ7; Match level="QueryCoverage=93%, HitCoverage=11%, E-value=5e-50, Identity=93%"; Hit description =Putative uncharacterized protein
MGSEYPSVHFEKDKALARRFQPVLVNEPSQEDAIKILLGLCEKYETYHKCKYTLEGINATVYLSARYIPDRHLPDKAIDLIDEAGSRARMESFKRKKEEQCSILSKSPDEY

SEQ ID NO: 47177 - protein, 77 aa, Zea mays
  Coding DNA Sequence Number=SeqID_3802
MQVTCNRTAVAHPFGFIASGMEAQAHASWTGKGDISKGILLSEGSGPQALLLIRGSKAGPSEGFDSRTRALGLQAHY

SEQ ID NO: 47178 - protein, 120 aa, Zea mays
  Coding DNA Sequence Number=SeqID_3803
  Subcellular localization annotation: CTP_CleavageSite=41; ConfidenceScore=5.15e-01
MTVAGGREQRSRRQPSSRPIRGQQENPLSRRSGRRFAFAVKTAPKKGPGKGDTPKRILPREGTRLRASLLIRGSKAGPPRGSTAASDRVGPTPTTGQRFEGRPPEGFHGRLRLLGLRAHY

SEQ ID NO: 47179 - protein, 149 aa, Zea mays
  Coding DNA Sequence Number=SeqID_3804
MGKNKKRKREPTPPSEEFGDSEYSEEEFSSEPEGSPAPVSPPASSDDSDDSQGIAAEVWTYIRAVERAGLEGSDESEYSSDEEDSDGGEEGEDDDDDDDDDDDGGSSGGGDGDGRGGTKGGSGGSGDSTRGSSRGSTRGGGGGRGRASG

SEQ ID NO: 47180 - protein, 188 aa, Zea mays
  Coding DNA Sequence Number=SeqID_3805
MVTTSPWVGRSKPGCGLCPSLSFKDVHHQCWGGECAELGSVSARAAARSFPQRSGGRAFAVRGAGSCRVSGSPARAASAPLSVPPSATAAGRGFSADEIAGAAHGLTSNSTAFCLSSPLEWGRGRGPYGSNIRPEVIAAAVRPLGAEVVVAAAEAGGGEPSVGLLLLRRPSNRGGLFVPAEVEPEFRL

SEQ ID NO: 47181 - protein, 247 aa, Zea mays
  Coding DNA Sequence Number=SeqID_3806
  Homolog annotation: Hit_ID=Q6J9V9; Match level="QueryCoverage=46%, HitCoverage=40%, E-value=3e-29, Identity=58%"; Hit description =Putative uncharacterized protein
MTIGEGMQPGCMMKILEAERRLESANPHKVALLKQQQEESHTGVRRLRPAGSSSRPRALGPPSPPTDQGFEGCALRGLTAAPEHPGSAPITDQGFEGWPLGRVRQPPQRTRAPRPLLIRGSKAGPSKGFDSRPRTHRVRDDPRYVRYMAEARATLPRYPRTFPRPVGTICNGIPPEGGTEPSGPIEMGPSPANPLQRLGGCPRTRLRPKLLTTSTNQLKNLEPDHTPGLRPGRMREQPGRPRHHSTN

SEQ ID NO: 47182 - protein, 433 aa, Zea mays
  Coding DNA Sequence Number=SeqID_3807
  Gene Ontology: Mol. function=cysteine-type peptidase activity; Biological process=proteolysis
  Homolog annotation: Hit_ID=Q5NKP7; Match level="QueryCoverage=100%, HitCoverage=79%, E-value=1e-71, Identity=71%"; Hit description =Putative uncharacterized protein 9C20.3c
MKHVDRPSNNPKRITIQSSQECFSVDIPCAEQSNPCPEVGNPPNVDSQTLINETIQLDSDEDDFMPAVKKCNVSKSHTRVLRKVVTKRIKVEDLPRQRLNVRCNPQDVIASINILNERQRQAIRRKGKELKITKDIVHLILGVPNHGGGKLLGIDEAVAASNLSAELAAVPQNKLGTPRIKFFDKNIIKALTKADKRKSKCRTNIFDAPRPAPNPRPTFNIQLPSIKEMMSSKINELPPRHRSKFTEKLAAYDLEVDKACLAIKDSIDKIIEKQYEIADKFIELIDERGEMATDEMEHNDSGPVFDQTPTPHDDTLKGTTLSGTDPLLTELDCVRSLWDLLCSKDIDQSRVVIDYGEYNGNCIDIYESFAEGKCLENVFMQCFIECFRDDSKNHRRTVTSNRLVLDVNVGALLNFEEQKRHSKNPQPFDQNVL

SEQ ID NO: 47183 - protein, 464 aa, Zea mays
  Coding DNA Sequence Number=SeqID_3808
  Gene Ontology: Mol. function=catalytic activity; Cellular component =chloroplast; Biological process=metabolic process
  Homolog annotation: Hit_ID=Q6F2M2; Match level="QueryCoverage=28%, HitCoverage=51%, E-value=1e-32, Identity=63%"; Hit description =Putative uncharacterized protein OSJNBa0020H14.2
  Pfam annotation: Domain name=DUF623; Domain location=158-215; Score =3.3; E_value=0.0037; Accession=PF04844.4; Description=Protein of unknown function, DUF623
  Subcellular localization annotation: CTP_CleavageSite=25; ConfidenceScore=5.30e-01
MSSSSSPSCSRVVLDSSVYSSLKLPASLPFGMVSDSFNSPCDVPFDKWEFENPRLAKTIASLFLDSGEPSFANSSARTTRHVDCASDSQSTESEAPATDDFANTIVRGLRSDDRLLFEPHGPSRSILERKPPAAPTLRPRAAASSSSFVDGVAVAFDSAYPYHDFRASMQEMVAAHGMGDWYWLERMPACPTAAWPSPSAPGDPDRTRLLGLTTGSCPAAAEAPSVLLQAELKVQRAGGVRRRNSVTSYLSASRLPDPPKEEEIQSACGRPRSIHRSNSNLQKKGSRNSDQRKAASAAAPTAADATNKRPRVSAFFRLDGSKVFANQLREAIERELKKLRAEREELDGRIRLLESQLEAGPAGFNGAAAGKGVGDDACGGSGACQSRVGNGFAPDGSLPADMIYRYSRHLLLPDFGVEGQRKLSQSSILVVGAGGLGSPLALYLAACGVAMYQLEGSGSASPSR

SEQ ID NO: 47184 - protein, 236 aa, Zea mays
  Coding DNA Sequence Number=SeqID_3809
  Subcellular localization annotation: CTP_CleavageSite=61; ConfidenceScore=5.22e-01
MTTVPIDSPFASRPHRLGIQCSTDPGCRRAVTALVPTIASMGDPVSGRMRDKVRARLHSVAAAEKRAEGLTGGETVPVKWSRTKGRSRGSQRYAERRRRWPESVGPRAQAGMLVGGKETGLGGPRDAREVMSERNWAETHWIARSTRGGGRPKSGEVDLGPPVKSDRVRGLGKLHGLLAELGEALACPEDGWSGLATVAEALAAMAGGIELAGAKGKWLAGEGECGAKWGAPGKAL

SEQ ID NO: 47185 - protein, 283 aa, Zea mays
  Coding DNA Sequence Number=SeqID_3810
  Subcellular localization annotation: CTP_CleavageSite=72; ConfidenceScore=5.13e-01
MDAQYDVTQEWLDRVKIARKGLRGTKRRASSTGVQRGSTGVQGKFNRGPERFNRCPGKVQPGGGSTGLGQLDQSADVDPRAIDLAMRIAERMFLKMKEDEAKNIIEEEENDRWRPNDESTSSQGLSFKSTSHMCFVANESDSESESEDEEEQESDSEDEDDLQQFFAQLSKKHRMSLLKLMKRAEEQKEMLHKQEDFLIRTIEDLEKLTKEHEKLKCSHDDLVQRASSTGVQRGSTGVQGKFNRGPERFNRCPGKVQSGYFPRTSLSDLQSASLTGRLSVSLP

SEQ ID NO: 47186 - protein, 145 aa, Zea mays
  Coding DNA Sequence Number=SeqID_3811
MTGDKQRQKLKQNPLSKISNTYMKKVDKKTATPHLIKKKKNGKVIAIKANKQANKGKGAKRIWVPKEVISTMKSTKKPPPCTEGNEARGVSAGSSIVETAGSVREEPEAEHHLRVEKARGSLRSYLTVVLGPRVGFPLRRGTNED

SEQ ID NO: 47187 - protein, 91 aa, Zea mays
  Coding DNA Sequence Number=SeqID_3812
  Gene Ontology: Mol. function=nucleic acid binding
  Homolog annotation: Hit_ID=Q5NKQ1; Match level="QueryCoverage=57%, HitCoverage=6%, E-value=1e-09, Identity=58%"; Hit description =Putative uncharacterized protein 9C20.4a
MASTGAGDDMQPVASVHRSPASAITRYREGVFVTPPTALMAPGHIDENTRSADVVGADKHIPMRHIGAHEYDTPHILQSHEESMAKGKKCK

SEQ ID NO: 47188 - protein, 104 aa, Zea mays
  Coding DNA Sequence Number=SeqID_3813
MPTALTGGAPKGPFVCILFCHFKGRIRRVIMRAHLRHGESLMVFDSTLSNDFANKPVRRQAETGGEERLENDQLTLQLGDFLRPRSMSNSAAKVAQPLHIFNAG

SEQ ID NO: 47189 - protein, 55 aa, Zea mays
  Coding DNA Sequence Number=SeqID_3814
MQAACNRAKWTRFSDSRHASMDAQAHASRNRRDRERGIPRKGSFPVKEPGSEPPY

SEQ ID NO: 47190 - protein, 175 aa, Zea mays
  Coding DNA Sequence Number=SeqID_3815
  Gene Ontology: Mol. function=cysteine-type peptidase activity; Biological process=proteolysis
  Homolog annotation: Hit_ID=Q5NKP7; Match level="QueryCoverage=98%, HitCoverage=25%, E-value=2e-40, Identity=46%"; Hit description =Putative uncharacterized protein 9C20.3c
MKNVDRPLSNPKRIIIQSTQECFSVDIPRVPANTVSHKPMHAGDEDDEFMPVLKKRNLASSPPRMMKKVVTKRMKAVDPPPPDRCKCFTLFPKMLDKLDHNDMTIRAGPGKELKITKEMVHLILGLPNAGGGKPLGVDEGVAANNLRAELGLSKEEFSVAALQDRLRKGFDDTFF

SEQ ID NO: 47191 - protein, 84 aa, Zea mays
  Coding DNA Sequence Number=SeqID_3816
MEKGQEQDRLARTHVDERRSARVCDRGRGSRLGRKNKVKAGKTNGTSNDGENDATARVSVRRIRGGGACSHALCREWGGAEVEA

SEQ ID NO: 47192 - protein, 211 aa, Zea mays
  Coding DNA Sequence Number=SeqID_3817
  Subcellular localization annotation: CTP_CleavageSite=51; ConfidenceScore=5.45e-01
MSSRSLMHRVFPPSKPPDGGYPPSFRLIVGGTQLRGSWYLSAIVRLQGFSSASPAVPPRRRSPETVTTSSWVGRSKPGCDLGATFSFKDVHHPRWGGGRAELALYLPRGFVGHPLPRRSRERALTGPAGGPDFDNAGLVDGWRRHLQRVGLVGLALGGPSCRRADAAPCARQDRPRCRARLGRRSCSGVVLPLHRRGIFTRRPVPHSSGRI

SEQ ID NO: 47193 - protein, 328 aa, Zea mays
  Coding DNA Sequence Number=SeqID_3818
  Homolog annotation: Hit_ID=Q5GAU8; Match level="QueryCoverage=9%, HitCoverage=22%, E-value=3e-07, Identity=83%"; Hit description =Putative uncharacterized protein
MTDAEKEVATERRMDSPHRCDCGDRVVIDEDTAKHFVCPNIDYPYRWRKCRFREWLYGPLSHWPEAEETRKCSWESYDDKGEVLRTIESKRLMGQKMRCGSQLVDSYINDRIHDMRRYAKSAFYDSPKRAEYRRLKAADEKRAQDVREWEAARAEKQMLDNLADRLKGKIGCGVNYMADEAHASNVQEKMATVELMEEEDDDTSRLSDLIALAEAGLDGEEEDDTSRLSELIALAEAGLRAQEEEDEFMSQAAEEVEAAYYKQKSDEAEAEAEDDLFSQAADEAEANYYKRTVDKCDARQCSKWNEVVVEDCTTDDSEDELLIYCDSD

SEQ ID NO: 47194 - protein, 86 aa, Zea mays
  Coding DNA Sequence Number=SeqID_3819
MAEKGTDLKGKRLSSPRWDVHKSIVNMKGMNKNRNDIKLQMYLRLERRSLAHSVAEPPELFQLKCLSHASGAVTHLNRNNPSVLQI

SEQ ID NO: 47195 - protein, 70 aa, Zea mays
  Coding DNA Sequence Number=SeqID_3820
MAEALAAMAGRIELAGAKERGLVGEGECGGERYGARKSDLSPCPNPRQIQGFVVSRSRVPMPSSSTRQRG

SEQ ID NO: 47196 - protein, 79 aa, Zea mays
  Coding DNA Sequence Number=SeqID_3821
MAGGIELAGAKERGLAGEEIWSQEIWSVSLPKPEANPRRQSCVMECQKASYKALPNATVEVIMDPILTEKAKYSCGPLH

SEQ ID NO: 47197 - protein, 177 aa, Zea mays
  Coding DNA Sequence Number=SeqID_3822
MNAYMFILRTEYFNNHPKTTNSITQLVPQTYLSYLKCLLEISFYKFKEHGTARSSPRVSTTTRRRCADRRREARSGECDAAKGVVAATAARAGTQTGGGAREEELGVCSSPVPRDGSGQTCRGRRSAQGELGLQEQQGEEVDGYWLRETVGKKGACASAHRSKGRQGCSVLGLLCAG

SEQ ID NO: 47198 - protein, 53 aa, Zea mays
  Coding DNA Sequence Number=SeqID_3823
MVGTSAVTARRQSESVRHCSLEDMVAGVTWSSILPSGWTVEWDPASAEEEHEE

SEQ ID NO: 47199 - protein, 135 aa, Zea mays
  Coding DNA Sequence Number=SeqID_3824
MEAIALHGLTTFCGFHPLELSTHPIGLFPAEKEDDPMWKDRVEHAKDIWAIYPELEELVGTRENTIEVLEDQLINTQQQLAEANQHLDMHHQEIQDMEANEDVDIEGGEEPASSLDTTGSRRPPSPESSVASFAH

SEQ ID NO: 47200 - protein, 296 aa, Zea mays
  Coding DNA Sequence Number=SeqID_3825
  Gene Ontology: Mol. function=protein serine/threonine kinase activity; Biological process=protein amino acid phosphorylation
  Homolog annotation: Hit_ID=Q33AJ9; Match level="QueryCoverage=27%, HitCoverage=12%, E-value=1e-11, Identity=54%"; Hit description =Calcium binding EGF domain containing protein
MEDARVLAVVFVDGEQSVDLGTVTVQPSFGGVKRLQAVVADRVGAAPHQISASLARPRRARHVPLDDATDLAAAVAREGSGCYVIAGFRRSRRGGRSRRDRKGVNGAAVEKTILKRLPPTDLASLVSPLPLPPRASAGASPGPLVLYDDYEARLRELQRQRDWYLMSTAGAGPGLDPAYLHLSVAAGHPDNEDPQQWSPRRRPSPCPECEAAAAAMRQPAFHWETGSLQLLASLLLTGGKGADLVIRGNVVLNTLSARSTSTLLRDQICINSPSIRQVSGLAELSYARGFDSPLHN

SEQ ID NO: 47201 - protein, 76 aa, Zea mays
  Coding DNA Sequence Number=SeqID_3826
MDLDAAAEAEEEERILEDFNEAEDARFFINEAAIALTAPNMVGPRDRETYLGHAELEMDLILTDDDASIPAVAAVL

SEQ ID NO: 47202 - protein, 227 aa, Zea mays
  Coding DNA Sequence Number=SeqID_3827
  Gene Ontology: Mol. function=transferase activity, transferring hexosyl groups; Cellular component=integral to membrane
  Homolog annotation: Hit_ID=Q10MQ0; Match level="QueryCoverage=38%, HitCoverage=19%, E-value=4e-16, Identity=52%"; Hit description =Glycosyltransferase 5, putative, expressed
  Subcellular localization annotation: CTP_CleavageSite=51; ConfidenceScore=5.12e-01
MLCPSSRPPPRHPRLPTLIPSAPLPMCSLAAIRGMSHPHRALAEHHDARSRASTTTTSSSSSSARCDDDPDPPPRSLRDPPYTLGPKIFDWDEQGAAWHRRHLETPPFLNDIKPRVLLVTTIYVVSGPIVLDKYQLHEAVQEKERGVESLGRTPCYKEMGSGRPRVTVGGTPLPALRHQEPTRPSIDYIARPLQQIALALSGMETLSAKHEDMVDVNLKPTSNQSNS

SEQ ID NO: 47203 - protein, 227 aa, Zea mays
  Coding DNA Sequence Number=SeqID_3828
  Gene Ontology: Mol. function=transferase activity; Cellular component= cytoplasm; Biological process=autophagic vacuole formation
  Homolog annotation: Hit_ID=A7P2T8; Match level="QueryCoverage=47%, HitCoverage=33%, E-value=3e-35, Identity=62%"; Hit description =Chromosome chr1 scaffold_5, whole genome shotgun sequence
MAEESVEIVEDGAADGGGIREDGIGCHPPRHGEKRVTAFARKIDLARRWDPLPNPRPPESSAGAAGSCDPWQGTFLGSRVHRRRSALVSPPTTPRCCRHGLLIDACSVHGLMRARQMTARSALDEVTDTGAFDRSPSTFRSSVSRDGRFPAVAGRYHLYVSYACPWASRCLAFLKLKGLDHAISVTVVKPIFERTKESDEHLGWVFPAAADKEPGAEPDPLRAPRGG

SEQ ID NO: 47204 - protein, 170 aa, Zea mays
  Coding DNA Sequence Number=SeqID_3829
MTKNTRDTRFIPRFGHTTKVPYFLVEAPTKSRVSFNPNPPFADHKARMKKNKRDLEMKHKNRSSQAHSKIPLQRLKWERQEMCVREREVFWVEMEFKSCSLLWERDCWSEVRGVRDQLNCPSGPVQLVLTREFRRENPSSTARRQVQLVYGQRGSQLKLSSAEVEKAQLS

SEQ ID NO: 47205 - protein, 170 aa, Zea mays
  Coding DNA Sequence Number=SeqID_3830
AKRDTKVFSDSELWIWSTARTKPEPDEGRKQPKLCAGKLRRDGIRGNRLKDEKTSGASTDFHKPSTNVMDMDRLRSSPQHWRPPPVNPLPLRVFVNTFGSYRPSLWRRRKLQRLRQHHYNRWTTTRRPSLFGSESAFIPFVSFGDLDNNTFKGLTSLLSVEQEIQYDEHT

SEQ ID NO: 47206 - protein, 197 aa, Zea mays
  Coding DNA Sequence Number=SeqID_3831
MSGWTIKMKQLEKGVILHGLTWMMQSVLLIHFKVATSQEETDMSLFIQGVVKLLLHKRRELWKRKSKATRAMNKMMKSTCLMMMKWMTLVNPHITVQLKLVLVVKKMQWMILIWEIFRFEASNEVRLIVYFSFVQFQASNEPQDHSNTAPATLNLKTQHQVCKLRACLVLECWVLKNKPPLIQLTQNHLILEFILET

SEQ ID NO: 47207 - protein, 156 aa, Zea mays
  Coding DNA Sequence Number=SeqID_3832
  Subcellular localization annotation: CTP_CleavageSite=57; ConfidenceScore=5.31e-01
GVAQAALSFCQTGQWSGGVTAVTSALPGARVRIEVSGHLCVKCPCNLVSRCGDLVKVASERSQGLGRAGDVSAIKRGPRARQKSLELYADGGYQLRIRRLEGTPNYGPRQVTPEAGGSGSDPAVGTGFVDSLFAFSPSGGEGGSGQSSNHPSGGYL

SEQ ID NO: 47208 - protein, 18 aa, Zea mays
  Coding DNA Sequence Number=SeqID_3833
MEGSLLASIGPAVSSMDI

SEQ ID NO: 47209 - protein, 283 aa, Zea mays
  Coding DNA Sequence Number=SeqID_3834
MSSIPPPASGLSAAIVVVARRWKKYHVIAAVEGHELKSPETKHRPGPERLLETAHLELDGELFVSTQRSPTWRANCRRFETGGSQSRRPESEPWGRAERSSPSSGSLARVRALGSGGAEFVVFRVLARVRALGSGGAEFAVFRVLARVRALGSGGAEFAVFRVLARVRALGSGGAEFAVFWVLARVRALGSSGAEFAVAPLARPDCLSDSPFALNAPATRPLQLYADGGYQLRIRRLEGTPNYGPRQDYGSVWFSFFLTSFSENLAVRRIWLWGESEYDYDYM

SEQ ID NO: 47210 - protein, 284 aa, Zea mays
  Coding DNA Sequence Number=SeqID_3835
  Subcellular localization annotation: CTP_CleavageSite=26; ConfidenceScore=5.35e-01
MSSRFLMHRVFPPSKPPDGGYPPSFRLVVGGTQLCGSWYLSAIVRLQGFSLVSPAASPRRWSPKTVTTSPWVGRSKPGCDLGPTLSFKDVHHPRWGGGRAEPELYLRAGSWVSLSLSVRGRERSLALREGRTSTTRGWSTTGVVSFSALGSPAWLPEPPPAARAVIAPCARKDRPRRRALPGRRSCSGAALPLHRYGASARRSVPRSSGRIRVGISRRADGPCRRCRGGGGSRSPRRRRDHRHHPRFGPPALCTCPRPSSVGVGEGRVAAAFALRPSLLQFGHP

SEQ ID NO: 47211 - protein, 635 aa, Zea mays
  Coding DNA Sequence Number=SeqID_3836
  Subcellular localization annotation: CTP_CleavageSite=68; ConfidenceScore=5.60e-01
MQAGSEQKKPNRRARCVQPPSGYKRPSTFAQTSRRKGGQPCRRHATVPCGRTSLTPNTPGTEAQAHASCNRRAECFVHAAAPPLAPPPRLLDCGTNTVTRGDPAHDPAAPAWRDGQYGQKWAGSNGGGRRAGAAVTSRRPWQEKRATLRLRHNDRVRKGEDEAVEGDFQEFQDYDEFRQSRSDRRHFAAPLAGLTKRQRRLRRSDCEDGELRSARPRARTWAQPQKTTNSAPPDPRGSDSALTSAVGLRLARPRGSDSTSATEDRLDLGFGGAYTSPNLGRRPPTSTGGAIITLPRADSGHGNKTGVPSGSLRQIGNDALCYTPHCTPGSSPYAYKRKDQGPPRGGWPRGDEDETGARLKPLAPSPAWTLVTPYCKRTRPGHGTNTKAAGFPPLSRLSPATSLPPFALGLASTHLGWGTRRHSLIGLGTPRSRNADKYYFEYCVMMSMLCNCCMARLRHTTQKSVIPFLPSRLAECPLRRPVAGQSSHLERLHHRLHEEQERRRQEQQGSSFSLQQEIDSVRSCSPVLPLEAPPAPPLGAPASGVAAGGDPDDGGGDDTDFSADQEPEGWVARPITRDAARGCHFHDALDTLLRRALNRRTWSIEYRCVVYQHSRGVYPDRWEVTCLVRRLENSL

SEQ ID NO: 47212 - protein, 54 aa, Zea mays
  Coding DNA Sequence Number=SeqID_3837
MGLGVCGSLCQVWVSPLGEECGGNETDGFGYDYGAGEDEAVEGDFQEFQDYDEF

SEQ ID NO: 47213 - protein, 342 aa, Zea mays
  Coding DNA Sequence Number=SeqID_3838
  Gene Ontology: Mol. function=small protein activating enzyme activity; Cellular component=nucleus; Biological process=protein modification process
  Homolog annotation: Hit_ID=A2WNC0; Match level="QueryCoverage=27%, HitCoverage=20%, E-value=1e-36, Identity=81%"; Hit description =Putative uncharacterized protein
  Pfam annotation: Domain name=E2_bind; Domain location=204-284; Score =38.4; E_value=2.5e-08; Accession=PF08825.1; Description=E2 binding domain
MVLLLQGQGRGALAFLGGGYGRLNGGEGHDQRGGGGRRVLQGGADGVHVRRLLQIGEGRRLGGGPAAGGAPAGRGEGRQLGDVSGRGVTDGWGNKLWHGAPSGRGPDRLPQHAKLAAYEYELIGLIWLAPEDYKIKGAAPCISRKETLGLREASVYYAGQDLALKDTLSQTRTVWEAYDTGCHVIYELKSNYKWFRTLFICCLFIKMLEEHPKLRMSKASVTHEGNNLYMQSPEVLEQMTRPNLSIPMFELLKEVPYTTVHATGMAENNGKKVSSLRKLRVAFKGIEDASKMDTTSLWLMLLVLLMVKTYIKGYKRVKEGGEAPRSFIGVEVKLRAIEWTFT

SEQ ID NO: 47214 - protein, 25 aa, Zea mays
  Coding DNA Sequence Number=SeqID_3839
MEELDNHRWHNGHPELRKREHVAPA

SEQ ID NO: 47215 - protein, 126 aa, Zea mays
  Coding DNA Sequence Number=SeqID_3840
MQVACNRTTGTHPLDFDASSMEAQAHTSCNRRAGYYVRETAPPLALMPRLLDCGTSVAIRGNPAHGPTVPTEHIGHGDRERGHFEKGSFSVKEAGPRALLLIRGSKAGPSEGFDSRLRALGLRAHY

SEQ ID NO: 47216 - protein, 61 aa, Zea mays
  Coding DNA Sequence Number=SeqID_3841
MAYQMLPLWVPIYTPSALQLGGPRLSLTFAILAKGRYVLHDLRLKIIIYPKGDNASKDEGL

SEQ ID NO: 47217 - protein, 235 aa, Zea mays
  Coding DNA Sequence Number=SeqID_3842
  Gene Ontology: Mol. function=endonuclease activity
  Homolog annotation: Hit_ID=Q2HUP4; Match level="QueryCoverage=24%, HitCoverage=19%, E-value=1e-14, Identity=59%"; Hit description =Endonuclease/exonuclease/phosphatase
MRRVSILCVQETKWKGKKAKEVENTGFKLWYSGTVANKNGVGILIDKTLKDGVVDVKRNQSWKIETTEPVTAIYNTRYGETEERQSMKNSISEKFINSFLKHESEYRTLILPLSLSKNILYYLQVLRCFETSTENFHLVVLMRGGGGSVIITGTTEHAKVVVRGGCAVQGEAGSRVAHRLRGKAVEEVYGGVQGLCLVAGGERCLEAKAVGHISGGANHAFGPAVLGRGVGKRET

SEQ ID NO: 47218 - protein, 92 aa, Zea mays
  Coding DNA Sequence Number=SeqID_3843
MKAGEHREDKEGECFVRFGHGGGLTPSGITVKVRTCEERKRFGIRVHDEKGDRPPGTSNCITFESQGIGALQVVSELLGWPQDVTLSLIKSF

SEQ ID NO: 47219 - protein, 343 aa, Zea mays
  Coding DNA Sequence Number=SeqID_3844
MEVRCQTSFCQNEDGFPKLLKACIVRLGIRSQPEYDGREFVEHGTEKCVVAVYIGSSPHHVEWSVTAAGHRFKDTCQVVARKALRAMCQIYEEEVANTPLRFFPPFQRDRPVWMARMRALEGQQLLEDDPTVAYLTAYLLTLDAQYDFLARHHRQMIARAEDAEKLNRKLHVDLTSAQARVAALESREAIAVEALKQAKDEHVQKLMEAYLVTHNQHRALWIQEPASSNPVQPIRVEDPQILEGHPISIRGEKKAMDKQEYPESSQDPLPELFEPLTMKKIPTPSLEVKEEAASTPPAPPPSEELQEPIQLEEEFDHVLSSQSPLEEVINISSLLTHPGDVSD

SEQ ID NO: 47220 - protein, 93 aa, Zea mays
  Coding DNA Sequence Number=SeqID_3845
MVMEQVTRGNKCDGGRDGVAGGNGGSVCAAKGAWGGGSAYGGRARVRGARVSGGVNDPDVCGLWFQESLPLCMLILGFKGKLPGIFLGKEHFS

SEQ ID NO: 47221 - protein, 93 aa, Zea mays
  Coding DNA Sequence Number=SeqID_3846
MSDDLVVPVHFEVGQEFCFRLLDHPLLVLLKLELLVSRQAESPKSMLTLFWSAKYPRRTGGGALWSGVDGAAEDRRRRLDLAPGRDPVGEERS

SEQ ID NO: 47222 - protein, 795 aa, Zea mays
  Coding DNA Sequence Number=SeqID_3847
MDVVELVPCARNKWGNWHEFWFYVAEGTVEDHPGLPVAEMCSHYYSAYPQFEVAEEDASEGALRCEAGLSSGRDLVEEFVAYGVWPLAHGWALGEVCPRQMPSHGGKLVRSPTFALDLHNRDPTAFVREAEDGAVRIVGRYVPKTEGQRSWDIRGSNDRLNRVFELNRLPYGGYPGKDDVDRRGKKPAVETGDDPAPAAAPSSKKRKLGIATGGLGVSDGFARELMRTCAAPGGRMSSPELRESSARMLRVTGGWWPKNVPIPLAAGEDFFTSRMVRDWRVFPYGRNIAAVVSAVMDKDRQGVAQKRQAVVRLHEARPKRPRGTAKATALGGSQPLLAAKSAAPRSSRVPEAAKAAAAGGTKSVPAGAVKARELPPPGKRVADFTTDISVEDYFVGLGEGQLVVVPPVVLTAAAAVVPRAKGSALSAGGEIPALTAVRDEAGAVSHRLKEALSQAADFADRAASGALTAVVSADVERLWAQHADAVREKSAADSKCRKLADKVAALEGEKADLRRQLAEERKEANEALAKAQSAQAEANLVRAEGSLARQRAEELEERLNALQTRVERTEASTRSEVERTRKQLMDSYHELGARTADFEVPDREPGLRCLEWLQEELLALPAIVEGFMSYASLVTCEGAMNALSREGCRHYEVFDQADEDFERDIYKVEDPVVKESAGALYDRMWGPYGREVVRERTETARGQVQDFGPAHATATANFLAASTVDDGNKSDGSASKFSDFGDSGSSVEWTEESSDEDLDYFAALDVAAAEASSHAADVEVVSGAHVVGLCADSLV

SEQ ID NO: 47223 - protein, 410 aa, Zea mays
  Coding DNA Sequence Number=SeqID_3848
MSFALPSCIVPFHLPSPPRMGDARNPSALSLEERNFVEVGTFRPSFGFKDFHRAARLHPLAGGHPRRGFGAAPGAAFRHGSWKRFRRRRASRRHPRTDLQLFGLLPVLASRVGGMGEGLMEAASALRSSLLLFGPPGQKSSSLPLPGRATTSRSSVFCCSAGPPVAWGCSYLRSTEPCFFFISSTETRLIDYLNRFTERELPRAKVTSEHRRRQSWLRKGGVVGQSLAGSSTGGTDAGVELPRPQAELMSLGVSWPRPRGGRLSRLLGPDSRRRPWRRWPGCGADVVLQSGGPPTASPSEARSDPAGGVVDAEGAAAPFGCRRPSLQDQYPDSFVGNRIVCAGESCFSRKAMSEGSVTDAVEKARKIISVEKLSSMKTCSVRGVTYPNVSYLSQKMMSEENFDAEGVAPF

SEQ ID NO: 47224 - protein, 151 aa, Zea mays
  Coding DNA Sequence Number=SeqID_3849
MGKSKKGSSSSPRSGDKRKREPTPPSEDFGDSEYSEEEFSSEFEGSPAPTSPPESSDNSDDSQGIAVEVWTYIRAVERAGLEGSDESEYSSDAEDSSDSSEEGSGSNGGGSNDDGGDGDGGDDSGKGGNGNGEGGHGGGRGSSRGSNQASG

SEQ ID NO: 47225 - protein, 175 aa, Zea mays
  Coding DNA Sequence Number=SeqID_3850
  Subcellular localization annotation: CTP_CleavageSite=41; ConfidenceScore=5.05e-01
MKVTSDNTQSEDLRVDYFQKSTRSSGATPIGCTFGAPNEVRSPAVRNADLRSKSLRQNTNFQVIKAEGDNYSCSNTKALCLQLEMAMGTRYPKPVGMGNPLGTRNPHEYGFGQNFIPVMGMGFLAGVFFLREYGFGEVIPSGFLPIAISTCNAVRTNAGLLLELGRDAPVLARLW

SEQ ID NO: 47226 - protein, 162 aa, Zea mays
  Coding DNA Sequence Number=SeqID_3851
MTRGPGPPRVRGWTAAFGEDEEARRFAPRMVVRLLRTQEPARQVHDMWAWAPMPEVGDVVCGEDEEAHYRESVARSLHGGSPSPHSETSALAVLVWEAKLCVRTPWTAIPNTRTPVAEWWSVQAYGQQAGLMRADLTELAYTYAQPSYKREKNSTPQTCFYG

SEQ ID NO: 47227 - protein, 227 aa, Zea mays
  Coding DNA Sequence Number=SeqID_3852
MADPETALNVASYMTKLELMRVVEAWPIWSENGLLKQLKLKAAGLAVDCVHTLECTENNVKQYEGLALADSSLPRLPQFPSAFGLVAVVVATPTRAVAAVLRRSGVDDDTHIRPDMFLLAVGRHHIDLDVGAARPTGTQVLNEYMKCRGHSINNFQQYSDAYLNVDQYMEAYRALCEIWASPECIEKSNMNQHKQRHQQDEEDDEVVVNHTYGADGHIQLAKRMVRA

SEQ ID NO: 47228 - protein, 62 aa, Zea mays
  Coding DNA Sequence Number=SeqID_3853
MNVCELTLAVSHPPQVKNRYRRMRRLEDAAIQEDEVWVSGGRDDDILPAAGDHYLRAPRGAE

SEQ ID NO: 47229 - protein, 96 aa, Zea mays
  Coding DNA Sequence Number=SeqID_3854
MGVPDLCARWRAINALQIHEGQGRIKLTRLWCTSCSLDAKTKVVVNEHKLMQFQVAEFVAELCVDECKRLYKLNYFPASKKPLGSRRKIVAGTNLA

SEQ ID NO: 47230 - protein, 214 aa, Zea mays
  Coding DNA Sequence Number=SeqID_3855
  Gene Ontology: Mol. function=pyridoxal phosphate binding; Cellular component=chloroplast; Biological process=amino acid metabolic process
  Homolog annotation: Hit_ID=P0AGF8; Match level="QueryCoverage=98%, HitCoverage=63%, E-value=2e-93, Identity=85%"; Hit description =Threonine dehydratase catabolic
  Pfam annotation: Domain name=PALP; Domain location=1-214; Score=82.5; E_value=1.4e-21; Accession=PF00291.16; Description=Pyridoxal -phosphate dependent enzyme
MLGIDGKVVMPKGAPKSKVAATCDYSAEVVLHGDNFNDTIAKVSEIVEMEGRIFIPPYDDPKVIAGQGTIGLEIMEDLYDVDNVIVPIGGGGLIAGIAVAIKSINPTIRVIGVQSENVHGMAASFHSGEITTHRTTGTLADGCDVSRPGNLTYEIVRELVDDIVLVSEDEIRNSMIALIQRNKVVTEGAGALACAALLSGKLDQYIQNRKNHQT

SEQ ID NO: 47231 - protein, 305 aa, Zea mays
  Coding DNA Sequence Number=SeqID_3856
  Homolog annotation: Hit_ID=A2Y842; Match level="QueryCoverage=88%, HitCoverage=88%, E-value=6e-25, Identity=61%"; Hit description =Putative uncharacterized protein
  Pfam annotation: Domain name=HSP20; Domain location=28-124; Score =18.1; E_value=6.4e-05; Accession=PF00011.12; Description=Hsp20alpha crystallin family
MATAGSKQGGGSSKPPAAAGQELDPRYEWEENASSFILRIHLSEGFRKQDFRVQVDGAGRLTVRGQRSDAAAANANARHSRFNKVFQLPSTSNLDDIAGRFDLGVLTLTVPKRLPAPAKEDQQQAKKPEDADADAAAATKQVAGAKGAKSEPEQQHKEAAAKEDKPKAAAAAAAPAPAADTTAKEDKPKAAAAAPAPAADTKKQPETQANAESKATDPTESLAERRTEEERANANAAAAAEHQRKACRGFKERVAEELQGLAGSEWAEGLVETVKRNREVIAVAVAAFSLGVFVSSRLFSRSSRN

SEQ ID NO: 47232 - protein, 293 aa, Zea mays
  Coding DNA Sequence Number=SeqID_3857
  Gene Ontology: Mol. function=helicase activity
  Homolog annotation: Hit_ID=Q2R4F5; Match level="QueryCoverage=93%, HitCoverage=35%, E-value=1e-44, Identity=36%"; Hit description =Putative uncharacterized protein
MGDILIPSLMVGDCSRTLCLRVSRLWEFLDPQDDSRLLHTDLVLLDEEGNSIHAQIYPPLCQQFSALLDEGGIYNLNVNALAISMVDVLGVVSVISRVSSLHTRGRQAEVMKRTVTISNARDTGPTVDVVLWGERATTFPAEQVHRDSESSPQIIIFVGTLLSSSPNLITVIPKLACLNSAETNHLPVIWDQGKAAAESTVIAVPEHKKLKDIKYLHHFENKKKEWLVIVKVLKIDSSWWYNACKKCLRTTKPHGDTYKCTNNSCDNIGSPTPRCCMNAAVAEKAKYEKPGKA

SEQ ID NO: 47233 - protein, 722 aa, Zea mays
  Coding DNA Sequence Number=SeqID_3858
  Homolog annotation: Hit_ID=Q4FX62; Match level="QueryCoverage=89%, HitCoverage=3%, E-value=4e-08, Identity=18%"; Hit description =Proteophosphoglycan 5
MAERYQLPRSCVPPTTRRKDCGCPPSGGLEGGKTRCIRERVDMVAFQGGHPPFKGDSPYLRPQPSWAESSPARSKVLPYGAGAGAHTSCKLAQSRRSQTTARGACNRPAVTSSSPLLPRPAGERAGSYAGGMQPRQVGAPLRLPMCPAWKPTPTRHATGAPVATYKQLHRHSHHCHASSTAEPVPRLEATLRTTQQCQPGATVDAAKNGPAVMAVAGEREQRSRRQPSLRPILGQGSERRFAFAIMTTSKKGPGKGDTSKRTLLREGNRLRASLLIRGSKAGPSEGFKSRLRARGLHTHYWSEVRRPAPRKGSTAASGHSGSVPTTDQGLGGCSRKLGSGQTVDSVNIPARELGTRPCTRATASSHEGTTRPAEALREALRPRRSQTTPPRPRGLHPAGALARTHRNKTQPRKAGPLAKKCDESLQASANTPFEAQGLLSGTIIRGTLKSPNSQLVTPISIKLQRPDGCDKSGIGPFEGLDHASPEPSLGQGQPTPGGFPSRLRPPSSDEHTYGSPEALSSPRSNPDQIAAPTDQIAGAFNAKKDSAACAAPTAVPLDKGSDSGSAPEDGELRSTRPRARTWAQPRKTTNSAPPDPGLGLGISPRRRRTPLRLSQGSDLGSAPEDDELRFARPQGSDSALASADGLRLARPRGSDSTMTTVDRLDLDLGGSSTLPNLGRGPTTSTRGAIITLPQADSGYGEQDGVPSGSPRQIGNDGAPHAL

SEQ ID NO: 47234 - protein, 392 aa, Zea mays
  Coding DNA Sequence Number=SeqID_3859
  Homolog annotation: Hit_ID=Q8H6I0; Match level="QueryCoverage=8%, HitCoverage=1%, E-value=2e-08, Identity=87%"; Hit description =Putative gag-pol polyprotein
MALIIKSFRQILKQRRGKDYKSRSKSVCYQCVKVTGTKIRRGRRRKDTTERRAAMHIYVGNEAPTKAPPTPPPTRTPPTSPSIKASSSPTPATSASWQRTIRRRRRPHLRRGARSASCNPPRSWPHPSRSSTINGATAASSPSRINDIAVPSRGRIPVRAIHGPRFALNPRPHPSSIPWRNPLTPGRIPVRAIHGAIQFRLATSQFHPATAPSTAQRPHPVPPASTTQSIDPDSPQPVLPALPHPVHANNSIDPDSCNPDAIHQFAQSRCNPDAIRARFRERFPSFSTLSWKTTIHGVAAAAPAINSIAPAIPFPTALTFHRSCPSLAGQSSPERLPPHTSLPVIPREDKEVHGLLSQRPDWNKDLLLQGCKLKLVDLEGAIQVDVEECDFL

SEQ ID NO: 47235 - protein, 49 aa, Zea mays
  Coding DNA Sequence Number=SeqID_3860
MAGGNELAGAKERWLAGEGNGKGRMKMGEFDDYWAHAYKGNSAVPHSDP

SEQ ID NO: 47236 - protein, 161 aa, Zea mays
  Coding DNA Sequence Number=SeqID_3861
MDQDIQENINGADPDTKRWLEDHKHLVFGFFKDAVAVTCILHRLNRCPRSSTTNHPQSSLVQLKDPVSQDAWSRLRHMLTRSGRRRPPRRRRPPPPSGRERERERERNKEADEVTVELRAVGFDKEVVLKQRRRMRRRRRLGEEERAAILLMALSSGVVYA

SEQ ID NO: 47237 - protein, 47 aa, Zea mays
  Coding DNA Sequence Number=SeqID_3862
  Subcellular localization annotation: CTP_CleavageSite=28; ConfidenceScore=5.11e-01
MAAQQQQQRSKQKKQPGWGNTVPTAFVRRRRGRGGDQGKASDRETGS

SEQ ID NO: 47238 - protein, 132 aa, Zea mays
  Coding DNA Sequence Number=SeqID_3863
MAPDGFCRASYFTESLALDKDFFVECLSMSSVLSSVNEICGTGGARELLCVALLLAAVVVQHTCSARPLQQETTTTPAPAKEGFGGLLHAAAQVHVDAAGAAAAAAQGQVGDAAVPYEDKRLSPGGPDPQHH

SEQ ID NO: 47239 - protein, 76 aa, Zea mays
  Coding DNA Sequence Number=SeqID_3864
MATRAAWAPSLRASCAGEAGTVLRAFRGARPAEPCLRLLGGKGAAEVRPAASFDTVPTSGTQGAEGTVHPGAVTTT

SEQ ID NO: 47240 - protein, 37 aa, Zea mays
  Coding DNA Sequence Number=SeqID_3865
  Homolog annotation: Hit_ID=Q6QP54; Match level="QueryCoverage=83%, HitCoverage=10%, E-value=2e-08, Identity=90%"; Hit description =Putative kinase
MAPPVDVAGLRPRLGDVEAPPKPRSSLSEASRSFGTQ

SEQ ID NO: 47241 - protein, 104 aa, Zea mays
  Coding DNA Sequence Number=SeqID_3866
  Gene Ontology: Mol. function=kinase activity; Cellular component =ornithine carbamoyltransferase complex; Biological process=amino acid metabolic process
  Homolog annotation: Hit_ID=Q6QP54; Match level="QueryCoverage=67%, HitCoverage=24%, E-value=6e-15, Identity=61%"; Hit description =Putative kinase
MPLWQPERFWHPAGVMSWPSEERWSLAEGQLSERVMMAPPVDVAGLRPRLGDVEAPPKPRSSLSSVAEAESEPLGRARRRSSAEARAESEPWGRAKRSSSSSGT

SEQ ID NO: 47242 - protein, 139 aa, Zea mays
  Coding DNA Sequence Number=SeqID_3867
MAGRYQLPRSCVPPTMRRKDGRYPPSGGLEGGKTRCIRESEDMGPGKGDTPKRILPREGTRLRASLLIRGSKAGPPEGFDSRLRSRGPYTHYWSEVRRPAPRKGSTAASGYSGSAPITDQGFEGWPPKGSQLPQTPSEG

SEQ ID NO: 47243 - protein, 755 aa, Zea mays
  Coding DNA Sequence Number=SeqID_3868
  Gene Ontology: Mol. function=DNA binding; Cellular component=nucleus; Biological process=regulation of transcription, DNA-dependent
  Homolog annotation: Hit_ID=Q0DGS1; Match level="QueryCoverage=100%, HitCoverage=100%, E-value=0.0, Identity=52%"; Hit description=Auxin response factor 14
  Pfam annotation: Domain name=Auxin_resp; Domain location=304-385; Score=126.1; E_value=1e-34; Accession=PF06507.4; Description=Auxin response factor
  Pfam annotation: Domain name=B3; Domain location=129-282; Score=50.4; E_value=6.2e-12; Accession=PF02362.12; Description=B3 DNA binding domain
  Pfam module annotation: Pfam domain module=Auxin_resp::B3; Domain location=304-385::129-282
MGIDLNAVGEDDPAGAVCAELWHACAGAGVALPRRGSAVVYLPQAHLAAGGCDGGGVSAPAPPRVPPHVVCRVVDVELRADAATDEVYARLALVAMDTMFGRNINDGETEEKNGEEEDGDGEKKHASHMFCKTLTASDTSTHGGFSVPRRAAEDCFPPLDYEQLRPSQELIAKDLHGMKWSVCFFMVHMGSECALFSPKERNVMLGKCYVQELVDETGSATVIQDEFLKQEFIYCGQPRRHLLTTGWSSFINKKKLVSGDAVLFLRGNDGELRLGVRRAVQLKNEALLEAVNCTDSKLLMLSAVANSLDNRSIFHICFNPRVGASEFIVPYCKFLKSLNYHFSVGTRFKVGCENEDANERSFGLIIGISEVDPIHWPGSKWKSLLLAMYLNKLVMVFHFAVFFLGGSRITIKIKWDGATKYSHQNRVSPWDIEGVGSSVSVTHRLSSSVSKRTKLCFPPSDLDTPILDGNGRPDSVETERFHRVLQGQELVHSSIHGTACSHSSDSPRCQGSYGRRFSADAWNCKMNDVMSGPRHLNATGFAYQPLGFSESVKFSEVLQGQEMSQAVPSFMRSAFNSGTQNGRVRPFDYVQRSDATQGYALQQFNLPATEVHSPSSVLMFNQTMVPHAELDGATNREEVHGSRYLSSNAIGREAEPWPSMQQQRASVNGSEPLDTTEASAPARNAESGSVGRGAGRSNCKLFGFSLTEKILGTDGGGVKEGNYEVDRQTPRVLDLFGHGSTPGALHALCAAPLGI

SEQ ID NO: 47244 - protein, 193 aa, Zea mays
  Coding DNA Sequence Number=SeqID_3869
  Gene Ontology: Mol. function=kinase activity; Cellular component =ornithine carbamoyltransferase complex; Biological process=amino acid metabolic process
  Homolog annotation: Hit_ID=Q6QP54; Match level="QueryCoverage=37%, HitCoverage=25%, E-value=3e-14, Identity=58%"; Hit description =Putative kinase
MAPPVDVVGPCPSLGEVEAPPRSRSSLSSKVEVESEPPGRTRRRPSADARAESEPWGRAKRSSSSFGTEPESEPWGRAKRSSSSSGAEPESEPWGQVKRSSSSSGAEPESEPWGRADRSSSSSGAEPEFRALGSDGADSRCGAGDAVLLSDRSVERRSDCGHFGSVDWRACVRIKLCADGGYQLRFRSLEGYP

SEQ ID NO: 47245 - protein, 176 aa, Zea mays
  Coding DNA Sequence Number=SeqID_3870
  Gene Ontology: Mol. function=protein-tyrosine kinase activity; Biological process=protein amino acid phosphorylation
  Homolog annotation: Hit_ID=A3AA52; Match level="QueryCoverage=97%, HitCoverage=29%, E-value=3e-76, Identity=81%"; Hit description =Putative uncharacterized protein
  Pfam annotation: Domain name=LysM; Domain location=92-138; Score=7.6; E_value=0.1; Accession=PF01476.11; Description=LysM domain
MATAAPVSVEGFNCTANHMYPCQAYALYRAGFTGVPLYLAAIGDLFAVSRFMVAHANNLSTTAAPANGQPLLVPLQWGCPSRSPSSYAPMQYQIGSGDTYWIVSTTKLQNLTQYQAVERVNPTPVPTVLDVGTMVTFPVFCQCPAAVDNATTLVTYVMQLGDTYVSIAAAFSVAYP

SEQ ID NO: 47246 - protein, 181 aa, Zea mays
  Coding DNA Sequence Number=SeqID_3871
MASGRTPLQPCPRPHRRTRGEDKYKEPEARSADGGGDPVGDEDFSSRIHPGTDDRSRQPIGRSPLGSSRTSGAPTSARRRRTGAKAGQPQNTNATLAARDVLGGPPPRVVEVRPSRRASERPLPRMLKERLTHGPAQEVELRLSPASAPARMMNILEAEGGTRIAARLASPHPGAGGHRLG

SEQ ID NO: 47247 - protein, 47 aa, Zea mays
  Coding DNA Sequence Number=SeqID_3872
MDDGAITEELRLDMMTKTMYDEDQKGTKTLQSLMIRVMVIDECHGHK

SEQ ID NO: 47248 - protein, 102 aa, Zea mays
  Coding DNA Sequence Number=SeqID_3873
MALFSQSQLCLGAPDSVGWCTGQCLVRQADSGELAALGKRLTAYDYNSPDCPCKGERLQVVEIPRKRDIVKQSKTPWYSSESLDRLRGVDCNPRPLGHHNVD

SEQ ID NO: 47249 - protein, 378 aa, Zea mays
  Coding DNA Sequence Number=SeqID_3874
  Subcellular localization annotation: CTP_CleavageSite=18; ConfidenceScore=5.54e-01
MSSRSLMHRIFPPSKPPDGGYPSSFRLIVGGTQLRGSWYLSAVVRLQGFSSASPAVPPRRRSPKTVTTSSWVGRSKPGCDLGPTLSFKDVHHPRWGGGRVEPALYLPRGFVGHPLPRRSRERALTGSAGGPDFDNARLVDGGRRHLQRVGLVGSAPGGPSCRRAAAAPCAREGHPRCRALLGRRSCSGVALPLHWRGIFTRRPAEAVREVPVADGITATIRASGLQIFVLVLAPRASVAGGSEPLVSLLLLRRPSPLEWGYSPVGCLNRFTKHESPRVKVTSEESTSRGLGSGWRPWKMVGRGPRGDRPSRLLGPDSRRRPWRRWPGRGDDVVLRSGGLRTASPSEARSNLAEVVVNAEGAAAPFQRQDPSLQDQIVL

SEQ ID NO: 47250 - protein, 218 aa, Zea mays
  Coding DNA Sequence Number=SeqID_3875
MAALSSLTEAGGRQQGLNRSDSCPSARLRRSSDGHDITPAGCQDLSAAAAVPIWRASGGDPGGQQRCRLEAGDRRWRSTRNERRWRSTGSSPASPPGPSRACLLGLGLGGSGTAEEAEMAAALMDVAAASAAASAAVFSTVASVSAAASSCSNKKAPSAFVAAAFAKKPETPTTADVAQEKHEELERCIDECESGSEVVFRSIVRNRVSLLNIHSPAI

SEQ ID NO: 47251 - protein, 235 aa, Zea mays
  Coding DNA Sequence Number=SeqID_3876
MQAACNRAKWTRFSDSQRTQPEGPGPRGPGKGDTPKKILPREGTGLRASLLIRGTLGHFRDQRERSCNGIPSKGGIEPSDPVARGPGPADHPQRLGGCSRKPGSDRTVDSVNIPARELGPRPYTRATASSHEGTTRPDEALRKALRPRRSETTPPRPRGLHPAGALARTRRNKMQPRKAGPLAKKCDESLQASANTPFEAQGLLSGTIIRGTLKTPNSQLVTPISIKLQRPDGCD

SEQ ID NO: 47252 - protein, 299 aa, Zea mays
  Coding DNA Sequence Number=SeqID_3877
  Homolog annotation: Hit_ID=Q7XBD4; Match level="QueryCoverage=51%, HitCoverage=14%, E-value=7e-07, Identity=25%"; Hit description =Cinful1 polyprotein
MLNLFEKYASDAEPWLIRLHYNYKFEDKFREPSDRWLDYVEAKCNEILGCVKIEDAIALIAEKVVPLKPLSESEEEEDEERIAPVIAHSSILAKGDVAIPRSPKLGLTTVLVTPSSIVIAEEKSSKLHYSKDKCIASLEAELKRAKEEYEVETNKKRQASAQAVVDLSAAQVKIEDLKDEVNHVRQLNENYQILAANCYTLDNRCYNELMKIFSSVGATSHEKNFVDGDIDGLIQWMLSEIHAYKNVIIEVNHSEAKAKDVAIEAEAVAARVAKKAAYDVVLKIYEQIDHEVMHDHKGN

SEQ ID NO: 47253 - protein, 74 aa, Zea mays
  Coding DNA Sequence Number=SeqID_3878
MTKIRACRRWSSTGRSLGKITFMSLTFTISQKELCISQPTYIGGGFGGLDYTKYKGEGGFGFGIKVFSRDRVKI

SEQ ID NO: 47254 - protein, 25 aa, Zea mays
  Coding DNA Sequence Number=SeqID_3879
MKMEPVVVDFFDDMLQHNGVAIFCF

SEQ ID NO: 47255 - protein, 637 aa, Zea mays
  Coding DNA Sequence Number=SeqID_3880
  Gene Ontology: Cellular component=ribonucleoprotein complex; Biological process=mRNA metabolic process
  Homolog annotation: Hit_ID=A2X7M1; Match level="QueryCoverage=90%, HitCoverage=91%, E-value=6e-84, Identity=39%"; Hit description =Putative uncharacterized protein
  Pfam annotation: Domain name=Peptidase_M7; Domain location=376-495; Score=-13.3; E_value=0.078; Accession=PF02031.7; Description =Streptomyces extracellular neutral proteinase (M7) family
MGLCFSKKQQEKRRDVQPSSDAKKSGCRKSGRDTVLVADAKKAPQAKAPALPKKAVARPEEATADKRTVFVVKAAAAAAAAEVAAAAKGRPEDAQAKRAAPEEELRPGAVGRAPVRTSSCTKEELDAILIQCGRLSRSSSSSGKAPSGEHRRYAGSKRSYDFDHERRGGGGDVDECDWGREGAAVARPSPRRRSPERKRSSSHDGRAGSGSGSQSRRISRSPGRRADVVPAPGSSATGERGARQQPGKMVSVPAREKGRAPSPVKAASSGKRYPSPRSNSPARAAASGNENAGVQSTHGPSLSRSTSRKAEQSPFRRNPMAELDENTLGNHHHHNSNGRPLKKSVDGAVVLPQKTAERTKDQISSCRTAKEIADEAVASDTKAAPARMNATHSVSIVAENVTNPRPGSRSSRRSSRDFEHNGNTYASLLLEDIQNQQQQSTSAATVAAAPTFALPACVSKACSILEAVADLNSSSSENKNFELERSVNDKESVNGRYGGKGAVTLVMESEVGVKDDLMEPSMHKYVSVRDIRGETEPQESAGSNSFAGNAWTCSWEPNSVDSADRTWTASQSYNGDEVEQSWQSKQKPSSSKEPSHVGSTSDVQVQRVRGAHRLRGSSSAVNGQSDVRGVSASSSIA

SEQ ID NO: 47256 - protein, 320 aa, Zea mays
  Coding DNA Sequence Number=SeqID_3881
  Gene Ontology: Mol. function=binding; Cellular component=integral to membrane; Biological process=transport
  Homolog annotation: Hit_ID=A2XVQ7; Match level="QueryCoverage=54%, HitCoverage=44%, E-value=5e-71, Identity=66%"; Hit description =Putative uncharacterized protein
  Pfam annotation: Domain name=Mito_carr; Domain location=93-255; Score= 0.5; E_value=0.0027; Accession=PF00153.18; Description=Mitochondrial carrier protein
MVTIFTGPRNYMGRSPMPEAAEMVGGSKPLGESVFAVHAVAGAAAISASAVAVYPLDTLGATGQKQKMGLRQVVDRLMAASGPADGREDNYVYYSEAMKAGIAAGAVEAVFCTPFELFKLRNQVSSVIPSKAMGPANVAQESFPLLSKLLPGYVPDIRVWNNTMSLLSDLSPKHPDMLGALKQHPWMLTGSGKPPLPSDVHLPSRVILLEGWGALWRGLRSGIARDCVFGGFAGAIAAAASHTFDTAKSRSECTVVPKVLVDSNLAGSISWDLVKQIFCCSEWIGTPAKLQLLPFHGIFRYFPRQESNRGNSMLQPGINM

SEQ ID NO: 47257 - protein, 254 aa, Zea mays
  Coding DNA Sequence Number=SeqID_3882
MPETLKPNHIVKILFNFVKVQDRFPSWIRVLLRDHLVCGRRRRNSASHSGSAGEEAFPENLRESRNKAANSATSSAPGKDYVLQVRSREFIYTKNPIVHLVHRRVDTDYEEKRSKRDRSSSSFSSDTFALKEGQKKVCHHNNSFLPRRPLHRGKSGIISHLRRRANRAWGRTSSVRSSPTEETDAGIFGDIPKLGNGTRHSLYPEMKSRRWEKPLTNESLEKGGTLADEIADRLKSKLNRMRGYAERTLSSRET

SEQ ID NO: 47258 - protein, 267 aa, Zea mays
  Coding DNA Sequence Number=SeqID_3883
  Gene Ontology: Mol. function=aspartic-type endopeptidase activity; Biological process=DNA integration
  Homolog annotation: Hit_ID=Q2QVF2; Match level="QueryCoverage=81%, HitCoverage=24%, E-value=4e-17, Identity=28%"; Hit description =Transposon protein, putative, CACTA, En/Spm sub-class
MTNQSKAESASHGVGTRSQIDNFEVWEEDGMIHTRESLRLKTNISIYKKEDVPPKFVNGRPFLTTVQLSKLSTPDIRMHEWYMVASNKYKLEDFTFVVPENAFWSKDNIDPVRHLFFDDLWSLYHRQRMETNYLTLFCFFVHAHINGSQRLTLLHVGCNTWMIRRNNLRQGFLDPLMISQARYKEVARRHGEEYKDLDDAEFEKAVKQNQRKEIKKDLGGEHPEDKPNLSISLFPYGDKQPSGTVLCGYYVCEWCRVTLHYMVNRED

SEQ ID NO: 47259 - protein, 203 aa, Zea mays
  Coding DNA Sequence Number=SeqID_3884
MSGALSGAPLKFISEPGALGFLRRECLFPGPARPHLAEGAPDSPVHTGQSGAPGPETLTLVFQLIFKAVFVLTCRAAGVAGTEEVTDTATAVVVTADAGGTGGCGQTELRTGEVKAKVTGRSGEGPTEGIGGRSESLAQLEPEAEELECRTNEELHPRPESQKQEQKLAQESQAQDGRIQKRGVRPQVCPKTEEADQLRKDVA

SEQ ID NO: 47260 - protein, 142 aa, Zea mays
  Coding DNA Sequence Number=SeqID_3885
MGTAAHSALGLGGARARGRGRRRLASETVALGLGDGGALGDGHGGALGLGDGEGDGGALGDGARRRSGSGTGKGTVAHSEMGSAALGLGDGVEGASETVALGDGDGRSARRRWRLGSGSATAWRALTARRRGRERRRSSLAA

SEQ ID NO: 47261 - protein, 92 aa, Zea mays
  Coding DNA Sequence Number=SeqID_3886
MVDKVQINTKNQRKDKWKRLGSSSQDSAQSGCTGLFGGAPDSVRCAKLALINWPLSGLEGGGERLQVVEIPRKREREKRKEHRGIQVDHWIT

SEQ ID NO: 47262 - protein, 258 aa, Zea mays
  Coding DNA Sequence Number=SeqID_3887
  Homolog annotation: Hit_ID=Q8RU98; Match level="QueryCoverage=24%, HitCoverage=22%, E-value=3e-24, Identity=88%"; Hit description =Putative uncharacterized protein OSJNBb0075K12.8
MWRLRWDLGATGRQRVGELSIECENTATLTVEDVNLGYVEVVREVEATTCTRQGLAGIACWWLMIPIPGAVVRAFPGSMAWVTYFSVVAPSMSLVEKQWLVHEAHTSALQRLVLGPRLEAFSLPLLTLKSESNDDVVVPVGSPMVSVETLVLGSPTTGVDWPHMADGICQRPYLVAYHHIDRDLSTPLRRPLARREPLLGWFTGQSGGTPDSPVNYSGARRRIPESGWFGVVRPGAPDIAVLQFSAHSSSYAPIKLSP

SEQ ID NO: 47263 - protein, 159 aa, Zea mays
  Coding DNA Sequence Number=SeqID_3888
  Gene Ontology: Mol. function=aspartic-type endopeptidase activity; Biological process=DNA integration
  Homolog annotation: Hit_ID=O24587; Match level="QueryCoverage=30%, HitCoverage=4%, E-value=7e-09, Identity=66%"; Hit description=Pol
MGSHDLRAKWESRLMGKVCDLCRGLETDISAVLTVKKKSSRRISRSSRTSTSSRIRLATSPIRQRRHGCDVIMLKDPKKRLCPIVYHLSIQRTLKRFLKRAQNEFELTVKKIMSDNGSEFRIFSGGVFLRRKGINTEFLRSLHTTAKWCGREEDKDANR

SEQ ID NO: 47264 - protein, 349 aa, Zea mays
  Coding DNA Sequence Number=SeqID_3889
MALGLSSPQKSQPESGSSSSSESGGPYEANAQQVLRERAGVIRPLGVGVLRGNDARLRLRREVNARRVPRWGAGVVDSLDSQRGAASCLAMVAPPPPPSVGKVTGQTRMLLFRHAGKTSSIPPPSGGLTAVVVARRRKEYHVVAAVEGHELETPEMEQRPGLERLLETTHLELDGKLFVNTQQAPTRRANCRCFDPGRADALAVGGYKRSRGRERESLSVSPFSRAATFSYEGPGPSFYRCKERVQPELARGRVMMYPLRRGRSEPGVGRGGDSSEVEVESEPWGRARRSPSSEVEAESEPWGRARRRPSSEVEVEFEPWGRARRSFRWRLRLDSAAVSLTLAGGTQSE

SEQ ID NO: 47265 - protein, 151 aa, Zea mays
  Coding DNA Sequence Number=SeqID_3890
  Homolog annotation: Hit_ID=Q6QP51; Match level="QueryCoverage=32%, HitCoverage=22%, E-value=3e-16, Identity=81%"; Hit description =Putative growth-regulating factor 1
MQAACNCTTEMHPFDFDASSVEAQAHTSCNWRAGCYVRKTAPPLMPMPRLLDYGTSAATRGNPAHGPTVPTKHVGHRDRERGYSERDPSPRRKRAPSPPTDQRFEGWPLGRVRQPPQSTRAPRPLLVRGSKAGPSEGFDSRLRPLGLRAHY

SEQ ID NO: 47266 - protein, 358 aa, Zea mays
  Coding DNA Sequence Number=SeqID_3891
MERAEASTRSEVERTRKQLVDSYRELGARTADFEVPDREAGLRFLEWLQEELLALPTIVESFMSFASLVTCEGAMNALSREGVEDPVVKDSAGPLFDRMWGPHGREAVRERSNRARDQMARAEDVEYLGDLNSARPEAEVNPVLPEAEVNPEAGEGSFVGPVPTMSGEGSLPAPAPTAEGPLKAVAELAAEDPKAATGPSQVQDFGPAHATATDTANFVAASTVVAENDSGDSVSKFFESDDSGSSVVWTEESSDDDLDYFAALDVAATEASPRVVGAEVPGPSLGCRRRRAVAKRRVSEVEVGRLRVDRTGKRELLSSPAGASVGEGDLRSLFEGEELRIMLFNYREMGIIPKVEPM

SEQ ID NO: 47267 - protein, 98 aa, Zea mays
  Coding DNA Sequence Number=SeqID_3892
MKTKTMSHLKMIKTRKMINKFRIKDHRTQESTKQFKEIAPLTPYLPYRIEDALRDPVWVVAMQEELNNFTRNEAEVAVLPLLCLSYATDGSSFHCDCG

SEQ ID NO: 47268 - protein, 366 aa, Zea mays
  Coding DNA Sequence Number=SeqID_3893
  Gene Ontology: Mol. function=carboxyl- or carbamoyltransferase activity; Cellular component=ornithine carbamoyltransferase complex; Biological process=amino acid metabolic process
  Homolog annotation: Hit_ID=Q8SA97; Match level="QueryCoverage=42%, HitCoverage=23%, E-value=4e-09, Identity=33%"; Hit description =Ornithine carbamoyltransferase
MAPPVDVAGLRPRLGDVEAPPKPRLSLSSVAEVESEPLVRARRRPPAEAGAESEPWGRAKRSSSSSGAEPESEPWVGWSRVRRLLGLSPSPSPGSGGAEFAVFRGLARVRALGRAERSRSVERRSDGGHFGSVDWGARVRIKLYTDGGYQLRIRSLEARVLHVQFSCALFFLHATCAQPCFPPSLYFSLCAPSFFLLAPSRSSLPYALLSAELFPSRAVLLSLQFAAPMAELGPAPSCCSPWWPPDALLLAPALCCARPRSPPSSSLRASLLGVLLAPDAALGRYGVPRLQLPYALCFLARASSLVMLLLLLQLGPCSSPCSPWTFLRARSSAPARSQFSMALGRAKPSSAMGPHRRCPCFPAARS

SEQ ID NO: 47269 - protein, 579 aa, Zea mays
  Coding DNA Sequence Number=SeqID_3894
  Gene Ontology: Mol. function=lithium ion binding; Cellular component =integral to membrane; Biological process=calcium ion transport
  Homolog annotation: Hit_ID=Q2QLY2; Match level="QueryCoverage=84%, HitCoverage=83%, E-value=3e-84, Identity=42%"; Hit description =Sodium/calcium exchanger protein, expressed
  Pfam annotation: Domain name=Na_Ca_ex; Domain location=121-262; Score= 98.1; E_value=2.7e-26; Accession=PF01699.15; Description =Sodiumcalcium exchanger protein
  Pfam annotation: Domain name=Na_Ca_ex; Domain location=424-567; Score= 87.4; E_value=4.7e-23; Accession=PF01699.15; Description =Sodiumcalcium exchanger protein
  Pfam module annotation: Pfam domain module=Na_Ca_ex::Na_Ca_ex; Domain location=121-262::424-567
MASLRQLHKCRRNAAATAAFLLTLLSVAVARDHRPGVGRSSEAELRAPAPAPAQAGRSCEAQLRALPDHAARCRYLSWASHPACAPRGYVHYLRLFYCAFGGAPWLGAAALALWLLLLFYLLGDTASQYFCAALQGLSAALRLPPAIAGVTLLSLGNGAPDVLSSVVAFAAADADAGDVGLSSVLGGALFVSTVVAGVVAIVASSSGTRGGPVEIERAGFVRDVCFLLVALCYLLAVLLTGSVTVWAAASFLSLYAAYVLLVWTSHCCAEDGTTKPAVDDVAAAGPDPDLAAPLLAEDPDEPPALPISSKHAEAAAPPRRGRSSLARHALHALQWPLYLPRRLTIPDIAAHRWSKRYAVASALLAPLLLAAISSPSSPAAALSGAVAGTVLAAAAARGTSSSSPPAGRCRRLPWLAGGFLMSVLWSYLLARELVALLVSIGLIAGVRASVLGATVLAWGNSLGDLVADVAMAMHGGHGGAQTAVSGCYAGPVFNTVVGLGLSLTLAAGARFPRPYAIPADASAYQAAGFLAAGLVWAIVVLPARGMRLDKVLGVGLLLIYLGFLGVRLGSLSLGGANGS

SEQ ID NO: 47270 - protein, 20 aa, Zea mays
  Coding DNA Sequence Number=SeqID_3895
MARRWTGATVADLCGCTEDG

SEQ ID NO: 47271 - protein, 461 aa, Zea mays
  Coding DNA Sequence Number=SeqID_3896
MESHDLRAEWESRLVGGYEIDGSGYGYGAASPLQPNRILAEYVDVYSPLLYTPNPPQVVSIATTAQAKMKLWKETSRSSKITTSSRCGLAATPSRLPVKAALSTFLFRTLIYCKNYMDVSDMARLRHTARKSVIPFLPSRLAERPLRRPVAGQSSHLERLHHRLREEQERRRQEQRSSSLSLHQEIESVRSCSPVLSLEPPPAPPLGAPASGVAAGGDPDNGGGDDSSSHDTDFSANPEPEGWVARPITRDAARGCHFHDALDTLLRRAFDRHTWSVEYRCVVYQHSRRVYPDRWEATCLVRCPEDSLQGAEACSEHYSISERDSAEAAMQDAARRALSHYCSVFGGAADGLDLKYYPRRSSGSTGGVIVSPVGEGNPRLSSTVNLAAVLNTELDHALDELSRARAEIALLRAERAERRYLDGGSPRSRWDSAPVPLTSAWTPVLWQSRLQDQDKSRTIDR

SEQ ID NO: 47272 - protein, 66 aa, Zea mays
  Coding DNA Sequence Number=SeqID_3897
MSGGTPDSPGSGVMGHNMPPPVIPAPGGAYAGEGATPGENSNPLHDFVNEFFASIGSGHNSNDPDI

SEQ ID NO: 47273 - protein, 186 aa, Zea mays
  Coding DNA Sequence Number=SeqID_3898
  Pfam annotation: Domain name=Transposase_28; Domain location=13-153; Score=-58.4; E_value=0.028; Accession=PF04195.3; Description =Putative gypsy type transposon
MPSSSSSAANTPLADASSEDTLSNVAAEELHPGDTVEFGVSRISSRSGACSGAEEVPEPEGELVVFEAFFTAGLRLPAHRFVAEVLQRFEVQKRKIGHKIAQFGSCTFTPRTGKTSMEVMELVPCARNKWGNWWDFWFYVSEGEVEDHPGLPVAMMCSHYYVAYPQFEVAEDDEDEGALRCAAPHE

SEQ ID NO: 47274 - protein, 382 aa, Zea mays
  Coding DNA Sequence Number=SeqID_3899
MTEAKGSSQDSWSKFCASGEITSAATAKDMVGLVAQQLKHATQQLKHHNEVVRDKSATENKTHKLKEKLTATKAKKEDLGRQLAAEKEDANKACAEAQVARAEAKLAMQRAAEAEANHSSLCGCLDRAEASTRIEVDRAHALLVDAYWQLGARIAPFDASGKEVGLRFLGWLQEEMEVLPTIVTSLMSFAALVTCEGAVNGLSREGCRHFEVFDRSDEDIERGIFQVEEPVLKRSAGVLYDKMWGPHDRDIVWERFDRAMEQMAHDEEVEDLGDLESTVPLAVGARARVEESPVSPTDASEGPVEASVPTGEDTLVAIAPAAEDPATSVDPSQVPTCGPAQTTPADVTNFVAVATVVPADYSVSGSESESFSFDDEFGSPFS

SEQ ID NO: 47275 - protein, 314 aa, Zea mays
  Coding DNA Sequence Number=SeqID_3900
  Gene Ontology: Mol. function=aspartic-type endopeptidase activity; Biological process=DNA integration
  Homolog annotation: Hit_ID=Q10SZ0; Match level="QueryCoverage=26%, HitCoverage=3%, E-value=2e-09, Identity=37%"; Hit description =Retrotransposon protein, putative, unclassified
MSGGDGPPPVFYDDDFPYWKIRMETYLEAIDIGVYKAVTQGFPEPRDATNLVGDEYNYEKWNAKAKNTLFRGLCKGVLNRVRNHKNAHDLWLDICALHEGTKKEVNGLGLTQISQPYVVNAHEMYMHINDKDGSSSKKKDLALKASQEKKGKTKIQVEEESSSDDDLDTNIALMVRKTTKMRRNSIGKASNLIEERRNFSLARESPSPRWIATIVENLAILIINATSPRKTNSRARKMMKVMMRRNKRSYSRRKKASTICFTKRRMEKHILLVIGSPTLNPQAALLQVKKMMKRSPPSSRISLHHHHHLHLLHT

SEQ ID NO: 47276 - protein, 212 aa, Zea mays
  Coding DNA Sequence Number=SeqID_3901
MGLGVPFIAPRHLGAVGGQQGRLSLPSVGWRTGQSDGCCRFVAVGAPDTVRCPLPIVGAGHASTADCAADRCAGDRWLTEQSGAPPDSPVNYSRTPPNSPESGLFTGVQPGAPDSPVCQTELDFGFLAIEHAVESAWLLRPSPASPSGAIAAALGGILDGGRFLRLGADWLCCAPIVGFGCPDQSLAAKVWSRFCWTAEGPLASSEIHLSLM

SEQ ID NO: 47277 - protein, 124 aa, Zea mays
  Coding DNA Sequence Number=SeqID_3902
VCSRFLLTVCGTPAISSSLGTESGGGTNLAAFAARAPWPDLPRTWEFRCSNSDHLCLAYKFIGPGTHRLGRPEGKQRVIATVCHGLWRERNLTGGDEEAPSREAADLCLNHRYEHVPVVCHWLR

SEQ ID NO: 47278 - protein, 61 aa, Zea mays
  Coding DNA Sequence Number=SeqID_3903
MGKGGRGWGMEERGMGKPTGDGYGAAERVCLNGDGEGRRPRQGRRLGQGAAQKKCKVRHGA

SEQ ID NO: 47279 - protein, 215 aa, Zea mays
  Coding DNA Sequence Number=SeqID_3904
DALLDHLGSDQWRVMISGQNGNHGLWVKDIVVQVVMRLMVLVMVMVLMARLRHTARKSVIPFLPSRLAERPLRRPVAGQSSHLERLHHRLREEQERRRQEQRSSSLSLHQEIESVRSCSPVLSLEPPPAPPLGAPASGVAAGGDPDNGGGDDSSSHDTDFSANPEPEGWVARPITRDAARGCHFHDALDTLLRRAFDRHTWSVEYRCVVYQHSRG

SEQ ID NO: 47280 - protein, 114 aa, Zea mays
  Coding DNA Sequence Number=SeqID_3905
MGVPCYSLRPALSIQHAPFSSMEKPAASPLLAVLRGARRLFEKLCSKPHAAGSLFGGAIGQHAVMPPREPRVLRGEEGKPLDARRCVEQCTKPNRHRPHKHRLVLFMICAIEKW

SEQ ID NO: 47281 - protein, 300 aa, Zea mays
  Coding DNA Sequence Number=SeqID_3906
MSKTPAEPLRARAASPPSSDVFGTSRWSDRDKTGRDTLRSIRHQTKACDGVIPQCGLVQLRGPTEYVLIPEQGSVQEEDQEQASETAIEDLPAAPAIEMNSPTPASGGDSRFSSDFLSRDSFPSILWEVLNSAGYPTPPLYTVRLYEEHRVPHCRVWLTLEAHPLQPGWCSLDSETIGLRMDDTVEAAAMKTLTTFCGYHPLEMVMHPLGLFPAEKKDDPMWCNRVSHVKDVWAMYPDLVGRTAKLTLDSREDFVVNLSTELVEKDLQVERLSQHITTLEQQVEIRDNTIDVLENQLHDV

SEQ ID NO: 47282 - protein, 366 aa, Zea mays
  Coding DNA Sequence Number=SeqID_3907
  Subcellular localization annotation: CTP_CleavageSite=57; ConfidenceScore=5.42e-01
MAATRGMNPSLKADSPARSVVRSLPRCPPGYPSHDTGARSYRSYSWRAGLRVRRRRTAAHEACYRPAVVRLLHLRYDQRSRRRTTVQGACYRPAVVRPLVFAATSGPTSGMGAQAHMSCTRRADFWVQRSCTAARANTTSPWGRSCKCSDSRHPAHGPTKTLSAEVTGQSAAGIGGAVGVTMGRPAVIASTGAQGQRANRRSNFGPTCRLVSSPKAGPGATVGTLNQGYPLLKYEDTVPVRRSLAARRRQGHPADGTPIQSIVKQCARAARCTVFIIPYMRSFPYTSMQRRSRMSGHKKIALAANISGSKYYIRYVPRPTCRGSVPLYMPPLAIKGEACNVTTQTHLDQAQALSSQASTAIQHTVE

SEQ ID NO: 47283 - protein, 172 aa, Zea mays
  Coding DNA Sequence Number=SeqID_3908
  Subcellular localization annotation: CTP_CleavageSite=57; ConfidenceScore=5.72e-01
MAVATTAPTARQRRRLPQLRAARQQRQPPLKRTASLAAATTSAPGSLPSSGDRLSVPAMAKRSSPPSPYGGEDKTIQAMQLGARWKAVLAIWQDRVAKVRLLHKAGDHPFPSNAGERGGHQPVWEVKPRLSSLPTTTRLMNILEAKHRWKNAAPTRPCTSSRGKTRPVAPAR

SEQ ID NO: 47284 - protein, 215 aa, Zea mays
  Coding DNA Sequence Number=SeqID_3909
  Subcellular localization annotation: CTP_CleavageSite=22; ConfidenceScore=5.30e-01
MSSSSLMCRVFPSSKPPDGGPVASPRWWSPKMVTSSLMVGESEPGCGLCPSLSLKDFHHQGWGGESAELGCSVPGLQARVASEPLAAPASATAAGRGSSAGAIAGAGHGLTSNSTAFCPSLPHEFWHGRGPPGSGIQSERQVSPVDYLKRFTKRESPRVKVTSEYEQRQSWHENGNLVGRSLAGLPVSGADAGVDQPRPRVGLAPLEDGWPRPQG

SEQ ID NO: 47285 - protein, 147 aa, Zea mays
  Coding DNA Sequence Number=SeqID_3910
MKHNEFTTSTELKSLRQSIKCEETECGRLRMLRVCFSISSMRLGVPFIALRQLRAVGGILGRLILPSVGWRTGQSGAPPDSPCSCPVRDLLPFLVQPTVADSWQLAHRTLSGEHRTVRCLLPTVGAPKRRAKIAQPAVGAVDHWLTG

SEQ ID NO: 47286 - protein, 100 aa, Zea mays
  Coding DNA Sequence Number=SeqID_3911
MAKMSSPLSPYGGEDKTIQAMELGARRKAVLAAGDHPFPPNAGGRGRHQPVWEAKPRLSSLPTTARLMNILEAKPWWKNAAPTRPHTSSRGKTRPVAPAR

SEQ ID NO: 47287 - protein, 128 aa, Zea mays
  Coding DNA Sequence Number=SeqID_3912
MRPIGKEKMNSEQNFLNYSRKFRNLEDEILFKRAMLLLQLNFMQSLPLMILMFQMERGHLASAYSTGSGRLDTGIVPKALPCGLDYKLVTVGVPYAVDHFQHLRNEDSREKPHSETLAIHLGSEYGSS

SEQ ID NO: 47288 - protein, 305 aa, Zea mays
  Coding DNA Sequence Number=SeqID_3913
  Subcellular localization annotation: CTP_CleavageSite=71; ConfidenceScore=5.13e-01
MRAGRSPSARSGPKFSGWYVDAVNGLAGAGFARAAPEPLHRARGRSRTDSSFLHALLRRLSARRRGESAMLSSEGAEHGVSGELLAGLPRVAVLTPQLRRRGSGPGCIPSPAVTQDGDLQFDGGGKQAGLRPLPLPQPQGFSSPVLGRGVCRVGVGPCAGGSPLLPSVIGGKGVRRSWHGQLPRARLSEPSGFGAAPGAAFRHGSWKRFRRRRACRRHPRTDLQLFGLLPVLASRVGGMGEGLMAAASALRSSLLLFGPPGQKSSSLPLPGRATTSRSLVFCCSAGPPSRVGLFVPAEVEPEFRL

SEQ ID NO: 47289 - protein, 215 aa, Zea mays
  Coding DNA Sequence Number=SeqID_3914
  Subcellular localization annotation: CTP_CleavageSite=78; ConfidenceScore=5.09e-01
MQAACNRAKWARPFDSNKPRMEVQAHASCNRSSGHVASQAHVPSRGSEGALSHGVKTARPTGGASGGRSKQRFAFAIMIASKKGPGKGDTPKRTLLREGNRLRASLLIRGSKAGPSEGFNSRLRSIGFCAHYWLALEGFIVASDTERGMTMGNSASPDPRARTRAQPRKTANSAPPDLGLGLGLSPGRRRTPLRPTQGSDSGSAPEDGELRSARL

SEQ ID NO: 47290 - protein, 209 aa, Zea mays
  Coding DNA Sequence Number=SeqID_3915
MCLGVPFIAPRQLGAVENILGRQILPSVDWRTGQSGAPPDTVRLFARASLAHRTLSGAPLDTVRKREPTPPSEDFGDSEYSEEEFFFESEGSPAPVPPPASSDDSDDSQGIAAEVWTYIRAVERSGLVGSDESEYSSDEEDSSEEDGGGDGEGDDNDDDDDGGDGGDNGDGGDGGGRGGNDGNGRGGNGGSSRGSSGGGSSKGSNKASG

SEQ ID NO: 47291 - protein, 122 aa, Zea mays
  Coding DNA Sequence Number=SeqID_3916
MAPKRKASSSSATVIPPIDPNSQLPFAGHWWWRLSQKLVQPWMFRDLSVFARDVLAEPINLIFLLMSRKRKRDVFDKYLVWIGALVLRFLLLRRFPCLNLLTLTPMGVALVDRMASQLRSQA

SEQ ID NO: 47292 - protein, 101 aa, Zea mays
  Coding DNA Sequence Number=SeqID_3917
MGDNEAIKAKELEARPQVVLVVSPAEATTSAPGSLTSGSDYLCNGQPPPAEATTSATGSPRQRRQPPQHRRQRPPLHQWLVGDGGHPSACKKVLAPVLLRG

SEQ ID NO: 47293 - protein, 63 aa, Zea mays
  Coding DNA Sequence Number=SeqID_3918
MSTGKRHLDQIELLSVRRLLLNHLIISCGGGVRQQGILSNGLFYSPQYKQAQDTGKINITPNI

SEQ ID NO: 47294 - protein, 215 aa, Zea mays
  Coding DNA Sequence Number=SeqID_3919
  Subcellular localization annotation: CTP_CleavageSite=54; ConfidenceScore=5.16e-01
MSIPVAGGARATLQTVHLSSLLSKQCARAARCTVLIPYMRSFPLRDEATQISVVRAHGDYTGMASSRSILPFVPGPTCRGSEPLYMPPLNYKRGGMQRERTQTQVIQAYTQLKLLQQSNTQWSRVLRSGGPNHSKSSHVLVLDDRLTRQAKRLSPSLILGFRAGASATQPENSLSDSMVDYDLIIVLILLMALPMSIPVRLLNPLGRSPYLTQSL

SEQ ID NO: 47295 - protein, 363 aa, Zea mays
  Coding DNA Sequence Number=SeqID_3920
MMTSELNSQACSLGLSAKAGGPDSLGAGSEEREPIPWGGPEPVWPLSLVPYPKPCTLHHSMTGTLVFGAISPMGLATWGPELENGHLSPGEVRSRVAAQPGSVPWACTLHHSATGMLVYSLDKSSLHPKGAKYQGGIGYATHNRDKWYKLLDASGVALEVRGRCPCGTLQDGVTAVMAASMRVPLRRGPHPRPPTGGDNEAIKAKELEARPQVALVVSPAEVTTSAPGSLTSSSDHLYNGQPPPVEATTSATGSPCQWRRPPQHRRQRPPLHRWLASDGGRPSACRNFLAPVLLRGVGGGTKATEAKEPDTLQLTAPAAGRPRVAEVRLLRKASCRTVSPTVAEWFVPDARKTMDSVYRFGPL

SEQ ID NO: 47296 - protein, 128 aa, Zea mays
  Coding DNA Sequence Number=SeqID_3921
  Homolog annotation: Hit_ID=O48967; Match level="QueryCoverage=48%, HitCoverage=13%, E-value=1e-22, Identity=82%"; Hit description =Putative uncharacterized protein
MAGRRRPVAQYGTLYLDQGVRDEKLLEKLATHDVETVPTLFALADKCARAAEGRAWHSAPQTGVAQSGGSGAVPGTSSKDGSPPRHRPSKEKVDDGEVAAAERDLRYQSPEGDLKDVFTEGSYSGGDN

SEQ ID NO: 47297 - protein, 259 aa, Zea mays
  Coding DNA Sequence Number=SeqID_3922
  Subcellular localization annotation: CTP_CleavageSite=30; ConfidenceScore=5.14e-01
MSSRSLMHRVFPPSKPPDGGYLPSFRLIVGGTQLRGSWYLSAIVRLQGFSSHSPVAPLRWWSPKTVTSSSWMGRGKPGCDLDPALSVEGVRHPRWGGERGEPGLYLLRGSVGHLFFQLLVVAIALQPCGGDILQPCRGRRTVATQLGCNIPPSSSHSRRGQQRGSAGRRAIIHRTVRCTPDSVRCSKEARPPELASLGNGQQPLRYNSPDMSGAPILAHRTRNSACPVCTGHPGGPTSQKLQRSESNGSVDVVGAPDMS

SEQ ID NO: 47298 - protein, 234 aa, Zea mays
  Coding DNA Sequence Number=SeqID_3923
MQPRKAGPLAKKCDESLQASANTPFEARGLLSGTIIRGTLKTPNSQLVTPISIKLQRPNGKDQGPLREGWPRGDKDETGALLGPLASLSRVDACNPLLQAHPTWARDEHEGRGIPTSLTPVSGRLAPPPFALALALDPSGLGHAATLTRRPKGPPGLGTPTVSKETNVLCLSAGNRKNQVGIKDGFVQPKSAQSGCTGQCPVRQADSGKPAALGKSSAAYGYNSPDCPVTVGAK

SEQ ID NO: 47299 - protein, 175 aa, Zea mays
  Coding DNA Sequence Number=SeqID_3924
  Subcellular localization annotation: CTP_CleavageSite=58; ConfidenceScore=5.08e-01
MGVDKGRLVTVVGGERLPSSSINSAFASLVFSHLLLLSAACFLLLLALPPWARTTSASVSEYSEEEFSSESEGSPAPIPLRESSDDSDDSHGFAAEVWTYIRAVERSGLEGSDESEYSSDEEDSSEGGGGDGDDDDDGGSGGNDGDGGDDGDDGGSGGSKDGDGGSSRGSNRASG

SEQ ID NO: 47300 - protein, 537 aa, Zea mays
  Coding DNA Sequence Number=SeqID_3925
  Gene Ontology: Mol. function=metal ion binding
  Homolog annotation: Hit_ID=Q69QZ4; Match level="QueryCoverage=67%, HitCoverage=96%, E-value=1e-123, Identity=63%"; Hit description=Zinc finger protein-like
  Pfam annotation: Domain name=zf-C3HC4; Domain location=455-491; Score= 26.8; E_value=8.1e-05; Accession=PF00097.16; Description=Zinc finger, C3HC4 type (RING finger)
  Subcellular localization annotation: CTP_CleavageSite=64; ConfidenceScore=5.33e-01
MGAGSSRADAPSRRRARLGLGGCFGTRSSSSPAAAAEAHDGGSFTLAGSSSSSAIEVQSGRPVRALNFQASLAAKDLQISTASSPRLHSSSSTISHHLRFNHLNCHENKEDGLGTENAETSGLESSSRKAVMVRGSFSNEAVNSDMSGEGISFIGSELENIPSTVSTNETGGSAAESGLGPSLMASERIMSDLEGEVSPQGTSSTTAMTSERSDVSQASLTSMFPNSSIASSVIVEPMPDPISTRADVPIFSGPHGEPGGSILHDDMMSIFSNDGLGRSRDSSSSETRRSHRRILWDTFSRRGSRGYPEFDADDLGFYSTWLDLGDDIFEELGESRYFHRRRHGSIRIREHRRAVFDSGNEQGTAACPLGIHQTGRCTCDSFLVAEESSARASISRIVMLTEALFEVLDEIHRQPASLSLSMVSVQAPESVVNSLPCKSYKKLEAPQRSDDMEQCHICLTEYEDGDQIRILPCKHEFHLQCVDKWLKEIHRKHLGSPSSTFPVVALLQGVPSVPRRRLRSRLVKTLALPSLPHGTGR

SEQ ID NO: 47301 - protein, 44 aa, Zea mays
  Coding DNA Sequence Number=SeqID_3926
MAGSVREEPEAEHHLRVEKARGSLRSYSTECRLKLSLCGRDSNT

SEQ ID NO: 47302 - protein, 138 aa, Zea mays
  Coding DNA Sequence Number=SeqID_3927
MAKLTEALARLGRDWRELVTAAEALKAWRAVARRARGNFRLGTGSCSVTKVPVSECLVPRSIYAKTMSNEFGLSSNFSRACSREFGTTLIFGSPGFEFRKTENAVDPWKEVSSESGCGYTRAWSRRSLTEMEDDHDEG

SEQ ID NO: 47303 - protein, 111 aa, Zea mays
  Coding DNA Sequence Number=SeqID_3928
MAVMGSISENMYLCQDCEANALAQVAELSASLENLRAYCNTLHEEVHVLYDLLHPNVLLVVAAMGARPSGAASGGPDGELDLFGAPPSMNVADERSPEAGSGAGAAKDEEN

SEQ ID NO: 47304 - protein, 54 aa, Zea mays
  Coding DNA Sequence Number=SeqID_3929
  Homolog annotation: Hit_ID=P21434; Match level="QueryCoverage=61%, HitCoverage=12%, E-value=4e-07, Identity=81%"; Hit description =Chloroplast 50S ribosomal protein L2
MGVVKGKPPLVEKNPQPLGVILRLEEELGKGKNIVIVLFFVTLVIYWQKSKMSI

SEQ ID NO: 47305 - protein, 75 aa, Zea mays
  Coding DNA Sequence Number=SeqID_3930
MAISIVLLSVTAVVLLHLCGQRIKACQDGVECGASRRLSKHKEQQNRSYTKLHLKQSSDVVYRKSGSSVKSVREL

SEQ ID NO: 47306 - protein, 55 aa, Zea mays
  Coding DNA Sequence Number=SeqID_3931
MARVACTLHGKRLDGGVSVLSVRKQQKRRIFLQFLVRDIQMRECDGLKNLRFLME

SEQ ID NO: 47307 - protein, 275 aa, Zea mays
  Coding DNA Sequence Number=SeqID_3932
MGRGKRGRGLPRRAGNKRKRDPCPPSEDFSDSEYSEEVSSMSEGSPALAFPPVSSNDSNDSQGLAAEVWMYIRSVERAGLEGSDESEVSSDEENSGSSEERSSDNSDDEGGVSHPGFRGPKPGREHNHQFIGISNAGIPRMTAIAAKSSQGPPYTDQSPTVLAPFRRALLHNRLAERVWITTGRWITIKRCGLDLVAIELPSHEQGNLRTSRLQSTAPTKAAAQDFGCYKFYFSNSNLSQNFEYKDVIVDITPQPITLNQRSKSDKYHKNKHSSA

SEQ ID NO: 47308 - protein, 97 aa, Zea mays
  Coding DNA Sequence Number=SeqID_3933
  Homolog annotation: Hit_ID=Q5NKP3; Match level="QueryCoverage=97%, HitCoverage=40%, E-value=4e-11, Identity=41%"; Hit description =Putative uncharacterized protein 9C20.7
MAPREFEPTTPMQMRAVATATPHEALVLAKLIADEKKLGDYQFNNWKLSYVVACAAMYDKLRRAASWTRSRAAAPRCPSSSRGTSWLSPTSATLGLF

SEQ ID NO: 47309 - protein, 205 aa, Zea mays
  Coding DNA Sequence Number=SeqID_3934
  Subcellular localization annotation: CTP_CleavageSite=31; ConfidenceScore=5.28e-01
MNSTPVLFILHCNRTRVTPTFSPSVKPKHLRARTNTRYATLVHNPELGEQDIVVKNSGRKSKLGQGGRGVTGVRTEGKKKDGTWKFCIDYRKLNDMTIKNIYNLQAYGRHNGSRKDLLGASADDGSSVVSASRSRSDLLGGRRSRKAQWLSRRSTKGQGQAVGGQRLDASADGGTWAEGQGQADNRSASADGDNGSADGRRHSDD

SEQ ID NO: 47310 - protein, 83 aa, Zea mays
  Coding DNA Sequence Number=SeqID_3935
  Subcellular localization annotation: CTP_CleavageSite=15; ConfidenceScore=5.00e-01
MALAAAPARFRMSVRAYRARTAVLFRAHRRVWGLERFLECLSVRTCSLDDRPGKQCNHEGGKEREEGVKVDLQEFQYVDEFED

SEQ ID NO: 47311 - protein, 244 aa, Zea mays
  Coding DNA Sequence Number=SeqID_3936
MALAAAACLALGRELASEPLSAPASATAARRGSSADEIARAAHGPTSNSTAFCPSLPHEFGHGRGPPGSSIRPEVIAAAVWPPGAEVVVVAAAGAGDGAPFVVKGTPQPLFDEPRPEVAVSARTEAELARKEDLVGRSLAGSSASGTDAGIDLPRPRVGLMSSGDSWPRPRGGQPNRLPEPDSRRRPWRRRPGLGDDVVLQSGDPWTASPSEARSNLAEGVVDAEGAAALFKRQDPSLQDRIIL

SEQ ID NO: 47312 - protein, 193 aa, Zea mays
  Coding DNA Sequence Number=SeqID_3937
  Gene Ontology: Mol. function=carboxyl- or carbamoyltransferase activity; Cellular component=ornithine carbamoyltransferase complex; Biological process=amino acid metabolic process
  Homolog annotation: Hit_ID=Q8SA97; Match level="QueryCoverage=52%, HitCoverage=18%, E-value=3e-17, Identity=49%"; Hit description =Ornithine carbamoyltransferase
MEHRPGSERLLETAHLELDGKLFVNTQQAPTWRANCRRFETGGSLSRRVKCRRVPQPRWVGARPSAKGGSEVAGDGRERGGNPTAFVFVPRPGLRPRLGDVEAPPKPRSSPSSVAEVESEPLGRARRRPLAEARAEFEPWGRGKQSSLSSGAEPNSEPWVGRSGVRRILGLSPSRSPGSGGAEFAVFRDLARV

SEQ ID NO: 47313 - protein, 257 aa, Zea mays
  Coding DNA Sequence Number=SeqID_3938
  Gene Ontology: Mol. function=carboxyl- or carbamoyltransferase activity; Cellular component=ornithine carbamoyltransferase complex; Biological process=amino acid metabolic process
  Homolog annotation: Hit_ID=Q8SA97; Match level="QueryCoverage=73%, HitCoverage=24%, E-value=4e-16, Identity=36%"; Hit description =Ornithine carbamoyltransferase
MAPPVDVAGLRPRLGDVEAPPKPRSSPSSVAEVESEPLGRARRRPLAEARAEYEPWGRAKRSSSSSGAEPNPSPSPGSGGAEFAVFRDLARVRALGRAERSSSSSGAEPKSEPWVGRSGASYGRSVERRSDGGHFGSIGGRARVRIKASGCLCIKCSCDLVGRRGNLLYADGGYQLRIRSLEGTPNYGPRHPYCKRTRPGRGTNTKATGFPPLSRPSPATSLPPFALGLAPTHLGWGTRRQFTRRLRDPPVSKRRQD

SEQ ID NO: 47314 - protein, 259 aa, Zea mays
  Coding DNA Sequence Number=SeqID_3939
MKSRMELGLPSPEKSQQKLGSSSSSDPEGPYEGDVQQAFRERAGVVRLLGVGVSRGDGARLRLKREVDARRAPRRGAGAVDSLDSRRGAASRLALVAPPPPPLAGERTGRARMLFFHHAGKTSSIPPPTGGLSAAIVAVVRRWKEYHVVAAVEGHELKAPETEHRPGSERLLEIAHLELDGKLFVNTQQAPTWRANCRRFETQGSLSRRVKYRCVPQPRWVGARPSVKGGSEVAGDGRERGGNPAAFVFVPRPGRVRLQ

SEQ ID NO: 47315 - protein, 98 aa, Zea mays
  Coding DNA Sequence Number=SeqID_3940
MAPKPLGFYTKNVVYHLRHPLEKLETETQTFDSTLTSVLSLCGHVGQKLNNNCNLADGEYILVPEQGAAQEVAPDPAPEPAPEDLPATALEGKPRFYA

SEQ ID NO: 47316 - protein, 259 aa, Zea mays
  Coding DNA Sequence Number=SeqID_3941
MTSHRSSDDGNALTHTDGLAREGFPRILWEVLQGAGYTTPPQYAVQQFEKHRVPRCRVRMTLEPHPLQPGWRSLDSESFGYRAEDTIEAIALHGLTTFYGFHPLELATHPIGLFPPEKEDDPMWKDRVMRGEAMSHLMALLEATKITLDNREELVVDLSQEMVEKDLQVEQLSTDIQELEELVGTRENTIEVLEDQLINTQQQLAEANEHLDMHHQEIQDQEANEDVDIEGGDEPASSVDTAGSGRPPSPESSVASFAH

SEQ ID NO: 47317 - protein, 57 aa, Zea mays
  Coding DNA Sequence Number=SeqID_3942
  Homolog annotation: Hit_ID=Q6J9V9; Match level="QueryCoverage=85%, HitCoverage=17%, E-value=8e-18, Identity=89%"; Hit description =Putative uncharacterized protein
MAKATFRENDRRMEFVGDAKILRRNFVIDLLSYEDNSCRYVIPANIQQRLIDIAKKD

SEQ ID NO: 47318 - protein, 113 aa, Zea mays
  Coding DNA Sequence Number=SeqID_3943
MAGLGGQGRLESRERLQLLDPLACILCSTGVPEWREVTPMEQSCCRAPWSKEERWRRCGPRELGHGCTCWAPWKPQGGMGVMAGRKLLRAAVRRRAPCPSVREGAGRRMAWGE

SEQ ID NO: 47319 - protein, 234 aa, Zea mays
  Coding DNA Sequence Number=SeqID_3944
  Gene Ontology: Mol. function=oxidoreductase activity; Cellular component=extracellular region; Biological process=hydrogen peroxide catabolic process
  Homolog annotation: Hit_ID=Q5U1N7; Match level="QueryCoverage=46%, HitCoverage=33%, E-value=5e-43, Identity=80%"; Hit description=Class III peroxidase 56 precursor
  Pfam annotation: Domain name=peroxidase; Domain location=1-159; Score= 18.9; E_value=7.5e-08; Accession=PF00141.14; Description=Peroxidase
MPGLPSEKESIPNLILRGFGTIDRVKAKLEQACPEVVSCADILALVARDVVVLTKGPHGDVPIWRRDGRRSVKQDALDNLHAPFFDVGRNMCQFFMPKGLNAKDQIVLLGVGVCRVPTTVWWLVSSGVESGGGVRSDSGGRRDAVRWPTGWQVELDASRGTGTGRTTEQADDTRRRQKLGGRGSGVGTRGSGRPQMASRPADQAQRRRGLTWVSRELGAMIYGAELGHVGASKA

SEQ ID NO: 47320 - protein, 123 aa, Zea mays
  Coding DNA Sequence Number=SeqID_3945
  Homolog annotation: Hit_ID=A2WMD7; Match level="QueryCoverage=100%, HitCoverage=46%, E-value=1e-22, Identity=50%"; Hit description =Putative uncharacterized protein
MSVEGIVKVSVHYDISYFTPAKLHKMKLVVDIFLFHGTPFTEIGSSLGNQSLVRLEQRRVMNHTEMLCVQDEVEMDGRVVEQKGRMTAVAVEIRKKESGELVAIGRQWMTASRPKGATAHSKI

SEQ ID NO: 47321 - protein, 250 aa, Zea mays
  Coding DNA Sequence Number=SeqID_3946
  Homolog annotation: Hit_ID=Q6QP51; Match level="QueryCoverage=20%, HitCoverage=23%, E-value=2e-14, Identity=74%"; Hit description =Putative growth-regulating factor 1
  Subcellular localization annotation: CTP_CleavageSite=71; ConfidenceScore=5.12e-01
MARRRSQKNKKTPPKENNESKGQGFVYSRDAISPRQSPASGGNSSPRRIHASPEGLLKQRARPRLARSPARAGFVVKPPWPTRLTNRPYRRRIQCEDRLTPYPDTRASVSKVEENSAARPLSDCCATPPGVRLTTAKSSLRRNRKLRLARPWGLSLRRRSPPRRPQGTALASASEWWSPPRPTPGLGLNLGLGRWSPPRPTLKARPQPRPREESHPCPTPASASGGVFASPDLGLGPIAPRGMHHYPTPS

SEQ ID NO: 47322 - protein, 278 aa, Zea mays
  Coding DNA Sequence Number=SeqID_3947
  Homolog annotation: Hit_ID=Q6QP51; Match level="QueryCoverage=69%, HitCoverage=95%, E-value=1e-33, Identity=43%"; Hit description =Putative growth-regulating factor 1
MQVACNHTTRAHPFGFVASSMEAQAHTSCNRRAGYYVQETAPPLAPMSRLLDCRTSATTRGNPGKRHLWQAKQASFHLHHDDRVKKAAPEHSGFRLITDQGFEGWPLGRVRQPPQSTRAPRPLLIRGSKAGPSEGFDSRPRARRARDDSGYVCYMAEARATLPRRIQCEDRLTPYPDTRASVGKVEEEISTSPDPRAQPPPRPRKVVFASPDPRAQPQPRPRKVVSASPDPKARPQPRPREESRPRPTPASASGGVSASPDLGLGPTAPRGMHHYPTP

SEQ ID NO: 47323 - protein, 358 aa, Zea mays
  Coding DNA Sequence Number=SeqID_3948
MMTTSSMVGRSKPGCGLCPTLSFKDLHHPCWGGGRGEPGPASAWSGDPLLPPRSGERGVRRPGSWQLSRVWLPGLSGSGAASGATSHRWGGAWLSAHRTGGCCTVRTGGPSKTSHAARAVYVFLDCLVLTLTRRLRAEAGVATIRWRSAGAQVAAVVGAEVVVARGGFSADETVGATRGQTSGSLALIACPRPSSGDMGEGLVTAVSALSSSLLLFSRPERRSLSLLVQRSAASQLEFVILQTLRCGGCSYPREWNQSSVCNGTLSTGAWTEAESARKGALSAQKQVASQAEEVQQRRLELGQVIREQDQPWSHAAEAVSRADVLGGQLAEATERAAKVSAWAETLEETLAVMAQARC

SEQ ID NO: 47324 - protein, 61 aa, Zea mays
  Coding DNA Sequence Number=SeqID_3949
MASFIHTHHLRAAPRRAPRLRGHPGADLHVSPIITNYTIEMLSCRFEGSEALEQQNGLFSE

SEQ ID NO: 47325 - protein, 413 aa, Zea mays
  Coding DNA Sequence Number=SeqID_3950
  Homolog annotation: Hit_ID=A5HEG8; Match level="QueryCoverage=84%, HitCoverage=99%, E-value=1e-120, Identity=66%"; Hit description =Putative growth-regulating factor 9
  Pfam annotation: Domain name=QLQ; Domain location=13-49; Score=63.8; E_value=5.7e-16; Accession=PF08880.2; Description=QLQ
  Pfam annotation: Domain name=WRC; Domain location=81-120; Score=39.9; E_value=9.4e-09; Accession=PF08879.1; Description=WRC
  Pfam module annotation: Pfam domain module=QLQ::WRC; Domain location =13-49::81-120
MMMSGRAATAGRYPFTASQWQELEHQALIYKCLASGKPIPSYLMPPLRRILDSALATSPSLAAFPPQPSRSPPTRTRSPGGAGARTARRRCSKEAYPDSKYCEKHMHRGKNRSRKPVEMSLATPAPASSATSAAAAATSSSQAPSYHSPAPAVPYHAPYGAAYHHTQTQVTMSPFHLLHLETTHPHPPPPPPPPYYYADQRDYAYGKEVGERAFFSDGAGERDRQQQAAGQWQFKQLGTMEATKQPCTTPLLVPARRAKEDEEEEETRRQQQHCFVLGADLRLAERPSGAHDAAAQKPLRHFIDEWPHEKGSNKAGSWMGGLDGETTQLSMSIPMAAAADLPVTSRYQILVQRRPKFIKNAIAIAIAHLCGRYTNTVAPDLRAPLNAAKRAHTLAIRSPSFRALTTYLYDARY

SEQ ID NO: 47326 - protein, 159 aa, Zea mays
  Coding DNA Sequence Number=SeqID_3951
  Subcellular localization annotation: CTP_CleavageSite=67; ConfidenceScore=5.63e-01
MSGAPGDSDFKLFTLGNFQRSLRYNSPDCPVSVLQGRAASGTRQPRAFTSAASLKFTRLSGVHRTVRCNSGATAISAPTATCSAFNARQKRAEVRHAHSGAPDIEQYMSGVHRTSRRAQKTVLQRSTQRLFGDVAVAPDMSGVHRTVRCAIEQTASPNG

SEQ ID NO: 47327 - protein, 91 aa, Zea mays
  Coding DNA Sequence Number=SeqID_3952
MAVARRRWRDGGGRGRRWARRRCSAVGAAAVAATAGRGGGCAVSAGRGGGARGEAVRRRRRAGRLELAAIAGGGLHIWFETSTLRNGKLCE

SEQ ID NO: 47328 - protein, 284 aa, Zea mays
  Coding DNA Sequence Number=SeqID_3953
  Gene Ontology: Mol. function=nucleic acid binding; Cellular component= intracellular; Biological process=regulation of transcription
  Homolog annotation: Hit_ID=A2XA63; Match level="QueryCoverage=100%, HitCoverage=100%, E-value=5e-64, Identity=52%"; Hit description =Putative uncharacterized protein
MAKPQEVRSVDSFSQLPFIRPAPAPRDATIRLFGREFPSDHNQQQQDAASDSPDAANNGSTVTCESNGAAKSGAAAERKFECHYCCRNFPTSQALGGHQNAHKRERQHAKRAHLQASLAMHRYVPGHMYGLFNYYPHPHPIGGGARFDHPAPPPPPLQHYPMWTTSASPAGPYGGGPGSMSQPINGSPVPAGLWRVPPPPAATAMENFGVSARHGASGGTAFPVGPPGGEAAACKDDKAAVMMSLLSPSPSLSSCSSTSPETKLAGRYELARQKETVVSLDLHL

SEQ ID NO: 47329 - protein, 220 aa, Zea mays
  Coding DNA Sequence Number=SeqID_3954
MASAGCPHPRSTILYPDLPCDPDVCAKSCAKGLNNGNGTCVRPIGCDCVFCVPTAGQAAPLETELSSATKCSSDPAANTSYRASLKLGNGELGYLCPREGKKTIADEWCTEAAQPDADYGGPAARMTLAAAARSRSVAATRRTSIWEVLCCGGVELLGCGDVEKVGNGGAMEVGAESLACTEGDIVEVDRRRKPPVACMEDPHRRTARTRKKSYVLMSTR

SEQ ID NO: 47330 - protein, 148 aa, Zea mays
  Coding DNA Sequence Number=SeqID_3955
MAAGGEGASTDAEEEEALTGKGRIKTCRLKATLERTLEEPKLTLDHEPSSGLGSGAHIADAVATPAVTAVGLTQAVVVVVSDLKMVAAEGSCPSARPRPEEELWGHISWLGATDRCTRNVDPPMGVPTTGLADRHTTLIKGRQLGQHR

SEQ ID NO: 47331 - protein, 178 aa, Zea mays
  Coding DNA Sequence Number=SeqID_3956
MASTCRGRMLGFLRWNWCHDPQGAIPIGTLPAHGLGQDRLQGGGACRLAVLDHTKRPNGPKPPHRLVAGSGYSIRMSLYQLGRETAWVGKRPTPQFCFYGKNLWRCSIFHWLGRDDRLEESDSSAMGDADHRGGFRPLGEFVNGDKEVPVPADSPRKWSQDIHPHTENDQEGGIICRA

SEQ ID NO: 47332 - protein, 209 aa, Zea mays
  Coding DNA Sequence Number=SeqID_3957
  Homolog annotation: Hit_ID=Q6QP51; Match level="QueryCoverage=28%, HitCoverage=27%, E-value=1e-14, Identity=65%"; Hit description =Putative growth-regulating factor 1
MGPQVPVGGNPQISFANRREDGCLRDGVRTKIVQLHRVDVQNRSHKTTRRHSKPPLVKGDEAQHIPRRRGWGGSARRGHPLRLRVTGERAKQTFSNKGLQITRRGGGERPRVARRNNGHPVGHHQAEEVAAGRTRDRERRYSKRDPSSQRKRAPSPPTDQRFEGWPLGRVQQPPQSTRAPRPLLVRGSKAGPSEGFNGRLRPLGLHAHY

SEQ ID NO: 47333 - protein, 178 aa, Zea mays
  Coding DNA Sequence Number=SeqID_3958
MGSAHVAFVLLLLEKRNLAEVGTLQPSLGFKDFHQAAWLHSLTNGHAGWGGNHPPALRRRRPPAMRGKANCCCLARVQHSVLRPGDCGRLRRGVAQHVVRREGGTRVLGRSRSRFRGEDGSEDLLVRFGAAGARWCGVGGQVDAAVGAEVVAAGEGFSTDDTVNATLALGLQLFGFNG

SEQ ID NO: 47334 - protein, 360 aa, Zea mays
  Coding DNA Sequence Number=SeqID_3959
MPTLAAVRDEVGAVSRRLKEMKEALSQAADFADRAASGALTAVVSAEVERLQTQHADAVWEKSAADSKCRKLADKVAALEGEKTDLRRQLVEERREANEALAKAQAAQAEANLAWVEGGLARERAEQLEERLRALQSRVERAEAATRTEAERTRKQLMDSYHELGARIAEFEVPDREPGLRCLEWVQEELQALPTIVEGFMSYASLVTREGAMNALSREGCWHYEVFDQADEDFERDIYKVEDSVVKESAGALYDRMWGPHGREVVRERAETARGQVARGERVDDFGALNNTLPVLESNPAEAALEPLPETAEGAPEAPAAAAAGEGPPPETAEGIPDAPAAAAAGEGSRFWACARNRHY

SEQ ID NO: 47335 - protein, 341 aa, Zea mays
  Coding DNA Sequence Number=SeqID_3960
MEVVELVPCARNKWGNWQDFWFYVAEGTVEDHSGLPVSEMCSHFYSAYPPFEVAEEDADEGALRCAAGLSSGRDLVEEFIAYGVWPLAHGWALGEVCPRRMPSHGGKLGFELNRLPYGGYPGQDDVDRRGKKPVVESGDDPAPAAAPSSKKRKLGTAMGGLGVSDGFARELMRTCAAPGGRMSSPELRESSARMLRVTGGWWPRNVPIPRVVGEHFFTSRMVREWKVIPYGRNIATVVSAVMDKDRQGAAQKRQAVVRLHEARPKRQRGAAKAAAPGGSQPPLAAKSAIPASSRALEAAAAAGGSKTAKAAPASGRVPEAVKAARGLPPPGKRVADFATDI

SEQ ID NO: 47336 - protein, 233 aa, Zea mays
  Coding DNA Sequence Number=SeqID_3961
MSTISKVTCSLRALGVVPNDNGRSILPTGKVPLPPKSGFDVEDLDDVVVGGGLGPLDDDGTSGWVGDGFARCGMVAGGIAGGDNLHRGTGSKIFVTAVPGLCLFLLCCCRSFAMRGGVLVGDGVYLLLVELLGPGVFFEQLVELLQVFGQISDAVAVQDADAKTADCIMDCYVIVDRCILVYQVRVGASSVMMKDLAMVAVGGPSSSEAPKLRARELRHDSRKGNRLKREKAI

SEQ ID NO: 47337 - protein, 46 aa, Zea mays
  Coding DNA Sequence Number=SeqID_3962
MAMMGSTSEKMYLCQVKKLRTFVASVQRWYQKESTKTKAAGGKLLC

SEQ ID NO: 47338 - protein, 167 aa, Zea mays
  Coding DNA Sequence Number=SeqID_3963
MKKDRNLQNGIGIQMSQVQIKKVKETTKEGRNGKSKVADKKRNIDNRLMGIFCRNSDPTANPPRTKFLRRKNSNIDKVEEIRFRDNRHMVTCKGQLAVGVDGRDHYYSRILVLPLGRHRNLVGGLNRSEIREKQKYGLRRKGEVRAQNAEACDDVIKMGFSRVGHRF

SEQ ID NO: 47339 - protein, 101 aa, Zea mays
  Coding DNA Sequence Number=SeqID_3964
MASASLGGTRVDSELLPSHGRCPPHPVPSLSGVGDHWSTKFIEGGGLKRSSSPQGLLLLLQMVRLPSRQDPQGRSGAVVNTTHELLHVMYYNKPASYQQLS

SEQ ID NO: 47340 - protein, 177 aa, Zea mays
  Coding DNA Sequence Number=SeqID_3965
MGQSPEYEVYFRKTYPTNLPEAKLTHDEACDQLKGPRARLSIGKTFCKTGIQRKARSRRYENRNSCLPDVPQNCFSFGRKGKRKGVNSTGLNRAQNILRVTDILHRGPQNFVSSPNRSLTTARSPAITDAARTGHDRWWLSSLATGEALLTQGDPGTIVNFGLNTLRTACPCARRKP

SEQ ID NO: 47341 - protein, 134 aa, Zea mays
  Coding DNA Sequence Number=SeqID_3966
MRCIRGGKNEPDIYGDSGSRGDQNMMSKRIRLFDVAGTSQSGAEVDPNPPPPPIPPTLADAVAALVNATADNARVLCEVLQNKNQHGARVPSNNARNASYMEFMETRPPTLIKAEEPLEADEWLWVVEQKFGRI

SEQ ID NO: 47342 - protein, 171 aa, Zea mays
  Coding DNA Sequence Number=SeqID_3967
  Gene Ontology: Mol. function=structural constituent of ribosome; Cellular component=ribonucleoprotein complex; Biological process =translation
  Homolog annotation: Hit_ID=O22424; Match level="QueryCoverage=93%, HitCoverage=73%, E-value=2e-68, Identity=71%"; Hit description=40S ribosomal protein S4
  Pfam annotation: Domain name=RS4NT; Domain location=3-27; Score=26.9; E_value=7.6e-05; Accession=PF08071.3; Description=RS4NT (NUC023) domain
  Pfam annotation: Domain name=Ribosomal_S4e; Domain location=58-123; Score=87.7; E_value=3.6e-23; Accession=PF00900.11; Description =Ribosomal family S4e
  Pfam module annotation: Pfam domain module=RS4NT::Ribosomal_S4e; Domain location=3-27::58-123
MEYYWMLDKLGGAFAPKPSSGPHKSRECLPLILIIRNRLKYAPTYREMSFPSLRQTRTTGCFRLHPIRDEDAKFKLYKVRSVQFGQKDIPYLNTYDDRTIRYPDPLIKANDTIKIDLETNKIMDFIMFDVGNVVMVIGRRNTGRVGVIKIREKHKGNFETIHVLLGAFCYV

SEQ ID NO: 47343 - protein, 105 aa, Zea mays
  Coding DNA Sequence Number=SeqID_3968
MSGAPATSPVPLESDRWSSDFWARLDVRWRTGHELFSVWIGSGETDGALVTLGETEISLRRETLREGPRDNLGTPNYHTRQFGMKDTKPAKTPLGTDGHLDLDKG

SEQ ID NO: 47344 - protein, 201 aa, Zea mays
  Coding DNA Sequence Number=SeqID_3969
METRLHGEKSGEREPIEMEGPGETRGCLVLLRGGGAHQGNGHDKSSTAAMERTAEYGGAPRVCAWCEREVRGGLLGALLSEGSGRVSVGSKRGWARRGSGREMRDVDASTVECAGGMLGKGRWLTDRHNIPLRNSDPFLLCQHSFAAGTMLSLDSLEPFSYSLRLQAKFRDRTPTFRRVGPNATKFDNSSHIVLGTVTSLN

SEQ ID NO: 47345 - protein, 375 aa, Zea mays
  Coding DNA Sequence Number=SeqID_3970
MSCKLSASALASSTCSGIGVSREDGARLRLKREVDAPTRPPVGGAGDVDSLGSRRGAASRLALGCPRLLLLLAGERTGRARNVVLPTTRGKTSSIPPAGGAGCRPPLLLSRGRWKEYHVVAAVEGHEIKTPETEHRPGPERLLETAHLELDGKLFVNTQQAPTWRANCRRFETGGSLGRRVNVAACPSPDGSSVWASAKGGSEVAGDGRERGGNPAAFVFVPRPGRVGRRGGSSEAEVESVFRGRGRVRAPGSGEAEVVRQRPGRSPSPGVGRSGVRRLLGLSPSPSPGSGRAEFAVFRDLARVRAPGSGGAEFAVFRDLARVRALGRAERSSPSSGAEPESEPWVGRSGVRRLPGLSPSPSPRSGGAEFTVFRG

SEQ ID NO: 47346 - protein, 139 aa, Zea mays
  Coding DNA Sequence Number=SeqID_3971
MGKSKKGGSSSHHSGDKRKHEPSPPSEDFGDSEYSEEEFSSESEGLPVYASPPASSDDSDNSQGISAEVWTYIRTVERSLLEGSDESEISSDEEDSSDSSEEGSGGDGDDEGDDGDKGDGGSGKDDGGSGRASGKAPLA

SEQ ID NO: 47347 - protein, 215 aa, Zea mays
  Coding DNA Sequence Number=SeqID_3972
MGRRAIRVLNPDRSGGTILMAALCALRTQFRNLHPSLAQLVKSVIQLGVEHGDQVDHAAQSRITLTNGILHGCLSSVPLSDRIMLSEGLCTLEIIVRTAHQASPTQQGVESIVEMTTAGGVTSDGSGDPSFRLLLLQELRVVAQTATVVVSVSIRVFSSSRDALWWCRGHLWLRRRGGLPPRLHLLLRHGARVMLLLLLASALLLLAQAAMQSLQ

SEQ ID NO: 47348 - protein, 658 aa, Zea mays
  Coding DNA Sequence Number=SeqID_3973
MSVVELVPCARNKWGNWNEFWFYVAEGTVEDHEGLPVSEMCSHFYSAYPPFEVAEEDADEGALRCAAGLSSGRDLVEEFVAYGVWPLAHGWVLGEVCPRQMPSHGGKLVRSPAFVLDLQGRDPAAFVREVEDGAVQIVGRIDEDMRGPGGKDVFARAPGVFGADAKVMDKDHQGAAQKRQAVVRLQEVRPKRQRGAAKDAAPGRGKPPLAAKSAVPASSKAPEAAAGTGGSKTAKTVPAPSRVPEVAKAARGLPSSGKHVADFTTDISVDDYLGGSDEGQLVVVAPAAATTAAAVVPKAKGGALSAGGEMLALAAVRDEAGAMFRRLKEVKEVLSQAAAFADRAASGALTAVVSAEVERLRTQHADAVREKSAADSKCRKLADKVAALEGEKTDLRRQLAGERREVNEALAQAQAALVEAKAEAAARTEAERTRKQLMDSYRELGAQTAEFEVPDREPGLRCLEWVQEELQALPTIVEGFMSYASLVTCEGAMNALSREGCRHYEVFDQADEDFERDIYKVEDPIVKESAGAIYDRMWGPHGREVVRERAETGEGSGNAARDERVDDFGALNSALPDPESNLAEAVPESALEPPPETAESAPDVLASAAAGGGPPPETAEGAPDAPAAAAPRAEGPATVAAEAPAEATAEAPATAGSS

SEQ ID NO: 47349 - protein, 80 aa, Zea mays
  Coding DNA Sequence Number=SeqID_3974
MTIEEVSNRGHNIPRKLRVSNKAIFGRQLQGAEAPRASEEGFLKKHKNSSLRSMKRREGVFSPKAQKRFIHNGFSHANNF

SEQ ID NO: 47350 - protein, 154 aa, Zea mays
  Coding DNA Sequence Number=SeqID_3975
MDKDGHLEDGVGCEVLELNSELLQQQLEERRIWQRQPVEEIGNEEHKLPGGKIAEGSSAGPDPSGKRKRAPSEQATHRVERLLGLVMIRANHHGHGDHGGEKLGSRNAERRGRLGGERAEQLGKGQKQNHCARKNPFFMGRLPAHPGKIRLTHT

SEQ ID NO: 47351 - protein, 108 aa, Zea mays
  Coding DNA Sequence Number=SeqID_3976
MGDHVSGRVRRAICGQVHSGRPPTASCGWHHITGSIIISRSYMRIQLLARSKSAITAALSRFGQILTCNFKNSQLKIQASKQDDPRLSGKITKNSDPRLFGKLRKSPT

SEQ ID NO: 47352 - protein, 106 aa, Zea mays
  Coding DNA Sequence Number=SeqID_3977
MENHPGKQCYHKGGKLVEDYLTRKGKGDRGAAYREVLVSIMLRWLFRRGIPILPFSETVAGILKLVELCKGLIVLPCLVSSAEMNGKSRSLGKWVTRLMGKDAQPL

SEQ ID NO: 47353 - protein, 128 aa, Zea mays
  Coding DNA Sequence Number=SeqID_3978
MDMEHAEIGPGRSCAQGERLPVGEVRRGVPWSREQGRSQPRGGQGRRRAPRELLLLRQEAEGGGAAAMGESSLPEKRGAQLQPWRRRESCCCRGRTPARGRRRQGKSAGEERRDTKLSRVRFDQRTTY

SEQ ID NO: 47354 - protein, 110 aa, Zea mays
  Coding DNA Sequence Number=SeqID_3979
  Subcellular localization annotation: CTP_CleavageSite=33; ConfidenceScore=5.11e-01
MAKPGHATPPGPLLRKNDRTCTHHNRNGRPRLRSREEGNLRAGSLRIQLLARSKSAITAALSRFGQILTCNFKNSQLKIQASKQDDPRLSGKITKNSDPRLFGKLRKSPT

SEQ ID NO: 47355 - protein, 334 aa, Zea mays
  Coding DNA Sequence Number=SeqID_3980
  Gene Ontology: Mol. function=metal ion binding; Biological process =metal ion transport
  Homolog annotation: Hit_ID=Q94CS5; Match level="QueryCoverage=25%, HitCoverage=41%, E-value=3e-30, Identity=78%"; Hit description=Heavy- metal-associated domain-containing protein-like
  Pfam annotation: Domain name=HMA; Domain location=257-316; Score =51.6; E_value=2.7e-12; Accession=PF00403.17; Description=Heavy-metal- associated domain
MASLLRWKDKYVKERLQGLSCSSAAATSVVPSNGRAIDRHSPHLRDPHRRLPPPVPKPPRPSSSFSTTKDSSSSSYKQRQQICHFDVDGKDKRKNKKKKSTAAAAAGSGSSPSEHRRNGKEKALQLQQVSPASSSRFLLNSSRLMMQSDDETTAVDSLPPLPSPRRPSFVDAAAEDDTDTFPSSHGDAASPAVPSRRPQLVAPAPPLELFAEPSASGAGSSSSSSSEITGGHVVAAADNTVVVRSCSTRTGQHQVVVLRVSLHCKGCAGKVKKHLSKMEGVTSFDIDIATKKVTVVGDVTPLGVLNSISKVKSAQFWPDSRSSFSTPPRASASF

SEQ ID NO: 47356 - protein, 97 aa, Zea mays
  Coding DNA Sequence Number=SeqID_3981
MAWHMATLDTQTWLRGEVPGLGLADEDVDLLRGVDYDILALGMGYPGPRLNIINRVIISTRCIFFFGSLSRRTSKLSVLGLEKFGWVTDREVFLGCA

SEQ ID NO: 47357 - protein, 168 aa, Zea mays
  Coding DNA Sequence Number=SeqID_3982
MDEGCTQPLSSDPMINLNTTTFLLIVFLPFARNIHKLEPLTLTIKIPKKAQEGPIYSPKAARSHCMQTWKAILAFCRVAHRTVRLRSMVQVRTLRRSRGKLQTWWCRAKQPRGGKRSRESSRRRYDGGDGTSGSKKVVNLVLDPRNRDQRPMRRFTCVHRSASASEQE

SEQ ID NO: 47358 - protein, 110 aa, Zea mays
  Coding DNA Sequence Number=SeqID_3983
  Subcellular localization annotation: CTP_CleavageSite=99; ConfidenceScore=5.55e-01
MDNSSKFIKTGPIECNQWTPRIRSNPSSGNAYRLVLNRSVSICNVVLRQTPSLATFSPLATLTVRLVLGVSYRPRRGMAALLMKVCDDLELTNAVTDSQADLGWSHGSSV

SEQ ID NO: 47359 - protein, 172 aa, Zea mays
  Coding DNA Sequence Number=SeqID_3984
MADGPSTRCAATREPEVEDAGTNWWRRGHQWPVLVGNEDKPPPLLSAQCRHTAVATCHVCASPGSMRPCSSSSSGRVVVVVEWTVDWHAVGSPASMAIPRCRMAPVCARVLSAGAGARRLTQSPGTRHLALTGGRTEWESGGRRRIGPPTAGLWTAIEASPHRLAFRLSLTA

SEQ ID NO: 47360 - protein, 186 aa, Zea mays
  Coding DNA Sequence Number=SeqID_3985
MATPTRGKKRLVVDVDLELDSETEVAAAFSRLSVSILAKPTGDGSGKEHSTSKPVTCVATSGTFHTQQTHQQHPESNNSQMRCTPQQQIQCSAPRSVSLEDLAGNEIMDSPDTAKEVSVNFAMWRVYELAQSLEEEAHRLEDLEAGPSPPLSEYFNNQFDEDEHMGGGEWALDDVSSEELSDRQMK

SEQ ID NO: 47361 - protein, 249 aa, Zea mays
  Coding DNA Sequence Number=SeqID_3986
  Subcellular localization annotation: CTP_CleavageSite=80; ConfidenceScore=5.47e-01
MGDRSKQCYVWAPDAAPSGHVTQRSTASGLRCHGTTICPARPSFVTWTRPRPATNGNLQVNRPAAGPPLNTVLLLPTTCYAQYSTDVDPRAIDLAMKIAERIFLKMKEDEAKNKIEEENDRWRPNDESTSSQGSSFKSTSHMCFIANGSDSESESEDEEERESDSEDEDDLQQFFAQLSKKHRMSLLKLMKRAEEQKEMLHKQEDFLIRKIEDLEKLTKEHEKLKCSHDDLVQRITPSMDQVGCSIMNA

SEQ ID NO: 47362 - protein, 73 aa, Zea mays
  Coding DNA Sequence Number=SeqID_3987
MADKGKGKGIVISNSRMSDISQKEIARKASDEKAKRFSSYAFGSSNCTKRQGHMLEAKMSLATVGLSAVVART

SEQ ID NO: 47363 - protein, 26 aa, Zea mays
  Coding DNA Sequence Number=SeqID_3988
MPRNMVNRYLLDLVDGVTWPSSLPPG

SEQ ID NO: 47364 - protein, 115 aa, Zea mays
  Coding DNA Sequence Number=SeqID_3989
MESVSGLMKHWLTFMSKKYPEDLTPEMREALQNEGGDSYDQCTEDDKSENYAAKDTSSIQEDSNADVTSRTNEVHNMVHVEQQQQQSVHRSLGQTQVHTSTPHEQTPSKIAKQHN

SEQ ID NO: 47365 - protein, 90 aa, Zea mays
  Coding DNA Sequence Number=SeqID_3990
  Subcellular localization annotation: CTP_CleavageSite=51; ConfidenceScore=5.29e-01
MKTMRSTSASKIKVAQRKRVWVLTHRSKVSSRIVSIGLENLKVKATSPQVKLAESKSTQESRDQPMNQSHFLASLFLNLEGEILLRGLDL

SEQ ID NO: 47366 - protein, 197 aa, Zea mays
  Coding DNA Sequence Number=SeqID_3991
  Gene Ontology: Mol. function=aspartic-type endopeptidase activity; Biological process=DNA integration
  Homolog annotation: Hit_ID=Q2QYR6; Match level="QueryCoverage=38%, HitCoverage=5%, E-value=1e-07, Identity=42%"; Hit description =Retrotransposon protein, putative, Ty1-copia subclass
MSCEHGSKAWRFYNPATKRVLVSRDAVFEENRAWDWGDAEKVDYENPFCVEFMQIGGDQQLDNTPVREKNFAGPSRSPSTTQHMPVLILSESAEIERRGGRQLVRDEEIYSPYERGSNPCLGGFLLAEGPEKPTEAVMTPGSVEEVATAVSRGKHYRGVRQRSWGKFTAEIIHGNTETARTAPSAPSPTAPYTETRN

SEQ ID NO: 47367 - protein, 130 aa, Zea mays
  Coding DNA Sequence Number=SeqID_3992
MHISYALHSLDCNLADGEYVLIPEQGTVQEEDQEQAPEAAIKDLPAAPAIEGKPRYGGYKCGHCTVAAGVSGALYAKTVLLRMIGCWCDLAFIPATGIDGREGLPAGTIGLALERQAEVGLGWSGPYEGP

SEQ ID NO: 47368 - protein, 179 aa, Zea mays
  Coding DNA Sequence Number=SeqID_3993
  Homolog annotation: Hit_ID=Q6J9V9; Match level="QueryCoverage=51%, HitCoverage=32%, E-value=2e-38, Identity=84%"; Hit description =Putative uncharacterized protein
MEAEGTRDWERRHFEEVLLSKGNGPRALLLIRGSKVAPCGVRQPPQSTRALSPLLIRGSKASPSEGFNSRPRACRVRDDPGYVRYMAKARATLPRYPKTFPRPAGTDDDTIHPVQTTVPTTRVRLITVSHHLSRDRPRAQQEVPPRPIPASGSEGIVATPNPGLGLSLGLGRRSLPRPT

SEQ ID NO: 47369 - protein, 472 aa, Zea mays
  Coding DNA Sequence Number=SeqID_3994
  Gene Ontology: Mol. function=transferase activity; Cellular component= Golgi apparatus; Biological process=cell redox homeostasis
  Homolog annotation: Hit_ID=Q2V2S3; Match level="QueryCoverage=51%, HitCoverage=63%, E-value=7e-54, Identity=48%"; Hit description =Uncharacterized protein At4g19880.3
MSSSGSPPTSEPTTVVAVVLRGEEYHVIAAVGGHELETPKAEHHPRLKRLLKIVHLELNGKDKVSGDPRIKCARDTVGGKAIWPRLLFYKVCPSFASGEPGVCSLPEGTLERAVNPFGTTILARCWARMTARSALDEVTDTSAFDRSPSTFRSSVSRDGRFPVVAGRYHLYVSYACPWASRCLAFLKLKGLDHAIGVTVVKPIFEQTKESDEHLGWVFPVAADEEPGAEPDPLNGAQSVRELYEIASSNYAGKPTVPMSLQSRHSKSTKQAADLIPPPPFQHAEVQNSPTAKLIPVFHCISGAVGQAVEDGGEQRELQEHPDAQRRVQRHRQEPRAGPHPAHLWASIDEANELVYDAINNGVYKCGFAKKKDGCVLVPNLGSLTSIHDRARELFYYLKGGQVDYGEEHNKACGHNRLSLVMVLLKIVVVVMDGGNGRGSCGGKDQNNDKKPLHLVKGAFGQVFLNSIHIQVK

SEQ ID NO: 47370 - protein, 268 aa, Zea mays
  Coding DNA Sequence Number=SeqID_3995
MEKDRQDAAQKRWAVVRIVDPMRKAKRARESTKATASGSSKPVPATKPAAPEHSKASASAKAASSSGSKPPPGGPAKGRELPSSARRVADFGTNISVEDYFVGSGEGQLVVVPPPVATTSPTAVVGAKGAARDPWAAFCASGEILSAAAAKDVVGSMFQRLREASRHLSQQLKREADFADHVASGALTADMAAEVESLWAQHVDAVREKSTAEIKNRRLAEKVAAMEAEKTDLWRQLAEERREANQAIADAQAARAEAKVARAENESS

SEQ ID NO: 47371 - protein, 105 aa, Zea mays
  Coding DNA Sequence Number=SeqID_3996
MKPAPKAATQLPILTTTTKLFQAISPKGQGWRGLRRKVINLRLLLFRQVIHKLPGPTFHYHHHCHLLTPEASSQKGTGTPNSSATSERSLKLVQSIAMCQNRIIY

SEQ ID NO: 47372 - protein, 431 aa, Zea mays
  Coding DNA Sequence Number=SeqID_3997
  Gene Ontology: Mol. function=sequence-specific DNA binding; Cellular component=cytoplasm; Biological process=central nervous system development
  Homolog annotation: Hit_ID=A2YEL5; Match level="QueryCoverage=34%, HitCoverage=98%, E-value=1e-51, Identity=74%"; Hit description =Putative uncharacterized protein
  Pfam annotation: Domain name=HTH_3; Domain location=88-140; Score =37.3; E_value=5.4e-08; Accession=PF01381.13; Description=Helix-turn -helix
  Pfam annotation: Domain name=MBF1; Domain location=12-80; Score =109.5; E_value=1e-29; Accession=PF08523.1; Description=Multiprotein bridging factor 1
  Pfam module annotation: Pfam domain module=HTH_3::MBF1; Domain location=88-140::12-80
  Subcellular localization annotation: CTP_CleavageSite=49; ConfidenceScore=5.03e-01
MPTGRLSGNITQDWEPVVLRRTKPKAADLKSSKAVNQALRSGAAVETVRKSAAGMNKHSTTVAPARKLDETTEPTAVERVAVEVRAAIQKARVAKGWSQAELAKRINERAQVEYESGKAAPAQAVLAKMERALEVKLRGKGVGAPLAAVGKIVIGGILYDVKDLLRCLIDGVPLGGEIQVALVNAASSAHTRRDGNGYPKPEYPTGFTRYEGGYGIIYLPAEEEGFPHLLRSRALCLGIRKKPEYVWKEYRENGMENNKNTPTWKKRLQALSGGDPIEDDPTIVYMAGYLHTLDNHYDELSSHCTHLNSRVESLEQQVKELTQEKASLQESLSIVEGEEANTREAYRTLKIDFDKKLKALAPKKKIQKKTANQGCQTEKKKKKAPLALPPPRIDDWSDEEDVSLASLDDLLKAFGDTLDKELASTSKNDLV

SEQ ID NO: 47373 - protein, 255 aa, Zea mays
  Coding DNA Sequence Number=SeqID_3998
MKSRMALGLPSPEKSQPESGSSSSSEPGGPYEANTQQALRESAGVICPLGVGTLRGKDTRRHLRREVNARHVPRWGAGVVDSLDCRRDAASCAAMVAPPPPPAARKATGQTRMLFFRHGGKMSPSSPPPGELTAVVVAILLQGKEYHVVAAVKGHELEAPEAEQCPGLKRLLETTHLELNGKLFVNTQQALIWRANCRCFDPGGGDALAVGVTSVREGERASLFVSPSSRATLRMEALDLPFIDTRRGSRCTMGV

SEQ ID NO: 47374 - protein, 344 aa, Zea mays
  Coding DNA Sequence Number=SeqID_3999
  Gene Ontology: Mol. function=protein transporter activity; Cellular component=cytoplasmic vesicle; Biological process=intracellular protein transport
  Homolog annotation: Hit_ID=Q6H8D5; Match level="QueryCoverage=20%, HitCoverage=8%, E-value=3e-15, Identity=57%"; Hit description =Coatomer subunit beta'-2
MTYAERSNDSLVEVFKSMNVEEVPSDNGDPVHEVTEDDGVEGSMDDVVEVEPDDSTDGGVLVNGNDGEEHWETIDTMFSRFQSIDNKTCANKGIPAAGGDPDGDGDDDDAGGSSSHDTERSEEPEPEGWIVRPITHDAARGCHFHDALDTLLRRAFDRHTWSIEYRCVVYQHRRRLYPDQWEATCLVRRPDDDLWGAEAFSEHYSITERDTAETAMQDAARHALSQYCSLFSGVANGLDLKYYPRRSTGSAGGVIVSPVGEGNPRLSSMVNLIVVLNTELDHALDELGKVRAEVAELGAECATRHYIDGGSPAPVGIQHSYRSPPRGRFDYGTPDCRTRIDLDP

SEQ ID NO: 47375 - protein, 99 aa, Zea mays
  Coding DNA Sequence Number=SeqID_4000
MADVEVCRACRQRARAWLLNADEDESWHSEAVPTRWVRCLSRGFTMQGSWLGSPAAMAARSARCASAGRFRLWDEGTHVAGEAVFGRCTGTPGRGLAMA

SEQ ID NO: 47376 - protein, 124 aa, Zea mays
  Coding DNA Sequence Number=SeqID_4001
  Gene Ontology: Mol. function=aspartic-type endopeptidase activity; Cellular component=chromatin; Biological process=chromatin assembly or disassembly
  Homolog annotation: Hit_ID=Q8W1D1; Match level="QueryCoverage=62%, HitCoverage=5%, E-value=2e-11, Identity=48%"; Hit description=Gag-pol
MSTLKPSLGRSSGTTSVATMCPGTDDSEEGGVSRPEARSLVRQRRQQDAKRQYRFLRGLVDPLHYQLMNHSFPTFQHLIDRAIMTERKRWEMEDRKHKIGGPQAGSSSRPRYSGNSPQQFKQGH

SEQ ID NO: 47377 - protein, 194 aa, Zea mays
  Coding DNA Sequence Number=SeqID_4002
MVLSSNSYHLMQQSSEKDFKIAREVANAPGLAFVHSSAGKRKRKRLRGTGPDSAQRPKTREESARARPRPGGFTERSSGFLLTGDGFGHCYVESLTGSTSVAEESSNNARRSEEEEGYWCSGWVSNTVALAPAINEEQGRVTAMRWKGADTRRKTERRRSPTCLSLQPQSRRGRRRAKTLYSERYKAPKLSQYH

SEQ ID NO: 47378 - protein, 28 aa, Zea mays
  Coding DNA Sequence Number=SeqID_4003
MVKNKLEGLAPMDRGNGEGCVEKFNGQV

SEQ ID NO: 47379 - protein, 238 aa, Zea mays
  Coding DNA Sequence Number=SeqID_4004
MGFYGVLGHMHLAALGQGGVLRNPSWAMLELALRCKVSECPASCVKDACALCNTPGVTQGVHPRQKDRIWSREATVHSDFAKIRTLGRSNPPLNHGRSKLPRVRRELTSGGALRARPCANPRAPAATRDHAHATAIKPAPVLGCLPRCLLRTSPDLPEPAISSGDLPATRQCRPSRRRPPPPVLVARVAPTTSDADPHTDVTVATSRTSPTTPPELYCRRGLCAMSVTHANSGPRTVL

SEQ ID NO: 47380 - protein, 272 aa, Zea mays
  Coding DNA Sequence Number=SeqID_4005
  Subcellular localization annotation: CTP_CleavageSite=35; ConfidenceScore=5.48e-01
MARARAYKALPGFDCTLPRTLKPHRSLARRRLPVRSVSAAAQSLCHRRPANRAIPNPVQPSEKAVHTSVKLPERGIGVCFAGEASPRSPELSTPPEYVDRVIHSTILRFLVHTVTTLPREAHRALGLNQFAVVWPVHSPPTRTPACARGPSDSGHPRRQAVPRRDRQSLPEPTPPFAGPPSPPDNLEKPYKNNPKDTRAIQIPYVYPQQKPKPKDCNLADGEYILVPEQGAAQEVAPDPAPESAPEDLPATALEGKPRFMHNLLIMLFYFTQ

SEQ ID NO: 47381 - protein, 167 aa, Zea mays
  Coding DNA Sequence Number=SeqID_4006
METRQRADLPFVSYAIGRRPVMRSSHIATSSSMEARSYCRLVRKPCLRHYTPPLDHLAPESKFQHLAPTVRATKKPPAMAPKKASSKADEAAKAALLAAKRGKALALTHSTHQEATEDDVLRTCESDALRTCGPEGQPQPPPGFASPEGADFTEDGEIIGVSAEEQL

SEQ ID NO: 47382 - protein, 80 aa, Zea mays
  Coding DNA Sequence Number=SeqID_4007
MAAVGALQRGVGGGSALQRGRGAVVVRMEAGTRAGAQVGGGVDDPDVCGLWFQESLPLCMASRVSFPVSSWVRHFALQMG

SEQ ID NO: 47383 - protein, 161 aa, Zea mays
  Coding DNA Sequence Number=SeqID_4008
MNFASPGLPMMALYPQSKRANSNLRNSVLEVLWGFKGDGQVDVSEWVLPFSRHDAEEGGIRLSEVFDSNPQGLECPGESDIDAASPVYQYFLYPDFSDHRINRSSDVDVRLPEQLFGGGWCFLEYGSDENRVVGSPIEVFNYGHFSDFGDVVPHCLKPFEE

SEQ ID NO: 47384 - protein, 248 aa, Zea mays
  Coding DNA Sequence Number=SeqID_4009
  Subcellular localization annotation: CTP_CleavageSite=35; ConfidenceScore=5.05e-01
MARARAYKTLPDLDCTLPRTLKPHRSLARRRLLVRSESAAAQSLCHRRPASGAIPNSVQPSEKTVHTSVKLPEQGIGVCFAGEASPRSPELSTPPEYVDRVNHSTILRFLVHTVATLPREAHHALGLNQFAVVWPDCNLADGEYILVPEQGAAQEVALDPAPEPAPEDLPATALEGKPRGLYPSRDLRRGLPFRLWWVQVRSLHDGQSGSVRHCSLEEMVAGITWPYTLPPGWTVEWDPASAKEEHEE

SEQ ID NO: 47385 - protein, 75 aa, Zea mays
  Coding DNA Sequence Number=SeqID_4010
MPTRAKIVNGPIYLGHPGMDGKIVNNDVRIINHVVQTYERHIWDQGSSWPGDVISRTAFGTTIKKGGEFSSCKEN

SEQ ID NO: 47386 - protein, 78 aa, Zea mays
  Coding DNA Sequence Number=SeqID_4011
MNVCELTLAVSQTPQVKTRTPVIYKDVTFDPVPLYIICVRLGPSIPGTLERIIKDLGKAKVLRRSSKGRHNRKEIKSD

SEQ ID NO: 47387 - protein, 140 aa, Zea mays
  Coding DNA Sequence Number=SeqID_4012
MDEGCTQPLSSDPMINLNTTVFPFFDFLPFARNLHNLEPFALTMMITKEARKGLFYSPKAARSRWRPTRKVILVFCRVAHQTVRCTTGQPLFMSGARSPSYSGTDDRCRFVAVGAPNTVRCPLPTVGAGGRWLTGQSIEL

SEQ ID NO: 47388 - protein, 194 aa, Zea mays
  Coding DNA Sequence Number=SeqID_4013
MDESCTQLLSSDPMINLNTMVFFFLYSFPFARNLHNLKSLALTIRIKVKALDPVHHRTLSGADFFPILAQPTVEDLEPLAHRTLFGAHRTVRCSLLTVGSATRHARIARPTVGSADRWLTGQSGEPPDSPVIYSHTPPSSPESGLFTETGPGASDTVRCTTGQSGAPKLSRVLAARAKSLPFVFSLILALRQIC

SEQ ID NO: 47389 - protein, 228 aa, Zea mays
  Coding DNA Sequence Number=SeqID_4014
MGAEPRHVGPGAKWKEELMPATPRRSSVHHNVRSAYSIDTPPLFPRGRAAQRPYVRLHPLAYVTGSVPRGSIGAPPEQGAEAYVVWSGHVSAPDPRLALIKVWVFFVSESWDPSVSGMDPAQRGPGPVPGVRSAPVEVLDLTRGVRSAYTGSGTFPWGSGPTVDTLEGANHVCISARELLKSSKKWSKEVWLNLGQSEPHRIVARDALGRVVTPPEVDLGRAVTASPT

SEQ ID NO: 47390 - protein, 154 aa, Zea mays
  Coding DNA Sequence Number=SeqID_4015
MPPAPPQGIPATRGDPDGDGDNDDAGGSSSHDMELSEEPEPEGWIARPITREAARGCHFHDALNTLLCRAFDRHTWSIEYCCVVYQHRRGLYPDQWEATCLVRRPNDDLRGAEAFSEHYSITKRDTAEAAMQDAARRALSHYCSLFSGLDDALT

SEQ ID NO: 47391 - protein, 86 aa, Zea mays
  Coding DNA Sequence Number=SeqID_4016
MESDYLFEVNPGKGGSSKSGFHWNEMGYLDVTSGHILSYFILHPLPPVSGLEVQTVFEPKDSLVICPEVRELFLAGFLHKPCRLWV

SEQ ID NO: 47392 - protein, 156 aa, Zea mays
  Coding DNA Sequence Number=SeqID_4017
MVDDDGGPVRGDGLQPRSKSMEEKGSLGRRREATLRFVPECGVSLSQMLMGNFADADHHRQPVALYSEKLGAVVLKDRPIQLNTATTCRHGRPESCHLRQLLKASTMFEEKWSYRQPLKMASDQCSGLLAMIHSTASVDMFLMLSIDTLKSSILHA

SEQ ID NO: 47393 - protein, 338 aa, Zea mays
  Coding DNA Sequence Number=SeqID_4018
MEMRLCGLRDLLDKTEASTRVEVERTHTQLVDAYRELGARTAPFEAPGQEVEDPVLKRSAGALFNRMWGPHGRETVRERSDRAMDQMAHDEEVEDLGGLDSTLPEASGVELAPPSDAGEGPLATPAPTGAGEDPVPATTPTGEDASKVMCELAAEDPAASAEPSQVPTFGPAQATAAGNTIFVAASTVVPTDDNLSGSGSECFESGGESESSFSWMEESSDEGLDYFAALDVAAAESSPRVEVGEAADLPSVSTKYRRRRVVSKHSVGEVSRSGRRRRMGMERGRLRLDRIGKRELLSSPIGASIGEGDLRNLFEGEELRIMLFNYREMGIIPKVEPM

SEQ ID NO: 47394 - protein, 66 aa, Zea mays
  Coding DNA Sequence Number=SeqID_4019
MRQRRWLELIKDYDLEAGFLAADKLTPPASVDRPTPTTTADDPHLNMIARDPRTSPDPSPEQPRRR

SEQ ID NO: 47395 - protein, 282 aa, Zea mays
  Coding DNA Sequence Number=SeqID_4020
MVKGFTQSTCAGEFLNSGERDLASPVTRALGSSLSKAHGLTRKLSGGLNRTEGDWRGVGHGGGSWSALAGCREVAGGNGWLGRVRRGTEGITGKATERWGGFYRRGRGRGAGSTVWRDAGTRGARAGVLWRAQSASNTWRVASARVLRSAERPSVRISPYRLWEISSLHLGLPSSCRIPRRRLAHPPAHVDRPTPTTTADDLHLDVIARDPWTSPDPSPEQPHHRHASYSLNSLDCNLADGEYVLIPEQGAVHEEDQEQAPEPAIEDLPTAPAIEDKPRFYA

SEQ ID NO: 47396 - protein, 93 aa, Zea mays
  Coding DNA Sequence Number=SeqID_4021
MEGSTKARSDGSTIARPTEEGTIEAAEEGTTEAAEEGTTEEGTTEPTEEGTTKEGTTEPTEEGTTKEGTTEPTEEGTTDAVHLAPFTKFASSP

SEQ ID NO: 47397 - protein, 216 aa, Zea mays
  Coding DNA Sequence Number=SeqID_4022
MRVTGVSGIKKIPFPWLPMKIILCLVWLRILNFFPYGRYIGVVVIAVVDKDHQESTQKKQKALLRLVDPRREAKMLRPSAKGSAAVATMLPPTELAASARKVPSPAKASEVEGAKGTKIGGAGDVSRELSVDDYLIEGVSMFDAHTRLAAGDEGRGIANASAAGGVAATVARQLRYAAAFPDQVASGALVDVATLQLRSERKRSEDKIERLLTQNT

SEQ ID NO: 47398 - protein, 301 aa, Zea mays
  Coding DNA Sequence Number=SeqID_4023
  Subcellular localization annotation: CTP_CleavageSite=10; ConfidenceScore=5.26e-01
MPRESLRPPRLAHDQPSWPPFSWALSSVPSRALSPALHASKPCAAPSKGFTEGFLTTDDGVHARRLVMPFAVVNRNQVGIFIPTTIKTPVWALARPMPPPRLHLGTYAQPADCHVDPPRQHIFLLPTGPTSAIPQRTCPTSHARLASAAARLARPRQSLPGFPYMHQRPILWKPRQWRPDLLCLPLRAAPTNLAGTAIPPRTPYRLPLRAAPTNLEAWSMAPSPSIAFPYVLQAPALPSPMRCTHKFGKPNLRRRFWKARSRSSNHNNYTPNFALTLIKKVAIPSCAHHRPLTPSCAHQRL

SEQ ID NO: 47399 - protein, 381 aa, Zea mays
  Coding DNA Sequence Number=SeqID_4024
  Gene Ontology: Mol. function=protein kinase activity; Biological process=protein amino acid phosphorylation
  Homolog annotation: Hit_ID=Q69L76; Match level="QueryCoverage=60%, HitCoverage=34%, E-value=2e-72, Identity=65%"; Hit description =Cyclin G-associated kinase-like protein
MRSDTEHGRVLSRCCHVSVDAVVAIAHKKPRFVERLVFNIWMRKSRTPTSSALPGSPRRPSSPTSLGSASNGRKTCWWKGVFHKYEDSLLSTELDYLPNNTHELSNCAHKRTPVMPRRNPPPPPREQSNSFFTAWKLKGRRCTVRGLSDTEIQNSWKSRAEQPQPEPKCEKDPFNSFVADFDTHNLNIAVGKASELELEVSNLKEQLKKITLEKAEMTTKHEKLSAICRSQRQEIQELKLTLVEPTPPSNKVSSRTQDSGSQRKEKIQGTVWELEQGMLAIASNSSSASSDAKTWQAFPDTKTQARPKVDHATNGSQNITKNTTSGASPDAWGFGTDNFRTPATTLRATTQINRAAAQRSSSQRFNAGVAKVEQPSGWAGF

SEQ ID NO: 47400 - protein, 130 aa, Zea mays
  Coding DNA Sequence Number=SeqID_4025
MEGETVICRLCHKEGRKSFQCKAMTEDKQRQKLKQKPSSNVSNTYIKKVDKKAATPYLIKKKKNVNVIAIKANKQANKGKGAKRIWVPKEIISTMKSVAEPPKLFQLKCLSPTLTAILHLNRNKTSVPWI

SEQ ID NO: 47401 - protein, 138 aa, Zea mays
  Coding DNA Sequence Number=SeqID_4026
MASMWGALRRSTSRASKVSVFLLLGREGGGCFVVAGVEVGVGEGCRLAAPVPSYLWWPSSLGSLWFGGRSLRREKDSRISAAAAYIPDPYREFHFRGPRGDIPDGEGRHQWGAGWRCCAPVANCGRLDRSLAAEFSST

SEQ ID NO: 47402 - protein, 112 aa, Zea mays
  Coding DNA Sequence Number=SeqID_4027
  Gene Ontology: Mol. function=selenium binding
  Homolog annotation: Hit_ID=A6N020; Match level="QueryCoverage=51%, HitCoverage=23%, E-value=5e-18, Identity=70%"; Hit description =Selenium binding protein
METVITDGGTLCSYWLWWRQRGGTTGLLYLVNWLHGDIRQRNIEDPANPFLVGQVWVCGLVQKGNDVVYVNDDGIEQRYNLPQVKKIGDTLDFEIKRWSARKEGNLCALLST

SEQ ID NO: 47403 - protein, 142 aa, Zea mays
  Coding DNA Sequence Number=SeqID_4028
  Homolog annotation: Hit_ID=Q2QQP3; Match level="QueryCoverage=46%, HitCoverage=4%, E-value=3e-08, Identity=42%"; Hit description =Retrotransposon protein, putative, Ty3-gypsy subclass
  Pfam annotation: Domain name=Asp_protease; Domain location=10-96; Score=-79.3; E_value=0.053; Accession=PF09668.1; Description =Aspartyl protease
  Pfam annotation: Domain name=RVP_2; Domain location=8-110; Score= -14.3; E_value=1.4e-05; Accession=PF08284.2; Description=Retroviral aspartyl protease
  Pfam module annotation: Pfam domain module=Asp_protease::RVP_2; Domain location=10-96::8-110
MDTCLDLTYSRAVSTTLAVEAKNTGHGKSKGFGGDRSTQGPEKRTRGQIFTKEVVFHVPITLAELKFPTNMSVLKGQDIDVILGMNWLAQHKAILNTDLRTIKLSHGHEEVLLSIPVVVPAKPFGRVYEAIIPRNLGYSGCM

SEQ ID NO: 47404 - protein, 386 aa, Zea mays
  Coding DNA Sequence Number=SeqID_4029
  Subcellular localization annotation: CTP_CleavageSite=45; ConfidenceScore=5.53e-01
MQAACNRAKWAHFSDSQHAQHGGPGPRVMQPARRMLRACNCTATCATTAPPRSRNQYRDSRRPSARPSSASLARRERTLSHGVKATRPCSVPRTARARATAVPPTTRPVALTPRRDRRRLWQEKQATLRLRRNNRAKKGPPEGFDSRLRSRGPYTHYWSEVRRSAPRKGSTAASGYSGSAPITDQGFEGCSPKGLGLGLSPRRRRTPLRPTQGSDSGSAPEDDELRPARPRARTRAQSRKTANSAPPDLGLGLGLSPRRRQTPLRPTQGSDSGSAPEDDELRFAQPQGSDSALASAYGLRLARPRGSDSTSAMEDRLDLGFGGASTSPNLGRRPATSTGGAIIALPRADSGRKKQDRLHRSSDGHDITPAGCQNLSGCHNGMYLGR

SEQ ID NO: 47405 - protein, 247 aa, Zea mays
  Coding DNA Sequence Number=SeqID_4030
  Subcellular localization annotation: CTP_CleavageSite=30; ConfidenceScore=5.14e-01
MSSRSLMHRVFPPSKPPDGGYPPSFRLIVGGTQLRGSWYLSAIVWLQGFSSCSPAAPLRWWSPKTVTSSSWMWRGKPGCDLDPALSVEGVRHPRWGGERGEPGLYLLRGSAGHLFFQLLVVANALQLCGGDVLQPCRGSWFASLEREREREPSGGRVHLGPWLLLQGSLAGPPESLSSVGLVVRGSSSLVKGTPWPLLDEPRPGSGDPWTASPSEARSDLAEGVVDVEGAAAPFQRQDPSLQDQIVL

SEQ ID NO: 47406 - protein, 32 aa, Zea mays
  Coding DNA Sequence Number=SeqID_4031
MAREIIQRSERGIHDAREVAKAAKKSTEPEGF

SEQ ID NO: 47407 - protein, 360 aa, Zea mays
  Coding DNA Sequence Number=SeqID_4032
  Gene Ontology: Mol. function=translation elongation factor activity; Cellular component=nucleus; Biological process=transcription
  Homolog annotation: Hit_ID=Q2QX87; Match level="QueryCoverage=100%, HitCoverage=100%, E-value=1e-110, Identity=61%"; Hit description =Transcription elongation factor, putative, expressed
  Pfam annotation: Domain name=TFIIS; Domain location=110-196; Score =131.7; E_value=2e-36; Accession=PF08711.2; Description=Transcription factor S-II (TFIIS)
MSSDGRLRRALAAFGGDVWDLVDAALAAAARDSPGDLRARRDGIVQRLYAGAARCRNCDADATPAPAQPRKANDAVAAAASPAAAASAFPASPEQEVDADGLDDVDDAADAGMESKILAIRDFLEDPDQSEDDIVSLLQNLADMDITYKALQDTDIGRHVNGLRKHPSSEVRQLVKLLVRKWKEIVDDWVRLHNSCGDGSGSIISMLQSFSNYFVFGDSFDTFSFMVASDFKYPPSPQRHNVLSSERSSNHNLVESTMEKRRTSPAPAYNNTKQNNSNNYSSISSSAPARAIREQKNTLLDSEKLDSARKRLQENYQEAQNAKKQRTIQVMDIHDIPKPKNRNTFVRKSGSSAGFPAKHR

SEQ ID NO: 47408 - protein, 222 aa, Zea mays
  Coding DNA Sequence Number=SeqID_4033
MQAACNHTKGAHHFDSDTSSVEAQAHTSCNRRAGYYMQGTAPPLAPVPRLLDCGTGAVTRGDPAHGPTVPTEHIGHGDRERGYSERDPSPLRKRAPSPLLIRGSKAGPSEGFDSRLRALRLRALLLIRGSKAGPSEGFDSRLRALGLRAHHWSEVRRLAPRMGSTAASGHSGSAPTTDQGFVGWPPKGSTAASEHTERGMTLGTSDTWPRLGLRSRGTLGHF

SEQ ID NO: 47409 - protein, 92 aa, Zea mays
  Coding DNA Sequence Number=SeqID_4034
MSLRRRAPLCQRASLSPALDSAWCDCNLCEEVEPFAEKPFTEKEGRGRGSEKVLSGACGRDENGLGGAVGSDLARRFGLGAFSILNAPRCNI

SEQ ID NO: 47410 - protein, 133 aa, Zea mays
  Coding DNA Sequence Number=SeqID_4035
  Homolog annotation: Hit_ID=Q5Z9G5; Match level="QueryCoverage=59%, HitCoverage=32%, E-value=3e-09, Identity=41%"; Hit description =Putative uncharacterized protein P0655A07.24
MVLAVVVLLGAVAVLVVVLLLQPPRAVRGGAGGLAVLRAYLFRVPARGVLPLAYVARAQGAPLGDAGSAAMEAALRDGVVLFRVDGEAHTRWKVAGIVGVDQWTRLACQLRFFWPNSTVLPFRCISKSKFLFF

SEQ ID NO: 47411 - protein, 146 aa, Zea mays
  Coding DNA Sequence Number=SeqID_4036
MDITSKMDIAKVRLGCVARRQLIKPRTKARKASRYQVHGRGSRRLRNPKPRVKKKACKVKEKPKAAQSGTPDCPVVHRTVSGGAPDSVRCARLNSGELAALGNSPATYGYNSPDCPVCTGLSGEPTVGRANGRPRNMRGTRGRANG

SEQ ID NO: 47412 - protein, 150 aa, Zea mays
  Coding DNA Sequence Number=SeqID_4037
MRLKLSLRQLLQGEEEHHIIGVKRDPVMDGIGRNGLQQPMLLSLDHKRIEDIHKKNKKQRRQGVALPQTPFMRNEAPRHPIEKIWVEEVIRIPLITSLHTGPKPNVSNTSRRKGQEIESKTLEMSSMWHLNLLERTLVTNLVLKAKRILG

SEQ ID NO: 47413 - protein, 227 aa, Zea mays
  Coding DNA Sequence Number=SeqID_4038
  Homolog annotation: Hit_ID=Q6J9V9; Match level="QueryCoverage=21%, HitCoverage=17%, E-value=8e-15, Identity=79%"; Hit description =Putative uncharacterized protein
MAEARATLPRYPRTFPRPTGTICNGIPPEGGIEPSDPVEGVWVRQITRRGSGAALAPGLRPKLLTASTNQLDNLEPDHAPGLRPGRMRERSDRPKHHEKHSDLRGVKPLLRGLGGYTWRENSAARSAPTAVSATPATTDNKSRSTTEFSLGRNRKLRLARPHAPASGGGFRLARSQAPASGGGLRLARPPDPGLNPGLGRNRVLARPRPRPQEKSPPRPTLGSDRPC

SEQ ID NO: 47414 - protein, 101 aa, Zea mays
  Coding DNA Sequence Number=SeqID_4039
MSCNRRTGYDVREVTPPLAPMLRLLDCGTSTATRGSPVHDPTVPVKGDGHGDWERGRCGKDPSRRRKRAPSPPNDQGFEGWTLERVSTAALEHSDFKPITD

SEQ ID NO: 47415 - protein, 197 aa, Zea mays
  Coding DNA Sequence Number=SeqID_4040
MHCALPPFEPPDGVHQRRLALAVVGGARPRGDRHLSAIARLQGFLSCSPAAFPHQWVVWWGEASRAAASAPPSASRIFVIRAEAEEHTEWGVASAWAGCSFPSFVRAAVVSRTGRPRPGLPRTVSHAGGLPSTSYAARAVLVFWGGLGEDGSEDLPMRFGASAIRWRGAGAQVAALVGAEVVAAGEGFSADETIGTS

SEQ ID NO: 47416 - protein, 53 aa, Zea mays
  Coding DNA Sequence Number=SeqID_4041
MRLAFIFYKLGEGLDNGGFFENDPQGKGKTSVLPQVISGKRTDATLWLSARRG

SEQ ID NO: 47417 - protein, 135 aa, Zea mays
  Coding DNA Sequence Number=SeqID_4042
SETTDQAKDEGKKSFEVPSARERVKEAEEPKAKGEEEGLQSQGMLEPSDEKPRQLSLAHRTVRVVHRTVSGGAPDSVRCARLNSGELAALGNSPATYDYNSPDCPVCTGLSGEPTVGRANGRPRDLRGTRGRANG

SEQ ID NO: 47418 - protein, 134 aa, Zea mays
  Coding DNA Sequence Number=SeqID_4043
MGKNNKRKREPTPPSEEFGDSEYSEEEFSSEPEGSPAPVSPPASSDDSDDSQGIAAEVWTYIRAVERAGLEGSDESEGGGDGRDSTKGSSRGSTKGQQRRQRGRHQGQQQGQHQGRRRRQGQGQWLGATGLLRY

SEQ ID NO: 47419 - protein, 603 aa, Zea mays
  Coding DNA Sequence Number=SeqID_4044
  Homolog annotation: Hit_ID=Q6JAD6; Match level="QueryCoverage=92%, HitCoverage=79%, E-value=0.0, Identity=80%"; Hit description =Putative uncharacterized protein
MEKCKPIKTPMPTNGHLDLDEGVTVCNRVPSPVLPGSSPLVMPRTKNASASGGGDDEDPRRPFRQVKGKTVFLEQQEGRKKRRSDREARAAAAAAAAAAQAALGDQPDVPSDQIAFRARRLASRSRSSTHTSASTPPPTLPAPVTPIAPSTSTAIPTTSTTPASTASPAPAPASAPPVPPPRFRERDETEVRPLVSDPRLFDLQRATAARVRRFRYVPVESWLPAQRDPAAGVLFSTRIQESFFRAQMSAQIALRVHRLLDLPAFLLAAGAESEAHLTYLPGLLTLLTISGRYVEEWVRVFYASVWIDPDHHWMRFRFEREDVTITASQIHQLFGFPESTTRLHSLCYGTSDPPRRPHGGVAPGTAHVAALFRPPFTDGSRRSPADFTTAAKYLYELIRRTLLPRMGYREATTHIQLWLLGALVSHSQFDVVDFLICEIEDTVLDGIRARRQLPYAHYLCHIFAQLIQPPRFQSTLEASRLVFGSYRPAPEIPVPAYAPVFDTQAEDAALRQFDTQGTAADDDDDDDFGIPPPPPPPMPPRSHDHEAGSSSAAPATPQAMDPALASILQTLTQQQAHLAAEQARLSDRMLSMFQNMQDRQDAL

SEQ ID NO: 47420 - protein, 706 aa, Zea mays
  Coding DNA Sequence Number=SeqID_4045
  Gene Ontology: Mol. function=phosphatidylinositol binding; Cellular component=clathrin coat; Biological process=clathrin cage assembly
  Homolog annotation: Hit_ID=Q10NB4; Match level="QueryCoverage=89%, HitCoverage=97%, E-value=0.0, Identity=76%"; Hit description =Clathrin assembly protein, putative, expressed
  Pfam annotation: Domain name=ANTH; Domain location=29-352; Score =355.1; E_value=1.2e-103; Accession=PF07651.7; Description=ANTH domain
  Pfam annotation: Domain name=ENTH; Domain location=29-150; Score= -7.4; E_value=0.00013; Accession=PF01417.11; Description=ENTH domain
  Pfam module annotation: Pfam domain module=ANTH::ENTH; Domain location=29-352::29-150
MSSSTIRKALGAVKDQTSISLAKVTSNIAPDLDVLIVKATSHDDEPAEERHIREILHLTSGSRAHVAAAVAGCSRRLSRTRDYVVALKSLMLVHRLLVDGDPSFHRELLHGTRRGTRLLNLSDFRDEAHSGSWDHSAFVRTYALYLDQRLEFFLHERKQGLNAGSSSSANGPSPRDRDRWGSPDPYGRRSPSYSSPPGYGGYDDYRERNGGNNDDKRPPTPVRDMKPERVLARMHHLQQLLDRFLACRPTGGAKQSRMVLVALYQIVRESFQLYSDICEVLAVLLDRFFDMEYAECVKAFEAYASAAKQIDELSAFYSWCKDTGVARSSEYPEVQRVTDKLLETLEEFMRDRAKRPKSPPREPEPEPVKEEPEPDMNSIKALPAPEDYKEPEPVKVEEEVKPEPPPQPQGDLVDLREDTVSADEQGNRLALALFQGPPAAGGNNGSWEAFPSNGGNEVTSAWQNPAAEPGKADWELALVETASNLSMQKPAMSGGMDPLLLNGMYDQGVVRQHVSAQVTTGSASSVALPAPGQKTQMLALPAPDGSMQTVGGDPFAASLAVPPPSYVQMADLEKKQQLLSQEQIMWQQYQRDGMQGQSSLNKLDQAYHNGFAPNPGMPYGMPAAYNTGDLDYPCAVSRPAWIITSRVSFPGCRARKMCRRQGEAMVRILVAPSGRSRARLFTWSSRKAARSGVRTEQPVQRQLIVA

SEQ ID NO: 47421 - protein, 186 aa, Zea mays
  Coding DNA Sequence Number=SeqID_4046
  Subcellular localization annotation: CTP_CleavageSite=44; ConfidenceScore=5.41e-01
MGGGLLAAAPALRSVLPLFGPPEQKSSSSPLLERATARRSSVFCCSAAPHRVGLFVPAEYLDFFVGNRDVCASESCFSRKVMCEVSVSRRRRSPSARSTLPLTRTLTRPWGSVTDSVEKARRIASAEELPNVKTCSVHGITYPNVSYLSQKVMSEVSVSPRRSSPSARSALAVYVYSVVFRIHFSK

SEQ ID NO: 47422 - protein, 121 aa, Zea mays
  Coding DNA Sequence Number=SeqID_4047
  Gene Ontology: Mol. function=carboxyl- or carbamoyltransferase activity; Cellular component=ornithine carbamoyltransferase complex; Biological process=amino acid metabolic process
  Homolog annotation: Hit_ID=Q8SA97; Match level="QueryCoverage=100%, HitCoverage=24%, E-value=1e-25, Identity=51%"; Hit description =Ornithine carbamoyltransferase
  Subcellular localization annotation: CTP_CleavageSite=92; ConfidenceScore=5.03e-01
MAPPVDVAGLRPRLGNVEAPPKPRSSLSSVAEVESEPLGRARRSSSSSRAEPKSEPWVGRSGVRRLPGLSPSPSPGSGGAEFAVFRGCARVRALGRALYADGGYQLRIRSLEGTPNYGPLQ

SEQ ID NO: 47423 - protein, 67 aa, Zea mays
  Coding DNA Sequence Number=SeqID_4048
  Subcellular localization annotation: CTP_CleavageSite=51; ConfidenceScore=5.22e-01
MGELKYFLGFQVVGGLRPPKNYGYGARPGRRLSQTKVGGSRSCTQGSFGAMAQGGTDLKMKRLRGPQ

SEQ ID NO: 47424 - protein, 118 aa, Zea mays
  Coding DNA Sequence Number=SeqID_4049
MEPPSMNWPPPQQQPQLLQSQHELDRVDPKWWKKWGQIIRSFVQKSPNKDAIGHTTSSVDRFGPKTPRSPMLIKNRPGHLNKGSILAFINAILLGHIRRGKLMLESQRSTECCKWSIF

SEQ ID NO: 47425 - protein, 881 aa, Zea mays
  Coding DNA Sequence Number=SeqID_4050
MPFHGGREVRNPAFALNLRNRDPAAFVRDAEDGAVRLVGRYVPRTEGQRNFDIRGSNDRLNRVFELNQLPYDGYPGQDEADRRGKKTAVETGDDPAPAAAPSSKKRNLGTAMGGLGVSDSFARELMRTCAAPGERMSSPELRESSARMLRVTGGCWPRNVPIPCAAGDDCFTSRMVRQWRVFPYGRNIGAVVWAVMDKDRQGAAQKRQAAVRLHEVRPKRQRGAAKDAASDGGKPPLAAKAGASAPSKAPEAAAGAGGSKSTKVVPPASGVAEASKAARALPLSGKRVADFGTDITVDDYLGGSDEGQLAMVAPGAEIATAAIVPKARGEALDAGGEVSALAVVRDEAGAATRRLKGVTEALSQATEALSQVADFASRTASGALTAAVSAEVERLRTQHADAVREKSASDSKCRKLTDRVAALEREKADLRRQLAAERREANEAIAKEQAAQAEAKLARAEGNLAKELAEHLQERLTALESRAKGTEAAMRAEAERTRAQLMDTYRELGARTGDFEVPDREPGLRCLQWVQEELQELPTVVGGFMSYASLVTCEGAMNALSREGCRHFEVFDQADEDFERDVYKVEDPVVKESVGALYDRMWGPHGREVVRERAETARAQAARGERVDDFRALNSALPDPEPTLAEAVTGVALEPTPETAAIATAAPTSAAAGEDLPPKVAEGAPDAPAAAVPSAEDPAAVAAETTAEAAAEPTAEAPAASGPSQVQDFGPAHATATTEFLVASTAKGGNEYGGSVSKFFDFTDSGSSVEWTEESSEEDLDYFAALDVAAAEASPHAADAPDVPGPSTGRRRRRAVAKRRVSAEEGARLRVSRAGRQELLSLPAAAGTGEGELRSLFAGEELRIMLFNYREMGIIPKVEPM

SEQ ID NO: 47426 - protein, 254 aa, Zea mays
  Coding DNA Sequence Number=SeqID_4051
MRLHTLRDDVVLYPQSPVASRGVFGSRGVTISELDHDSDDVVSSLSDEETERRVKDKLNWLSFIADTAGGLCTLALGEDAVSTSDDKDIDNDTASEIEELNAALASQDACERRKFRSMYGSTLRELESARASVMVSDETECDVCALHMSNITNFQTKYATLLDEHDKLRSRSSLLSACTICPGLQTELAKRDVRIALLEKASSVSAPAPTQCALCEGLQSVVESCRHDKTRIEEENTYLRSVLSWVSCSEPQLA

SEQ ID NO: 47427 - protein, 104 aa, Zea mays
  Coding DNA Sequence Number=SeqID_4052
  Homolog annotation: Hit_ID=Q10SZ0; Match level="QueryCoverage=83%, HitCoverage=4%, E-value=1e-07, Identity=35%"; Hit description =Retrotransposon protein, putative, unclassified
  Pfam annotation: Domain name=zf-CCHC; Domain location=63-80; Score =11.1; E_value=0.032; Accession=PF00098.14; Description=Zinc knuckle
MALVSGGGSVSNPSPVVFALSSLLSITWEQVESLGDEELALVASQFTRFHNNHMSRWHGRSKDECYSCGDPDHFVVSYPKKGKAESGPCDHHSSRRKGKYSIGK

SEQ ID NO: 47428 - protein, 84 aa, Zea mays
  Coding DNA Sequence Number=SeqID_4053
MAHEIMKKSEKDIHDSREAAKKAEKAAELERHIAELSPPPEPFDPLADPETKKAIEIINMAEAIVDEVVTKLLNEVAEKVLKEE

SEQ ID NO: 47429 - protein, 83 aa, Zea mays
  Coding DNA Sequence Number=SeqID_4054
MGETEQGLGELEAGHGKARGRSSDWRSKGRKQQARHPWKQGRAPWLEQEHAGELARPTSRAGGSSASWASMGGRACQGARLRV

SEQ ID NO: 47430 - protein, 172 aa, Zea mays
  Coding DNA Sequence Number=SeqID_4055
  Subcellular localization annotation: CTP_CleavageSite=43; ConfidenceScore=5.11e-01
MRNPAITDQLHCLLSLWAQLAWSRDASRPSVLPPTTVQPALASAHLGRGGGRPALSVSLQPKRFRLDGRHRRAIRPHGYGFMDGRGNNLIHLDLRRPQPPTPRSSAIRCTVVGGEWLMGRPLLGVCFVAEDPKKNTFERSSQKQAPKLLSIKLRHKDRSQDEGSNRLKDELT

SEQ ID NO: 47431 - protein, 113 aa, Zea mays
  Coding DNA Sequence Number=SeqID_4056
MVEVLIPVILVDEAFLVKLSMLGPSVLLILSKMTNFFRGFVYLPLQASRRERVSWFGSSGCRAVAPVAEAFFGGMTKVDACRKWSERVHRRNRNDIMLQVYLRLEGRHGTQPM

SEQ ID NO: 47432 - protein, 352 aa, Zea mays
  Coding DNA Sequence Number=SeqID_4057
  Homolog annotation: Hit_ID=UPI0000D8A02E; Match level="QueryCoverage =48%, HitCoverage=40%, E-value=2e-08, Identity=22%"; Hit description =hypothetical protein, conserved
MAPPVDVVGPCPGLGDVEAPPRSRSSLSSEAEVESEPLGRARRRPSAEARAESEPWGRAKRSSSSSGADPESEPWGRAKRSSSSSEAEPKSEPWGRAKRSSSFSGAEPKSEPWGRVKQSSSSSGAEPESEPWGWAERSSSSFGAEPESEPWVRAKRSSSSSGAEPKSEPWGRAKRTEPESEPWGRAERSSSSSGAEPESEPWGRAERSLSSSGAEPESEPWGRAKPSFPWRLGPDLADVSLTLSSGSAVGAAQATLSPCQTGQWSGEATFALNAPAIWSVGVAIWPRLLLGEDWGLGELKLCADGGYQLRFRSLEAEAGSHSTVQPGGKMDGQVTLATMSSKEPVKLCHKQG

SEQ ID NO: 47433 - protein, 494 aa, Zea mays
  Coding DNA Sequence Number=SeqID_4058
  Gene Ontology: Mol. function=RNA-directed DNA polymerase activity; Cellular component=chromatin; Biological process=chromatin assembly or disassembly
  Homolog annotation: Hit_ID=A3BBM6; Match level="QueryCoverage=96%, HitCoverage=49%, E-value=9e-97, Identity=39%"; Hit description =Putative uncharacterized protein
MAKPCEQVLAANDGHSVDQQMAQLMATLQQKEDELVALREQMAREQVANHNHNNDRDASTSHNQQRSEPALTLEAIQRMISEGVRAQYMQTHYSMRPGYVKPYPPEVDMVPFPNNYRQPQFTACQDTSHNGALLLRQFVQTLSGPAFTWYRVRPITFEELASKATDIENYMQHISRQARPYNKPVMERNGPRDKVPSKPKQMQAMEATVVPRKLQTGGAIERNQHRGDASAPRRPTLSERQNQTYSFPVEEVDDLFIGLRELGLIELPKPKRPEEASKFKEPNFCHYHRILGHTLKDCFVVKNIIQKLIDEGTINADLLKSMKKGKKVATSNVATFRNDLVSHATLNMSPNYDQYMYDQFMMISNPENVNVTMPGYPKQQVESKHESKALRRWIHTPRDGTSTSQRSRKRRQQFSRRLALRRVMEKGEGPCISLNVEKHEHNPMEEYDTFAIGVFEDDDEPLYFPEEEVPEVDEIQLRSGRQFPSFISARKSPK

SEQ ID NO: 47434 - protein, 124 aa, Zea mays
  Coding DNA Sequence Number=SeqID_4059
  Subcellular localization annotation: CTP_CleavageSite=47; ConfidenceScore=5.15e-01
MHRSPILKNKRSPKKSAKEPKKRAVSQRLVAHRTVLSAPDIRYRTVRCAPDRRQRSDPTVDCYKRQRSAVVTSSIVETAGSVQEEPEAEHHLRVEKARDSLRSYSTVVLGPHVGFPLRRGTNED

SEQ ID NO: 47435 - protein, 94 aa, Zea mays
  Coding DNA Sequence Number=SeqID_4060
  Subcellular localization annotation: CTP_CleavageSite=59; ConfidenceScore=5.37e-01
MALLPPVFPTSLTCGPGSSVSHATLCAPRSCHCHTGPISRLGLVDWLRTRLPPLGLRRRAESAAPGGSIATSRGFLGCAPSAYWDPRHYSPARP

SEQ ID NO: 47436 - protein, 253 aa, Zea mays
  Coding DNA Sequence Number=SeqID_4061
  Homolog annotation: Hit_ID=Q6J9V9; Match level="QueryCoverage=50%, HitCoverage=44%, E-value=2e-54, Identity=83%"; Hit description =Putative uncharacterized protein
MRLRKPKQKASANGMVKNHCRPLFRGKRHLRQEKRALFHLRHDDRVRKGTRKGDIPKRILLSEGNGPRALLLIRGSKVSPSGVRQPPQSTRAPSPLLIRGSKAGPSEGFNSRPRARRVRDDPGYVRYMAEARAMLPRNPRTFPRPTGMICNGIPPEEGTEPSYPIEWVRVQQITRRPWPQPQPRGRSPPRPTPGLGLRGRSPSRPTSGLNLSLGLGRSHILADLNPGLGRSLRLAQPRPRTDYATGDASLPYR

SEQ ID NO: 47437 - protein, 438 aa, Zea mays
  Coding DNA Sequence Number=SeqID_4062
  Subcellular localization annotation: CTP_CleavageSite=40; ConfidenceScore=5.36e-01
MSATRNAPQFPLPLPISLCPRSPVVRRAAATVDPGHRRVSVAAEESPEPALRGLRLFPEYLSRAVKLVYQPCSRLRAALGSSLIRDTDGSRYKDYVMVSMARLRHTARKSVIPFLPSRLAERPLHRTVSGQSSHLERLHHRLREEQERRRQHGEQQGSSSSPQQEVETVRPRSSVAQLEAPLVPPRDVPAVGGATGGDPGGDPDDDDSDHSMESSEPQEAEGWVARPITRDAARGCHFHDALDTLLRQAFDRHTWSIEYRCVVYQHSRGRYPDRWEATCLVRRPEDDLRGAEAVSEHYSISERDTAEAAMQDAARRALSQYCSLFGGVADGLNLRYYPRRPTGSTESVVVSPVGEANPRLSSTVNLVAVLNTELDHSLDELSRARTEIAELRAELAERHHQEGGSPAPVGTQHPYRSPPRGHHTYGSPVCKTRIDLDP

SEQ ID NO: 47438 - protein, 179 aa, Zea mays
  Coding DNA Sequence Number=SeqID_4063
MGKDYEIGERVGMRREERGELGLGGGLDWRKDFKFKYESTLIELESSKASIVVSDETEYDNIVRPAPATVSTTRVGLATASRDLSRVQPRARQGAPPRPTPGLGLSPGLGEGLRLARPQASASREGPRLARPRASASASASGGVTSSPDLNPGLGRSLRLTRPRPRTDYATGDASLPYR

SEQ ID NO: 47439 - protein, 140 aa, Zea mays
  Coding DNA Sequence Number=SeqID_4064
MAISLLVPARRSGRSSHGHLSAGPGAQIWPEQPWPPPSVQLPLLLPLRSSLSLCLFLVDCKLIHFLLIGNQIDCTKKESQEQLQQRARKRKRHGHAPVGQITYAKYYSYLLNNPNVAQGFVEVSLLYKLSMLTEFINGNM

SEQ ID NO: 47440 - protein, 84 aa, Zea mays
  Coding DNA Sequence Number=SeqID_4065
MNVCELTLVVSHPPTGQEQMVNTRKGGGIDLPPNRHTRRIFRQPQQQEEEMNPPPSKTDLAVSAQMQIMQQMADTMADMHAQMR

SEQ ID NO: 47441 - protein, 245 aa, Zea mays
  Coding DNA Sequence Number=SeqID_4066
  Gene Ontology: Mol. function=kinase activity; Cellular component =ornithine carbamoyltransferase complex; Biological process=amino acid metabolic process
  Homolog annotation: Hit_ID=Q6QP54; Match level="QueryCoverage=37%, HitCoverage=37%, E-value=3e-21, Identity=58%"; Hit description =Putative kinase
MAPPVDVVGPCPRLGDVEAPPRSSLSSVAEVESEPLGRARRRPSVEARAESEPWGWAKRSSLFSGAEPESEPWGRADQSSPSSGAEPKSEPWGRADRSSPSSGAEPKSEPWGRADRSSPSSGTEPESEPWVGQSGVRRLPGLSPSPSPGSGEAEFPTAPEAGPGSLSASLCRVAQQSGRRRWRCPSVRPATFALNAPAIWLVGVAIWPELLLGEDWASGEPEGAEHGVSGELLAGNPSGRPCPIY

SEQ ID NO: 47442 - protein, 77 aa, Zea mays
  Coding DNA Sequence Number=SeqID_4067
  Subcellular localization annotation: CTP_CleavageSite=59; ConfidenceScore=5.51e-01
MAPRTLYDDGGSQPPYGSKRTSARTRQPRQLSFRQAPALLRRPRHHTNRGPPGLETPTVGAPGRGLLRVDEQLPVKL

SEQ ID NO: 47443 - protein, 33 aa, Zea mays
  Coding DNA Sequence Number=SeqID_4068
MWKQKLNLENPKTRKRCGLKVKKLVKEEMSNKE

SEQ ID NO: 47444 - protein, 141 aa, Zea mays
  Coding DNA Sequence Number=SeqID_4069
MGRRETEREGGKPEGVRRKRGNPRPSCLSRTQVGCACSRGLQASAWEGVRGLHAPSRPPHAANPLASLSLLFYPPRATPPLPRFPLRRGPPHLVGDGRSGQLARSLAPSRGPIASPARTVGAQDGWLGSCAALPSSSPSQG

SEQ ID NO: 47445 - protein, 288 aa, Zea mays
  Coding DNA Sequence Number=SeqID_4070
MASEDDASTWSIDFAWGLSTTGSNGPDDHRRWWRWRTTSNCRCSGRGRWWCRQVNIHGGQCRRSCVKHRRRWRRRCNGESTLHHRQRNHRCPSMENAEVHILHLHTAFRDLVHRWECCGLPNGERFQHCIINNMKNFAHTTYAHGNVGYRYPWVFSTRSGMGMGGFLYPWSGSSSGMGADLRSWVQNTLTSLGTVVQATYVCVCPVFARGPWVSSRPTGRAGTPYGSMALDNKTVKTHVDVANEDTHGANQSTAMNRGGGHHSDFPARGRAVGSQNQEAILPMLPTAT

SEQ ID NO: 47446 - protein, 184 aa, Zea mays
  Coding DNA Sequence Number=SeqID_4071
MALDPAAALAVWGRSRRSTALRRGAEDMQWNCDVRPDPAMARLPGSAAATWWRLVRPTEALARSGARRGIALGARRDRHEEQWLWPGAHALAARRGLCVATGALGVASTRRARRARREALDAAPPGTLGTRRWREPPRRARWPPPVAKRGGGWELLAPWRRQESPWWRRRLQGQLGLETLAAPR

SEQ ID NO: 47447 - protein, 218 aa, Zea mays
  Coding DNA Sequence Number=SeqID_4072
MDHKSLNDTRYEHSIIMRVIFELKVLLGEAGSEPEPPVIGNTSFVAEDASAWLLNEAISSKVEMVRTIQTTQINTNYITPPRQVPVYPVVVEEIPMDLPRIHVENGVILEDSSEEFLPTPTPLAESLAFAAGSSASAPPAPAVQAPAPGGNDSDNSGDDDEDDQEEEDEENINEQANEEQQDHYVGFWPVTEHYTSMFETGHFPNLLQDVLHALGTYV

SEQ ID NO: 47448 - protein, 313 aa, Zea mays
  Coding DNA Sequence Number=SeqID_4073
MDGATGSSEAVGDDGASSRRVVNGDDAANRCAARRGATEGGITRQRRRGRAWPGHAGQGTDDGELLRADVWFDKDGRGWGVRGESFLRGRGLRRPGLGRARMPRRRWGIRAWGCRCARTDPCRSGVETGSVEPPWLLGQCVDGDRMGPSSRKARQGEERREGGRRCYARLRVGEWAQGLGRCSRPTDAILEDLLNLWVRTHTRFRCTNLILLVDVDCIVFIGELEVAKRTGARGKNNEKRQDLQGVKEGGAVNGEIGKTLSSNKDGKEKAFKGRFKHNPWTESRQDSPNGKVEKTIKDKISEVPAEELSRGTR

SEQ ID NO: 47449 - protein, 337 aa, Zea mays
  Coding DNA Sequence Number=SeqID_4074
  Homolog annotation: Hit_ID=Q6J9V9; Match level="QueryCoverage=38%, HitCoverage=45%, E-value=8e-51, Identity=79%"; Hit description =Putative uncharacterized protein
MTIGGGMQPSCVMKILKAERRLESANPHGVALLQQQQEKDNTGAPHLGARKGERRDECEECEGMATAQGVDPFLKADLLTRTPKRHGQSLHRHAPGFPPYDTGAGSHTSCELTRNAKKANRRTRSITSAATQGSPARDPTVPIKCDDHGSLSRGDRHDGRYDQRRADSNCSNRRAEAAVQSPTGTGKGDISKRILLSEGNRPRALLLIRGSKVAPSGVRQLPQSTRAPSPLLIRGSKASPLEGFDSHPRARRVKDDPGYVRYMAKARAALLRYPRTFLRPARTIYNGIPPEGCTKPSNPIKWVRVQQIPCRGSGAALAPGYGQTVDHVNKPAYKLGA

SEQ ID NO: 47450 - protein, 150 aa, Zea mays
  Coding DNA Sequence Number=SeqID_4075
MSISSLALVGVLRPSLLTRSRQVVPARKRADDIRVGDVGQLGALLQKSPDVVPQGFSRLLAAASEIPGVPRAHVCALEVAGKGFDQVVPVGDLRRRQMFQPGSGGVEATTSIHNTQAFQPSTFNTRASNPFQDTFKASISPSFTIEKRDH

SEQ ID NO: 47451 - protein, 18 aa, Zea mays
  Coding DNA Sequence Number=SeqID_4076
MAKSFIIALEGPALTCFI

SEQ ID NO: 47452 - protein, 202 aa, Zea mays
  Coding DNA Sequence Number=SeqID_4077
  Pfam annotation: Domain name=MAP7; Domain location=2-163; Score= -81.3; E_value=0.067; Accession=PF05672.2; Description=MAP7 (E-MAP -115) family
MAPKRTTSKADEAAKAALLAEKKGKALVDTTHQEPCENDANSKRQRNEQPTTEGSLRTCSSGGQPQLPPGLAPPEGADATEDGEVIGVSAEEQLQLRALRIKNRNLQKQKEILEAKRQRVPAQAKVRQMIHDEEQKAQELEQEIALMQSEGNSACNTTHPSNSAHKSKTCSSLSADTPSLTPRHSKASTTLTSEVPWHLICK

SEQ ID NO: 47453 - protein, 194 aa, Zea mays
  Coding DNA Sequence Number=SeqID_4078
  Subcellular localization annotation: CTP_CleavageSite=49; ConfidenceScore=5.39e-01
MSDDNANASCSWSLFGSPGLYLTTGSPDQRRRRFHRACEEAPVSRRAPAAAALSSRRIGGRGGGARRSSASAAVQLQEAPVGRGGVGGGGAVHGACGRGAAGRRGRPCGGAAAAAPRFVRGGAGGLAVLCAYPFRVPARGVLPLAYVARAQGAPLGDTGSAAMEAALRDGVVPFRVDGEARTRWKVAGIIGVDH

SEQ ID NO: 47454 - protein, 21 aa, Zea mays
  Coding DNA Sequence Number=SeqID_4079
MAKDAFINKGKAVKFITGKIL

SEQ ID NO: 47455 - protein, 183 aa, Zea mays
  Coding DNA Sequence Number=SeqID_4080
  Subcellular localization annotation: CTP_CleavageSite=53; ConfidenceScore=5.33e-01
MALHKLYDDGGPPALLRKQNDVRRDSTAPTAVPPPGSAAPPTATTSHQQGRTRAFSEKVGRAGPRTGQALSWGRSLPSPAWTLVTPLLQAHPTWARDEHEGRGTSTSLTLDSGHLASPPFALAHALDPSGLGHAAHSLVGLGTYAVRGGSLAVPGWDVSLADDVTAAPARLPPLLLPAHFRLL

SEQ ID NO: 47456 - protein, 385 aa, Zea mays
  Coding DNA Sequence Number=SeqID_4081
  Subcellular localization annotation: CTP_CleavageSite=65; ConfidenceScore=5.05e-01
MSGDHAKKMVIGSEKSATSHGKAPSRESANKKKDGSCRRFETGGRRGGSSEAEVESVFCCRGRARAMGRARRKSFGRGQGEVRALGSGEAEFRRLPARVRALGSGGAEFVVFRVSARVRALGSGGAEFAVFRVLARVRALGSGGAEFAVFRVLARVQALGSGRAEFAVFRVLARVRALGSGGAEFAVFRVLARVRALGSGGAEFAVFRVLARVRALGSGGAEFAVAPLSRPDCRSDSLCRVVLQSEWRRRRCPSVRLLYADGGYQLRIRRLEAPEPPHRARGRSGTDSTFYIRPYVAFPQGGGGSAPCYPRWAPNMVSPVSCKRVIRVDVRAPFVGGRLGAQRHAQKYLRVICRTRSPGDGVRGLDASLRWDSVTRSFPLVSEMS

SEQ ID NO: 47457 - protein, 152 aa, Zea mays
  Coding DNA Sequence Number=SeqID_4082
MTHFSDWCSACPLLPDVLPELHKFPCFLVEPSLHLADLLELYEANAQQVLRERAGVVRLLGVGVLRGNNARLRLKREVNARRVPRWGAGTVDSLDSQQGAASCLAMVAPPPPSSAGKVTEQTRMLFFHHAGKTSSIPPPVGGLAAAIVVVAR

SEQ ID NO: 47458 - protein, 213 aa, Zea mays
  Coding DNA Sequence Number=SeqID_4083
  Gene Ontology: Mol. function=serine carboxypeptidase activity; Cellular component=extracellular region; Biological process =proteolysis
  Homolog annotation: Hit_ID=Q10QL9; Match level="QueryCoverage=80%, HitCoverage=37%, E-value=1e-56, Identity=64%"; Hit description =Serine carboxypeptidase family protein, expressed
  Pfam annotation: Domain name=Peptidase_S10; Domain location=12-213; Score=-76.4; E_value=1.7e-10; Accession=PF00450.13; Description =Serine carboxypeptidase
TWLLFVWNRSIPGDRPVPRGHGQQDPLQFQIRLKHRYHDVVANVLYLESPVGVGFSYAANTDVYKVMGDNMTADDSLQFLLKWLDRFPEYKGRDFFIAGESYAGHYVLELAASILAAKNARPKDMASVNLKGIAIGNAILEFAAEQSALYEYLWQHAFLSDTAHTLIGQRCKNAEDNSPLCSGTKDVAYNQLGNIDAYNIYAMTCHDKKVKPT

SEQ ID NO: 47459 - protein, 378 aa, Zea mays
  Coding DNA Sequence Number=SeqID_4084
  Gene Ontology: Mol. function=cyclin-dependent protein kinase activity; Cellular component=cytoplasm; Biological process=protein amino acid phosphorylation
  Homolog annotation: Hit_ID=P23111; Match level="QueryCoverage=58%, HitCoverage=90%, E-value=5e-96, Identity=68%"; Hit description=Cell division control protein 2 homolog
  Pfam annotation: Domain name=Pkinase; Domain location=25-264; Score =79.0; E_value=1.5e-20; Accession=PF00069.16; Description=Protein kinase domain
  Pfam annotation: Domain name=Pkinase_Tyr; Domain location=20-264; Score=-85.2; E_value=3.4e-07; Accession=PF07714.8; Description =Protein tyrosine kinase
  Pfam module annotation: Pfam domain module=Pkinase::Pkinase_Tyr; Domain location=25-264::20-264
MEVDAGLHGFRLGLTPFADLTLEEFHAGALGSAAPVTARRRWRRSGRGTNETIALKKIRLEQEDEGVPSTAIREISLLKEMNHPNIVRLHDVVHSEKRIYLVFEYLDLDLEKFMDSCPEFAKNPSMIKNLLIDRRTNALKLANFGLARVFGIPVRTFTHEVVTLWYRAPEILLGERQYSMPVDVWVLGTPNEQSWPGVTSLPDFKSAFPKCQSQDLAAVVPNLEPTGLDLLSPIYVFIAHGQKMLRYEPSKRITARQALEHDYFKDLEMENMTTTSKKIVETVISPLAKELNEGDVDKIVPQNVDVNIKKEAKVDTNVKGPTISKKIHQRIATDDVKKPLESVSRYLHKLRRVMTNQSKAESASHGVGTQSQIDNFEV

SEQ ID NO: 47460 - protein, 420 aa, Zea mays
  Coding DNA Sequence Number=SeqID_4085
  Subcellular localization annotation: CTP_CleavageSite=26; ConfidenceScore=5.23e-01
MSSRSLMHRVFPPSEPPDGGHPLSFRLVVGGTQLRGSWYLSAIVRLQGFSSVSPAASPRRWSPKTVTTSPWVGRSKPGCDLGPALSFKDVHHPRWGGGRAEPELYLPRGFVGQPLLQHSRERALTGPTRGADFDNAGLVDGGRRQLQRVGLAGLAPGAPSCRKGGCRAARTGGPPKTSRAARAAFVFWGCPAFASVRRLRAEESLGSVDPDVRGFSCLVKGTPRPLFDEPKPGVAASARTEAELAQKEDLVGQSLAGSSTSGTDAGIELPRPRAGLMSLGDSWPRPRGDRPSRLLEPDSWRRPWRRWPGRGDDVVLQSGDPRTVSSSEAGSDLAEGVVDAEGAAAPFNCQDPSLIVCASESCFSRKAMSEGSVTDTVEKARRIASAEELSSVKTCSVRGITYPNASYLSQKVMSEDPLSK

SEQ ID NO: 47461 - protein, 122 aa, Zea mays
  Coding DNA Sequence Number=SeqID_4086
MPLEYNVWTWIFEREPTVNSAPVLFTLTGHSLLHHACTLTFFRAEGTFGLRSKPQCEEAQRIRRMAQSRSYAQGSFGVIAEKETDLKGKRLFRPRWITIELLANVKDMGVILHGLRPVPINR

SEQ ID NO: 47462 - protein, 95 aa, Zea mays
  Coding DNA Sequence Number=SeqID_4087
MTGKKTTTSSDGGTPKKAKVVVEDEEEVGLEDEEEATVTLSVEKDALECDICCLPFQSEVFMASQITMHCKNGHSGCAKCCIRTDESRVKLHDMS

SEQ ID NO: 47463 - protein, 66 aa, Zea mays
  Coding DNA Sequence Number=SeqID_4088
MSGEHAKREMVTSDKPEASRRKNDEETPSKEADDKYKEESTGSIKSHRKAHAPQVGDEDYDSDEAA

SEQ ID NO: 47464 - protein, 174 aa, Zea mays
  Coding DNA Sequence Number=SeqID_4089
MVGNKARVEGCIAEQFKLKETNDKAVGPPKAYHLSMEELKVSNGDTEDEVLISTWDEYRFKKERNHTDRQGLLRYRLPDEEDYMGHAEHVFQNNAKKLVKDAIYYARIQATNLYFQKHPEEAGPLNKKEGSSKIYLTEDQYREEAMSGQKPSDIEVYQEGHKGPDPNNPDQLCS

SEQ ID NO: 47465 - protein, 174 aa, Zea mays
  Coding DNA Sequence Number=SeqID_4090
MMTASKKVCHVVRFHILFHFLFLSLAIGTGKGDTPKGILLREGSGPRAPLLIRGSKAGPSEGFNSRLRALGLRAHYWSEVRRLAPRKGSTAASGHSGSAPTTDQGFVGWPPKGSDSRLRARRARDDPGDRRERFCNGIPPEGGIEPSDPVKRGPGPANHPQVLMERASGSLADP

SEQ ID NO: 47466 - protein, 43 aa, Zea mays
  Coding DNA Sequence Number=SeqID_4091
MAHRRAPPPWGREVGAAVLRSEPAGKATGLDTAPLITCTTLFQ

SEQ ID NO: 47467 - protein, 406 aa, Zea mays
  Coding DNA Sequence Number=SeqID_4092
MTSVARHDKWEGGDARISEHGAHGGLRETAVGGTSASWSGIRPGRDEGSCASRASRESAERNRELRAEGQGAKARESRARRAENFARGHGKAGAAGLNELRQGAAAGCEERGWARCRKRGPRRTPNRTMDAAGKLHGIHGRERAPRAEDWARREQRVAAPEEQRWSADELEQALGKGPSREKTWQPARIRGEQKAKRRPWEQARLPGAIAPDAWAGWETTRARGELEQRAGRSGAAAGRASVEHPGELQRPSRGRTSSRHGRGKSDQRRSQRRGMNLAERYGILKQAMANPRGEVAVPRVEVKAQSTQGTRSRLARAQPRARAADPGGFTSRPRAPSSNEHTFGSPEAQSSPRSNLGQIATPTDRICRRFETGGSLGPTSECRRVPQPRWVERMGEREGGKGARRP

SEQ ID NO: 47468 - protein, 476 aa, Zea mays
  Coding DNA Sequence Number=SeqID_4093
  Subcellular localization annotation: CTP_CleavageSite=44; ConfidenceScore=5.21e-01
MAAAGERKQQSSRLQARVPSWDSERDLSHGVKTTRPCSVPQTARARTTAAPPTTRPVALTLRQNRRHLWQATLHLRHNDRVKKGTGKGDTPKGILLREGSGPRALLLIRGSKAGPSEGFDSRLRAPGLRAHYWSEVRRLAPRKGSTAASGHSGSAPTTDQRFVGWPPKGSTVASEHAERGMTLGTSDTWPRLGLRSRGSGAALAHPAPAKPLTASTYQPENLEPDYAPGQRPENNAACPAPTAVPPARVRLTAAKSSLGRHRKLRLAQPQSSDSTSTPDDGLRLARPQGSDATSTTDDGLRLARPQGSDTTSTPDDGLRLARPQGSDSTSTPDDGLCLARPQGSDSTSTPDDGLRLARPQGSSSTSTSEESPPRLTSGLDRPRHRGGIIILPLASSGYGEQDPRPIWLAPVKHVMMTPRVLHDVAVLSPLRKQGDVSKDPTAPTAVLLQGSSAPPTATTSHEQGSNTSPTATSACT

SEQ ID NO: 47469 - protein, 548 aa, Zea mays
  Coding DNA Sequence Number=SeqID_4094
  Gene Ontology: Mol. function=pectate lyase activity; Cellular component=extracellular region; Biological process=pathogenesis
  Homolog annotation: Hit_ID=Q43862; Match level="QueryCoverage=79%, HitCoverage=100%, E-value=0.0, Identity=89%"; Hit description =Pectate lyase homolog
  Pfam annotation: Domain name=Pec_lyase_C; Domain location=171-355; Score=294.0; E_value=3e-85; Accession=PF00544.10; Description =Pectate lyase
  Pfam annotation: Domain name=Pec_lyase_N; Domain location=33-80; Score=77.1; E_value=5.7e-20; Accession=PF04431.4; Description =Pectate lyase, N terminus
  Pfam module annotation: Pfam domain module=Pec_lyase_C::Pec_lyase_N; Domain location=171-355::33-80
MAAVIRSRRRVSVFFYVVLAAAAAAAAAQASNNVTSDEEYWAERAEVARSRNLAAYVSDPVAATNRFNADVLRATTRRALARYDGPCMATNPIDRCWRCRADWATDRKRLAQCARGFGHRTVGGAAGKLYVVRDPSDDEMIIPRKGTLRHAVIQDRPLWIVFARDMVIELRQELIVNHNKTIDGRGAQVHIMFAQITLQNVQNVILHNLHIHDSKAHSGGMIRDSKRHYGLRTRSDGDGVSVLSSSNVWIDHVSMSSCSDGLIDVVNGSTAITVSNSHFTDHDHVMLFGASNDSPQDAVMQVTVAFNHFGRGLVQRMPRCRYGFFHVVNNDYTHWIMYAIGGNMNPTIISQGNRFIAPDDPNAKEVTKREYTPYKDYKEWVWKSQGDVMMNGAFFNESGGQNERKYDRFDFIPAKHGRYVGQLTRFAGPLKCIVGQPCYGGDGFFGRASGIGDSLGCERRQIPMASGSAAPRRVTGGGTHPGSSDDDAPEVGRQAATVHPRPGGDDGCVIGFGSGGHLRHGSLQRLREARSSPAMAATRGVGGSGVLR

SEQ ID NO: 47470 - protein, 522 aa, Zea mays
  Coding DNA Sequence Number=SeqID_4095
  Gene Ontology: Mol. function=nucleotide binding; Cellular component =mitochondrion; Biological process=small GTPase mediated signal transduction
  Homolog annotation: Hit_ID=A1YKF4; Match level="QueryCoverage=100%, HitCoverage=82%, E-value=0.0, Identity=84%"; Hit description=GFP binding protein
  Pfam annotation: Domain name=EFG_C; Domain location=345-410; Score =21.8; E_value=3.3e-06; Accession=PF00679.15; Description=Elongation factor G C-terminus
  Pfam annotation: Domain name=GTP_EFTU; Domain location=1-128; Score =88.4; E_value=2.3e-23; Accession=PF00009.18; Description=Elongation factor Tu GTP binding domain
  Pfam annotation: Domain name=GTP_EFTU_D2; Domain location=151-221; Score=27.6; E_value=4.7e-05; Accession=PF03144.16; Description =Elongation factor Tu domain 2
  Pfam annotation: Domain name=LepA_C; Domain location=411-519; Score =259.2; E_value=8.7e-75; Accession=PF06421.3; Description=GTP-binding protein LepA C-terminus
  Pfam module annotation: Pfam domain module=EFG_C::GTP_EFTU::GTP_EFTU _D2::LepA_C; Domain location=345-410::1-128::151-221::411-519
MFYRHITASQDSDMPRYLLNLIDTPGHVDFSYEVSRSLAACQGALLVVDAAQGVQAQTIANFYLAFESNLSIIPVINKIDQPTADPDNVKDQLKRLFDIDPSEALLTSAKTGRGLEQVLPAVIERIPSPPGKCDAPVRMLLLDSYYDEYRGVICHVAVVDGALRKGDKIASAATSRAYEVLDVGIMHPELTPTGVLYTGQVGYVISGMRSTKEARIGDTLHQAKSTVEPLPGFKPVKHMVFSGLYPADGSDFEALSHAIEKLTCNDASVSVTKETSNALGMGFRCGFLGLLHMDVFHQRLEQEYGAQVISTIPTVPYIFEYGDGSKVQVENPAALASNPGKRVAACWEPTVIATIIIPSDQRALLKYRLPLKEIIVDFYNELKGITSGYATFDYEDSEYQQADLVKMDILLNGQPVDAMATIVHNQKAQRVGKDLVEKLKKFIERQMFEITIQAAIGSKVIARETLSAMRKNVLAKCYGGDITRKKKLLEKQKEGKKRMKRVGSVDIPQEAFHELLKVSNSK

SEQ ID NO: 47471 - protein, 123 aa, Zea mays
  Coding DNA Sequence Number=SeqID_4096
  Subcellular localization annotation: CTP_CleavageSite=82; ConfidenceScore=5.72e-01
MNSASPDPRARTQPRPRKTTYSASPDPRARTQPWPRTTVSTSPDPGLGLSLGPGRRRTPPRPTPGLGLSLGLGRRSPPRPTRGSDSTSTSEDRLDLDLGGASASPDPGLGPTTSQGGPSLPYP

SEQ ID NO: 47472 - protein, 141 aa, Zea mays
  Coding DNA Sequence Number=SeqID_4097
MGKSKKGGSSSHHSGDKRKREPTPPSEDFSDSEYSEEEFSSKSEGSSAPASPPASSDDSDDSEGIAAEGSDKSEYSSDEENSSDSSEEGGDGDGGDSDDDGGDGDGGGGDGKSGDGGGKGGSGDGGGGSKGSSRGSNKASG

SEQ ID NO: 47473 - protein, 921 aa, Zea mays
  Coding DNA Sequence Number=SeqID_4098
  Homolog annotation: Hit_ID=Q7XHQ4; Match level="QueryCoverage=58%, HitCoverage=58%, E-value=1e-150, Identity=50%"; Hit description =Putative uncharacterized protein P0565A07.109
  Pfam annotation: Domain name=DUF1723; Domain location=301-350; Score =6.9; E_value=0.08; Accession=PF08330.1; Description=Protein of unknown function (DUF1723)
MPLRGRSRRQGDFPQNMNTFHARPSVPCSYDRNTQEVAGQRIRSGDRPDHHPSQTISPSAHQRHDPSMNTRRVITSVHSRNMSPGERTFYTLFSGPAEQAPPEEEEEIYLWRKDFDFFADANSVMHHAGDVDDAKAENPDDFMTLVANCLGLGRGYQLVTEPGHEIIEKERKNRKRCRVPTSSRTLSTTTPDNIPFGIQKNPQEPPVSDYAGRAHILHPVLDSSKRSLDIPSSTSTLAQKMVKHPSSRWFNDCRPQLRLDVPVCRKMLIWARMMLVNHEDRSMLQKSDIYRGVLASLYCFQADPSLVAAFLTYWNVDGHTLVTSQGEMGYPLHTISDAMGIPISGRLYEEFIPPCSDVHGHLETLYAIYASLCPSELQPGPGLVSLTAWLDHFFDDKADSFGSSLLDGFADPKDPLLQKLRFHVAVQGDRPAAILGAETLSYRSMYPSTVYRAAFITAWLCTYCIPVEAGQYIRPEVFHMAVQISEGVRRAIGVASLAFLYNCLDNIHDNIISGTRSASECSLFLPGHFIMGWFASFWKQARKSATLHCPVKFPPFVIDLTKLEQPMPITEAHHIFWDFDGDGRGLRSLDFLGRSSLRFPGGHRPVFIRDGRTKNEKQPFAISVSAMELLMSSLFGGITHRRGERSDNLVYCPHRFARMFNYDQLIPYFDYRAADNVTDSLNFRSYSPSSRKETLQICVRRHLSYYDQPEGHALVVQPSNLGTRRSYNYIIWCNNAFRFLRDPSFFCDRIFMSAAIKTTVAAPAEGDIDQPAKETAVIKYSLLPGDSEHDREDTTPATVSRLGQGKNIGIIQARLQDKASALTSSPELPLPVDSSQSTHTSKGSRANTDLLNDTLSDGGLACPPDDPDFLNDFVFTGALEPFTDLFTDLPNEVREMQASHTQVPTSGDLEQTDMVHVSQPG

SEQ ID NO: 47474 - protein, 603 aa, Zea mays
  Coding DNA Sequence Number=SeqID_4099
  Gene Ontology: Biological process=protein localization
  Homolog annotation: Hit_ID=Q6K796; Match level="QueryCoverage=83%, HitCoverage=19%, E-value=1e-128, Identity=67%"; Hit description =Vacuolar protein sorting 13C protein-like
  Pfam annotation: Domain name=DUF946; Domain location=172-525; Score= -415.2; E_value=0.035; Accession=PF06101.2; Description=Plant protein of unknown function (DUF946)
MAYATTAALVDRGARARAAVVLGGRGAASGGGGWDVGSGPYGPGRRSGESCAGTGHAKPGARAGEGRRLRSGVGAAAGWEEGRVVSPEFTFYDSSKLSMDDSLHIEKLLRAKMDFSFMYASKEKDIWARSVIKDLTIEAGSGLLVLEPVDVSWKYTSVNEKTNIVLVSTDVCIHLSLSVASLMLKLQNQTLAALQFGNISPLISCTNFKRIWSSPKGDLPGYNLTFWRPQAPSNYVILGDCVSSRFEPPTLGILFKCDTVVSEKPVQFTKVTQIDRKGLEEIFFWYPVPPPGYASLGCIVTKTDEMPSKDSICCPKLSLVSQANMSEDPISMSSSSKGPCCWSIWKVENQGCTFLARPDVKKPSAQLAYRIADHAKPKARENITAELKLGCLSVGILDSSCGMVTPLFDTTIANINLATHGRFETLNAVLICSIAASTFNRHLEAWEPFVEPFDGIFKFETYDTSEHPPSKVGKRIRVAATSPLNANLSSANLELLIETLVSWRRQIDLENKSSTKSEGLPIIDDGNGHSYFCALRLLIGSHASDQHKASANLEIEVTNLASKAGKALPTVANSPVIAAGRFSKRPSSPAQALKLPGPRSRSL

SEQ ID NO: 47475 - protein, 242 aa, Zea mays
  Coding DNA Sequence Number=SeqID_4100
  Homolog annotation: Hit_ID=Q6QP51; Match level="QueryCoverage=64%, HitCoverage=64%, E-value=3e-14, Identity=40%"; Hit description =Putative growth-regulating factor 1
MQAACDYTTETCPFNFDASSVEAQAHTSCGRRQQSNRLQAHVPSWGNRGALSHDGRRHLWQAKRATLHLRHDDRVKKAALEHSGSAPTTDQRFEGLPLGRVRQPPQATRALRPLLIRGSKAGPPKGSTAASEHAERGMTLGMSDTWPRLELRSRGTLGHFRDQQERFCNGIPSEGGIEPSDPIKQDRENSIACPAPTVVPPARVRPTAAESSLRRHRKLCLARPRGSAPASTSEDGLRLAQP

SEQ ID NO: 47476 - protein, 271 aa, Zea mays
  Coding DNA Sequence Number=SeqID_4101
  Subcellular localization annotation: CTP_CleavageSite=10; ConfidenceScore=5.04e-01
MPSHSPHALRPSAFPSPRMGSTRVAFVSLWEERNLVEVGTFQPSLGFKDFHQAARLHPLTNGRGEPGPAFAWAGVPPLPPASGGGNHPPALRRRRPPAMPGKANCCCLARVQHSVLCPGDGGQPHRGVSQHVVRREGGTRVLGRSHSRFRGEDRSEDLPVRFGAAGARWCGSGGQVDAAVGAEMVAAGESFSTDEIVGAICVPGLRLFGFNIWFSSLEWGREREPSSGSVRPGTIAAVVEAAGESPGACRPAGPPMWRLFIPAGVVPEFHL

SEQ ID NO: 47477 - protein, 143 aa, Zea mays
  Coding DNA Sequence Number=SeqID_4102
MDRAELAREETSSAQEQDLFVGSRIVYPSESYLSRKVMSEVSVSRRRRSPSARSASPLTCTLTRPQDSVTDIVEKARKIVSAEKFSSVKTCSVSGIAYPSVSYLSQKVMSEDPTIEVVEKRERCSGRKTFSEENFDAEGVPPF

SEQ ID NO: 47478 - protein, 202 aa, Zea mays
  Coding DNA Sequence Number=SeqID_4103
MNKNTGIQSAITNGTPVPPPQVRTTPLDGGPAEQQKTDERRAVARSSSGDDDDFCSGGPNSGSDDLRADAAARRPPPVPKLVRQGWAEGRRVGGRPVGSPGYPVGGRTSSSCRGGSRRRERLRSHSGRRARHAAAAGATDDSRPSPRSLREGAGHHPRRGRSQLGTLPSPALVMKILEAEGGAEAAARLAFPHHQTGGHRLG

SEQ ID NO: 47479 - protein, 323 aa, Zea mays
  Coding DNA Sequence Number=SeqID_4104
  Homolog annotation: Hit_ID=Q6J9V9; Match level="QueryCoverage=20%, HitCoverage=33%, E-value=9e-09, Identity=47%"; Hit description =Putative uncharacterized protein
MAERYQLPRSCVPPTTRRKDGGYPPSGGLEGGKTRCIREREDVVVFQGGHPPFKGNSPCLRPQPSRAESSPTRSKVLPLRRGGWVPHVMQAGSEQKKPNRCARCIQPPSGYKRLFAFAQTNGRKGRAAMQAACNRAKWAHFSDSQHAQHGGPGPRVMQQARRMLRACNSTATCATAAPPRLRNQYRDSRRPSARPSSASLAQRSMRPKMGRRSGRRFAFAIMTASKKGPGKGDTPKRILPREGTRLRAPLLIRGSKAGPSEGFDSRLRSRGPYTRYWSEVRRPAPRKGSTAASGYSGSAPITDQGFEGWPPKGSQPPQTPSEG

SEQ ID NO: 47480 - protein, 297 aa, Zea mays
  Coding DNA Sequence Number=SeqID_4105
  Subcellular localization annotation: CTP_CleavageSite=56; ConfidenceScore=5.64e-01
MWKLLRSRGRVCLPWPRSSPSPRVGRGRDRRLRSGRSPSPGVRRSGVRRLLGLSPSPSPGSGGAEFAVFRDFSPSPSPGSGGVRRLPGLSPSPSPGSGEVRRLPGLSPSPSPGSGGAEFAVFWDFSPSPSPGSGGVRRLPGLSPSPSPGSGGAELPMAPLAGPDCLSVSLCQVALQSEWRRQRCPSVRPLCADGGYQLRIRSLEGLNASRNASAGLVVPSCELAVARGERAIRDRLGFFTYAPASPFRKEEGESAMLPSMGAEHGVSGAQRHAQKYLRVICRTRSPGDGVRGLDASL

SEQ ID NO: 47481 - protein, 330 aa, Zea mays
  Coding DNA Sequence Number=SeqID_4106
MAASMRAPLQRGPRPRPPMGGDNETIKAKELEARRQVALVVSPAEATTSAMGSLTSGGNHLSTEESVHLCTGGLPAMAAASPRAERSSPPSSYGGEDKTIQECDRHLYGMTTDGRLQLSCMMKILEAEQWQKSANPREVALLQQQQEEDKIDNTTAQETKSASSLAVDIPDRASKRHGQGLPRRAPGFPFYDMGLGLTCRTRNLKERRRRIVAQGACNRPAVTHPFTFAVASGQEGEPPHKERATVLRLFALPSSPQSAVKEANRRTRSMQPHRSCAPPQLRCNRWSNLWHGAQAHMSYIRRAGSWVQQSRAAARANTAPSRGRRRRLRR

SEQ ID NO: 47482 - protein, 155 aa, Zea mays
  Coding DNA Sequence Number=SeqID_4107
MGKSNKRKREPTPPSEDFGDSEYSEEEFSSESEGSPAPVSPPASSDDSDDSQGIAAEVWTYIRAVERSGLEGSDESEFSSDEEDSDGGEDEDDDDDDGDDDDGGDGDGDSSNGGGGSGGKGGTRGGSSTGSTRGGNSKGSTRGGGGKGSSSKASG

SEQ ID NO: 47483 - protein, 389 aa, Zea mays
  Coding DNA Sequence Number=SeqID_4108
MNKTPALKVPLQTELRFRPRGYEQPPHRGACGATSSGRLASDLCSSSHGPRTDAATGRLSCHRVSTDGGVRLSTNAALANAGRSKAHRNSSPSSAWLEDASSAELEDGFHHQKLEEEVVSRPVREVEPLLTSLSAPARMMNILEAEGGTKIAARLASPHPGAGGHRLGGWVPTRHASWAQGRRKPNRRARVHATAQRLQAFLHFRPDQRVKGRTAMQSACNRAKWVHPFDSNAPSMEALAHTSCNRRAGCYVRATAPSLAPLPRLLDCGTSTATRGNPVYDPTVPARRIGHGPGPGKGDTPKGILLREGNGPRAPLLIRGSKAGPSEGFNSRLRALGLRAHYWSEVRGSAPRKGSTAASGHSGSAPTTDQGFVGWPSKGSQPPQTQSEG

SEQ ID NO: 47484 - protein, 285 aa, Zea mays
  Coding DNA Sequence Number=SeqID_4109
  Gene Ontology: Mol. function=kinase activity; Cellular component =ornithine carbamoyltransferase complex; Biological process=amino acid metabolic process
  Homolog annotation: Hit_ID=Q6QP54; Match level="QueryCoverage=26%, HitCoverage=26%, E-value=1e-16, Identity=62%"; Hit description =Putative kinase
MTGDKQRQKLKQKPSSKISNTYIKKVNKKDATPYLIKKKKNGKVIAIKANKQANKGKGAKHIWVPKEIISTMKSTKKGNDGASCDVVGPSPGLGEVEAPPRSRLSLSSKAEVESEPLGRARQRPSAEARAESEPWGRAKRSSSSSGAEPESEPWVGRSGVRRLPGLSPSPSPRVGRSGVRRLPGLSPSPSPGVGRSGVCRLPGLSPSPSPGVGRSGVRRLPGLSPSLSPGSGEAEFPMAPEAGLGCCQPHSVEWHNSRSGAGDTVFLSGQSVERRSDCGHFGSID

SEQ ID NO: 47485 - protein, 48 aa, Zea mays
  Coding DNA Sequence Number=SeqID_4110
MARVARTLLAKDRLKGVGERLQVVEIPRKREKDKGRKNHGIQVDHRIT

SEQ ID NO: 47486 - protein, 418 aa, Zea mays
  Coding DNA Sequence Number=SeqID_4111
  Homolog annotation: Hit_ID=A7PC38; Match level="QueryCoverage=76%, HitCoverage=95%, E-value=1e-18, Identity=26%"; Hit description =Chromosome chr2 scaffold_11, whole genome shotgun sequence
MRLSVSLSSRGGAAEDTRPDRPRKEEKPAEGDRGQRDSEMGMGDELWDDSALVVAFDRAISTFNEMHCKSRRATPSKDAKKEHAAAPAAEEEPITAGAVDECREEDDNCDNAQTVEQQQPSDDRQTVEQASLQETDPGKETHVSEAKTLTADADGNLSSSQQTGEYNELLRQYYELEEKSRNILEQLQQTNSWNYQAPGYASTTQQQQVPVYSATAPDLHSSTTQSSCCNWNVPLVSVYCCSTGQPSGGSAYMPPTAGCSATLTCDQCPDANSAYPSVSNFMQVPTNVSINDDQVAKAAMKTAEGAFNFMRSTISGQPGAQRNESDTGKEESTDMGTNLNLDSDLAALLNSWYAAGFYTCRLQRYLVLVGLCINFFISLLTIIHTSQHLYLSLHFGWVPHAAIYEKFQTVECFGRLEF

SEQ ID NO: 47487 - protein, 205 aa, Zea mays
  Coding DNA Sequence Number=SeqID_4112
MTVSTASIPVLHSAEVAHLYPQVVLPICHGVDQTPYTSTKEARQGTTTRPLQSSTSFRKPATVIGSSSAEIPRLTVIAAKSTQGPLYTDHSPTALAPFRGLGAKVIETQATLSKDCGLILVFGGGSLIILPVPKVGLSYRCLSKHGTDHSKSGSAAARKSDEQFPPPRLRIRPNKTTKSFTTRPRCTTARPRVQNGKEKRFPQAA

SEQ ID NO: 47488 - protein, 534 aa, Zea mays
  Coding DNA Sequence Number=SeqID_4113
  Homolog annotation: Hit_ID=Q6J9V9; Match level="QueryCoverage=21%, HitCoverage=41%, E-value=5e-20, Identity=46%"; Hit description =Putative uncharacterized protein
MNGGDHPRGGKPSFSQLLQGLQKGLEILLSVAWGPVAPVIDDGATGSHRHADSSFPRRRGKKLCGEEMGPQVPVGGDPQISFANRREDGCLRDGVGTEIVQLHPVDMQNRPHETTCRHSEPPLMKGDEAYHIPRRRGRGGSAQRGHPLQLRITGERAKQTISNKGLQVIHRDGGKRPRVARRNNGHPVGITKQKGWRRRGLGTGKGDTPKGILLREGNGPRALLLIRGSKAGPSGGFDSRPRALGLRAHLLAGPRRVHSRLRARRVRDDSGYVRYITKARSTLPRYPRTFPRPARTICNGIPPKVGIEPSDPVKRGPGPANNPQLVNPISTKLQRPDGATQAKAPPKGHDPASSEPGLGQRQPTPEDSPPTLEDDGLHLARPQGSDSTPTLEDDGLRPRPDPRARTQPRLWKTTDSALARPQGSDSAPTLEDDGLRLARPQGSDSAPTLEDDGLRLAQPQGSDSALTLEDDGLCLAPTLGLGLSPDSGRRRTPPHPTPGFGPSLDLGRESPPHPKHGLGPNPRHQEAHHYPTPG

SEQ ID NO: 47489 - protein, 468 aa, Zea mays
  Coding DNA Sequence Number=SeqID_4114
  Gene Ontology: Biological process=regulation of transcription, DNA -dependent
  Homolog annotation: Hit_ID=Q9FVG4; Match level="QueryCoverage=35%, HitCoverage=27%, E-value=7e-14, Identity=30%"; Hit description =Transposase DOPA
TNGIRQSQYGITEVQHKERLRGHDNFILAHQCDQVYYLSYPNPKFEAWWVVHKEEEDDEEEVQHHEEEDEQAHEEDDEEEVQHHEEEDEQAHEGIDAEADDDTTEAPVVRRRGTRKGHFVLPPSAPAQSEARVLIIPVGDSQWEDTSFDGRGHHRQVNQVLGNLCRLHNPGIVTDPKGVVVPCTSWSHFALAPHATYGTAQGAVKHDFWRRYCVEPEAQEHADRVLEKNAKKVCRDAFSNARLQVVNAYMKRRGHSINNFRQYSDVYLTVDQYMEETYGQEMIKKYGEDYDWRGAPTIDAEVVHSLGGKAHGRYSMFTGVIDSTELRSRGGSSSQAGCGSSSRSRRSVSSMEEAMREQQEKFREEMRQKQMAFLQQQSEYMAAYNAQAQQAMNPPMPQWGLHAPPPPPPPQGSGVMGHNTPPPVIPAPGGAYAGEGAYAGEDPNPLHNFVNQLLASGGSGHNSNDPNV

SEQ ID NO: 47490 - protein, 104 aa, Zea mays
  Coding DNA Sequence Number=SeqID_4115
MQIHYVILKENLNLKDCNLADGEYILVPEQGAAQEQIALLTRPETRSPIPVMVGTSAVTARRPVGVSEALYAKAALLYLLCDSPSSEIVVLDPVSGRVGLDPRD

SEQ ID NO: 47491 - protein, 197 aa, Zea mays
  Coding DNA Sequence Number=SeqID_4116
MGSARGLVHSWLGPPVHTTCHLTPAVTSVLHVVHAPEEEQPSPGDVRIGIEEEAPGAATEAPRVVDGVPSGVPDGAAVPAGPMGDDGIEVAAVLGARSRLRDPPLSYSRRRSRVVAAATPPWAPAEQFINRITSKVGSLLPVPKISRRRSKTAQASHAPRRSRRVAGLPVEPGKVDASGCRTCCVRLVLTLWRSKSP

SEQ ID NO: 47492 - protein, 82 aa, Zea mays
  Coding DNA Sequence Number=SeqID_4117
MAHRTVRCTPDMSGAPATSPVPLESDRWSSDFWARLDVRWRIGHELFSVRETFIGYSQMSSHLGPFNKQYHSTNIKLKEELY

SEQ ID NO: 47493 - protein, 153 aa, Zea mays
  Coding DNA Sequence Number=SeqID_4118
  Subcellular localization annotation: CTP_CleavageSite=49; ConfidenceScore=5.23e-01
MVVGSPSGGITDDDLSPGRKRNTRVNPATLLAECNTLNLGRKPSGMSPRGTLVVAFMPLHGVSKCKMNRQSSFGNQITQLFEFYKVEDPEHLFGEGKNWGVVRFAVVPLMGLGVCGSLCQDDDEDGYDHAYGNGKEGVEADLQEFQDVDEFED

SEQ ID NO: 47494 - protein, 190 aa, Zea mays
  Coding DNA Sequence Number=SeqID_4119
MARQEAAPRRLSDQSKLTAPAPLRGTCRAVQHKCLSVKWWTKYKSSQKPKPALSGCTGLSGGAPDCVRCARLALANSLLSGFHRRRTTIIHRTVRCAPDCPVSQRSAEPTVSCAICARHVAEQTVCRGHRTVRCAPDSVRCANGSQAPTVGYATEGKKSAPDSVRWCTGLSGAPGDRRQELPSWNALNGS

SEQ ID NO: 47495 - protein, 29 aa, Zea mays
  Coding DNA Sequence Number=SeqID_4120
MEIKIDYKCTFGLKESKYRRDAKMNAKSA

SEQ ID NO: 47496 - protein, 98 aa, Zea mays
  Coding DNA Sequence Number=SeqID_4121
  Gene Ontology: Mol. function=carboxyl- or carbamoyltransferase activity; Cellular component=ornithine carbamoyltransferase complex; Biological process=amino acid metabolic process
  Homolog annotation: Hit_ID=Q8SA97; Match level="QueryCoverage=88%, HitCoverage=21%, E-value=7e-14, Identity=45%"; Hit description =Ornithine carbamoyltransferase
MALPVDVAGLRPRLGDVEAPPKPRAESEPWGRAERSSSSSGAEPESEPWVGRSGVRRLPGLSPSPSPGSGGAEFAVFRDLARVRALGRAERSSPSSGA

SEQ ID NO: 47497 - protein, 35 aa, Zea mays
  Coding DNA Sequence Number=SeqID_4122
MKDAKAIKTPMGTNGHLDLDTGGSKPILRKFTLGP

SEQ ID NO: 47498 - protein, 125 aa, Zea mays
  Coding DNA Sequence Number=SeqID_4123
  Homolog annotation: Hit_ID=Q6J9V9; Match level="QueryCoverage=23%, HitCoverage=10%, E-value=2e-07, Identity=93%"; Hit description =Putative uncharacterized protein
MHLACNRTTGAHPFGFVASSMEAQVHTSCNRHAGYYVQATAPPLAPMSRLLDCETSAATRGNPAHGPTVPIEHIDHRYRERGYFERDPSPRSKRAPSPLLIRGSKAGPSEGFDSRPRALGLCAHY

SEQ ID NO: 47499 - protein, 216 aa, Zea mays
  Coding DNA Sequence Number=SeqID_4124
MWGKANCCCLARVQHSVLRLGGYGRPHRGVAQHVVRREGGTRVLGWSCSRSRGKNGSEDLPVRFGAAAARWCGVGGHVAAVVGAEVVAAGEGFSANDTVSATCAPGLQLFGFNGWFSSPARGRERGPSSGSVRPGAIIAAVLPSETEVVAALLGAAVAGEPPGSLSSRRPFRCGGAVLASSFEVEIFPPGSPSEAGPGSAEGGNDAEGAAAPSIDV

SEQ ID NO: 47500 - protein, 148 aa, Zea mays
  Coding DNA Sequence Number=SeqID_4125
  Gene Ontology: Mol. function=nucleotidyltransferase activity; Biological process=RNA processing
  Homolog annotation: Hit_ID=Q2QX33; Match level="QueryCoverage=34%, HitCoverage=8%, E-value=1e-15, Identity=76%"; Hit description=TRNA -nucleotidyltransferase, putative, expressed
MCDIRDLGLFYVVFSFPKKSNPPVFDKCDWQCVSHIEVAWDLAYSIGSCVFSSGSDSKSQKSERERVRYRSDEAPSSTNVVGALGLRRAHHLLRERDGTVGGDGWRWRRRDELGLRGRQAEDENERAGGGAVTFGCWAASRGALAAPR

SEQ ID NO: 47501 - protein, 114 aa, Zea mays
  Coding DNA Sequence Number=SeqID_4126
MALSSGSARELSPLLEGDVDPGDTKSQWKCFRLWDNYCVKNKRCVDECLGVEGKGYTHGHCELWTCICCKKNGEDEILAPSCWATLSSEQNHPSVSNKRSVRGELKWFPHFAVL

SEQ ID NO: 47502 - protein, 1056 aa, Zea mays
  Coding DNA Sequence Number=SeqID_4127
  Subcellular localization annotation: CTP_CleavageSite=13; ConfidenceScore=5.16e-01
MSSSSSSAATTPPAAASSKETLSSLMVEELRAGDSVDFGVSRMTSARVEDMQRLGYFGGGVARAPGTEEVPEPEEEDDWDEVAQFGSCTFTPKTGKTTMQVVELVPCARNKWGNWNEFWFYVAEATVEGHEGLPVSEMCSHYYSAYPPFEVAEEDADEGALRCAAGQSSGRDLVEEFVAYGVWPLAYGWALGEVCPRQMPFHGGRVVRSPAFALNLQNRDPAAFVRDAEDGAVRLVGRYVPRTEGQRSFDIRGSNDRLNRVFELNQLPYDGYPGQDEADRRGKKPAVETGGDPTLAAAPSSKKRKLGTAMGGLGVSDSFARELMRTCAAPGERMSSPELRESSARMLRVTGGCWPRNVPIPCAAGEDCFTSRMVRRWRVFPYGRNIGAVVWAVMDKDGQGAAQKRQATVRLHEARPKRQRGAAKAAASGGGRPPLAAKAGAAAPSKAPEATAGAGGSKSTKVVPPASGVAEASKAARALPLSGKRVADFGTDITVDDYLGGSDEGQLAMVAPGAETATAAIVPRARGEALGAGGEASALAVVRDEASAATRRLKGVTEALSQATEALGQVADFASRTASGALTVAVSAEVERLWTQHADAVREKLASDSKCRKLTDRVAALEREKADLRRQLAAERREANEAVAKGQAAQAEAKLARAEGNLAKELAEHLQERLTALESRAKEAEAAMHAEAERTRTQLMDTYRELGARTGDFEVPDREPGLRCLQWVQEELLELPAVAGGVDVAFDQADEEFERDIYKVEDPVVKESAGALYDRMWGLYGREVVRERAETARAQAERGERVDDFGALNSALPDPEPTLAEAVTGVALEPTPATAAIATAAPTSAVAGEDLPPKVAEGAPDAPAAAVPSAEDPATVAAETTAEAAAEPTAEAPAASGPSQVQDFGPAHATATTEFLAASTAEGGNEYGGSVSEFFDFTDSGSSVEWTEESSEEDLDYFAALDVAAAEAPSHAADAPDVPGPSTGRRRRRAVAKRRVSAEEGARLRVSGAGRQELLSLPAAAGTGEGELRSIFTGEELRIMLFNYREMGIIPKVEPM

SEQ ID NO: 47503 - protein, 515 aa, Zea mays
  Coding DNA Sequence Number=SeqID_4128
  Subcellular localization annotation: CTP_CleavageSite=38; ConfidenceScore=5.58e-01
MQTGSKQKKPNRRVWGTQPPSGYKRSSTFAQTNGRERRAAMQAACNRAKWTRFSDSQRAQPGGPGPRVTQPARRMLHASNCTATCATTTPLWLRNQYRDSRRPGTRPSSASLTRQSMRPKGPGKGDPPKGILPREGTRLRASLLIRGWKAGPRRVHQPPQMAWALHPLLVRGWKAGPPKGSTAASGYSGSVPITDQGFEGWAPEGFTVASDAERGMTRGDRVRQITLRYFWACLWAPSRPLTNGAQTSTRITRLQLTGDTMFGAHRGGSGAALANPAPAEPLTASTYQPENLGLDRTPGATASSHEGTTRPAEALRKALRPRRSEITPPRPRGLHPAGALARTHRNQMQPRKAGPLAKKCDESLQASANTPFEARGLLSGTIIRGISPYERLDHASPEPSLGQGQPTPKGFPSRPRPPFNGGHISGLPEALPSLRSNPDRIATPTGQVAGAFNAKETRPCQRHHRKLRSARPRVRIRAKPRKTANSAPPDPGLGLGLSPGRRRTPLRPTQGSDSG

SEQ ID NO: 47504 - protein, 210 aa, Zea mays
  Coding DNA Sequence Number=SeqID_4129
MAMMGSTSEKMYLCQVPNFGFEMIKRRPGGPIGVPRHQLAPRHEDSSSGSNDPIGDLEAQVEQLRSELRHRNEVWVEDGQRINELRTDIRHLQDQLAERDLALDWAVNSSSLACAKEAKARACVEELSTTVDNLQVYCNTLHEEVHVLYSQLHPNIPVDPVGMKAGPSGAAGEALGGELDLFRPPPSMNLVDEWSPTPDSEATKSDKKLE

SEQ ID NO: 47505 - protein, 117 aa, Zea mays
  Coding DNA Sequence Number=SeqID_4130
MGSARVAFVLLPLEERNFAEVGIFQPSLGFKDFHQTVTTSPMVGRSKPGCGLRPALSFKDLHHPCWGGGRAEPELYPPHGSVGHLLLQHLGERAPTGLAERADFDNVGLVGRERRQP

SEQ ID NO: 47506 - protein, 93 aa, Zea mays
  Coding DNA Sequence Number=SeqID_4131
MQAACNLATGMHPFDFDASSMESQAHTTCSRPLLEQQESPHPRREDDAPVFRSSNGSCMHNGCPVNHSSRRINSAAGQATPLAGEAGDASPPP

SEQ ID NO: 47507 - protein, 187 aa, Zea mays
  Coding DNA Sequence Number=SeqID_4132
MVSPVSCKRVIRVDVRAPFVGGRLGAQRHAQKYLRQLARRLLDAWAWVPKLTRQKLEKRVHLARLHAACMAARPFCPLVWARKGGGSLKAAMSSSSLKRRVFPSSKPPDGGYPPPFRLLVGGTQLHGSWYLSAIVRLQGFSSPVAPLHRRSSEMAASGLMVGESEPGCGLCPSLGLKDFRHPGQDGR

SEQ ID NO: 47508 - protein, 658 aa, Zea mays
  Coding DNA Sequence Number=SeqID_4133
  Gene Ontology: Mol. function=ferredoxin-NADP+ reductase activity; Cellular component=thylakoid membrane; Biological process=electron transport
  Homolog annotation: Hit_ID=O23877; Match level="QueryCoverage=56%, HitCoverage=98%, E-value=0.0, Identity=84%"; Hit description =Ferredoxin--NADP reductase, embryo isozyme, chloroplast precursor
  Pfam annotation: Domain name=NAD_binding_1; Domain location=234-350; Score=130.8; E_value=4e-36; Accession=PF00175.12; Description =Oxidoreductase NAD-binding domain
  Subcellular localization annotation: CTP_CleavageSite=63; ConfidenceScore=5.72e-01
MAPPALGSQVAAAASVPVGSDSLAKGAALKGNSTLNFRTKPCIGMALAWKNRTQQPRRLNKVLCMSVQQASRSKVAVVPIELEKAKEPPLHLYKPKEPYTATIVSVERLVGPRAPGETCHVVIDHGGNVPYWEGQSYGVIPPGENPKKPGSPNTVRLYSIASTRYGDSFDGKTASLCVRRAVYYDPETGEEDPSKRGVCSNFLCGSKPGDKVQITGPSGKIMLLPEDDPNATHIMIATGTGVAPYRGYLRRMFMEDVPTFKFGGLAWLFLGVANSDSLLYDEEFTNYLQQYPDNFRYDKALSREQKNKSGGKMYVQDKIEEYSDEIFRLLDGGAHIYFCGLKGMMPGIQDTLKKVAEQRGESWDQKLSQLKKNKQWHVEAEPSSSAPQGAPTTADARAPRATYRGHPHYRTSHCPNHPYRLFLPGLRFTTTRPLQLPPLSPTRHALGGEQLNPTPAARNGANKALKRTLRLLPMARIQLVSLSVPPCLCVRNSVVVRWGLGLLELAGAVRSGDGRCCHAYLVAVAGDASRASSAARVLPFWRIEVDGRKRNLHCFASMRALLLVREGVGFCCFGTGKSTARGELLCSSLVTSQRPILHCCWLLRHAFTLAEWERNGIVVYGTAVLAYWCSVPVLQLSLLAITSHPSPEFLYSVSSTGW

SEQ ID NO: 47509 - protein, 67 aa, Zea mays
  Coding DNA Sequence Number=SeqID_4134
MGHALTRPRGPRDVCDFRGPPLCACGFRAVTVSKAKSEIINVKIFTKSSYPTSLKIGPCLISGPMFL

SEQ ID NO: 47510 - protein, 107 aa, Zea mays
  Coding DNA Sequence Number=SeqID_4135
MERAEASIRVEIERTRKQLVDSYRELGAWTADFEVPDREAGLRFLEWLQEELQALPTIVAGFMSYASLVTCDGAMMRCPVRGAVTMRSSTDPMKILGARFLRSKTLW

SEQ ID NO: 47511 - protein, 236 aa, Zea mays
  Coding DNA Sequence Number=SeqID_4136
MQGHSVPTHINRPHRFPVSREGLTTLALGCWIWGYLLSSSLLWHEDVLSVSKITVYRNAMNIPSPHANSNRGKEKGGAAYRRRGRSGEGWGWFWETLAVTSRYGSTSEMAGIARSTRTGGCPRRRRVYRPNNGELVQSEGMVSFTGSRSDCVHKESKDGGVVYPVHVLRRGRELRRAWTGFSGEVLSDSLLGEPHGGVHSLLRGLDGVGNGSIGRSMVAEGLGGRGLAAHGQTATS

SEQ ID NO: 47512 - protein, 76 aa, Zea mays
  Coding DNA Sequence Number=SeqID_4137
MFGLQLAMRLMVLGIGSGNASPLQANKILVEYVDVYSPFLYTPNPPSPGCPHCNHCSGEDEAVEGEHQEFQDYDEF

SEQ ID NO: 47513 - protein, 161 aa, Zea mays
  Coding DNA Sequence Number=SeqID_4138
  Subcellular localization annotation: CTP_CleavageSite=27; ConfidenceScore=5.17e-01
MQAACNHAKWVHLSDFQQAQHGGPGPRVMQPARRLLRGPRKGDTPKRTLLREGNRLQASLLIRGSKAGPSEGFNGRLRSIGFCAHYWSEREASSPRTPSTGDRVRQITRRGSGAALANSALAKPLTASTYQPENLGPDRALGLRPARMREQLDQPKCCETH

SEQ ID NO: 47514 - protein, 52 aa, Zea mays
  Coding DNA Sequence Number=SeqID_4139
MARVACTLRGKRLDGGVSLLSVRKQQIFVVSVPRWCPKKKIKTEAAGGKVLR

SEQ ID NO: 47515 - protein, 71 aa, Zea mays
  Coding DNA Sequence Number=SeqID_4140
  Homolog annotation: Hit_ID=Q7XBD4; Match level="QueryCoverage=49%, HitCoverage=3%, E-value=2e-08, Identity=77%"; Hit description =Cinful1 polyprotein
MEEWIYVKNDLKKREDIKEIIQRPIWSRFGLRRPKSAEELIVVPKVPTCGGQISPGSTRRIKDLTKGPKAP

SEQ ID NO: 47516 - protein, 62 aa, Zea mays
  Coding DNA Sequence Number=SeqID_4141
MEHRPGLERLLDTAHLELDGKLFVNTQQTPTWRANCRRKERIQVYIGGVAECYVSSGGELVP

SEQ ID NO: 47517 - protein, 76 aa, Zea mays
  Coding DNA Sequence Number=SeqID_4142
MISLIRFGIKLHAFRLETSERRFKVGKEVGGLPRLDYDVIDVGLDRSADVFAKHMVHASLASRKDRVSHPVVESTI

SEQ ID NO: 47518 - protein, 610 aa, Zea mays
  Coding DNA Sequence Number=SeqID_4143
MEGQAIAGAGVRDRTGQDQDPGNWWPDVDARGRRLLEATDRAALEEGASAFWFTGPNDIGRIQREPGTDLSWEELELLVKGITGLRTAILAWPPTLDESDVAVRQTGGRDPHHGIQILGVPAGGSQPAGAGSRVPPAAPSPLDKGKGAASSSFAPGGTRGQRRIGDAGYVAPMGRSSRTLLLMRTRPKSIKGQLAGPRGPAPRLRARRGASVLRHHRIRRRRHHHHRSRHHHLGVISPRGANNNSSSSNSSGRPASRAAGRSRAPSKCSPILVFASLVIMPTGLNPSLFARTSSPSAPKGAPTPSGTMLAGGSGSQQQASAGSGAGGPPPTGATTPTATSASTTATLSSTPSAAVEEALQETDAVIRQEWEALESKHQHLSDSHTQLEERTKAASQWFAFEQSELARDHKDYKKDLLKEKDLAFREEMFERREKLLANHELEAKEKERALEERVRQFEAARAAQAAPGPHAVEAMKKTLEDLQAEQRAGVLRIAAWADKTSTALVPLGVSPIPVSEPPTSISDALPVLDSTADHLRRLDQILGARLEAEGGRLCRAVIEYILTCFQSHDPAISLEPVIAGPVADIEDVTREGVQDIMVVVGRALPAGSHR

SEQ ID NO: 47519 - protein, 444 aa, Zea mays
  Coding DNA Sequence Number=SeqID_4144
MAVALWRARSVGGGGREVCRCANEGGREGGLGSGAQVAEGEVVASFTRDVGAEAAARAARGGGYAGMRELSARAHEQRERGSERGCGEGGCTDGRARQGRERRGEKARAGWAGWAERLRGGQGSQMEVRCQTSFCQNEDGFPKLLKACIVRLGIRSQLEYDGREFIEHGTEKCVVTVYIGSSPHHVEWSVTAAGHRFKDTCQVVARKALRALCQIYEEEVADTPLRFFPPFQRDRPVWMARMRALEGQQLLEDDPSVMYLTAYLLTLDVQYDFLARHHRQMIARAEDAEKCNRQLHVDLTTAQARVAALESREAIVVEALKQAKDEHVQKLMEAYLVTHNQQGAIVLEGIPVFPQAMNKQEHPESSQDPPPELFEPLTMKKIPAPSLEVKEEAASTSPAPPPFEELQEPFQLEEEFDPVLPSQSPPEEVINISSLLTHPGDASD

SEQ ID NO: 47520 - protein, 254 aa, Zea mays
  Coding DNA Sequence Number=SeqID_4145
  Homolog annotation: Hit_ID=A2XFR6; Match level="QueryCoverage=58%, HitCoverage=42%, E-value=1e-29, Identity=44%"; Hit description =Putative uncharacterized protein
MDNKSRSDDLPMMVHTIHTTRINTNFIPSPRQVPVYPVVVEEIPVDLPRIRVENGVILEDSLEEFLPTPTPLAKSLAFAAGSSASAPPAPAVQAPAPEGDDLDDPVDRGFRTLSTHESLTPLSTYAASVSDAARRTLWSLSHTYQQQLHNTEYKHLPLRIRGENQTIIVPGGANEDRLNTLAGVVAGLNTDLDSATLDLSRVHLELEDAHARIIALEAQLAGRNPPDVQVPAMALSPPRKRIRYGEPGSITRLL

SEQ ID NO: 47521 - protein, 338 aa, Zea mays
  Coding DNA Sequence Number=SeqID_4146
  Subcellular localization annotation: CTP_CleavageSite=60; ConfidenceScore=5.50e-01
MVAFQGGHPPFKSNSPHLRPQPSRTESSPTRSKVLPLRHGGWAPRIVQAGPGQKEPKLPRAMRATAQRLRAFLHFRPDQRVKGRTAMQATCNSTKGAHPFDFDASSVEAQAHTSCNRRAGYYVRETAPPLAPVPRLLDCGTSAVTRGNPAHGPTVPTEHIGHGSVSHGRRRDGRYGQKWAGSNGGGRRAEAAVKSSASSRPLLGYRLRRRARDDHEYVRYITKAQATLPRIPPKGGIEPSDSVKRGPGPTNHPQVMELPLDAQSSGRRLDVDERVEQCRAVAGVLHVLARSVQVLQMQHLQGIHKYREEAPRTELLGSRRRLGEGERWAAAVSSLVAN

SEQ ID NO: 47522 - protein, 21 aa, Zea mays
  Coding DNA Sequence Number=SeqID_4147
MTNVDACRRWSFRFTGVCLKA

SEQ ID NO: 47523 - protein, 174 aa, Zea mays
  Coding DNA Sequence Number=SeqID_4148
MTLHIWHLFGEVFQVGDEGLGLGEGLGVLHALHVAFERVFVRGADGDDPVGARHLELQVGSSEPDHLERQGLPSEVGGRSEADGEVESSEGLDALPRDDPVEGRSACSDGGQIDAQEPEGLGVDDVEAAAPIHQDLGEPDVADDGVDDERVFPRARHVVGVVGLVEGDGLVGPV

SEQ ID NO: 47524 - protein, 261 aa, Zea mays
  Coding DNA Sequence Number=SeqID_4149
  Homolog annotation: Hit_ID=Q7XBE0; Match level="QueryCoverage=19%, HitCoverage=5%, E-value=5e-08, Identity=54%"; Hit description =Putative gypsy-type retrotransposon
  Pfam annotation: Domain name=Transposase_28; Domain location=101-254; Score=-53.1; E_value=0.011; Accession=PF04195.3; Description=Putative gypsy type transposon
  Subcellular localization annotation: CTP_CleavageSite=94; ConfidenceScore=5.19e-01
MGVFDPLGVSYRVLSYLILYQSFGWPSRPKGGLMATPSAGFPQENVRWFVSCKNISPSTYSWGNSVLNGRLLGLVTLTTFMRLGLYLLPLRKPCATLLFLLPCDFHPLVLWPPFPVLYHSEPTQGLGGKRVPSLRADLTLAFGGKGRCSSASQWRSCGACLFLLAWLWAPLHPFVRGLLFYYGLELQNLNPNTVLYIVCFIRLCEAYLGMPPLKALDAFVLPMGGPRPRWSAIRWLLQCLASRVVDGVLPFNPPSILYPWL

SEQ ID NO: 47525 - protein, 90 aa, Zea mays
  Coding DNA Sequence Number=SeqID_4150
MAHRIARPTRSGGWPKSGDEDLAVPVRQSFDPCLEKLHGSSGKLSKGSVEAEGLWKWLAMVAGARVARAGGTELAGAKDGVWPAKAYGFC

SEQ ID NO: 47526 - protein, 89 aa, Zea mays
  Coding DNA Sequence Number=SeqID_4151
MDKLSLSWTNTRKVGPKWEWRDGESIVYPPGKRLDGGVLSSRLAGTRSGLEKTVGELTYARLESLFFSRDYKFVLLWMVLSAGGLGLLI

SEQ ID NO: 47527 - protein, 338 aa, Zea mays
  Coding DNA Sequence Number=SeqID_4152
MVSPVSCKRVIRVDVRAPFVGGRLGAQRHAQKYLRQLARWLRDAWAWASKLACQKSEKRVHLARLHAACMAARPFRPLVWAKVGGRFPAAPLHRRSPKMVTSSLMVGESEPGCGLCPSLSLKDFHHQGWGGESAELGCSVPGLQTRVASEPLAAPASATAAGRGSSAGAIAGAGHGLTSNSTAFCPSLPHEFWHGRGPPGSGIHPEVSVAAVRPPGAEVVVVAAAGAGDGAPFVGLPLLRRPSPMEWGCSYLRRGNRSSVCNGTSNASVFVHYGCRGLNILVKGTPWPLFDEPRPGVAISVRTEAELARKWEPGWPELLGAFGLRRSSKTGFNSISGV

SEQ ID NO: 47528 - protein, 206 aa, Zea mays
  Coding DNA Sequence Number=SeqID_4153
MAPKAGLGCCQPHPGGWHSSRSSAGGAIFLSGQSVEGRSDCGHFGLVDWKVRVRIRCQAILALNAPAIRSAGEAIWPRLLLREACPSWASGESKVLSGPPFSRCRRLFSGCGRLGDSPSHLQHYINRRVHQMARVRLTARVTREGEETEATETALISEVMRQSGLVVTEGTVDEGTSGAKADTSTHNLYSDGSRDVFTGAFQCRQC

SEQ ID NO: 47529 - protein, 374 aa, Zea mays
  Coding DNA Sequence Number=SeqID_4154
MLVDYTTVVDGPSVPVESPTQQGAESIVEVTPVSGIASDGSSDPPLWLRLLRELRAVARTATGVVVVSVSVRVSSRSRDALWWYRGHLWLRCRGRRPPRLHLLLRQGGRVLLLLVLLLLLASTLLLLVQATMQSLQVTGLTWHRVTQWTLRQARRQKGDHRLTCSAPNTSHLQNINQHGGAREHRPQWEKSRGGTTNSGEQLRGLWGDTWRNKGMGRVLTLECELRDAWRMAGVRWSLGSTASGLRLRKERSGERRLGKPERGTTNQRVSRVADDKVELTEATDGARARQRSQNGRQSTVGGGGALWSRSQSEREGERVRLRAQHGQRRGQLEKKLRRPKSRGLPRPRRRSSGGWDLAWSSTGGTNPGVGLSRP

SEQ ID NO: 47530 - protein, 88 aa, Zea mays
  Coding DNA Sequence Number=SeqID_4155
MTGKKTTASSNGGTLKKAKVVVEDEEEAGLEDEEEATVTLSMEKDTLECDICCLPFQSEVFMASQITMHCKNGHSGCAKCCIRTDESH

SEQ ID NO: 47531 - protein, 329 aa, Zea mays
  Coding DNA Sequence Number=SeqID_4156
MLTLSVKNRPPTASAVNWRTRWPPLEKEKADLRRQLAGERREANEAIAKEQAAQAEAKLARAEGNIAKELVGHLQERLAALESRAKGAKAAMRAEAERTRTQLMDTYRELGARTGEFEVPDREPGLRCLEWVQEELQELPAVVGGFMSYASLVTCEGAVNALSREGCRHFEVFDQADEDFERDVYKVEDPVVKESAGALYDRMWGPHGREVVRERAELARAQAARGERVDDFGALNSVLPDPEPTPAEAVTGAALEPTPETAAIVTAAPASAAAGEDLPPKVAEGAPDAPAAATPSVEDPAAEAVGTTAEVAAEPTAEAPAASGPSQVA

SEQ ID NO: 47532 - protein, 41 aa, Zea mays
  Coding DNA Sequence Number=SeqID_4157
MSDGDPHTVVIPETSLTSSTTSLEQSRRREPRKNTETINSD

SEQ ID NO: 47533 - protein, 316 aa, Zea mays
  Coding DNA Sequence Number=SeqID_4158
  Pfam annotation: Domain name=zf-CCHC; Domain location=265-282; Score =18.5; E_value=0.0024; Accession=PF00098.14; Description=Zinc knuckle
MEDLSAMTPTIVIGKIAAFEMSRKMCQGEETTSSRPYAFACDERKGKKKAPTPSSSSEEEEEEESDDDEDNQPCTSSSEDEKNNLTRRKGKSKEREDASHVGRRATSGIAIQLWPNPKRRGAKDVCTKQKAQLKTLKNKLISSQNDYKEKMEILSIHNDELTTKLENIGSTPEASLVKIIEIIKKDAFTYCFDLIDDTNPCNHVLVENIIETCSDEVAKKNEQLRQEVARLGKALYDKKGKAKQIRPPQDNTIAGVNKPMEGETVICRLCHKEGHKSFQCKTMTGDKQRQSSSKSHQAKSPTPTSKRWTKRLLHHI

SEQ ID NO: 47534 - protein, 131 aa, Zea mays
  Coding DNA Sequence Number=SeqID_4159
MAELTEALALLGRDWRELATAAEALKAWRAVARRARGNFRLGTGSCSVTKVPVSECLVPRSNCAKTVSKEFGLSSNFSRTCSREFGSTLIFGSPGFEFRKTENADDPWKEVGNSEIQKLQGFMVQGLIWEF

SEQ ID NO: 47535 - protein, 163 aa, Zea mays
  Coding DNA Sequence Number=SeqID_4160
MWPRAGELVGGEEFGLSRAQLTNQMGQRALPGIKEGVKFCQVQGLGKLHGPMAELTEALARLRRDWRELATAAEALKAWRAVARRARGNFRTCSREFATTLIFGSPGFEFRKTENADDPWKEGSDTFPWGSGLTIDALEYITFSGHVAAQEPPTWWGRMLLLA

SEQ ID NO: 47536 - protein, 166 aa, Zea mays
  Coding DNA Sequence Number=SeqID_4161
  Subcellular localization annotation: CTP_CleavageSite=40; ConfidenceScore=5.72e-01
MGAFVRSAFKFSRASSASGFQVKRSTFLKRRYKGNHFSPRREMKRLRAARHPITLCTPFKSLIGPMLVMAAIFSGLASMPRSETMNLEHASGDSKGTLLGIEFHAFRPLTLECRFKIEEEVESFPRLDHDVIDVSLDRSADVLSEHVVHAPLVCCTCIPQAKCEST

SEQ ID NO: 47537 - protein, 252 aa, Zea mays
  Coding DNA Sequence Number=SeqID_4162
MSGHWMGIVSSDDEDDENDDGSGDYDSSDEDSDGSGDDDDDDDGGASQCDEMLPSKHRRLLHGSLFCSCIRLPNLAHSFTDSCSPDKHNHNGLGLDSRTGDIEADDSYWGTQEGDPSPQGSRGKPPPFLDELYTLFGLTTHDRGNLISVGGVREPLRSYGSHDTPDDGNSEMSSTEDSSHSDTTSDDSSNIFQQAGATTILAAFTSRSYTLAPMINLHTPLSHVTGRKWVELNMRDFRKCHDNFRMTPHSFR

SEQ ID NO: 47538 - protein, 148 aa, Zea mays
  Coding DNA Sequence Number=SeqID_4163
MGKNNKRKREPTPPSEEFGDSEYSEEEFSSESEGSPAPIPLRESSDDDSQGLAAEVWTYIRAVERSGLEGSDESEFSSDEEDSDGGEDEDDDDDDGGDGDGDGGKGGGSSGGKGSTRGGSSTGSTRGGSSKGSTKGGGGKGSGGKASG

SEQ ID NO: 47539 - protein, 100 aa, Zea mays
  Coding DNA Sequence Number=SeqID_4164
MKPQKWEKLPTSEYTEKGGTLAAVITDKLRTKNGSKPSKVQGYVEITVVGAKAKTPPLARGLRCSRWSDRDKTGRDTLRSIQHQTKACGDVIPQRGLVQL

SEQ ID NO: 47540 - protein, 372 aa, Zea mays
  Coding DNA Sequence Number=SeqID_4165
  Gene Ontology: Mol. function=protein binding; Cellular component =cytoskeleton; Biological process=phagocytosis
  Homolog annotation: Hit_ID=Q2R485; Match level="QueryCoverage=63%, HitCoverage=83%, E-value=1e-132, Identity=94%"; Hit description =Phagocytosis and cell motility protein ELMO1, putative, expressed
  Pfam annotation: Domain name=ELMO_CED12; Domain location=192-353; Score=315.7; E_value=8.5e-92; Accession=PF04727.4; Description =ELMOCED-12 family
MEAAAAAAAAAPAPAGERDPEHHHGCLAVRTSLPRCAIGAGGGSSLPGSSGQKSRNARFIRCRPVLFLSLLILAPFCLNSKIHMTDQATQPLIHYFEKIILNHRLNSKTSQQSLCLLDMALLGSRVSHRWGGIRFDETSCGSPRWIGRGLSCVCIKRKGTYERICMNLTPVQEERLQRLKHRMKVYFDPSRRDHQEALKALWHATYPDQELEGLISEQWKDMGWQGRDPSTDFRGAGFISLENLLFFAKTFSASFQRLLNKQCGNRATWEYPFAVAGVNITFMIMQMLDLQSTKPRTFVRAIFIQMLSEDEWAFDLLYCVAFVVMDKQWLDKNASYMDFNEVLKSTRAQLERELMLDDVIRIEDMPSYSLLC

SEQ ID NO: 47541 - protein, 478 aa, Zea mays
  Coding DNA Sequence Number=SeqID_4166
  Gene Ontology: Mol. function=diacylglycerol kinase activity; Cellular component=nucleus; Biological process=activation of protein kinase C
  Homolog annotation: Hit_ID=Q2R484; Match level="QueryCoverage=98%, HitCoverage=99%, E-value=1e-167, Identity=67%"; Hit description =Pentatricopeptide repeat-containing protein, putative
  Pfam annotation: Domain name=PPR; Domain location=189-223; Score =36.4; E_value=1e-07; Accession=PF01535.11; Description=PPR repeat
  Pfam annotation: Domain name=PPR; Domain location=293-327; Score =40.4; E_value=6.2e-09; Accession=PF01535.11; Description=PPR repeat
  Pfam annotation: Domain name=PPR; Domain location=328-362; Score=0.2; E_value=7.4; Accession=PF01535.11; Description=PPR repeat
  Pfam annotation: Domain name=PPR; Domain location=364-398; Score =13.1; E_value=0.22; Accession=PF01535.11; Description=PPR repeat
  Pfam annotation: Domain name=PPR; Domain location=430-464; Score=3.3; E_value=3.2; Accession=PF01535.11; Description=PPR repeat
  Pfam annotation: Domain name=TPR_4; Domain location=157-182; Score =5.1; E_value=9.7; Accession=PF07721.5; Description=Tetratricopeptide repeat
  Pfam annotation: Domain name=TPR_4; Domain location=188-213; Score =7.1; E_value=5.6; Accession=PF07721.5; Description=Tetratricopeptide repeat
  Pfam annotation: Domain name=TPR_4; Domain location=292-317; Score =4.1; E_value=13; Accession=PF07721.5; Description=Tetratricopeptide repeat
  Pfam annotation: Domain name=TPR_4; Domain location=363-388; Score =4.4; E_value=12; Accession=PF07721.5; Description=Tetratricopeptide repeat
  Pfam module annotation: Pfam domain module=PPR::PPR::PPR::PPR::PPR::TP R_4::TPR_4::TPR_4::TPR_4; Domain location=189-223::293-327::328 -362::364-398::430-464::157-182::188-213::292-317::363-388
  Subcellular localization annotation: CTP_CleavageSite=38; ConfidenceScore=5.06e-01
MPSAPLVAAAIGTRVSLRPNLSLLADRCATPCALARVHAAMLVSGRLAEDAFAASRLLDAYVALSPDPAAAALALLSSLPCAPNSFMFNTTLRVLASSPDPATAFPFFSRIHGTGALVPGRHTFPFLLKAAARLPLSLPVTEQLHALAVRHGVHLDAYVANGLVRAYSVAGLLRPARRVFDEVPERNAAVYTTMVSAYAQNGRHEDAMAAFVQMVRVGFEPCGAALASVLSACARSPSGGLEMGRHVHDLMVARGVAVGPILGTALVDMYVKNGAIEEALAVFDGLPERRVPAAWNPLISGLANLGHGERALDFFRRMQREGVPPNATTLVGALSACSHPGLLDEARRLFRSMEKDFGIVPGIQHYGCMVDLLGRAGLLSEAEDMIREMSCKADTVIWGALLTACKNHGVIEIAERAAVEMLKLNPSNHGVYVVLSNLYAEAGRWQDVDKLRKVMKGARLSKIPGASAVNGDGSLEQP

SEQ ID NO: 47542 - protein, 158 aa, Zea mays
  Coding DNA Sequence Number=SeqID_4167
MALIASRIRELEANAFWLGVHHALVTTGSHLDDSIKRDRECLCHANGWGDMGREDKVSFIFLIVGRSVLTACWGDKALEGKDNPCSVPCPCRVRLRPPSASTTMFGFLGGEGQVGDAWTISSSLSMMKSRLLKRSITLRVRTAWGSPQDHVIALRLLG

SEQ ID NO: 47543 - protein, 312 aa, Zea mays
  Coding DNA Sequence Number=SeqID_4168
  Homolog annotation: Hit_ID=Q6J9V9; Match level="QueryCoverage=27%, HitCoverage=31%, E-value=2e-07, Identity=39%"; Hit description =Putative uncharacterized protein
  Subcellular localization annotation: CTP_CleavageSite=28; ConfidenceScore=5.07e-01
MQSACNRAKWARPFDSNAPSMEAQAHTSCNRRAGCYVRATAPPLAPLPRLLDCGANTATRGNPGPGKGDTPKRILLREGNRPRASLLIRGSKAGPSEGFNGRLRVLGFCAHYWSEAGPRRVHSRLRHRVRDDPGYVRYITKARATLPRGLGAALANPAPADPLTASTYQPENLGPDRTPGLRPACMREQLDQPNAACAAPTAEPLDRVRLTAAKSGLRRHRKLRFARPQGSDLGSAPEDGELRSARPQGSDSGSAPEDGELRSARPQGSDSGSAPEDDELRLARPQGSDSGSAPKDDELRFARPQGSDSTLA

SEQ ID NO: 47544 - protein, 117 aa, Zea mays
  Coding DNA Sequence Number=SeqID_4169
MATFSYEGPGPSFYRCKERVQSEPKVGRGGDPPSEVEVEAEPWGRARRRSSSEVEVEAEPWGRARRSFLWRLRLDLAVVSLTPGGWHNSRSGAGGAVFLSGQSVEGRSDCGHFGPAD

SEQ ID NO: 47545 - protein, 155 aa, Zea mays
  Coding DNA Sequence Number=SeqID_4170
  Gene Ontology: Mol. function=binding; Cellular component=cellular _component; Biological process=biological_process
  Homolog annotation: Hit_ID=Q655H8; Match level="QueryCoverage=69%, HitCoverage=8%, E-value=6e-34, Identity=60%"; Hit description=LvsC -like
  Pfam annotation: Domain name=Beach; Domain location=1-152; Score= -83.4; E_value=7.5e-13; Accession=PF02138.9; Description=BeigeBEACH domain
MARSVYHHFSPRRRSYLVAAMHMASETISEGGKFDHADRLFQSIESAYINSLSNTSDVKELIPEFFYMPEFLENSNSYHLGVKQDGEPIGDVALPPWAKDDNSSDEFDKDSIESDDRSLEELSWETQNFLWYLIYSGIWTYMFCTHLYYLLRLQG

SEQ ID NO: 47546 - protein, 129 aa, Zea mays
  Coding DNA Sequence Number=SeqID_4171
  Gene Ontology: Mol. function=electron carrier activity; Biological process=protein amino acid phosphorylation
  Homolog annotation: Hit_ID=A3A0N4; Match level="QueryCoverage=53%, HitCoverage=21%, E-value=1e-20, Identity=59%"; Hit description =Putative uncharacterized protein
  Pfam annotation: Domain name=ABC1; Domain location=64-128; Score= -20.9; E_value=0.0018; Accession=PF03109.7; Description=ABC1 family
MDYNPTVWCRRFPIAFPTFYERLISESLILCLVMRKIPDELVEHYLGHRSGFHCPDLHLNVVEKQLGKNFDDMFEFFDVEPVGSASIAQVHRARLKLSKTDVTVKKHDLNFDLFSATKEMEKQVSPPLP

SEQ ID NO: 47547 - protein, 107 aa, Zea mays
  Coding DNA Sequence Number=SeqID_4172
MRKKLRRKIFLMLRCVRKEEKVFFAFGSKEKFRPQQSRLNADKGDRIYYKLRHPVYAKQQDKKGANFKGEASPSKSSSCTPRSYQGAEVGVPTNNFVKGINFAFNIF

SEQ ID NO: 47548 - protein, 85 aa, Zea mays
  Coding DNA Sequence Number=SeqID_4173
MAHEIMKKSEKDIHDSREAAKKAKKAAELERQIAELPPPLEPFDPLADPETKKAIEIINMAEAIVDEVVTKLLNEVAEKVLKEEE

SEQ ID NO: 47549 - protein, 98 aa, Zea mays
  Coding DNA Sequence Number=SeqID_4174
MSCCPLCPLSPWTERFRAPLVKLIEGKHLLELELGLSRKNEEEIEVEEARTTPPPEEPQARNCFYFDICGAEPDSPITQGKPQCICHLLAILKTFSLA

SEQ ID NO: 47550 - protein, 95 aa, Zea mays
  Coding DNA Sequence Number=SeqID_4175
MAPPVDVAGPRPRLGDVEAPPKSRSSLSSVAEVESEPLGWARRRPSAEARAESEPWGRAKRSSSSSGGAEFAVFRGLARVRALGRAERSSPSSGA

SEQ ID NO: 47551 - protein, 149 aa, Zea mays
  Coding DNA Sequence Number=SeqID_4176
MEQGGRCLGARLGERRAPAPAARHTGRKKAGVEHLAGLLRRGGASGGRRWEKRQPVGGARLRDFLDAMAGSLTARASPAPWIQGTAARWRGRAGRCSVREEEGAGAGATAPWLAERRSRPGRHGRKGAELPARWLCAWEKKTGRRESGG

SEQ ID NO: 47552 - protein, 361 aa, Zea mays
  Coding DNA Sequence Number=SeqID_4177
  Subcellular localization annotation: CTP_CleavageSite=26; ConfidenceScore=5.03e-01
MSSRSLMHRVFPPSETPDGGCPQSFRLAVGGTQLRGSWYLSAIIRLQGFSSCSPAAPLRRWSPKTVTTSPWMGRGKPGCDLGPALSFKDDATFHPLPRFRGEDGNEDLPMRFGAARSLALMADSPVGCLNRFTKRELPRAKVTSEHGQRQSWLEKEDLVGRSLAGSSVSGTDAGIDLPRPRARLMSSEDSWPRPRGDQPSRLLGQDSRRRPWRRWPGLGDDVVLRSGDPQTASPSEARSDLAEGGADAEDFFVDNRIVCASESCFSQKVMSEGSVTNVVEKARRIASAEELSNVKTCSVRGITYPNMSYLSQKVMSEPMHQVAHLEVSGPDPSGVVASQGLLAFVLGEPYSKSVGKMASAP

SEQ ID NO: 47553 - protein, 20 aa, Zea mays
  Coding DNA Sequence Number=SeqID_4178
MAVGVSEALYARAVLLRSIG

SEQ ID NO: 47554 - protein, 290 aa, Zea mays
  Coding DNA Sequence Number=SeqID_4179
MGRRETEHEGGKLEGDRRKGETRGLHVCPAPRSRSSPSPGSGEVEFVVFRGRGRVQALGSGEAEFVIFRGRGRVRALGRARRSSSSSGVEAESEPWVGARRSSSSSGAEAESEPWVGAQAESEPGVGARAEFHCPRAETGARALGVGARAELSKGAPKARTWAAVSLTLSSGTTVGVTQSGAVLLSGPTILALNASAIRSVGVAIWPRLLLGEDWASGEPKLCADGGYQLRLGVLGSSPKFSGWYVDVVNGLAGAGFARAAPEPPHRGAEHGVSSELLTGNPSGRPFPIR

SEQ ID NO: 47555 - protein, 245 aa, Zea mays
  Coding DNA Sequence Number=SeqID_4180
MTASKKVCHVIRFRTLFLFLFLSLTTGTEKGDTPKGILLREGSGPRAPLLIRGSKASPSEGFNSRLRALGLRTHYWSEVRRPAPRKGSTAASGHSGSAPTTDQGFIGWPPKGSTAASDAERGMTLGTLGHFRDQRERFCNGILPEGGIEPSNPVKRGPGPANHPQSEADSSPSPGFRGALGKLRPRPDPQGSGPRLGPGTMKLRPRPDPRLGFSLGSGRRRNSASPDPRARTQPRLRKTTKHRLA

SEQ ID NO: 47556 - protein, 57 aa, Zea mays; identical to SEQ ID NO: 44635
  Coding DNA Sequence Number=SeqID_4181

SEQ ID NO: 47557 - protein, 194 aa, Zea mays
  Coding DNA Sequence Number=SeqID_4182
  Subcellular localization annotation: CTP_CleavageSite=22; ConfidenceScore=5.42e-01
MSSSSLMRRVFPSSKPPDGGPVASPRWRSPKMVTSSLMVGESEPGCGLCPSLSLKDFHHQGWGGESAELGCSVPGLQARVASEPLAAPASATVAGRGSSAGAIAGAGHGLTSNSTAFCPSLPHEFWHGRGPPGSGIQPEVSVAAVRPPGAEVVVVTAAGAGDGAPFVGLPSLRRPSPSEWGCSYLQEGEPEFRL

SEQ ID NO: 47558 - protein, 1367 aa, Zea mays
  Coding DNA Sequence Number=SeqID_4183
  Gene Ontology: Mol. function=helicase activity; Cellular component =nucleus; Biological process=viral genome replication
  Homolog annotation: Hit_ID=Q1EPC6; Match level="QueryCoverage=95%, HitCoverage=87%, E-value=0.0, Identity=64%"; Hit description=DNA helicase homolog, putative
  Pfam annotation: Domain name=DUF889; Domain location=1034-1270; Score= 442.2; E_value=6.9e-130; Accession=PF05970.5; Description=Eukaryotic protein of unknown function (DUF889)
MTEGVDVGKQHLTSSTITTNEDADETVLFKEDDDDEEGYLFAGQDGESGEDIEIDETQDAFTVNPDVPDLYDKVYSNIPEETHLLSTVADCDYCKAKKFQYEPPGFCCRNGQINLAAFETPLQLRRLWESADADARHFRDNIRFFNGHFSFTSLYCCLDSMTTNMDCGIYTFRAHGMMYHNVRSFGREVGAEHKHLELYFYDDDPSLEHRYRKCHQQQFEKDKSVIKQLVEILKGNPYSEHLRSMGHVDNIEDYHIALNLDQTLNQKLYNSPITSEVAVIWIEGSECRERPSHLCVSVRDYYCYRFQIRPSIFNPILHGKRLFQQFAVDTYIKIESSRLDFICKNQDRLRADLYKGLVDSLHEGENKADKIGKRTVLSTSFIGGPRDMRRQYMDVMALVRKFGKPDIFLIMTCNPNWDEITRELLPMQSPQDRPDLVKRGLPHVHFLLIMQRKYKLTCPDQYDHLISAEIPDKKKYPELYKMVIKHMMHGPCGLLNPKCPCTKGRASCKNHYPRAFSNATSQGKDSYPIYRRRDDGRKKTVRGCELDNRWVVPYNPYLLWLFNCHINVEACGSIKAVKYLFKYIYKGHDRVSVAVTDANKADGDVDEIKQYRDARWVTPPEALWRIFSFDLSQNSPPVMQLQLHLENMHMVSFHERAKVNHVVQRLGADRSMLTTYFEANRLHEEARGILYRDFSEWYTLQQGKVWQRRKRNTGGQVGRIVSAHPAEGERFYLRLLLNHVTGATSYADLRTVDGDTLPTFREAAQRRGLLEADDTIDECLNEAAIYQMPSALRRLFATILVYCEPNDVAELWQRHLDSMSEDYHRSTQSKIHVQQMVLIDIRNILQSMGKDIKTFPLPAIIDRYDDSHGTDREIYEEESIEPTTEDVALKETLNEEQRSAYDKILSVVDTNNSGVFFVDGPGGTGKTYLYKALLAALRSHDKIAVATATSGVAASILPRGRTAHSRFKIPLTIDDGVVCSFTKQSGTAKLLQKASLIIWDEASMTKRQAIEALDNSMRDIMGRSRLPFGGKTVVFGVDFRQVLPVVRKGSRAQIVAASLRSSYLWESMCHLKLFQNMRAQSDPWFVEYLLRVGGGTEEANNDGDVRLPDEVCVPYTGNDRDLDRLIDDIYPNLNENMSNTSYITSRAILSTRNDWVDMINMRMIDRFQGEQMMYHSFDTAVDDPNNYYPSEFLNTLTPNGLPPHVLKLKVGCPIMLLRNIDPANGLCNGTRLVVRGFQKNSIDAEIVLGQHAGMRIFLPRIPLCPSDDEMFPFQFKRKQFPIRLSFAMTVNKAQGQTIPNVGVYLPEPVFSHGQLYVALSRATARSKVKILAIPVHDEKKKKGVERNSAINGATYTNNIVYKEVLTP

SEQ ID NO: 47559 - protein, 174 aa, Zea mays
  Coding DNA Sequence Number=SeqID_4184
  Homolog annotation: Hit_ID=A2YPC6; Match level="QueryCoverage=62%, HitCoverage=5%, E-value=3e-37, Identity=74%"; Hit description =Putative uncharacterized protein
  Subcellular localization annotation: CTP_CleavageSite=77; ConfidenceScore=5.38e-01
MVKSLPSVGVISSWPSLWSSSLWISTDQAWSLPRAKTMPLLSQTSDCVHCLSTFLMVTVGNHFLKLQTRQTPNSISVAGSDNQRSQWTKDVVEYLQHMLDEFCSKEGAFVHPSFREQSSPGPTAGTNQIKMKTEASPAVGDIEEHLVHFKWWYMVRLIQWDLTEELLVPSVLIE

SEQ ID NO: 47560 - protein, 65 aa, Zea mays
  Coding DNA Sequence Number=SeqID_4185
MAKRSHGIVGGAGVEQESANAKGHRGLEGVLRWCPNHRSCHDEVKYKLWPHLQAHILVASQKFKS

SEQ ID NO: 47561 - protein, 62 aa, Zea mays
  Coding DNA Sequence Number=SeqID_4186
MTTLLDSNTNLRPCRHSSDTDMRFRLIEGTYSTSFSMSVFPEVNFRTFGDEADPPTVAPSQC

SEQ ID NO: 47562 - protein, 104 aa, Zea mays
  Coding DNA Sequence Number=SeqID_4187
MESHDLQTERESRLVGGNENDGFGIDYGNGKWYSFHLERVVRIATTAQEKMKPWKETSRNSKITTSSRRGLAATPSRLPVKAECIYVSFPHFDYCKDYVDVSDI

SEQ ID NO: 47563 - protein, 157 aa, Zea mays
  Coding DNA Sequence Number=SeqID_4188
KQQKSATSSPKNNEGINPEYGILSKSYPTKEKTLKGMLVIWESRVSRRVIKIKEVTDNLQKRPPVSVSSQGKVPDHGSARRGSGEPLYRPIGAVTGANLRLRPNPSSYERFPQLNCTIGGLGSSGHGGRKQSGNKVVFPAMGAGLVQLKGSGSITEA

SEQ ID NO: 47564 - protein, 188 aa, Zea mays
  Coding DNA Sequence Number=SeqID_4189
MGSSSLRAERESRLVGKVHSPGGGNETDGFGYGYGAASPLQPNRILAEYVDVYSPLLYTPNPPHPQVVSIATTAQEKMKPWKETSRSSKTTTSSRRGLAATPSRLPVKAAFIYFSFPHFDLLWLVLDTLPESPSSPSYPPALLSVRFAVPWPDSPATWRDCTTVCMRSRNVDDRSRSSRALLSRSSRR

SEQ ID NO: 47565 - protein, 65 aa, Zea mays
  Coding DNA Sequence Number=SeqID_4190
MESHDLRAERESRLVGGNENDGFGIDPVMVVSIATTAQEKMKPWKETSRSSKITTSSRRGLAATP

SEQ ID NO: 47566 - protein, 126 aa, Zea mays
  Coding DNA Sequence Number=SeqID_4191
MAPKRASSKAAPSVDEAAKAALLAEKKGKALVDTTHQEACEDDALGKRQRNEQPTPEGSLRTCSSGGQPQPPPGFAPPEGADATEDGEVIGVSAEEQLQLRALRIKNRNLQKQKEILEAKRQRVSV

SEQ ID NO: 47567 - protein, 78 aa, Zea mays
  Coding DNA Sequence Number=SeqID_4192
  Homolog annotation: Hit_ID=Q8SA86; Match level="QueryCoverage=60%, HitCoverage=5%, E-value=1e-07, Identity=55%"; Hit description =Putative retrotransposon protein
MTTYRPLELLHMDLFGPIAYISIGRTEDTPAAEATQADVEEVGSEEEFSYGVPTKPSHLDFGKSTITEADLPKMMKLG

SEQ ID NO: 47568 - protein, 179 aa, Zea mays
  Coding DNA Sequence Number=SeqID_4193
MGSSSLRAERESRLVGGNETDGFGYGYGAGKWYSFRLERDYHTLLVEVIRERNTALSEVAQLRATQVNLMQQLNNVEAWNTNLHEEEGDQEAPLPPPPPYTPEQFFAQLLGAQRNMENLQQKMEAKLHNIANNTRHGQPQEAHGVNQYSSFKDFMDTRSPIFKEAAKPLEAHEWINTME

SEQ ID NO: 47569 - protein, 49 aa, Zea mays
  Coding DNA Sequence Number=SeqID_4194
MEGEIRYTSFIAHALWGQRSPSAESWSPKSMVLVRRVWREAIGVRYSKF

SEQ ID NO: 47570 - protein, 55 aa, Zea mays
  Coding DNA Sequence Number=SeqID_4195
MALSWGAARAAEHRRLTPDTIAARGFEDVKNHPGNWNLKSQASCALDHFFYPLMF

SEQ ID NO: 47571 - protein, 117 aa, Zea mays
  Coding DNA Sequence Number=SeqID_4196
MAPPWCQKFIYNYTKSTVRNTVDYSGQEKLFGKTGQARTVRALAADRPRHRNIPRTEPMQKHKFPLQTVRRKSKDRPSPRADRPASGADRPIAVDLQGRTVRTRRADRPRSAEWPNG

SEQ ID NO: 47572 - protein, 850 aa, Zea mays
  Coding DNA Sequence Number=SeqID_4197
MEVVELVPCARNKWGNWHEFWFYVAEGTVEDHPRLPVAEMCSHYYSAYPPFEVAEEDADEGALRCAAGLSSGRDLVEEFVAYGVWPLAHGWALGEVCPRQMPSRGGMVVQSPAFALDLRSRDPAAFVREAEDGAVQIVGRYVPKIEGQRSWDIRGSNDRLNRVFELNRLPYGGYPGRDDVDRRGKKPAIETGHDLVPAAAPSSKKRKLGIAMGGLGVSDGFSRELMRTCAALGGRMSSPELRESSARMLRVTEGWWPKNVPIPRAAGEDFFTSRMVRDWRVFPYGRNIAAVVSAVMDKDRQGAAQKRQAVVRHPVGGLKIVFPYGRNIAAVVSAVMDKDRQGAAQKRQAVVRLHEVRPKGSRGTVKAAAPGGSQPTLVAKLAAPGSSRVPEAAKATAAGGSGEGQLVVVPPAVATAAATVVPRAKGSALSAGGEIPTLTAVRDEAGAVSRRLKEALSQAADFADRAASGGLTAVVSAEVERVRAQHADAVQEKSAADSKCRKLADKVAALEGERTDLRRQLAEEWKEANEALVKAQQRAEELEERLNALQTRVERAEASTRSEVERTRKQLMDSYHELGARTADFEELLALPAIVEGFMSYASLVTCEGAMNALSREGCRHYEVFDQADEDFELDIYKVEDPIVKESAGALFDRMWGPHGREVVRERSETARGQAARNEKVEDFGALNSAQPDSESNPVAAVFEIAPAPPPETVEGVPDAPAATAADGGSSPTAAPRAEDPVKMAAEPAAEDPATAGSSQVQDFGPAHATATANFLAASTVDDGNKSDESASKFSDFAAEASPRAADAEVVPGPSAGREGELRSLFAGEELRIMLFNYREMGIILKVEPM

SEQ ID NO: 47573 - protein, 52 aa, Zea mays
  Coding DNA Sequence Number=SeqID_4198
MARVACTLRGKRLDGGVSVLSVKKQQTFVASIPRWYRKKKIKTEVTGERVLR

SEQ ID NO: 47574 - protein, 298 aa, Zea mays
  Coding DNA Sequence Number=SeqID_4199
  Gene Ontology: Mol. function=peptidyl-prolyl cis-trans isomerase activity; Biological process=protein folding
  Homolog annotation: Hit_ID=A3BH57; Match level="QueryCoverage=54%, HitCoverage=62%, E-value=1e-19, Identity=54%"; Hit description =Peptidyl-prolyl cis-trans isomerase
MIDPTERRWNPGLLPLHPQLHCSTRATEALCPPRSPPVAASAAQRSILLTPPATASGGDPFQLALRPGNHFGKVVSGIALLKKLEAVGSETGNPSYQVKIVDCGEVSNTNSQDPLKGDKVSSKTDNSSSDSEKGGHRTKRSLPKVNVDGNIGGDNAEASMSRTGEGRHLPSNEPLSTNGKDLGVGSADNGQPQQIRKGRGFTQKYGYERNGPYSRRSPVRRYHGSPRANSPSSTTQASTVQSVARRGYVQEEQKVIPSSLVVSGASIPSDRQLKKRIDLFYGRSVEDGFGEGNVLLAS

SEQ ID NO: 47575 - protein, 442 aa, Zea mays
  Coding DNA Sequence Number=SeqID_4200
  Subcellular localization annotation: CTP_CleavageSite=58; ConfidenceScore=5.61e-01
MEGMAAQGAGRAARAKPFPALRPDRTRDSKNAKRNSRSSNGSRTRNGRPANHSPRRINSAAGQAAPLGPGKGDTPKRILLCEGTGLRAPLLIRGSKAGPPKGSTVASDRVGPTPTTGVRRLAPEGFTVASDAERGMTRGSGAALANPAPAKPLTASTYQPESLGPDRAPELRPVRMREQPDQPKHYARARTRAKTRKTASTVPPDPGLGLGLRPGRRRNPLRPTQGSDSGSAPEDDELRLARPQGSDSALASAERSLPRPTQGLGLGLGHGRQTRPRLRRSPHVARPRAQARHVNGKRHHHPTPSRLGSQRTRPVSHQASSARWAMMAPHKLCDDGGSQLSYGSRGTSARTRPLRQLSLRQAPLLLRQPRHHASRVPRSLRLPHWHSNQESSVLVISRAFDDYYIEDYDVILVPKVTQRWIDNSDQFVIVATVRIAFVPAYL

SEQ ID NO: 47576 - protein, 234 aa, Zea mays
  Coding DNA Sequence Number=SeqID_4201
  Gene Ontology: Mol. function=protein serine/threonine kinase activity; Cellular component=extracellular region; Biological process=response to biotic stimulus
  Homolog annotation: Hit_ID=P31110; Match level="QueryCoverage=62%, HitCoverage=81%, E-value=1e-66, Identity=80%"; Hit description =Thaumatin-like protein precursor
  Pfam annotation: Domain name=Thaumatin; Domain location=32-177; Score= 260.2; E_value=4.4e-75; Accession=PF00314.8; Description=Thaumatin family
  Subcellular localization annotation: CTP_CleavageSite=19; ConfidenceScore=5.35e-01
MASGAAASSALLLLVAALVATSARAATFTITNNCGSTVWPAATPVGGGTQLDPGQTWTVDVPAGTQSGRVWGRTGCSFNGGSGSCQTGDCGGALSCTLSGQPPMTLAEFTIGGGGSQDFYDISVIDGYNLAMLFSCSTGVTLNCGGPSCPDAYLFPSDNTKTHACSGNSNYQVTLDKEIIGLHSAKGPPAGPFVSFFAKCARRHSAKLASLLSGKVTALDKEALQVPRCSFYAE

SEQ ID NO: 47577 - protein, 227 aa, Zea mays
  Coding DNA Sequence Number=SeqID_4202
  Gene Ontology: Mol. function=protein binding; Cellular component =endoplasmic reticulum membrane; Biological process=response to stress
  Homolog annotation: Hit_ID=Q06397; Match level="QueryCoverage=81%, HitCoverage=82%, E-value=4e-74, Identity=69%"; Hit description =Derlin-1
  Pfam annotation: Domain name=DER1; Domain location=31-207; Score =143.8; E_value=4.8e-40; Accession=PF04511.6; Description=Der1-like family
MNKIYSKLVTKVIKELAEAPAFTCNRYYKSLPPISKAYGTLCFFTTVLVRLHILNPLFLYLYYPRVFKKFEVGVFEISLHRARYGVMLEKGAFDKRTADFLWMMIFGAISLLVLSVIPQLNTYVLGLPMVSMLVYVWSRENPNAQINIYGILQLKAFYLPWVMLLLDVIFGSPLMPGLLGIMVGHLYYYFAVLHPLATGKNYLKTPKWVYPFTWSWPKHYLSVCIYN

SEQ ID NO: 47578 - protein, 32 aa, Zea mays
  Coding DNA Sequence Number=SeqID_4203
MDMVSYSRPMAPPPSTVVFHDQDFRFLFLFAS

SEQ ID NO: 47579 - protein, 99 aa, Zea mays
  Coding DNA Sequence Number=SeqID_4204
  Subcellular localization annotation: CTP_CleavageSite=35; ConfidenceScore=5.22e-01
MALPISPSSCCCWRSATSWGLALFRRCSVSRMFISLAVVGSESGCGLPPTLSLKDDHQPRGGGKRAGLRPPLSSASRMFISLAGVESELSCGSAFRMSW

SEQ ID NO: 47580 - protein, 301 aa, Zea mays
  Coding DNA Sequence Number=SeqID_4205
  Gene Ontology: Mol. function=kinase activity; Cellular component =ornithine carbamoyltransferase complex; Biological process=amino acid metabolic process
  Homolog annotation: Hit_ID=Q6QP54; Match level="QueryCoverage=29%, HitCoverage=30%, E-value=8e-20, Identity=60%"; Hit description =Putative kinase
MEPGGGTAVGAVESLLTFACFRKGAESRRRHRVCGAPSSPIWRSEPDGTPVLSPWPKSARGRVMMVPPVDVAGLRPRLGDVEAPPKPRSSLSSVAEVESEPPGRARRRPSAEPESEPWVGRSGVRRLPGPSPSPSPRSGGAEFAVFRGLARVRALGRAERSFLWCLRPGLTACQPHSVKWHRSRSGAGGAVSQSGRSVERRSDSGHFGSVGWGARVRIKVSGHLCIKRSCDLVGRCGDLVRVASWRRQGLGRAGNTFAAGGGPRPRRRSSGLYADGGYQLRIRSLEGTPNYGPRHLVITKV

SEQ ID NO: 47581 - protein, 198 aa, Zea mays
  Coding DNA Sequence Number=SeqID_4206
  Gene Ontology: Mol. function=chromatin binding; Cellular component =chromatin; Biological process=chromatin assembly or disassembly
  Homolog annotation: Hit_ID=Q7G6W6; Match level="QueryCoverage=79%, HitCoverage=48%, E-value=3e-10, Identity=31%"; Hit description =Putative uncharacterized protein OJ1136E01.1
MVLGLAFLRETLGDTGVSQEFLSTQPPLFTKAEDSLDADVWLRVVESKFPLLTGDCPDEAKARFAAQQLCNPARTTSVLCSPLIGKCLGRNSRLLSEGTTSQLAFLIIFFTGTGLGRQNPVGLYHLCQYAGYHADSDEKKRDRFRRGLNTKLRERLNTVWADSFNELVNLAISQEDRIVAHRAEKKRKAPMAAPSAQA

SEQ ID NO: 47582 - protein, 144 aa, Zea mays
  Coding DNA Sequence Number=SeqID_4207
  Gene Ontology: Mol. function=RNA-directed DNA polymerase activity; Biological process=RNA-dependent DNA replication
  Homolog annotation: Hit_ID=Q2R100; Match level="QueryCoverage=78%, HitCoverage=10%, E-value=1e-16, Identity=42%"; Hit description =Retrotransposon protein, putative, unclassified, expressed
  Pfam annotation: Domain name=Transposase_28; Domain location=1-121; Score=-22.0; E_value=4.2e-05; Accession=PF04195.3; Description =Putative gypsy type transposon
MASLGHPDHFQSEEALNLEEFGLQLQHLMPHSVLQAAIFVHLYEMFLSVAPCTSLFRYFFVLVKSGKTRDHIGFYYFQTRPDPVVVYIPTFGGARWENWRSDWVIASTEDNDRLILPSNGPALDRKQWRSKLWQNHPNYSSLSS

SEQ ID NO: 47583 - protein, 269 aa, Zea mays
  Coding DNA Sequence Number=SeqID_4208
MWAQDKWKEATNACNARRMRQYGCITCKRNGQAHCLQDGLVALHQRARLIRNKCRGRAAQRPYVRLRPLAFVTGSGPRGSIGSPPQHGVEAYVVWSGHVSAPNPRLVLIKVRVLFVPESWDPVVSGLDPTQRGPRPLPGVRFVPMEVLDLTWRSNPYTQGSGTLPWGSGPTADALEHIVFSSHVAALEPPAWWGRAQTLEPAQQPRFSITKTKVYTESPSPYSATCEGSADAAGSSAAGSPSTFEASSPVGVVAGTGSLPVQGSYATNV

SEQ ID NO: 47584 - protein, 215 aa, Zea mays
  Coding DNA Sequence Number=SeqID_4209
MAMMGSTSDKMYLCVVPNFGFLNDKAETGRTNTTKANTQWEWKDGESRVYPPWQEAGRWCIYALGWREPGLVLRNLVGYPRVWAQDSQRIAELAADVRRLQDELAERDLAVDWAVNSRSVAWDREAKARARVTELSAALDNLQVYCNTLHEEVHVLYARLHPDVPSDAGLGAGPPGTANEGLDKELDLFQPPPSMNLADEQSPTAGNEAAKGDEV

SEQ ID NO: 47585 - protein, 54 aa, Zea mays
  Coding DNA Sequence Number=SeqID_4210
MAMMGSTSEKMYLCQNKITRNGSGEMARVACTLCGKRLDGGVSVLSVGVNLIWS

SEQ ID NO: 47586 - protein, 251 aa, Zea mays
  Coding DNA Sequence Number=SeqID_4211
  Homolog annotation: Hit_ID=Q2HPJ0; Match level="QueryCoverage=51%, HitCoverage=40%, E-value=2e-09, Identity=33%"; Hit description =Erythrocyte binding protein-like
MFMGVAPCTSLFRHFSALVKSGKAKDHLGAYYFQTRPDSAGTYIPSLGGARWENWRGDWVITSVEANDRLALPRDGPRLDRKQWRTKPSLALELQLVLDRIRSLAEELEVLVKGITGESFVPESLILLEGISALYDDAGLRSVNLAMLPTLDEHGIAVRQTGGQDPHRGIQISDAPFGGAQTAGVAPSIPAGASHSPAVAPRPLAKGKGAASSSSAPGGAGMSEVERRRRLRRADGAFFSDPPVGAEEAGS

SEQ ID NO: 47587 - protein, 112 aa, Zea mays
  Coding DNA Sequence Number=SeqID_4212
METCALLFCLGTREKTEREKDLNMLDLDCRRTPTCDGHHGQMRARIGMFKHNMEKLIKSTFIWIRNYSHICSEAADECPSGQGVTLHKIVTAIGGGVSVAKAQRLWKAVVGP

SEQ ID NO: 47588 - protein, 148 aa, Zea mays
  Coding DNA Sequence Number=SeqID_4213
MAREGELPGRVYPSYGGTTLHSEYLNRFSTTSSGKGKKRKAAALAALAESVPKAAGKKMKVLTHRPCYIEPAVIPELGERTSSSTKTKETVPPVQRTEESATMPKVPLVKLAEPKADKDCRDAKNDRSFKSFNRGNSAEDTKRLRRNS

SEQ ID NO: 47589 - protein, 133 aa, Zea mays
  Coding DNA Sequence Number=SeqID_4214
MENRAPQITLSEPLKMLAMVELGVSRTGAPIIAFSSQYRLVGDTLVAVHHRGLSTTKKQKGGLDNEEEVTVEEEETTPSTENPPAGNCFYFDICGIEPDSPTTQGKPRCICHLLAVLNLYHLYDALGDRSCVL

SEQ ID NO: 47590 - protein, 376 aa, Zea mays
  Coding DNA Sequence Number=SeqID_4215
  Subcellular localization annotation: CTP_CleavageSite=41; ConfidenceScore=5.58e-01
MSSHSPHASRPSTFRAPGWGVPALLLSCRRWRNATSRKLVPFSHRSASRIFIRQPGCIPLPVVTQDGDHQFDGGEKQAGLRPLPHPQLQGSSSSLLGRRARRAGALPPARVGGPPLLLASGGGNHPPALRRRRPPAMPGKANCCCPARVQHSVLYPRFRGEDGSEDLPVRFGAADARRCGVGGQVDTAVSAEVVAPGESFSTDETVSATRKPTSGSLALMSGFRPLSGDANESLLAAASVSGPSLLLQRSLASRPEFVVPQALRCGGCSYPREWNQSSVCNGTLSAGVCSLWLSGPEHESLGSVGLAARGFSCLVKGTLGRSAMSQSRRQRCQHGQRRSWLEKKLRWPEPGRAVHWPDQRRSRVTEAMSRADVLEG

SEQ ID NO: 47591 - protein, 343 aa, Zea mays
  Coding DNA Sequence Number=SeqID_4216
  Subcellular localization annotation: CTP_CleavageSite=45; ConfidenceScore=5.24e-01
MQAACNCTKGAHPFDFDASSVEAQAHTSCDTFGRRSGRRFTSAIMAASKKGLGKGTLRKGSFSVKEAGPEPSYGSEVRRLAPRKGSIAASEHSGSAPTTCQRLAPEGFDSRLRARRARDDSGYVRYMAEARAMLPRAQSTQGTRSRLAGAQPRAKAADPGGFTSRPRAPSSNGRTFDSPDAQLGQASRRSNLGQIATPTDRISSGSTSTPDDELRLARTQGSDSASTSEDGLRLARPQGSNSTSTSDDGLRLARPQSSGSTSTSDDKLRLARPQGSDSTSTSDDGLCLARPPGLVLNLDLERRSPPRPTPGPRLDLDLGGASASPDLGLGSTTSQGGPSLSYP

SEQ ID NO: 47592 - protein, 147 aa, Zea mays
  Coding DNA Sequence Number=SeqID_4217
MNGSPVPGAPDDTRPAYMQVSAREAFRPSAKPAGGTSGESAQAWGLGGGMETVGAEPRTEASAGKQRGSGGFRPRVWPAFKGAPPSSQPAAEAGSGRWLLTVGWSCSLAGHHTEGPASPSSSRLTVAMDGDAFDLNSQAPDTYQGCG

SEQ ID NO: 47593 - protein, 24 aa, Zea mays
  Coding DNA Sequence Number=SeqID_4218
MARRRSQKNKKTIPKENKESDKCL

SEQ ID NO: 47594 - protein, 792 aa, Zea mays
  Coding DNA Sequence Number=SeqID_4219
  Gene Ontology: Mol. function=nucleic acid binding; Cellular component= prefoldin complex; Biological process=protein folding
  Homolog annotation: Hit_ID=A3BNH7; Match level="QueryCoverage=31%, HitCoverage=39%, E-value=3e-46, Identity=41%"; Hit description =Putative uncharacterized protein
  Pfam annotation: Domain name=Prefoldin_2; Domain location=85-167; Score=27.5; E_value=4.9e-05; Accession=PF01920.11; Description =Prefoldin subunit
  Pfam annotation: Domain name=RRM_1; Domain location=621-686; Score =9.0; E_value=0.022; Accession=PF00076.13; Description=RNA recognition motif. (a.k.a. RRM, RBD,
  Pfam annotation: Domain name=zf-CCCH; Domain location=510-535; Score =14.3; E_value=0.018; Accession=PF00642.15; Description=Zinc finger C- x8-C-x5-C-x3-H type (and similar)
  Pfam module annotation: Pfam domain module=Prefoldin_2::RRM_1::zf -CCCH; Domain location=85-167::621-686::510-535
  Subcellular localization annotation: CTP_CleavageSite=35; ConfidenceScore=5.38e-01
MFAFFPPPNPLLPRHRSFSRLLGRIPRPPSQPRARASIAPPLHGIAVVGVLPLLSPGPVPVVLAPARGTRRNAIHLGSRGPPPHYRPHHRRPVIIFAELELLSDGANVYKLIGPVLVKQDLAEAKANVKKRIEYISAELKRMDQALKDLEEKQKSKKESNIPDVYPFQNHSWQYHFCYNILCVEIKFVVNCFLTCSVAADIQTMLEETQLKFEEERQNLLKVLSNTSKEQCESSLNEEYNKFQETYDTFCKEKGCSHADFQRGQCRLPPLPAYESHPPLHLPRRETSRHPHALTLRESPATPQAPCSPPAAILFAFFLPPNPPLPRHRNFSRLLRRIPHPPSQPRARASIAPPLHGIAVAGVLPLLSPGPVPAVLAPARGTHRNAIHLGSRGLPPRYRPHHRCPVILFAETDALGAQRLGGKENNKKQSNIPDVYPFQNHSWQYHFCYNILCVEIKLLHICNSPFAVADQLGYDGGADAFYADKYGCWSPAGAAGAHHRSFSLSKAEAAASWRPCMYYARGYCKNGSSCRGFHGVPEDDAAEREMAVMRAKALAAAPPMQQQLMASAYPFSTSPKGGVSLSFLIQQHQQQQSETQRAAVGMLLGSEDMHMFPVCSPRMDRGDLIGSPATRQIVSNYFSIFGPVQDMRIPYQQKRMFGFVTFMYAEMVKAILSKGNPHFVCDARVLVKPYKEKGKVPGRFRKLQHAHHGGAEFAGCASPTGLLDSRDLYALLLLSGAQVFTSEVLKVVEDGLREASFEIGLDDRKVHKEMDKIYTLATIISRIPWSPRSGLLS

SEQ ID NO: 47595 - protein, 91 aa, Zea mays
  Coding DNA Sequence Number=SeqID_4220
MESSRMASAALTTDDLLKRVKGTVGKADYIVPVLMCPEWGLCIPGTYWTFPLSLSLFLHLNSTSRSSIGATGVLNRLAPLVSEEAAGRLAC

SEQ ID NO: 47596 - protein, 497 aa, Zea mays
  Coding DNA Sequence Number=SeqID_4221
  Subcellular localization annotation: CTP_CleavageSite=92; ConfidenceScore=5.55e-01
MQAACNRAKWTRFSDSQRAQPGGPCPRVTQPARRMLHASNCTATCATTAPPGLQNQYRDSRRPSSASRTRRSKRPKQENLLSRREDNAPVIRSSNGSRTRDGRPANHSPRCINSTVGQAALLAGEGPGKEDTPKRALPCEGTRLRASLLIRGSKAGPPKGFNSRLRSRGPYTHYWSEVRRPAPRRVPRPPQATRAPRPLLIRGSKAGPRRVHIRLRRRARDDQGYVRYITKARAALPSSPETPCSAPIEGLGGCSRKPGFGRTVDSVNVPARELGPRPYTRATASSHEGTTRPAEALRKALRPRRSETTPLRPRGLHPAGALARTHRNKMQPRKAGPLAKKCDKSLQASANTPFEARGLLSGTIIRGTLKTPNSQLVTPISIKLQRPDGARTRARSRKTANYRSARPRAQTRAQPQKTTNSAFARPQSSRLRPYPLPNDLRLARPRGSGSASAMEDRLDLGFGGASTSPNLGRRPATSTGSAIITLPRADSGRREQD

SEQ ID NO: 47597 - protein, 162 aa, Zea mays
  Coding DNA Sequence Number=SeqID_4222
MALALMLRTLQTTRVNTNRIPPPQLAPSYPVMEEDILVEWHHLSVRNGVILEDSSEEILATPTPSSEPHAFVAGASSLVPPVSVAQAPAPGGDDPDGSGDDGDDDEYNEEENFNHEDANNEQEQEEKFVGMWPAAEHYTSMFESGHFPNLLQDVLHVLGTYV

SEQ ID NO: 47598 - protein, 644 aa, Zea mays
  Coding DNA Sequence Number=SeqID_4223
MKIVGKYVPKTETLRSWDIRGSNVRLNRVFELNHLSYGGYPGNDYADVAVRRGKQAMSTANEGPTWDKAPGAAAKKRKLGTVAEGLRASNRFVVNLLETCVAPGETMSSPKLQESSMRMLKVTWGHWPRNVSIPRAASEDMLTSRLAHEMKIFPYERNVGAIVSAVMEKYRQDAPRKRRAYARLADPRCEAKMTRPSVKPAAPGASMPPPVAPIHERRPPSPPCTAEVTVAGTEASKELSVDDYLVGGVAMFDAHTRLAPDAVSVGLVAAATVEKGDVGAPEDPWSKFYVGGEIASATTAMDVAAFTERIASGVLTSEFSAERRRLEGRIERLRMQHTGQSGTTTPRRRRPPPALGLNGRTRCSWMRTSSSARTVPFEKSGEEVGLRFLGWLQKELESLPAIATGLMSYASLVTCEGAVNVLSHEGCRHFEAFDRVTEDFDCGIFQVEVEVLKRSARALYDRMWGPHGRDTVLEKADRTLAQMMNNEEVEDLGGLESSMTRTEGVEMGAEGHSTPQDSPSEDSTVVPTFGPAQAITADIDTGILEAANVIPFNRNVSETSETESWSSDGDDFGIPLLWIEESSEEDLDYFVALDLVASESPPQSDACEESAPLVRAIAEDHRRQKVVSKQSVGGMSRSGRHRRM

SEQ ID NO: 47599 - protein, 185 aa, Zea mays
  Coding DNA Sequence Number=SeqID_4224
MGATQLEDGGGSEKEVLTRICSLEHHGHDDARHRGGGETSATIGLVPLDVFAVKQAIESSRLLGLSSAPSSCVVAAALRGVFLTTVGLSGWVLVGYGIQLCANGAPQTWCTSQTVGRVPRDNSASALVSGRYPWKLSRNLSRSPFQDSIDSGGTDLEVGRPGCCLELRSHGTSLVEIVDSLESNI

SEQ ID NO: 47600 - protein, 170 aa, Zea mays
  Coding DNA Sequence Number=SeqID_4225
  Pfam annotation: Domain name=SlyX; Domain location=80-140; Score= -9.4; E_value=0.076; Accession=PF04102.3; Description=SlyX
MKTLTTFCGYHPLEMVMHPLGLFPAEKKDDPMWCNRALQSDAMAHLANITQTTKRTLDSREHFVVDLSSELVEKDLQVERLSQRMTTLEQQVEIRDNTIDVLENQLYDVQQELKEANDHLDMHHLEKEANEAGSEGEEAPEELGPAPGANGTTSVMPPSPASSVASTAQG

SEQ ID NO: 47601 - protein, 208 aa, Zea mays
  Coding DNA Sequence Number=SeqID_4226
MEKEPLDMVESSVRVIETHVDIIRSLVTDGVVDTSEPESVYTLKTTLFQIGDVCDMLEKCALSIKKYADSKRAKIIQDEALQYAEDDEAADDLEELPSLDLLTQADILEKYFGIEMQYMDDKKKQLKTGFLDPLMISQARYKEVARRHGEEYKDLDDAEFEKAIKKNQRKKMKVPKSKINAQWLERDMVSVGVAKVAVHHKRFLEPPV

SEQ ID NO: 47602 - protein, 54 aa, Zea mays
  Coding DNA Sequence Number=SeqID_4227
MAMMGSTSERMYLCPERPTRNGSGEMARVACTIHGKRLDGGVSVLSVGVNPVWS

SEQ ID NO: 47603 - protein, 23 aa, Zea mays
  Coding DNA Sequence Number=SeqID_4228
MGKRGSEGDAGDFDGDFIDDDDF

SEQ ID NO: 47604 - protein, 171 aa, Zea mays
  Coding DNA Sequence Number=SeqID_4229
MDPGTHMVCARFYPLEPGVTVCLQASYGQGDGFNAMGRSTIGGANQSTLRAAYASAGGQAHGTYQRQQSEYQRQQAEYQKKRDEYYASLHAQNQALLSQLAQQAGVPMPTYGMPPLDFALPMPMLAPPPPPPPPSQFPMGFQTPPASVAAPGDGSVQDDTTHSWVNNLFNT

SEQ ID NO: 47605 - protein, 179 aa, Zea mays
  Coding DNA Sequence Number=SeqID_4230
MVTRSAITEQKWVAAERTGWAVSFSLAKSLRLRKPKKEARSGAKNRRQTLPRVYKDQGETRSTFRPDPPRDSKTQSETAVPRTAHARTTTASRTTRPIALTPRRDRRRLWQGKQATLRLRHNDRVKKRGSGAALANPDLAKPLTASTYQPENLGPDRAPGLRPARMREQPDQPKHCARH

SEQ ID NO: 47606 - protein, 104 aa, Zea mays
  Coding DNA Sequence Number=SeqID_4231
  Pfam annotation: Domain name=zf-CCHC; Domain location=49-66; Score =34.7; E_value=3.4e-07; Accession=PF00098.14; Description=Zinc knuckle
MVTCLDLTYTRAVSTALAVEAKNAGHGKSKGFGGERSNQGPEKRTSSSTGCFNCGKSGHFIKDCPNLKQNKTNFQQNSGNSNQGKGNTANTSTGKNFKKTGRIY

SEQ ID NO: 47607 - protein, 130 aa, Zea mays
  Coding DNA Sequence Number=SeqID_4232
  Homolog annotation: Hit_ID=Q53J49; Match level="QueryCoverage=30%, HitCoverage=3%, E-value=2e-07, Identity=60%"; Hit description =Retrotransposon protein, putative, Ty3-gypsy sub-class
MRQRRWLELIKDYDFEIHYHPGKAKCGGRCIESQGFLSLSYIFENKSPTLAPTSGEPFFDHLRQAPTFVMPPKKASAPGAAALQPLDPNQETLSLREVLSGTIIRGTLKAPKSQLVTPISTKLQRPDGCD

SEQ ID NO: 47608 - protein, 110 aa, Zea mays
  Coding DNA Sequence Number=SeqID_4233
MAVMVMCAWLSEWKSNPAVRPRMWRCICKGIGVLILRILMCYALRRPPTVYRCSLCSPSSKLPAVKDSRCPRRRARVDFPARRTPQAPLLTSTSLCPIRPLRKYSKVYTE

SEQ ID NO: 47609 - protein, 42 aa, Zea mays
  Coding DNA Sequence Number=SeqID_4234
MAGGKELTGAKEGRLTGEGFELGIKVNTLIFDPRSEIQNSEF

SEQ ID NO: 47610 - protein, 48 aa, Zea mays
  Coding DNA Sequence Number=SeqID_4235
MVGTSAVTARRQLGTLQGMVDGVTWPTTLPPGWTVEWDAAPAGEEHED

SEQ ID NO: 47611 - protein, 110 aa, Zea mays
  Coding DNA Sequence Number=SeqID_4236
MANSGQPSRAPWHGENLNEWIGTMMTPRMTFDGEIDGDTRWWRDRHPSAWLEEGDSRGEEPECQTPWSRARAEGDLVGKTQGMERRYDKLVVAPKKLLVRSRAGAGARRP

SEQ ID NO: 47612 - protein, 163 aa, Zea mays
  Coding DNA Sequence Number=SeqID_4237
MSTVSINSPFASRPHCLGIQCSTDPGCRRAVTALAGEFVGGEEYGLSRAQLTNQMGQRASPGIKEGGRPKSGVGDLGLPVKFYRVRGLGKLHKLMAKLTERLVWFGSDWSGLATVAEALAAMAGGKELAGAKEGRLAGEEIWSPEIRSVSLLKPEANPGFCHV

SEQ ID NO: 47613 - protein, 165 aa, Zea mays
  Coding DNA Sequence Number=SeqID_4238
MGKPGPSLLMLLLGRGRVPLDYPPRWQDGRPSHASNHVLQRTCKNYAISKAEYTNTQLYLPVTALVPTIIGMGDHVSGRVRGKVCGQVHSDAPCAKLTKAGELVGGERSGLLTAASLNPRAQGASRGVKDATRARNRRKTHRGARSTHTGGWVKSGDVDPVSPAR

SEQ ID NO: 47614 - protein, 346 aa, Zea mays
  Coding DNA Sequence Number=SeqID_4239
  Gene Ontology: Mol. function=phosphoprotein phosphatase activity; Cellular component=cytoplasm; Biological process=embryonic development ending in birth or egg hatching
  Homolog annotation: Hit_ID=P22198; Match level="QueryCoverage=40%, HitCoverage=44%, E-value=1e-75, Identity=96%"; Hit description =Serine/threonine-protein phosphatase PP1
  Pfam annotation: Domain name=Metallophos; Domain location=2-173; Score=24.4; E_value=0.00044; Accession=PF00149.19; Description =Calcineurin-like phosphoesterase
MGKNQAYKAVQRARLGSSYGTPGAADAPEDSMVKYPENFFLLRGNHECASVNRIYGFYDECKRRFSVKLWKTFTDCFNCLLVSALIDEKILCMHGGLSLELNKLEQILNLNRPTDMSDTGLLCDLLWSHPSNEATGWAINDRGVSFTFGPDKVSEFLEKHDLDLICRAHQVVVFLKMGPSYGYRGRVMLAFEDNGSSKIGVRFDKQIPDGCYISTAESLRPDFSAGEEVERLAMTELIEDEALLTDWKQQLDRGVETLKAKSNIGSIRTREVGTTMVVVAAQTKAIAGVWLITLWIKSYSSSKWDENTKIQIQDSGSHQVTPPPHVDFADRCLNSSGGATNNNPMS

SEQ ID NO: 47615 - protein, 43 aa, Zea mays
  Coding DNA Sequence Number=SeqID_4240
MACTSRVWGDQRAHRENEEEVEIEEEKTTPPPPVEHQVIGVDC

SEQ ID NO: 47616 - protein, 35 aa, Zea mays
  Coding DNA Sequence Number=SeqID_4241
MGKTLSTQVLRKTYPTKEKTLKDFQVSDQVFISEK

SEQ ID NO: 47617 - protein, 26 aa, Zea mays
  Coding DNA Sequence Number=SeqID_4242
MRIHTLRDDVVLYSQRCLLLIKGSGK

SEQ ID NO: 47618 - protein, 25 aa, Zea mays
  Coding DNA Sequence Number=SeqID_4243
GVRWVTINSDEDILHNYPLAKTQLA

SEQ ID NO: 47619 - protein, 364 aa, Zea mays
  Coding DNA Sequence Number=SeqID_4244
MGGTRRLSASSLEERNSMGVGTFQPSFGFKDFHHAAWPHPATGGHPRWPRWKMRRVGGPPPRGSAAFFFPPRLGESGVLESHGDFLQPCRDRQGASGPGSPSPCLNGWFSSSAGESPPVVTPAPKLLPEPLRCLGRGWLSSWLERAAASRSSFFCYSAGLSPRSGVESLGPIGLVVWGSSSLVKETPRPPFDEPRPGPTPKSISRGLGSGWRPWKPVGRGPQGNRPSRLLGPDSRRSPWTASPSEAGSDFAEDVVDAEGATAPFSAKTRACRIRSSCSVCLLRPPRPEKHTLAVLAKLRLFSSCFEHLDSVGNRDSLYPSASYFSQKVMSEDPLSEVVKKHESNPAEKRSFFEEKFDAEGVSPF

SEQ ID NO: 47620 - protein, 47 aa, Zea mays
  Coding DNA Sequence Number=SeqID_4245
  Subcellular localization annotation: CTP_CleavageSite=35; ConfidenceScore=5.47e-01
MGVVAFGSTYAQVKKKKASRRISRSSKTSKSSRIRLATSPSQLPVVG

SEQ ID NO: 47621 - protein, 253 aa, Zea mays
  Coding DNA Sequence Number=SeqID_4246
  Subcellular localization annotation: CTP_CleavageSite=19; ConfidenceScore=5.14e-01
MWRGSGPCCCVQGLSSGSTASTRPPQGRRCPGARLGKLSAIYGEERLPAGLLLASWIGQGRSGWGEMPWGKEACASCSIPEWGAHMGKGLLLPGIGARLLWKMAGAEGGGHGEGSEEGDAGSSGAMAIRKNNGEAGEQGRAPSMGGGARAHGGGEQSCCSAKGERGARRGSLAGRCGVREEQEGGGHRGMAGRGRNGELLRKGEEDRKVGWRREKSEKANRDILKSLSIRGFEFGLDTRYLAESDKIDYRMTY

SEQ ID NO: 47622 - protein, 51 aa, Zea mays
  Coding DNA Sequence Number=SeqID_4247
MSLNPKLRSSENLRNKATVGKQELRNQAKQSTFGLGSEPQYEEVQRMRRLA

SEQ ID NO: 47623 - protein, 272 aa, Zea mays
  Coding DNA Sequence Number=SeqID_4248
MGPTGIKGKRLCKWPIHEREPLPKMKYISKSTKCIKGGARTWTDEHSHVFDAPWQRQSTPSVLSPRVQPHARGYKSDPCLDRTPPRVPDPARARVRWRLPREPRAGGSASHGHRRPAKLAILYPIRPLGLASTDLSEAPRAEDWTIPHRRRWIDVAGLQPAVVACRPSSTPYHREQARAHATNEPDRLRMRSDLFRPSSSTTRTSTWPLGPPGPHPALHRTSLTADCNLADGEYVLIPEQGAAQEVVQEPAPEPAIEDLPTLALEGKPRCYA

SEQ ID NO: 47624 - protein, 102 aa, Zea mays
  Coding DNA Sequence Number=SeqID_4249
MVRGYVMKRNDQQLELGYKFIEELRKDGSLLVLHIGRYTIFANVIDSSQVRVQRGGLSRSAACSSRRSTQDPAEVEQLREELRQHQDYLKQQAAQHEYYDYV

SEQ ID NO: 47625 - protein, 160 aa, Zea mays
  Coding DNA Sequence Number=SeqID_4250
MEILSIDNNELTTKLENIGSTLGASLIEIPEIIKKDASTFCFDLIDDSNPCNQVLVKNVVIETCSDEIAMENEQLKQEDNTTAGVNKPVEGETMIYRLCHKEGHKSYQCKAKTGDKQKLKQKPIRKISNINISKMDKKVATPYLIKKKKNGKVIAIKANK

SEQ ID NO: 47626 - protein, 185 aa, Zea mays
  Coding DNA Sequence Number=SeqID_4251
MTSHGSSDEGNAQSHTTGLHERVSLVSCERAEDTMEAIALHGLTSFYGFHPLELSTHPIGLFPAEKEDDPMWKDRVEHAKDIWAIYPSQTAHLTVEQLSNEIQELEELVGTRENTIKVLEDKLINTQQQLVEANQHLDMHHQEIQDMEANEDVDIEGGEEPASSLDTAGSGRPPSPESSVASFAH

SEQ ID NO: 47627 - protein, 89 aa, Zea mays
  Coding DNA Sequence Number=SeqID_4252
MGEIMGHDGNGVEGFKLCGGVGLGVAALGGDAVSGRRAGLGTEPERRWRRRPVAATKEAGHDSGVEAQGSGGEARRVAAMGRASWRLAA

SEQ ID NO: 47628 - protein, 333 aa, Zea mays
  Coding DNA Sequence Number=SeqID_4253
MILGLPELHKHEKLAEEGGTRRYPHEHLAQVSKDGHLKDGVGREVLELKTELLQQQHEEGQDRQRQPARKVGDEEHKLPGGEIAEGSSAGSDPPGVHRRTPSQQAAHHTECPLSLETLRMNQRGHGDYGGEKQKNANAMGRRGLRGERTQQLEKIQKRNRYSRGESPFKEDSPTRAPRRRGKSNPMLTKAAREGKPPREERTTAYGNMVDGLTEGGLAATTSANAQKQRANLKSDFGPTHRLVSSPEVGPGATVGRPRHGRLIGTHGSTQFRHVVGPRDATWPEEVMYSRTSSVGPNFHRRVPNPCTYNSDPLDGIRIPPNEVRAAHNEAPRF

SEQ ID NO: 47629 - protein, 203 aa, Zea mays
  Coding DNA Sequence Number=SeqID_4254
MDEGTPLGGFESKDDAKPSHGLHTIFSSLWGRGYLAHRLRIRLPEDKGVRRPKQLDQPTRLTRLAGRGSGHGLTTLGTVSAVSATLPRPRGSVPRPPGGGPGASATTRRPRAPQAHTSLGRVVHHRQDFEAQNIQAGQQSRRGLDINRGSSSTLGVDSTFGGIRPGLGRRHGRRISTSKEDVSTMPEPSPPGSPPGTRPEQTA

SEQ ID NO: 47630 - protein, 137 aa, Zea mays
  Coding DNA Sequence Number=SeqID_4255
MQESLAGQPSQQNPPEGLPRNPLQDRHHSKILPRAFPGIPCRTAITAKSSRGPPYTDHSPTALAPFGCGGHGYGHLTDNDIVEKSAYGASRFHGGAAEAPDEFGEEGKADPGGPRIFIPPFTFQIQIISDVPIYIWR

SEQ ID NO: 47631 - protein, 126 aa, Zea mays
  Coding DNA Sequence Number=SeqID_4256
MTVSTASIPVLQSAEVAHLYPQVVLPICHRVDQTPYTFYQESEAGYHYEAFTKVPLASENPLQFIGSSSAGIPRLTAIAAKSTQGPPYTDHSPTALAPFGVSLARIQSRRGTGKKLAVGSGFSVQD

SEQ ID NO: 47632 - protein, 114 aa, Zea mays
  Coding DNA Sequence Number=SeqID_4257
MGVGILSPPFGFKDVHHPRCGGRRVEPGPYPPAWLPIHRTGDSCVVRGFATSMASPARRAHWGPYKTSYAAAVAAATFLDGLVLTPVGRNGSEDPFVRAEAAAAHRCRGGRRRW

SEQ ID NO: 47633 - protein, 321 aa, Zea mays
  Coding DNA Sequence Number=SeqID_4258
  Gene Ontology: Mol. function=transcription factor activity; Cellular component=nucleus; Biological process=regulation of transcription, DNA-dependent
  Homolog annotation: Hit_ID=Q10R18; Match level="QueryCoverage=100%, HitCoverage=100%, E-value=1e-102, Identity=60%"; Hit description=AP2 domain containing protein
  Pfam annotation: Domain name=AP2; Domain location=26-77; Score=80.8; E_value=4.6e-21; Accession=PF00847.11; Description=AP2 domain
MESYGRKRAWKKGPTRGKGGPQNAACEYRGVRQRTWGKWVAEIREPNKRTRLWLGSFATAEEAALAYDEAARRLYGPDAFLNLPHLRVSAAAAHQRIRWLPASARGAAAAAVPAYGLLNLNAQHNVHVIHQRLQELKNNGSPAKPPPPAPRVSPAARQQQLAPADHLPVASTSPCSTVTTHAAAAALPPPMSCFHALDLDLEQAVATAAMTTVDDAEPFEGGGAFPPGADKPQLDLREFLQQIGVLKTDDDGTATAKGSLHGDAADAGCFGGNGEFDWDALAADLNDIAGAHGGANGGFQMDDLHEVDQFGTCLPIPVWDV

SEQ ID NO: 47634 - protein, 43 aa, Zea mays
  Coding DNA Sequence Number=SeqID_4259
  Homolog annotation: Hit_ID=Q9XEJ4; Match level="QueryCoverage=62%, HitCoverage=2%, E-value=2e-07, Identity=96%"; Hit description=Copia -type pol polyprotein
MTTDRPLELLHMDLFGPIAYISIGGKKISNPRDSKGILETGSK

SEQ ID NO: 47635 - protein, 379 aa, Zea mays
  Coding DNA Sequence Number=SeqID_4260
MRRKDGGFPPSGGLEGGKARRIREREDTVAFRKGPTGERGEQPCRRHATAPSGCASPTPDTPAWRPRPTRRATGAPDAACKQLHRLRHHRASSIAEPIPRLEATQRATQQRQPDAAANAAKSGPAVMTVAGAREQRSRRQPSSRPIRGQQKNPLSRREDNVPVVRSSNGSRTRNGCPANYSPRRINSAAGQAVLLAGAAGDASPSPKQPRQKRLRASLLIRGSKAGPPKGSTAASDRVGPTPTTGQRGSKAGPRRVHSRLRRRARDDQGYVRYITKARAALPSSPETPCSVPIEGNMALSPLLLAERRRRGVCKKAESVPDHPLALCGGSGAALANPAPAEPLTASTYQPENLGPDRAPGLRPVRIREPPDQPKHYARH

SEQ ID NO: 47636 - protein, 207 aa, Zea mays
  Coding DNA Sequence Number=SeqID_4261
MGGPMEQQKTDERRAVARSSGSDDDDFCSGGPDSGSTDLRADAAAKRPPPMPKLVRQGRAEGRRVGGPSLRRGGWVPHVMQADSGQKKPNRRARCIQPPSGYKRPSTFVQTSGRKGGRPCRRHATAPSGRASPTPNTPSLEAQAHASCNWRADCFVHATAPPLAPPPRLLDCGTNTATRGDPAHDSAAPAWRGGTGKGGYPEKGPSP

SEQ ID NO: 47637 - protein, 251 aa, Zea mays
  Coding DNA Sequence Number=SeqID_4262
RKEIGSQMEVRCQTSFCQNEDGFPKLLRACTIRLGIRSQPEYDGREFVEHGTEKMRALEGQQLLEDDPTVVYLTAYLLTLDAQYDFLARHHRHMIARAEDAEKRNRKLHVDLTTAQARATALESREVIAVEALRQAKDEHIQKLMEAYLVTHNQHRALRIQEPAPSNPVQPMRAEDPQILEGHPAMDKQEHPESSQDPLPELFETITMKKIPAPSREIKEEAASTPPAPPPSEELQEPVPLEEEFNPVLPS

SEQ ID NO: 47638 - protein, 92 aa, Zea mays
  Coding DNA Sequence Number=SeqID_4263
MKLLFQCPCCSCFCFMKTASSKTQHGGGSGNKEGAAAHHQRTGKLQGVVVGKAMEMDNGGDTGSSGHAPPTPSQDASTQQQQRYVSLFLSAE

SEQ ID NO: 47639 - protein, 120 aa, Zea mays
  Coding DNA Sequence Number=SeqID_4264
  Gene Ontology: Mol. function=catalytic activity
  Homolog annotation: Hit_ID=A2Y3P0; Match level="QueryCoverage=91%, HitCoverage=40%, E-value=1e-25, Identity=50%"; Hit description =Putative uncharacterized protein
MYDKLRRSRRLNAVQNGCSALSIVKQGDLMVVANVGDSRVVLGTAFDDDGYYLADEPGEHFVLQPSQESSVLGMSRAFDDYYIENCGVILAPEVTQRRTDNNDQFVILATVGVTFVPACL

SEQ ID NO: 47640 - protein, 77 aa, Zea mays
  Coding DNA Sequence Number=SeqID_4265
MDVLMIRNLGEDQQGLGKGLGVEEEEQQGWHNRKEIKSDSAATPSRVPGPELALVARSIAQCMVDNQRRSGVAIAGF

SEQ ID NO: 47641 - protein, 122 aa, Zea mays
  Coding DNA Sequence Number=SeqID_4266
MVLVSGILSVWKGYIGLITWVNAKTWLSTTSPLQPNRMLAEYVDVYSPLLYTPNPPQVVSIATTAQAKMKLWKETSRSSKITTSSRSGLAATPSRLPVKAALSTFLFRTLIYCKNHMDVSDV

SEQ ID NO: 47642 - protein, 182 aa, Zea mays
  Coding DNA Sequence Number=SeqID_4267
MWQIHASHLPRAEWSTVQWVRPVTQRRPRGARYNGPDHTWASEQDEAELRGDVTAGLRLALIEAKGVPARFVFVRPATAEKGDERRVASLPSPQHLPSEGPVRQSHLVPKTSLDGGDAALARSGSAGVFDVTVDGRRTVGLRVSRSAAPYRIAGFPKSRALPIKGGGGRCFLNFAFRAPRKP

SEQ ID NO: 47643 - protein, 384 aa, Zea mays
  Coding DNA Sequence Number=SeqID_4268
MGGLGVSDSFARELMRTCAAPGERMSSPELRESSARMLRVTGGCWPRNVPIPCAAEEDCFTSRMVHRWRVFPYGRNIGAVVWAVMDKDRQGAAQKRQATVRLHEARPKRQRGAPKAVASGGGKPPLAAKAGAAAPSKAPEATAGAGGSKSTKVVPPASGVVEASKAARALPLSGKRVADFGTDITVDEYLGGSDKGQLAMVAPGAETATAAIVPRTRGEALGAGGEVADFASRTASGALTAAVSAEVERLRTQHADAVRWPPCRGRRPDLRRQLAAERREANEAVAKGQAAQAEAKLARAEGNLAKELAEHLQERLTALESRAKEAEAAMHAEAERTRTQLMDTYRELGAWTGDFEVPDREPGLRCLQWVQEELLELLAVAGGR

SEQ ID NO: 47644 - protein, 75 aa, Zea mays
  Coding DNA Sequence Number=SeqID_4269
MRIRLKTMNKKIKKMIHLKRRAMIKGEITMTKTRKMIKKYRVKDRHTQESTKVEDALRDSMGVGNARGAQQLHEE

SEQ ID NO: 47645 - protein, 317 aa, Zea mays
  Coding DNA Sequence Number=SeqID_4270
MTSPTPTNRGDTRFSSDYHSHEGFPSILWEVLSSAGYPTPPLYTVQLYEEHRVPHRRVWLTLEAHPLQTSWRSLDSKTIGFRADDTIEAAAMKTLTTFYGYHPLEMPSRPTERRHGTPPNLAQTTKLTLDSREDFVVDLSLELVEKDQQEELEEANEHLEMHHQEMEANEAGSEGEEAPQELEPALGPNATPSGMPLHLHQVLPLPLRVDGKTIMKLTGQRRSKKAPMLGPSAPTQRFRIVSNSQSRGFQQTRRWVIRPPQQPQAPNRFPAPAPRNNQPQQQQQREWKQMLHMWQCGPLCQELPKESAEATASTKSR

SEQ ID NO: 47646 - protein, 161 aa, Zea mays
  Coding DNA Sequence Number=SeqID_4271
MSAIHNVFHVSQLKNCVHLPTKVIAEPEVEIELDLSYQDYPSKEESKSHVLDAVSGQPSADWPRQHVPPRVVAPPHALQSLTGGPESPCQTSSAHRQTWTEPEYSPPTNSPACARGLADSNHLQRRPIPRRDRRNLPDLPVHLIGAVSPPGVFYAVRDSVQ

SEQ ID NO: 47647 - protein, 368 aa, Zea mays
  Coding DNA Sequence Number=SeqID_4272
MESPKKDNKLPMQIYKVGRESCETVTTEFVSRPPPCTRRNEARNVSVGSSIVEIAGSVREEPEAEHHLKVLETAMCELFAECLISVGFTHNMLVNARVVFNDFSLTETTWLPDVIQGLMTFSVLVTYQSGFESLVHEGCDHVARLTLSDLVTLNLYTEVGEVAGMNVDKMLDHMWSPFAAEVARKCSVAELERMGRRETEHKGGKNSKGEPAAFVLSEPEVGRGEGSFEVEAESGPGGRARRRPSSGVEVESEHRGRARRRRPSGVEVESEPWGRARRRPSSEVEVEFEPWGRARRSPSSEVEAESEPWGRARRSPLFGIEVEPELWGRARRSFLWRPSLDLAAVSLTLSSGTQVRAGQATLFSCKVG

SEQ ID NO: 47648 - protein, 284 aa, Zea mays
  Coding DNA Sequence Number=SeqID_4273
  Subcellular localization annotation: CTP_CleavageSite=20; ConfidenceScore=5.47e-01
MKSNHQGRVSLASAKPDPPSGARRGAPPLRQNFPRKKSFCQNIFRAFRLLRKSDPENDGVHEPGPSRRLDWPLRSLSQLSSEDISPAHGLGNPTPALVRPVDSPARLQPTKLLFEPTLPLSMLTPLPPAPAHREAAEDGTSVPPPLVRTTPHIGGPAGRQNPRWFADTRSGSSDNDLRSGWPNSSSDDLREDAAATSPSPTSPLEGQGQAIKAKETEVRSADGGGDPVGDEDFFSRHHLSTDDGSRLPTGRSPLKSSRTGEHRPSRRGVVPEQRQDSPRTRTPP

SEQ ID NO: 47649 - protein, 283 aa, Zea mays
  Coding DNA Sequence Number=SeqID_4274
MHRALPSSEPPDGERPRRFRIVVVGGTQLRGSWYLSAIARLQGFSSGSPTASPRQWSPKTVTTSSMVGRSEPGCGLCPALSFKDLHHLGWGGGRAEPELYLPHGFVGHPLLKHSGVRALTGLAEGADFDNAGWSVFARPGGLEWGSTGGQTATVVGAEVVAAEEVLVTDGITATIRAPDLRLFGFDSLSLPLEWGRGRGARRSSVLPEVIAAAIWPPGAEVVVAAAGAGVGEPPGVLSPRRPSNVGGCSYQRGWNRSSVCNGTLSAGVCSLWLSGPEHLCILA

SEQ ID NO: 47650 - protein, 227 aa, Zea mays
  Coding DNA Sequence Number=SeqID_4275
  Subcellular localization annotation: CTP_CleavageSite=55; ConfidenceScore=5.74e-01
MAAPTSTQIPATTHVSDPYSNPPLVCSAISTTRRHLPTHLRSCTTSSLSSEDRCRSSRHTSVLSPPLRSHYAFCLGEFRLVGAPPPSTQALVVSLSPFKGPEVSTRDDEQHLVPECVAKDLPKQQPGEGKAIPNPVQPSEKTVHTSVKLPEQGIGVCFAGEASPRSPELLTPPDSPWFGRYTRRRQGHPPARVDRAIPAILDVKPYLDVTARVSPSQPHPSPDLPSR

SEQ ID NO: 47651 - protein, 452 aa, Zea mays
  Coding DNA Sequence Number=SeqID_4276
MNVCELTLAVSPPTGQEQGKLLVEGITQCAAWHGRPVRQQIQQARRLLDDLDAACQRMGRDTLNAERARRLSAQWQAAHPLLNKCRGYTALRQARPDGLCHGPQATGLRLRGERRIRPPHVSAPDPCIPQGPSRSETLPGFGPPPGLRPCLQMGCTGVLRRGPRQGRLFRRLYRRRAGARGGAANLVFFLPPLEECNPMGVRILSPPFGFKDFHHAAQLQPPAGASRMFIILARAKGASSQGSASHVGQRPASSSSIRGMRGVHQPREGGELRLRGAGQVQALTATACLALGLGGPTGYRRLCRCLLLFGRGVAIRPPQGRRSRRVRVCHIHGFSRAVGHTGGPSKTPYAAGVAAAFLDGFVLTPWEDGSEGLFSACPEAIAAAVWAPGAEVVVTAGAEVVAAAGSRHGTRLSGYMASGSPQETSACSSKPDLQLDVSRLDTSSYKRVVNGL

SEQ ID NO: 47652 - protein, 751 aa, Zea mays
  Coding DNA Sequence Number=SeqID_4277
  Gene Ontology: Mol. function=cysteine-type peptidase activity; Biological process=proteolysis
  Homolog annotation: Hit_ID=A3C831; Match level="QueryCoverage=32%, HitCoverage=52%, E-value=2e-21, Identity=30%"; Hit description =Putative uncharacterized protein
  Pfam annotation: Domain name=TolA; Domain location=159-540; Score= -120.9; E_value=0.0033; Accession=PF06519.2; Description=TolA protein
MQMLYVDILQHGLDTSPFSIPRCAFLDSKMIDAIASKDLRGDVPPGTTEFGHLRQYYMLPVPAPAPVAILNPTAAPNPVAAASVPVVTAAPSGTYADVLGTSHDPACHSSFNIQPPVFYQYPSFRSSFGQRITNLVGRSRKSDALNILKAFDESTSEAQSYAQKATKYSTISRNLMAKAHHECYTGIQKLIADAIVEKRAAKERRRKEQELVQLHRRTNLEEVMVKKLYGVPLQLTLEHEQDQELLQMYRKTNLEEHFASIDGEGAPETEEEPLSRDTGMQHPTAQDHITYSRRSDRSIQVANTQKAEAEKKKAEIEMKNAEAEEAEKRKAEAEQADKKKAEEAENKRKAEAEVAEIKRKAAAEEAEKKKEEEAEDKRKAEAEEAEIKRKSEAEEAEIKRKAVAEEVMKKKADAEKKVEAEEKRIQVAIQKTAEGQHQSFEKAGARYQVKEDVPVTNVKKNMLSSANNEVSVGQADFSEFQRMIFKRLGDRVLKKPREYISPFKIPRNRPEIPLAKAVALRRKIASDPELKRRILLEFGLLVGLTGEEILTFFSNDTLGESGIIDFFVHCMRHDDIVHKVDSCGYRVFLTTGFYVFVPIKDGTHYFVYCFNFIHKRIDVLDSNDYFLNCSNQEERHKAVFAKIPIIDAAFQKVSNLKLPRVSKWRRPFIDVPKQAGQSDCLFFVWKYMEYYDGDKMTKEINPFKGPIYRCELLHYEIFHPLNQAEIPGSLDKFRIGGRPLPIEWDSSQSNN

SEQ ID NO: 47653 - protein, 117 aa, Zea mays
  Coding DNA Sequence Number=SeqID_4278
  Subcellular localization annotation: CTP_CleavageSite=35; ConfidenceScore=5.63e-01
MAHARAYKTLPGFDCTLPRTLKPRRSLTRRRLPVRSVSAAAQSLCHRRPASRAIPNPVQPSEKTVHTSVKLPEQGIGVCFAGEASPRSSELLTPVAVCGPAKSSIIERKIVVLFDWG

SEQ ID NO: 47654 - protein, 54 aa, Zea mays
  Coding DNA Sequence Number=SeqID_4279
MEVAPDSAAELASEDLLVAGSLEEMVAGVTWPSILPPGWTVEWDPASAEEEHEE

SEQ ID NO: 47655 - protein, 52 aa, Zea mays
  Coding DNA Sequence Number=SeqID_4280
MARAHLGTKDYDHMWKNLRSKDYNLANGEYVLVPEQGAAQEVAPDPAPEPAS

SEQ ID NO: 47656 - protein, 78 aa, Zea mays
  Coding DNA Sequence Number=SeqID_4281
MARAHLGTKDYDHMWKNLRSKDCNLADGEYVLVPEQGAAQEVAPDLAPEPASEDLPATALEAKPRFMHNLLFMLSYFT

SEQ ID NO: 47657 - protein, 223 aa, Zea mays
  Coding DNA Sequence Number=SeqID_4282
  Gene Ontology: Mol. function=kinase activity; Cellular component =ornithine carbamoyltransferase complex; Biological process=amino acid metabolic process
  Homolog annotation: Hit_ID=Q6QP54; Match level="QueryCoverage=33%, HitCoverage=26%, E-value=1e-16, Identity=61%"; Hit description =Putative kinase
MAPPVDVVGPCPRLGDVEAPPRSRSSLSSKAEVESKPLGWARRRPSAEARAESEPWGQAKRSSSSSGAEPESEPWGRAERSSSPSGAEPESEPRVGLTLLSGTAVGAAQAALSSCQTGKKVNRQDFYTRQTIARTRCTVGRKNQNSEPAWWDRYTLENCIVSQQQAQGRCFRTFGFLKPKRLFSRIKLVTKNDLAPRRGYCWDHASSPKVLQKATASAEAART

SEQ ID NO: 47658 - protein, 108 aa, Zea mays
  Coding DNA Sequence Number=SeqID_4283
  Subcellular localization annotation: CTP_CleavageSite=19; ConfidenceScore=5.20e-01
MRAPSSNADGNPGSGPSPTARTKPRRAPQLSPSWEGPFKDHSAKAGGLDSLGADSRERDPIPWGGPEPVWPLSLVPYPKAYTLHHSVTGTGPFDGLDHASPEPSLGQG

SEQ ID NO: 47659 - protein, 142 aa, Zea mays
  Coding DNA Sequence Number=SeqID_4284
  Gene Ontology: Mol. function=kinase activity; Cellular component =ornithine carbamoyltransferase complex; Biological process=amino acid metabolic process
  Homolog annotation: Hit_ID=Q6QP54; Match level="QueryCoverage=34%, HitCoverage=17%, E-value=9e-11, Identity=69%"; Hit description =Putative kinase
MELGLRLKANVILLLFVRLDLSRLQTSIPKKEFGGDPQEVGRCGGSSEVEVESEPLGRARRRPSAGARAESEPWGRAKRSLSSSGAEPESEPWVGRSGVRRLQGLSPSPSPGSSGAEFAVFRGLARVRALGRAERSLPSSGA

SEQ ID NO: 47660 - protein, 181 aa, Zea mays
  Coding DNA Sequence Number=SeqID_4285
MARFPPQDTGGAWDGAMAQPAAHLHEAAGPKREEGESTHKERATALWLYALPSLPQPAVKKVNRRTRSVQPPCGYMPFHLRRNQRSRRQSVAQGACNRPAVVRPLGFDRWSNLWHGGPGPHVMHPARRFLGAEKSHRRSRQYRASSRPSQKAEKINFQNQCSNSRHPTHGPTKTLSAEVMG

SEQ ID NO: 47661 - protein, 71 aa, Zea mays
  Coding DNA Sequence Number=SeqID_4286
MARKDNTSQSVWSPTEGHRTPIHISPEPPGGVKVIQQAARLLGLLANSAPAPGSALCYSFYKKLPQHTEDT

SEQ ID NO: 47662 - protein, 331 aa, Zea mays
  Coding DNA Sequence Number=SeqID_4287
MAGGSVGGGAKAIQAKELDTRQLTAPAAGGPRVTEVCLFRKAGGRSRSPALLLQMLEEEAGHQPMRKAGLQLGSPSTPMTTGGRLQPGYMMKFLEAERWQKSANPHEVALLQQQQEEDKIGSTTTQETKSASYKAVRSLGRVALRRIPPANAGAPHTEARKAITPLMPQSVTGKVSPDAHQGSHVIHPARRFLGAGKMHRRSHQCRASSRPSQKTKKINFQNRCSDLRHPAHGPTKTLSMEVTGQLAAGAGAAVGVTISGTAVTASMGAQGQRANHQSNSGPTCRIASSPEAGPGATVGGILGDNAVGPRRHETPIRTTRTPEVKQLGAIG

SEQ ID NO: 47663 - protein, 155 aa, Zea mays
  Coding DNA Sequence Number=SeqID_4288
  Subcellular localization annotation: CTP_CleavageSite=19; ConfidenceScore=5.26e-01
MTTVVLSPLRKQGDVSRIPAALPAVLLKGSGTSPTATDKFTGWLTDPRVRNADSCAGSRCSAGVLDSSVTHRTVRESVLTILGAAAQQPACTLLGGPTTCSEHRQGSNMSSSSDEWGWRRERATAVEVIMGDSYIREESTGGGDATAESRLEGGE

SEQ ID NO: 47664 - protein, 178 aa, Zea mays
  Coding DNA Sequence Number=SeqID_4289
  Subcellular localization annotation: CTP_CleavageSite=66; ConfidenceScore=5.48e-01
MVVLEKIQQVIMSVFESSTTKVTSFPGNVPLNLNSFGTVIQGGRPSPTPQTASRHGLTDRAPAALRCSLGFVATDDSLLTWEHVDHATGASTHLQGRYFPMRAHGIQVSTVEDNEDWLDVGEENEDDENFVLVCYVCAFVVVDIAFHFSCFSAMFVIVDYCTFHSTLFVVVYLLVAIS

SEQ ID NO: 47665 - protein, 178 aa, Zea mays
  Coding DNA Sequence Number=SeqID_4290
  Gene Ontology: Mol. function=protein-S-isoprenylcysteine O -methyltransferase activity; Cellular component=integral to membrane; Biological process=C-terminal protein amino acid methylation
  Homolog annotation: Hit_ID=A7QIF9; Match level="QueryCoverage=92%, HitCoverage=97%, E-value=1e-45, Identity=47%"; Hit description =Chromosome chr12 scaffold_103, whole genome shotgun sequence
  Pfam annotation: Domain name=ICMT; Domain location=84-157; Score =53.1; E_value=9.4e-13; Accession=PF04140.5; Description =Isoprenylcysteine carboxyl methyltransferase (ICMT) family
MDEPNFIMDACIGPAHVVCDQTMLSFQTGIRLHQCSRIVSNEVASHAALLISKQYVLAMGFAMLEHLTEILILPEVKEFWFVSNIGLLMVIIGEIIRKLAVVTAGRAFTHVIRTYYEDQHQLITHGLYRFMRHPGYSGFLIWAVGTQNRYEEFFLKQFFGSEYDEYAQRVHSGIPFIK

SEQ ID NO: 47666 - protein, 73 aa, Zea mays
  Coding DNA Sequence Number=SeqID_4291
MAGSAAPPPCLARLGRPTAGSAAPCAAPCPAGGNEIDGSGYDYGAGCQHCNHCSGEDEAVEGDFQEFQDYDEF

SEQ ID NO: 47667 - protein, 197 aa, Zea mays
  Coding DNA Sequence Number=SeqID_4292
MSGAPPDMSGAPEDSNANSPPSGISRGDSAIIHRTVRCTPDSVRCAKEERPQELAGFGNLQRLVRYNSPDMSGVHRTVRCNSGATAIRRQRLPATQLMRAQKSGAPILAHRTRYNACPVCTGHPGGPTSQKLQRSESNDSDDVAGAPDMSGVHRTVRCAIDRQPPPTVKFGGWGYKYPNHPTIHCIQVFHFSTTYKS

SEQ ID NO: 47668 - protein, 96 aa, Zea mays
  Coding DNA Sequence Number=SeqID_4293
  Homolog annotation: Hit_ID=Q5NKP3; Match level="QueryCoverage=36%, HitCoverage=14%, E-value=2e-11, Identity=88%"; Hit description =Putative uncharacterized protein 9C20.7
MSCAFDDYYIKDYGIILAPEVTQRRTDNNDHLPSSASVYGGAYLMTDNVRGNFYRQSVRGGGPPSGGGSPIQRASDSRALVRASGGVPEAPRRRHF

SEQ ID NO: 47669 - protein, 45 aa, Zea mays
  Coding DNA Sequence Number=SeqID_4294
MKRRGHSINNFRQYPDVYLTVDQYMEVTLPWMEHRPQAYKAFEST

SEQ ID NO: 47670 - protein, 85 aa, Zea mays
  Coding DNA Sequence Number=SeqID_4295
MADLEVGLIWSEEVGRGLPAGRWRSFAAGLPPVSSGRAAEVGEGCIVFAARHLRSWDTWNTLWMSDMDSGSSRRYAIGPIREMTG

SEQ ID NO: 47671 - protein, 226 aa, Zea mays
  Coding DNA Sequence Number=SeqID_4296
  Subcellular localization annotation: CTP_CleavageSite=63; ConfidenceScore=5.29e-01
MGKPVPSLLMLLLSRVTALVPTITGMGDHVSGRVRGKVCCQVQSAGTVTGVKITTARLTGGSRAPVGWSVTSGRSQRSQRYAGRLQRWLELLWPQAQAAEVSGGTCSGQTTAVGFNQGARGAPLGDVEAMRARNREMVQWITRSTCSGGVTNSGERDLIVPVGLVLGSSLGKLHGLSRKLSAGSDRAEVGGNGLATAGALGQLWRVAGRLPELRAGSGKLGAVRSG

SEQ ID NO: 47672 - protein, 201 aa, Zea mays
  Coding DNA Sequence Number=SeqID_4297
  Homolog annotation: Hit_ID=Q03200; Match level="QueryCoverage=41%, HitCoverage=66%, E-value=8e-20, Identity=57%"; Hit description=Light- regulated protein precursor
  Pfam annotation: Domain name=Lir1; Domain location=1-97; Score=47.8; E_value=3.8e-11; Accession=PF07207.2; Description=Light regulated protein Lir1
MEKSTVVVCVPVVIMAEIAEIDYSSSFSVFTMEAYDLLGGDACSTQMYSEAKLASVAATVRRRVEKEERDYLSHDKPRTVLSGKACNDLDGEFCDAPYQVLRDLGGKFVFILYNTLSKSTFVTVGVDSENHLVFSNDARILKTICDNLYMPFPKDCNLADGEYILVPEQGVAQEVAQDPAPEPAIEDLPAPALEGKPRFYA

SEQ ID NO: 47673 - protein, 230 aa, Zea mays
  Coding DNA Sequence Number=SeqID_4298
  Subcellular localization annotation: CTP_CleavageSite=38; ConfidenceScore=5.22e-01
MAQAEPSAPFRRLPSTPMKPSSPQSIYARIHTRPQSPREAQAKQSAIHTRGSACPHPRVPTSTRDASALAPIRHHAHHEISLRLLVGTNHARALDPWHPHIPPPVPLPSRSRMTLPRVDVRVPKSPVPLPSRSRTALPSPRPMASPNPRFLSLPVRGQRFRALMFVSPIPAPVRCFPTSRRHTIAMGYRQRRQRVAPSFADQPGQGLTGHERYTTRLPTNVSEIQPGHDV

SEQ ID NO: 47674 - protein, 132 aa, Zea mays
  Coding DNA Sequence Number=SeqID_4299
  Subcellular localization annotation: CTP_CleavageSite=32; ConfidenceScore=5.02e-01
MAMMGSTSKKMYLCKVPNFGFLNDKAETGRVTCTRRESRCSVSVCVVKDRVDVGLMIEDLLTGHMTHHGGRGNGNTCSTVADTPGSRPFAHRASQCTPARTRRSTTARAPRRAYKAFPGVPHFTGAIPPPRT

SEQ ID NO: 47675 - protein, 88 aa, Zea mays
  Coding DNA Sequence Number=SeqID_4300
MALRFSSSNRRRGYFTGRAPARISSGCSATSLETTDQAKDGGKKSFEVPSAREKVKETRNPKPGVKKKTCKVKVDRVKKSYGASRITT

SEQ ID NO: 47676 - protein, 68 aa, Zea mays
  Coding DNA Sequence Number=SeqID_4301
MAHRTVRCATGAPTVRHRCANGRFQRLVLTASRWTHGTPDSEQSLSGAHRTVRCDVRGASSSDQPGPT

SEQ ID NO: 47677 - protein, 740 aa, Zea mays
  Coding DNA Sequence Number=SeqID_4302
  Homolog annotation: Hit_ID=Q6JAD6; Match level="QueryCoverage=93%, HitCoverage=98%, E-value=0.0, Identity=66%"; Hit description =Putative uncharacterized protein
MEKCKPIKTPMPTNGHLDLDEGVTLIARVSSPVLPGSSPLVHQFRMSRTKNVSAPGGGDDEDPRRPFRQVKGKTVYLEQQEGRKKQRTDRAARAAAAAAAAAAQAELGDQPQTPSDQIAYRVRRLASRPRSSTHTSASTPPPTLPAPVTPVAPSTTTAIPATSTTPASTAPPPAPATAPPIPPPHFRERDETEVQPLAADPRLFDLQRATAARVRRFRYVPVESWLPAKRDPVAGDLFSTRIQESFFRAQMSAQIALRVHRLLDLLAFLLTVGADSEAHLTYLPGLLTLLTTSGRYVEEWVRVFYASVWIDPDHHWMRFCFEREDVTITASQIRQLFGFPESTTRLHSLCYGTSDPPRRPHGGVAPGTAHVAALFRPPFSDGSRRSPADFTTAAKYLYELIRRTLLPRMGYREATTHIQLWLLGALVSHSEFDVVDFLICEIEDTVLDRIRARRQLPYAHYLCHIFAQLIQPPRFQGTLEASRLVFGFYRPAPETPVPASAPVFDSQAEDAALHQFDTQATAVDDDDDDDFGVPPPPPMPPHSHDHEAGSSSAAPAAPSAMDPALASILQSITQQQAHLAVEQARLSERMLSMFQNMQDRQDALQQQLLQDRAESRAFMALMLQQSGVSVPPVQSPPPPPLHAPVVPSILSGPPVGPSPLRPVTLAFTSPVLSSVCPQPPVPPASAVTTTVVAVSVTSSVPVAPAARPQSESVLALASTTDPGSETDSDPPPAFALLPRP

SEQ ID NO: 47678 - protein, 49 aa, Zea mays
  Coding DNA Sequence Number=SeqID_4303
  Homolog annotation: Hit_ID=Q9XEJ4; Match level="QueryCoverage=55%, HitCoverage=2%, E-value=3e-07, Identity=96%"; Hit description=Copia -type pol polyprotein
MTTDRPLELLHMDLFGPIAYISIGGRKISNPRDLMKRPDPLGLKCDTNY

SEQ ID NO: 47679 - protein, 186 aa, Zea mays
  Coding DNA Sequence Number=SeqID_4304
MPPRTRKTARKSTGPIGVPRHQLAPRHEDSSSGSNNPIGDLEAQVDQIRSELRHRNVIWVADGERINELRTDIRHLQDQLAERDLALDWAVNSRSLAWAKEARARSRVEELSSAVDNLQVYCNILHEEVHVLYSQLHPNVPADPVGMGAGPSGAADAVLDSRTGWGRNLPWEGGNPESTPSTSNIS

SEQ ID NO: 47680 - protein, 271 aa, Zea mays
  Coding DNA Sequence Number=SeqID_4305
MPGKANCCCPARVQHSVLCPRFRGEDGSEDLPVRFGAAGARWRGVGGQVDTAVGAEVVAAGESFSADEIVSATCGPTSGSLALMSGSRPLSGDANESLPAAASVLGSSLLLQRSLESLGSVGLAARGFSCLVKETLGRSAMSQSRRQRCRVPGGDPKRRWPRHGADRFLRGGDPPTVSPSEAGSDSAEGGVGAEGAAAPPADVRSCRNSLSVDLFVGNRIAYPRKSYFSQKVMSEKVMSEVSVSRRHRSPSARSALPAYVYSVVFWIPLSK

SEQ ID NO: 47681 - protein, 177 aa, Zea mays
  Coding DNA Sequence Number=SeqID_4306
  Subcellular localization annotation: CTP_CleavageSite=41; ConfidenceScore=5.45e-01
MFGALQGQHGAFPPPPCGKATQGQDSAACVAPTAVPLDRVRRTAAKSSLGRHRKLRLVRPQGSDPVSAPEDDELRLARPQGSDPASAPEDDELRLARPPGLGLGLGSGRRRNSASPDPRARTQPWPQPTVSASPDPGLGLDLDLGRQTRPRPRRSIRLARPRARTDHVTGGPSLPYP

SEQ ID NO: 47682 - protein, 44 aa, Zea mays
  Coding DNA Sequence Number=SeqID_4307
MARVACTLRGKRLDDGESVLSVGEEIAEFCCLCSKVVPKDEPQQ

SEQ ID NO: 47683 - protein, 356 aa, Zea mays
  Coding DNA Sequence Number=SeqID_4308
  Subcellular localization annotation: CTP_CleavageSite=11; ConfidenceScore=5.09e-01
MVAPQAPSWPRARAPVSPAASRFANCGVVRFAIVLLMGLGVCGSLCQGGDEDDDFGYDYGNGKWYSFRLERTHCTEVSHPFLPSRLAERLLRHLVAGQSSHLERLHHRLHEEQDRRRQELEQQDSSFSLQQEIESLRSCSPVLPLEAPPAPPLSALAAGVAAGGDPDDGGGDSSSSHSTDLSEEQEFEGWVARPITRDTARGCHFYDVLNTLLHQALDRRTWSIEYHCVVFQHSRGVYPNRWEATCLVRHPENSLRGADVCLEHYSISERDSAEAAMQDAAWRALSHYCSVLGGVADGFNLKYYPRRPSGSTGGVIVSTVGEDNPRLSSTVNLAIVLNTELDHALNELSRARAEIA

SEQ ID NO: 47684 - protein, 43 aa, Zea mays
  Coding DNA Sequence Number=SeqID_4309
  Subcellular localization annotation: CTP_CleavageSite=9; ConfidenceScore=5.07e-01
MAGSAASLPAGLGRPPRRPLPRRVRPPHGRARPPPAPPPAPPG

SEQ ID NO: 47685 - protein, 88 aa, Zea mays
  Coding DNA Sequence Number=SeqID_4310
MAAVGMVGTVVIWSRFPRKEGWVREGGRRGVLLLILCGLGTGWKGCRATILRSPTLAPPWTDSVEGESDNPGPHHGETSRFRARTVND

SEQ ID NO: 47686 - protein, 92 aa, Zea mays
  Coding DNA Sequence Number=SeqID_4311
MARVACTRSKRLDGGVFVLSVWREPGLVLRNPVGELTYARVKCYICHVIGDPQLGLSKVRWTRTTVGGPNNLGGSVTIEVAEQELIEGKLCP

SEQ ID NO: 47687 - protein, 118 aa, Zea mays
  Coding DNA Sequence Number=SeqID_4312
  Subcellular localization annotation: CTP_CleavageSite=65; ConfidenceScore=5.08e-01
MTQPLRNYIHVLYKASLPKVFLLMGPSATKQAPNNDNPRLSSMVNLVAVLNTELYHTLDELGKVRAEIVELCAERVQCHHQEDGSPAPVGTQHPYRSPPRGHHAYGTPDCRTKIDLEP

SEQ ID NO: 47688 - protein, 325 aa, Zea mays
  Coding DNA Sequence Number=SeqID_4313
MNALSREGCRHFEVFDQADEDFERDVYKVEDPIVKESAGALYDRMWGPHGCEVVRERAETARAQAARGERVDDFGALNSALPDPEPTPAEAVSGVALEPTPETAEDAPDAPTSAAAGEDLPPKVAEGAPDAPAVAAPSAEDPTAVAAEITVEAAAEPTAEAPAASGPSQVQDFGPAHATATTEFLAASTAEGGNEYGGSASEFFDFTDSGSSVEWTEESSEEDLDYFAALDVAAAEASPHAADAQDVPGPSTGRRRRRAVAKRRVSAKEGARLRVSRAGRQELLSLPAAASTGEGELRSLFAGEELRIMLFNYREMGIIPKVEPM

SEQ ID NO: 47689 - protein, 649 aa, Zea mays
  Coding DNA Sequence Number=SeqID_4314
MIGDEVAQFGSCTFTPKTGKTTMQVVELVPCARNKWGNWNEFWFYVAEGTVEGHEGLPVSEMCSHYYSAYPPFEVAEEDANEGALRCAAGQSSGRDLVEEFVAYGVWPLAHGWALGEVCPRQMPFHGGRVVRSPAFALNLRNRDPAAFVRDAEDGAVRLVGRYVPRTEGQRSFDIRGSNDRLNRVFELNQLPYDGYPGQDDADHRGKKPVVETGDDPAPAAAPSSKKRKLGTAMGGLGVSDSFARELMRTCAAPGGRMSSPELRESSARMLRVTGGCWPRNVPIPRAAGEDCFTSRMVREWRVFPYGRNIAAVVSAVMDKDRQGAAQKRQAAVRLHEARPKRQRGSAKVAASGGGKPPLAAKPGASASSKAPEATTGAGGSKSTKVVPPVSGVAEVAKAARALPLSGKRVADFGTDINVDDYLGGSDEGQLAIVAPAAAIATAAIVPKARGDALGAGGEVSALAVVRDEAGAATRRLKEVTEALSQVADFASRTASGALTASVSAEVERLRTQHADAVREKSASDSKCRKLTDKVAALEREKADLRRQLAGERRETNEAVAKEQAAQAEAKLARAEGNLARERAEQLQERLTALESRVKGAEAAMRAEAERTRTQLMDTYRELGARTSDFDVPDQEPGLRCLEWVQEEL

SEQ ID NO: 47690 - protein, 125 aa, Zea mays
  Coding DNA Sequence Number=SeqID_4315
MGKNNKRKREPTPPSEDFGDSEYSEEEFSSESEGSPAPIPCGLAAEVWTYIRVVERSGLEGSDESEYSSDEEDSDGGGEDEDGDDDDDDDDDEGGGSGDGDGSGRGGSSGSKGSNRGGSSNRASG

SEQ ID NO: 47691 - protein, 174 aa, Zea mays
  Coding DNA Sequence Number=SeqID_4316
MAKNGPRAHFPFNLAHQCNKPKNNKFKGKKDDEKKEKKFFKRKEGKHKRFHKKKDGKAYIVGDWLTDIEFSSGLLQVKKKMMKRLLPSLGISVHHHHHLHLLHTYVSWLKVNGSDSDNEYASPTYDELADLRQEYNQIIRKSKAKCDKLKDENEFLTAKYDIVVHPYRRNKGRK

SEQ ID NO: 47692 - protein, 141 aa, Zea mays
  Coding DNA Sequence Number=SeqID_4317
  Gene Ontology: Mol. function=methionine-tRNA ligase activity; Cellular component=cytoplasm; Biological process=tRNA aminoacylation for protein translation
  Homolog annotation: Hit_ID=Q8FFX8; Match level="QueryCoverage=84%, HitCoverage=17%, E-value=5e-62, Identity=100%"; Hit description =Methionyl-tRNA synthetase
  Pfam annotation: Domain name=tRNA_bind; Domain location=45-139; Score= 148.1; E_value=2.4e-41; Accession=PF01588.11; Description=Putative tRNA binding domain
MRQVEALVEASKEEVKAAAAPVTGPLADDPIQETITFDDFAKVDLRVALIENAEFVEGSDKLLRLTLDLGGEKRNVFSGIRSAYPDPQALIGRHTIMVANLAPRKMRFGISEGMVMAAGPGGKDIFLLSPDAGAKPGHQVK

SEQ ID NO: 47693 - protein, 24 aa, Zea mays
  Coding DNA Sequence Number=SeqID_4318
MAMMGFNIGKDVPLTGSIPVNKKG

SEQ ID NO: 47694 - protein, 27 aa, Zea mays
  Coding DNA Sequence Number=SeqID_4319
MWKDRVEHAKDIWAIYPDGRESASWSK

SEQ ID NO: 47695 - protein, 290 aa, Zea mays
  Coding DNA Sequence Number=SeqID_4320
MSKTPAEPLRARAASPPSSDVFGTSRWFDEDKTGRDTLRFIQHQTKACGLIFPWNSHTRDSHRCQEEVYAGFLPRFARLRSQQAFEHGQMNTSTCSTHSARARARPRPTPRAPRHAKPCPRRLLVPTPINHPQASTVLFRARSTSPESETTGVCPVHGVPAATRAPATVDRANRALPSHARSLEETVHASVKLPEQEIGLCFAGEASPRSPDFARPPVNVDRTYPLTRPETWSPIPVMVGISAVTARRQSGSVRHCSLEDMVAGVTWPSILPLGWTFEWDPASAEEEHEK

SEQ ID NO: 47696 - protein, 136 aa, Zea mays
  Coding DNA Sequence Number=SeqID_4321
  Subcellular localization annotation: CTP_CleavageSite=48; ConfidenceScore=5.47e-01
MSFHLPSPPDGGHPQSSCLVVGGTQLHGSWYLSAIVRLQGFSSVSPVASPRRWSPKTVPTSPWVGRSKPGCDLGPTLSFKDVHRPRWGGGRAESELYLPHGFVGQPLLQRSRERALIGPARGADLDNAGLVDGGRR

SEQ ID NO: 47697 - protein, 239 aa, Zea mays
  Coding DNA Sequence Number=SeqID_4322
  Pfam annotation: Domain name=zf-CCHC; Domain location=122-139; Score =16.6; E_value=0.0047; Accession=PF00098.14; Description=Zinc knuckle
MEDLSTMTLTIVIEKIEAFEMSRKMGRQEEPTSSRRYAFACDEKSQGKKKAPTPNSSSEEEKKEESYDEEDNQPSTSSSEDEETILRIGKVMRMIHKINLMGVPLQVEHLLFNIDRKKQRKRGCFACGEKGHFRENYPNMAEPTKVRSKGKALTSVKTWDDSASEDESQRTRSHRSSSCSSWSSQKCLKARGKMSIPSSSDDSSSDDKDDDEDNAGFYCDYDYGYGFSYSFCLERVLLG

SEQ ID NO: 47698 - protein, 245 aa, Zea mays
  Coding DNA Sequence Number=SeqID_4323
MTIAEYVDVYSPLLYTPNPPGCPRCNHCSREDEVMEEDFQEFQEYDEMARLRHTARKSVIPSLPSRLVERPLRRPVTVEAPPAPPLVVLAAGVAARGDPDDEGDDSSSSHSTDLSEEQEPEGWVARPITRDAACGCHFHDALDTLLRQALDQRTWSIEYRCVVFYHSRRVYPDHWEATCLVHRPENSLRGAEVYSEHYSISKRDSAEAAMQNAARCALSHYCSVLGGVVDGLDLRYYPHRPPNST

SEQ ID NO: 47699 - protein, 160 aa, Zea mays
  Coding DNA Sequence Number=SeqID_4324
  Homolog annotation: Hit_ID=Q6J9V9; Match level="QueryCoverage=40%, HitCoverage=33%, E-value=3e-09, Identity=46%"; Hit description =Putative uncharacterized protein
MEAQAHASCNRRAGCYVRATAPPLAPLPRLLDYGTSTATRGNPAYDPAVPARGSERRFAFAIMTASKKGPGKGDTLKRILLREGNRPRASLLIRGSKAGPSEGFNSRLRARGLHTHYWSEVPRPAPRKGSTAASGHSGSAPTTDQGFVGWPSKGSQPPQT

SEQ ID NO: 47700 - protein, 306 aa, Zea mays
  Coding DNA Sequence Number=SeqID_4325
MAPPVDAVGPCPGLGDVEAPPRSRSSLSSEAEVESEPLGRARRRPSAEARAESEPWGRAKRSSSSSGAEPESEPWGRAKRSSSSSGAEPESEPWGRAERSSSSSGAEPESEPWVRRSRVRRLPGLSPSPSPGATFALNAPAIWSVGVAISPRLLLGEDWASGEPKLCADGGYQLRIRSLEGDQPFSVAFCYGGCARAHLLGVAPEASDEWFDSSEGERTVKDRLDFFTYAPASPFRKEEGGKAPCCPRRAPNMVSPVSCWRVIRVDARAPFVRGRLEARRRAQKYLRVICWTRSPFDEVRGLDASL

SEQ ID NO: 47701 - protein, 121 aa, Zea mays
  Coding DNA Sequence Number=SeqID_4326
MGWRGAERMGSGAGVLWRAQNASNTWRCSSAHVQKLAEIAKVRILAKIRRRPLPGTYGYLLYEIGAQEGSRVYSPLAQGGKCTKAWVMLLVIHISWLIHGLQGSYALLLKFLPHVITVISV

SEQ ID NO: 47702 - protein, 122 aa, Zea mays
  Coding DNA Sequence Number=SeqID_4327
MGKPVPSLLMLLLSRDRIPLDCPTRWQDGRPSHSSNHVLQRTCKNYATSKAEYTNTQLDLRGQHGSSSLISYEKQMIRIEFLSLQVTALVPTITGMGDHVSGHVRGYVCGQVHSGFGKHYAK

SEQ ID NO: 47703 - protein, 172 aa, Zea mays
  Coding DNA Sequence Number=SeqID_4328
  Subcellular localization annotation: CTP_CleavageSite=47; ConfidenceScore=5.02e-01
MVTQDGDHQFDGGEKQAGLRPLPRPHLQGCSSSVLRRGVRRVGACLRASSGPLLPSVIGGKGVRRSWRWQLPRVWLSGLSGSDAASGATSPRGSRRRFLCRRDSRCHPRSDLRLYGLGSLSSPLEWGRGRGPYRNSVCPEVIAAAVWPPGAEVVVAAAGVGGGEPPGIFFVP

SEQ ID NO: 47704 - protein, 189 aa, Zea mays
  Coding DNA Sequence Number=SeqID_4329
  Subcellular localization annotation: CTP_CleavageSite=61; ConfidenceScore=5.07e-01
MTVGGGCLRMVHRTVRCTPDMSGSSASPDPRARAPVSTSDDGLRLARPQGSDSTSTPETVSASPDPRARTHLDTGRWSPPRPTPGLGLNLDAGRRSPPRPTLGLGLNLDLGRRSPPRPTPRARTQPRPWTTVSASPDPRARTQPRLRKTVSASPDLRARTQPRPRRSHHLARLRARTDHVTGGPSLPYS

SEQ ID NO: 47705 - protein, 44 aa, Zea mays
  Coding DNA Sequence Number=SeqID_4330
MAHRTVRCPTGGDSAVDQPGPTWQRVHRTVRCTPDSPVPLSQKH

SEQ ID NO: 47706 - protein, 641 aa, Zea mays
  Coding DNA Sequence Number=SeqID_4331
  Gene Ontology: Mol. function=transferase activity, transferring glycosyl groups; Cellular component=integral to membrane; Biological process=protein amino acid glycosylation
  Homolog annotation: Hit_ID=Q10BV5; Match level="QueryCoverage=75%, HitCoverage=72%, E-value=0.0, Identity=75%"; Hit description =Galactosyltransferase family protein, putative, expressed
  Pfam annotation: Domain name=Gal-bind_lectin; Domain location=150 -354; Score=149.7; E_value=8.3e-42; Accession=PF00337.13; Description= Galactoside-binding lectin
  Pfam annotation: Domain name=Galactosyl_T; Domain location=400-588; Score=63.1; E_value=9.4e-16; Accession=PF01762.12; Description =Galactosyltransferase
  Pfam module annotation: Pfam domain module=Gal-bind_lectin::Galactosyl _T; Domain location=150-354::400-588
  Subcellular localization annotation: CTP_CleavageSite=12; ConfidenceScore=5.37e-01
MPPKRACRLALLAAAAAYLLFLLLFELPSFSVSTASPRLAQAATRRELLRASSARSPLRPRTSAPLAVSSVRVHRRATSSSSSASAAAAISSIDASAAAAFAAAAPHLARLLSAPAPPSSAPSPSPTAAASASCPATVSAPRDQLASGAGVAVDLPCGMAVGSRLTVVARPRAARPEVAGAGDGAAPPVMVSQFMLELLGTKAVQGEEPPRILHFNPRIRGDFSARPVIELNTCYRMQWAQPQRCEGWQSRPDDDTVDGELKCDEWIRDGNNETQESRMKRWLNRLIGRPKVNRPYPFAEGKRFVLVITAGLEGYHVNVDGRHVTSFPYRTGYNLEDATQLSLKGDIDVESVLAGSLPTSPPTSATRSYLEMSKQWKASPLPTEPVELFIGILSSANHFAERMAVRKSWMISTRRSSDVVARFFVALNGRNEVNEELKKEADYFGDIVIVPFMDNYDLVILKTIAIVEYGVMVVPAKHIMKCDDDTFVRIESVLDQVNKVPRGKSIYMGNINYYHRPLRSGKWSVTYEEWPDEVYPPYANGPGYVISSDIAQYILSEFDNKTLRLFKMEDVSMGTWVEKFHTTRQPVEYLHDVRFYQPGCFDGYFTAHYQSPQHMICLWRKLQAGSAQCCNIMIYSKLTQE

SEQ ID NO: 47707 - protein, 315 aa, Zea mays
  Coding DNA Sequence Number=SeqID_4332
  Gene Ontology: Mol. function=ATP binding
  Homolog annotation: Hit_ID=Q84T10; Match level="QueryCoverage=96%, HitCoverage=11%, E-value=1e-121, Identity=70%"; Hit description =Unknow protein
MDEDLHYATDLFYDCENVRSLFGSVAPYAVPQVSSSSLKKAIGFKTEVSYCDALMVLKSWITSKVPFRASMSQMCKFYTFLSEGVADAKIDIKREFMSSPSIFTPLQRPRASEVIPGRFLAPEDLYWHDPTGCSEITEDFVATKNRSMFPRKMLSAAYPNLYELFTLTCGVPKAPTTSNYVEMLLRLSTIALPSQAGNHVFCVFVRWAKCMHSESDKMNDILYLKESLQKLETTILPTSADKWVSLHPSFGLVCWVDDDELKQQFVNSNDVYFIQFGDLSSEDKQMLYGRVAALMKSLGIQALSKPASYMHEELG

SEQ ID NO: 47708 - protein, 46 aa, Zea mays
  Coding DNA Sequence Number=SeqID_4333
MAVVSPPTGGGINDVFPTWRKNSIQLLQGSNTLEEVRMGVENSTRK

SEQ ID NO: 47709 - protein, 124 aa, Zea mays
  Coding DNA Sequence Number=SeqID_4334
MGGVVFPKWRTREERLSSLYLATTWSIGPRSRQEWRGGGCDPADSALRCGVASTWSATGRTTLTVRSRTTVTAQKKTRVCSEGPIGQWQGCGCAKVEWRLPGELAHVEVKRDQRGCQIGPARSG

SEQ ID NO: 47710 - protein, 124 aa, Zea mays
  Coding DNA Sequence Number=SeqID_4335
MAETPHRRAIPNRSAPDPAAEATTWSIGPRSRQEWRGGGCDPADSALRCGIASTWFATGRTTLTVRSRTTVTAQKKTRVCSEGPIGQWQGCGCAKVEWRLPGELAHVEVKRDQRGCQIGPARSG

SEQ ID NO: 47711 - protein, 124 aa, Zea mays
  Coding DNA Sequence Number=SeqID_4336
MGGVVFPKWRTREERLSSLYLATTWSIGPRSRQEWRGGGCDPADSALRCGVASTWFATGRTTLTVRSRTTVTAQKKTRVCSEGPIGQWQGCGCAKVEWRLPGELAHVEVKRDQRGCQIGPARSG

SEQ ID NO: 47712 - protein, 111 aa, Zea mays
  Coding DNA Sequence Number=SeqID_4337
  Subcellular localization annotation: CTP_CleavageSite=24; ConfidenceScore=5.51e-01
MGAIKAKARSTQGTRSRLARAQPRAKAADPGGFTSCPRAPSSNGHAFGSPEAQSSQRSNHGQIATPTDPAKSSLGRHRKLYLARPQGSAPISASEDGLRLARPQGSDSTTT

SEQ ID NO: 47713 - protein, 106 aa, Zea mays
  Coding DNA Sequence Number=SeqID_4338
MAVMDSTSEKMYLCQVPSFLVKKIKLRPGRRLAREESLGVVSPSESIKDLVDVGLLTEDPLTGHMPRHGIHFSKHFCKTESLIIEKPYLDSHITSIPLRVFSLVGF

SEQ ID NO: 47714 - protein, 568 aa, Zea mays
  Coding DNA Sequence Number=SeqID_4339
MGGLGVSDGFARELMRTCAVPGERMSSPRAPGVFGSDAEVMDKDRQGAAQKRQAAVRLVDARPKRQRGSAKAAAPGGGKPPLAAKSGVPASSKASETAAGAGGSKPAKAVPPPSRVAEAANAARALPSAGKRVADFATDICVEDYLGGSDEGQLVMVAPAAATAVAAATPKAKGGALSAGGEVAALAAVKDEAGAASRRLKEVVESLSQVADFANRTASGALTAVVSAEVERLRTQHADAVREKSAADSKCRKLADKAEAKLARAEGNIARERAEQLQERLIALESRVEQAEAAMRAEAERTRTQLADEDFDRDVYKVEDLMVKDSPGALYDRMWGPHGREVALRGERVDDLGALNSALPDLEPTPAEAVSGVALEPTPEAAEDAPDALTSAAAGEDLPPKVVEGAPDAPAAAAPSAEDPAAVAAETTVEAAAEPMAEASAAPGPSQVQDFGPAHATATIEFLAASTAGGGNEYGGSAYEFFDFTDSGSSVEWTEESSEEDLDYFAALDVAAAEASPHAADAQDVPGPSTGRRRRRAIAKRRVSTEERARLRVSRAGRQELLSWPTAA

SEQ ID NO: 47715 - protein, 81 aa, Zea mays
  Coding DNA Sequence Number=SeqID_4340
MTRTTTLGQQQHLTPPYGRVRCRHVSEKVTYSEASPIVEHRDLSPEDFLMEEGAASSVPRGSYRPTPGAAAMHAAQQHTPA

SEQ ID NO: 47716 - protein, 162 aa, Zea mays
  Coding DNA Sequence Number=SeqID_4341
  Homolog annotation: Hit_ID=Q6J9V9; Match level="QueryCoverage=32%, HitCoverage=17%, E-value=2e-10, Identity=67%"; Hit description =Putative uncharacterized protein
MAERYQLPRSCVPPTTRRKEGGYPPSGGLEGGKTRHIREREDMVAFQGGHPPFKGDSPYLRPQPSWAETSPTHSKVLPYGAGAGSHTSCKPAQSRRSQTAVRGTKLRASLLIRGSKAGPSGRVQQPPQSAWAPHPLLVRGSKAGPSEGFNGRLRLLGLHAHY

SEQ ID NO: 47717 - protein, 26 aa, Zea mays
  Coding DNA Sequence Number=SeqID_4342
MRLHTLRDDVVLYPQRCLFLIQGSGK

SEQ ID NO: 47718 - protein, 289 aa, Zea mays
  Coding DNA Sequence Number=SeqID_4343
  Subcellular localization annotation: CTP_CleavageSite=5; ConfidenceScore=5.30e-01
MSFHSLMHRVSPPSKPPDGGYPPSFRLIVGGTQLRGSWYLSAIVRLQGFSSHSPVAPLRWWSPKTVTSSSWMGRGNPGCDPDPALNIEASGGAIALQPYGEDVLQPCRGRQIVAAQLGCNIPPSPSHSRRGRQRGPAGALGSGPLFGFNSWFASLERDREREPSGGRVHPGPWLPLQRSLADSPVDYLNRFTLHELPRVKVTSEHGQRRSWLENENLVGRSLAGLSVSGTVAGVDQPRPRVGLAPLEDGLRTASPSEARSNLAEVVVDAEGAAAPFQRQDPSLQDQIVL

SEQ ID NO: 47719 - protein, 114 aa, Zea mays
  Coding DNA Sequence Number=SeqID_4344
MAWAPEDDELHLTRSQGSDSASAPEDDELRLARPQGSDSALASDDGLRLSRPGARTRPRPRKTDSTSTSKEPPPRLTYGSDRSCHRGAIITLPLASSGYGEQDRRPIWLAPVNK

SEQ ID NO: 47720 - protein, 249 aa, Zea mays
  Coding DNA Sequence Number=SeqID_4345
MGYRGPDSESHLNGTLKAFRGALEGVPHVLVIRALGIEDLIQRLYPFMGRCRFCASNEVLSPLIRDNVDVRLPEQLFRGGRYFLKYGSDKGWVVGSPIEVFNYCRLSDFGDTVPHRLKSFEERTKSFIILSPNGFEVPWLRRFIRKKLEILDKSSAEVTPIVDAVSWQVPEPLQCVLPQNDGQLRRHDVLHCPSSLGGGCIDGQPAPRILLRLIFVDVGDLEIRRPLDGSEARGRSADEREVEDDWPPE

SEQ ID NO: 47721 - protein, 117 aa, Zea mays
  Coding DNA Sequence Number=SeqID_4346
MSHFFSGLINLLLKNGETKHLFLFPLDLLMNGFEVPDFLVQLLLLSPEDFFGGMTKVTTCRRWSNEFTGDRAFHTVRTFISKPKVPKWEKLPMKEHIEKGATPVTAIAVRLKNESGN

SEQ ID NO: 47722 - protein, 82 aa, Zea mays
  Coding DNA Sequence Number=SeqID_4347
MWEPGVLLSLFPLALLGVAIIMVSGIAALIERSVVRGFPYFRGFIPGDVLSRIPFLGLVMTSNVTVHVPMSACLALQGLLPQ

SEQ ID NO: 47723 - protein, 159 aa, Zea mays
  Coding DNA Sequence Number=SeqID_4348
  Subcellular localization annotation: CTP_CleavageSite=60; ConfidenceScore=5.15e-01
MCSVAVLSSGSSSFLIYLMISVLRPFGSDSTCSIALHSSSGPDVTLGCCISWMKMPSGACARLDPNLDRSLGLDHFARSKLYIVSSEFAHPFGCPPHFFSIAEYVSYLKAYNHYDFVIIKIMAQLSCGEEHYIQQLLDLRLSDLGGPKDFTDEVYGMLD

SEQ ID NO: 47724 - protein, 126 aa, Zea mays
  Coding DNA Sequence Number=SeqID_4349
MGPKRQTSNAAWRLGVQLARSVVPLLVGFFCFFFFCRATDWWALPSLDLGLWITDGPGGYARCRWAHCAASFGHWEEGSSARGRSLGRSLGGILACAAVFYQGAVAACIRGRKKISLGRWTHFKPF

SEQ ID NO: 47725 - protein, 52 aa, Zea mays
  Coding DNA Sequence Number=SeqID_4350
  Homolog annotation: Hit_ID=Q9XEJ4; Match level="QueryCoverage=51%, HitCoverage=2%, E-value=3e-07, Identity=96%"; Hit description=Copia -type pol polyprotein
MTTDRPLELLHMDLFGPIAYISIGGRKISNPRNLKGILKMSSKRVRLKDQEN

SEQ ID NO: 47726 - protein, 573 aa, Zea mays
  Coding DNA Sequence Number=SeqID_4351
  Gene Ontology: Mol. function=acyl carrier activity; Cellular component=chloroplast; Biological process=fatty acid biosynthetic process
  Homolog annotation: Hit_ID=Q1W7L7; Match level="QueryCoverage=66%, HitCoverage=91%, E-value=1e-144, Identity=65%"; Hit description =Palmitoyl-ACP thioesterase
  Pfam annotation: Domain name=Acyl-ACP_TE; Domain location=291-559; Score=498.5; E_value=8e-147; Accession=PF01643.8; Description=Acyl -ACP thioesterase
MEWSPGQPLSAGQGQPLSSRPHMHGEERTPVDSFIHLICSAQQQEASYAWPASPGPLSIPGCHALTDPTLSKRVKRSRWTTPGAGVSASASGEKKQSSTGPAPPRPAAPTAAPAKPPNTTTYPPEASSSLALPHRRAANGRVVKRTRRKKHAPTPKPPVPSPSPPAQGSPAPAAPKNGLGERPESLDVRGVAAKPGASSSAVRASKTRAHAAVPKMNGGGKSAVADGEHETVPSSVPKTFYNQLPDWSMLLAAITTIFLAAEKQWTMLDWKPRRPDMLTDTFGFGRIIHDGLMFRQNFSIRSYEIGADRTASIETLMNHLQETALNHVKTAGLLGDGFGSTPEMSKRNLFWVVSQMQAIIERYPCWGDTVEVDTWVSANGKNGMRRDWHIRDPITGLTILKATSKWVMMNKLTRKLARIPDEVRTEIEPYFFEHSAIVDEDNRKLPKLPEGQSTSVAKYVRTGLTPRWADLDINQHVNNVKYIAWILESAPISILENHELASIVLDYKRECGRDSVLQSHTSVHTDCNSESGETTLHCEHVLSLESGPTMVKARTMWRPKRTKAQETVVPSSI

SEQ ID NO: 47727 - protein, 552 aa, Zea mays
  Coding DNA Sequence Number=SeqID_4352
  Gene Ontology: Mol. function=cysteine-type peptidase activity; Biological process=proteolysis
  Homolog annotation: Hit_ID=A3C831; Match level="QueryCoverage=43%, HitCoverage=52%, E-value=2e-21, Identity=30%"; Hit description =Putative uncharacterized protein
DHITYSRRSDRSIQVANTQKAEAEKKKAEIEMKNAEAEEAEKRKAEAEQADKKKAEEAENKRKAEAEVAEKKKEVEAENKRKAEAEVAEMKRKAAAEEAEKKKEEEAEDKRKAEAEKAEIKRKAEAEEAEIKRKAEAEEAEIKRMAAAEEVVKKKADAEKKVDAEEKRIQVAIQKQLKDNIKALKKPVPAAKLKKMFQLQMSKEYAEQRQQYEDRLNMLRQEAKAEIDSLENSIDGQAGPSSSFDDIQFPAESDDDINNLTQPIRLSQDEVSVGQADFSEFQRMIFKRLGDRVLKKPREYISPFKIPRNRPEIPLAKAVALRRKIASDPELKRRILLEFGLLVGLTGEEILTSFSNDTLGESGIIDFFVHCMRHDDIVHKVDSCGYRVFLTTGFYVFVPIKDGAHYFVYCFNFIHKCIDVLDSNDYFLNCSNQEERHKAVFAKIPIIDAAFQKVSNLKLPRVSKWRRPFIDVPKQAGPSDCLFFVWKYMEYYDGDKMTKEINPFKGPIYRCELLHYEIFHPLNQAEIPGSLDKFRIGGRPLPIEWDSSQSNN

SEQ ID NO: 47728 - protein, 679 aa, Zea mays
  Coding DNA Sequence Number=SeqID_4353
  Gene Ontology: Mol. function=cysteine-type peptidase activity; Biological process=proteolysis
  Homolog annotation: Hit_ID=Q5NKQ2; Match level="QueryCoverage=40%, HitCoverage=29%, E-value=1e-24, Identity=30%"; Hit description =Putative uncharacterized protein 9C20.3a
MRKRLRLKVPPIQDVESDDEQDPEFVPGGDGSGDDNVGIVGGDENKGITKTRAIRCSPGKFIKLVNSLFDELKSEVVAKGFGGLLRFKPHLLSRKLLSWLMQKLNPETMKLEIGGGKEIQITEHSVWCVLQLPNVGSDPPPMSDADARALRDELGEQICGKSYRHISGINISVITDRLQKRTLNGELGLRAFFMAAFQCLLFFNTDTRIRIDDVKYTQDIQNMGNKNWCKAVVDRLSIAARIYRKDFAEKGINTPISGCGIFIAMLYVDNLQHGLYTSPFSIPRCAFLDSKMIDAIANKDLRGDVPPGTTEFGHLRLRSITDTCYGVPIGALAILHAPVPAPAPVAVSNPTATPNPVAAAAPTRTSADVLGTSHDPACHASFNIQPPVFYQYPSFRSSFGQSITDLVGRSRKSDALNILKAFDESTSEAQSYAQKAAKYSTISRDLMAKAHHECYTGIQKLIADAIVEKRAAKERRRKVKNDPRAGAGAGTSSIAPEDQSRGGDGEEIIRSPVAIDTRAGAGSGTTSNVPEDQSGGVDSEEIQLDCSGGDLDDSLDFMRTPLCGDDIDLEEGNLNRTPPDLRGAVRSLDDILQMMYSPQHFASIDGESPPNSQPTRARRIAVRKRKASSNPHGNDQRPMGAPETEEEPLSRDTGMQHPTAQDHITYSRRSDRSIQVANT

SEQ ID NO: 47729 - protein, 121 aa, Zea mays
  Coding DNA Sequence Number=SeqID_4354
MGPCSEGIECPSTNDCIVGVFHVNNVKDNLFSPCVVDIAKGLSKYDIRCTACVNQNIMGQKSLDDTRYDHSIIVRVIFELKVLLGKGDWDVRPFGLDEGSLHPNMLHPSLRFVLLLLVSRL

SEQ ID NO: 47730 - protein, 62 aa, Zea mays
  Coding DNA Sequence Number=SeqID_4355
MAGPSATWQLEAPGLLTKSDCPPSKPDGPHYNSGTVPKADFSGQDYGRSSPKARTVRSAKEQ

SEQ ID NO: 47731 - protein, 331 aa, Zea mays
  Coding DNA Sequence Number=SeqID_4356
MSPDISVSVPSSVGFPLRRFFSGCSRLVVGDGGRLHSPNEEDIGAHEGDDLTNYGAFGPFVRSFILLVDPGDICLPQAPDLWADFEINGPKIPGPACGVAPELRVDFCRQSTRRSSLQTCTLSAIFGFPLILAGISFLSWSIHCAYCTDVTVLENILIISGCPPNGCRQGTACVFTLLATAFCFISSPSFHFRHGQEQECSSSHHSGDKRKREPTPPSEDFGDSEYSEEEFSSESEGSLAPASPPVSSDDSDDSQGIAAEGSDELKYSSDEEDSSGSSEEGSGGDDGDGDDDGGDDDGGSGSGKGGDGSGKGGGGGSGSKGSSKGSNKASG

SEQ ID NO: 47732 - protein, 35 aa, Zea mays
  Coding DNA Sequence Number=SeqID_4357
MEFGDSEYSEDEFSSESRGVSGSHPPRNNAERCEG

SEQ ID NO: 47733 - protein, 90 aa, Zea mays
  Coding DNA Sequence Number=SeqID_4358
MKKFMYSHLHPNVPANSVGMEAGPCHVAGEALDGALDLFQYPPPSMKLVDEWSSTPESQDIDVILGMNWLAQRKAVLNTDMRTIRLSYDQ

SEQ ID NO: 47734 - protein, 86 aa, Zea mays
  Coding DNA Sequence Number=SeqID_4359
MASPLSTCGDEEPPQASKGRTCDRSNKCGRSASQQECDDHVKTPGATAYGPLRTRRLSKHRGKISLKPKGPSNASSGELKMSLSSK

SEQ ID NO: 47735 - protein, 123 aa, Zea mays
  Coding DNA Sequence Number=SeqID_4360
MPLENLVGVASCLCGFLWLAPSSPMLKGIDEQRYGFARAGWKWRAEYELWRGENSIYKNLNNTIAKKVYEIPLINHSMFKISVKFAMSKGILPYFYKSLTTEIYVAGEKPCHNYGSKLNTCLT

SEQ ID NO: 47736 - protein, 120 aa, Zea mays
  Coding DNA Sequence Number=SeqID_4361
MSLTQLKGMCIGQPSQDNSDHMVKKLETGTTVACTKSLEENVKDLRIAKRREQKKKINTSSKSLNHASIKDQHAVDTDLGGSVLPTRARRLDGSFTAARSPPCLPPLATALSPAPARSAA

SEQ ID NO: 47737 - protein, 87 aa, Zea mays
  Coding DNA Sequence Number=SeqID_4362
MGRASLVLTDVAASTALAHAVEKRGRQDSETAESASESGVEADAEETERREASSAAGIVGGGEEDGRGRCYARALIRSRSDKDLHPY

SEQ ID NO: 47738 - protein, 68 aa, Zea mays
  Coding DNA Sequence Number=SeqID_4363
MSCAFDDYYIKDYGIIFGTIAIVYGDAYLMTDNVRGNFYRQHNDIVRIARNFIIKMNLFVRQITIRVN

SEQ ID NO: 47739 - protein, 239 aa, Zea mays
  Coding DNA Sequence Number=SeqID_4364
  Gene Ontology: Mol. function=protein disulfide oxidoreductase activity; Biological process=cell redox homeostasis
  Homolog annotation: Hit_ID=Q941V7; Match level="QueryCoverage=61%, HitCoverage=58%, E-value=6e-42, Identity=61%"; Hit description =Glutaredoxin-like
  Pfam annotation: Domain name=Glutaredoxin; Domain location=94-160; Score=46.8; E_value=7.9e-11; Accession=PF00462.15; Description =Glutaredoxin
MWLSWVRRSKTSGRLTQSPSFSAPTVSSPTGKDHPGIGAVLDDDAAVGSGDGAGAGSKIVLHRARSASRLRACKSFAAAAEAAAASVAGERHVVLYFTSLHAVRATFEGCLTVRTILRGLRVSVDERDVSMDAAYLAELCALMRRDRPSLPQLFVGGRLLGDAEEVLLLHESGELRRVLASAVQAAPAPCASCGGSRFVPCGACCGSHRRFSDKTGGFRVCTSCNENGLVRCAACSSGS

SEQ ID NO: 47740 - protein, 185 aa, Zea mays
  Coding DNA Sequence Number=SeqID_4365
  Gene Ontology: Mol. function=transferase activity
  Homolog annotation: Hit_ID=Q6QP44; Match level="QueryCoverage=31%, HitCoverage=7%, E-value=3e-15, Identity=69%"; Hit description =Putative aminoalcoholphosphotransferase
MEKSPRSIPIGSGAARADTRKVVAEGAEGSRRTGIVDMSKIDYDTSRLRPRHRLCRTHDPAQRYNRVWDGLLDAIRQMQLSADELRKLSRRNHVPEYLDMLHKNCLVNAMSDVNEIAKGLDSMSRDLEEVLIGPQPLLEDYKALGMYDDLKTDVNCDCTEQCASDEDNSSFDSDEIPDRRMKGSL

SEQ ID NO: 47741 - protein, 215 aa, Zea mays
  Coding DNA Sequence Number=SeqID_4366
MALRNCRRNQCQLSSVSDSKNPYATGNIQLWPSTAVADEWCQPWWELGIGGSKSVTVSTGSSRQPGGASNQELSTSSIVRAASTNGDGLRASPVSLPTTSPGGNDEDNSPAAWTARSSESSSGEGTAGGCIGTKKELDERRNQSGSRTEMERKKGASSRSVLKNRGRPIRFDEQEIQIFNVKEGHTRGNSSRYKLILSATDKSAHDDKFPNESLL

SEQ ID NO: 47742 - protein, 531 aa, Zea mays
  Coding DNA Sequence Number=SeqID_4367
MRRGLDVLLVSWKLSGNTRTHKDLEWFGPPEREASCRRDDEYRAPLGLGALFVNRVDMRAVCWGLHDVMGLASCIARWLMSWATSHAVAAGLCLSGKRREGPGRVPAPDPYSSRGPPRSGTLLRPGPYSEGPGAFPRDPAYLLGSSGLTCPMWWGSVSFSVWPKGVPRVRRLHAVEEVFCGSPEKTWHWRERRCDFPHPMGCAGVLWGIRVRVAPSGDLTAGELALMVVLSVLSSSCSCWRSATPWGGMTTSLVVERSELGCGLPPALSFKDVHHPCWGGGQAELGSAFRMGWWPASSSIIRGRRAFTSLGLAEEANFGYAGPANCRCHRPPRARFPGLDGLGAAFDAASYYLVGVWLPVHYTGDGRAVRSEDGSEDLFARTGAVAIRRYGTEVAAAVGAEVVASAGEPLGASYPAALLVWRLDLLRLDTSVSEKVVNNSREAASSRAVERAGPWYGTRLSGYTGFGPPHETNAKRPHRLQTTPWNGVPFSGAGPQAVGPPNFRIGGPKLQAWLLNSDVVMSEQIEVVWVG

SEQ ID NO: 47743 - protein, 102 aa, Zea mays
  Coding DNA Sequence Number=SeqID_4368
MESSSTSTSSHHAAAWGLPWLASMESRGGAAAGAGTATTKGSWSHEEEGREGRAPPLERVGAMEAGLLLHGWEERRMAWGEQSELEFGRTEDRMINMTESLI

SEQ ID NO: 47744 - protein, 151 aa, Zea mays
  Coding DNA Sequence Number=SeqID_4369
MGKNNKRKHEPTPPSEDFGDSEYSEEEFSSESEGSPAPVSPPASSDDSDDSQGIAAEVWTYIRAVEHSGLEGSDESEYSSDEEDSDGGDEDDDDDDGGGDDGDGDGDGDGSGWGGNGGGRGGDGGSRSGNGGSSWGSGGGGSSKGSNKASG

SEQ ID NO: 47745 - protein, 97 aa, Zea mays
  Coding DNA Sequence Number=SeqID_4370
MAGGIKLAGAKGKWLAGEGLAFERNPERHWGVPQKTDGRLAAARSDCDDNDPRSGWPNCSSAGLRVGAAAILPSPTPTLEGRGQVQRAGGSKRGWWR

SEQ ID NO: 47746 - protein, 334 aa, Zea mays
  Coding DNA Sequence Number=SeqID_4371
  Homolog annotation: Hit_ID=Q6J9V9; Match level="QueryCoverage=38%, HitCoverage=45%, E-value=2e-56, Identity=84%"; Hit description =Putative uncharacterized protein
MPRLLDCRTSAATRGSPTRDPTVPIRCGDHGGALSHSVKTTHPSRNSNSKGTQHIWQTKRAPFRLRHDDRLKKGIEKRGHFERILLSEGSGPRALLLIRGSKVAPCGVRQPPQSTRAPSPLLIRGSKAGPSEGFNSRPRAHRVRDDPGYVRYMAKARATLPTYPRTFPRPAGTICNGIPPEGGTEPSDPIKWIRVQQIPCSHFATGSSASSDLRPRPQPRPREKVSASPDPRPRPQPRPWEKVSSSPNLSLGLGRSHILARPQSQPQEKSPPRPTSASDRLRHRGYIITLPLASCLRLRRNKTGVPSRLLRTPCRNASCASTGLKYFSVGHVST

SEQ ID NO: 47747 - protein, 171 aa, Zea mays
  Coding DNA Sequence Number=SeqID_4372
MTEKKRRQTKTDGAKAPRRREQTKQAKALHVPIRARNREGLSDCRRPGTWSTKASCSQPRVVKTACPCKTALGRLVPLHRIIPVLPLFGFARPRVSKFQHLAPTVRASKNIPAMAPKKATSKAATSIDDAAKAALLAEKKGRQSSLTIYLIKPLGMRQSTRSDIAKRIHQP

SEQ ID NO: 47748 - protein, 88 aa, Zea mays
  Coding DNA Sequence Number=SeqID_4373
MAHEIIKKSEKDTHDASEATKAAEKAAELERRIAELSPPLEPFESLVDPEAKESTEIINMAESIMDEVVTQLLTEAADKVLKEEEYIL

SEQ ID NO: 47749 - protein, 169 aa, Zea mays
  Coding DNA Sequence Number=SeqID_4374
MATTPNLRSTNLAFPVLHLPTLPFSHDCFVDQMLEGREGVVHQLVMEGINQSSQEEGTLLQGEKLLLPHYHQSLGHMVAMEVVPEFFPSDGFRVGRGGEALVASRLAPEAEAVVAAAAPTASLLGSDQLLGLLESASGTFAQWSLGVAVANAAAELPPLGVPAILAEHA

SEQ ID NO: 47750 - protein, 81 aa, Zea mays
  Coding DNA Sequence Number=SeqID_4375
MAMACIRCTAHKSMIPFLPSRLAERPLRFMVPGQSSHLERLHRRLHEEQERRCQEQEQEQQDSSPSPQQEVESKRPPSPVS

SEQ ID NO: 47751 - protein, 117 aa, Zea mays
  Coding DNA Sequence Number=SeqID_4376
  Subcellular localization annotation: CTP_CleavageSite=49; ConfidenceScore=5.00e-01
MDLRLFTLQLQLWLGQPVCKYYKLNSKFKGKARLQKGNSCAPRSCQGTEVAMPSYNLVKIINFTFNMLEGTKQVFSRRSKLFATGSNKMEYLFQLLNASIAKLQAFILKICQGFFQL

SEQ ID NO: 47752 - protein, 144 aa, Zea mays
  Coding DNA Sequence Number=SeqID_4377
MTRGDGGDSGGPGPKLRAEAAAPGPCIPDDALVEMFGLLLANSLHRFKCVSKIFSRLRGISTTWSLSPLQLSFTKKYRVREGSKHTQIHSKMRTHTAKTRAQKTILKFSLERSSNHLERQTNAQRLSVDDQDCSKVAWCTPPCA

SEQ ID NO: 47753 - protein, 345 aa, Zea mays
  Coding DNA Sequence Number=SeqID_4378
MASLWGALRRSTSHASKVSGRGGCFDVAGVVVGVGEVRFVLPDGVGKHGAVDAGRGRGYMVEGVAVFAMEEAVESARRLRTPPDPCREFHFRGPGGDIPGGEGRQQRGAGWRCCALAVDCGRLDRSLAAESSSTCGWTVEHLWASFETQPWLVELFRIWRIFQTADIIPGEREFGQGVGVWAVPLEVEQELVPEASLGINGQRRQPGEPGESWAFEGDDERLGHCGIIPSGRCNGDLITHYVLCRVSAAVVLGIGPCPEVGGPRHHLQMWRQGTSLVEVVDPLEWRGVREGVVALGETRVFRLCGLLHGWPMLQAEVAFALHQRDLPLEVLGLLLFIAYHLPHLG

SEQ ID NO: 47754 - protein, 193 aa, Zea mays
  Coding DNA Sequence Number=SeqID_4379
  Subcellular localization annotation: CTP_CleavageSite=74; ConfidenceScore=5.04e-01
MLGALESKGCAHLVRLPAAYMAVRPFTRWSGRKWRNARNCWAVARTARDAIVRLQGFSSGSPAASPRHRSPKTVTTSPWVGRSKPGCGLCPSLSFKDVHHQSWGGECAELGSVSARAAVLGRRRRRHPSLEAFASVVGPTETRQRAGTPFAPYDIRRRPATRSSHRAASSSMETHDVGHSDTYKYPRTVPVRG

SEQ ID NO: 47755 - protein, 373 aa, Zea mays
  Coding DNA Sequence Number=SeqID_4380
MAGSKDHTKISTTNIIKLAMEALPADDQRPFEDLIMRDEKEGNDGPSCDVVGPSGGSSEVEVESVFSRSRLSPSPLGRARRRPSAEAEAESEPWVGRVRVRRLPGPSPSPSPGSGEAEFVVFQGRARVRALGRARRSSSSSRAEPESEPWVGRGGVRRLPGPSPSPSPGSGEAEFVVFRGRARVRALGRARRSSSSSGAEAESEPWVGRGGASYGARGRNWPLRQKGARQDKVSSHLCIKCSCDTVGRRGDLAKVASWRRLGLGRAEGVSVARGGPRARRKSSGVGFPCPRLGSGEARSCPLSGPSLDLIAPIRPLHLCADGGYQLRLGVLGVPLIMVPDTPEASEEWFDSFEVLMRFAMLRSVWLFPHASWP

SEQ ID NO: 47756 - protein, 301 aa, Zea mays
  Coding DNA Sequence Number=SeqID_4381
  Homolog annotation: Hit_ID=Q6QP54; Match level="QueryCoverage=13%, HitCoverage=14%, E-value=5e-08, Identity=77%"; Hit description =Putative kinase
MEIKTINKKAIINGEMRKIKTMKMKRKFNHQEAKCLTQESTEPFEEIIRVKDALKDPDWVMAMQEELNDFKRNEVECACSRGVTSVHAGEGSERPQESACLVLVPARPTFSKKALVLPFIVVRRGSRMMMALLVDVAGLRPRSGDMGAPPKPRLGLSSVAEAESEPSGRARRRSFGRSQGGVRALGSGEAEFRRLQGLSPSPSPRVGRGGVRRLPGLSPSPSPESGGAEFAVFRVLARVRALGSGGAEFAVFRVLARVRALGSGGAELAMAPLARSDCLSDSLCRVSLQSSGTGGAVLLSD

SEQ ID NO: 47757 - protein, 568 aa, Zea mays
  Coding DNA Sequence Number=SeqID_4382
MEVVELVPCARNKWGNWWEFWFYVSEGTVEDHPGLRVAVMCSHYYVVYPQFEVAEDDEEEGALRCAVRMSSGRDLVEEFVGMPSQDALPWRDVGVKSLPSRWILHGRDPAAFVCEAEDGAARIVGRYVPKTEGLRSWDIRGSNGRLNRVFELNRLPYGGYPGEDAVDRRGKKPMGVDADMCGPRGKDVFARAPGVFGANAGVMNKDRQDAAQKHRAVIRLPDPRREAKRARWSAKAAAPGGSQPTPATKPAAPGSSKVSESAKAVVAGGTKSTPGEAAKVRELPSPGKRVADFDTNISMDDYFVGNVSRGGWGEGWRFLRERRDFVGRFRQGRGGHHVPPAEGGIATSKSRKLSWTSVFAVSLGIVDSCDSVKQRLHDRVTYGLAEKVAALEAEKIDLWRQLAKLARAEGSLASQRAEEWEVRFNALRGRVDKAEASTRSEVERTLAQLVDSYRELGARTADFEVPDREAGLRFLEWLQEELLVLPTIVEGFMSYASLVTCEGAMNALSHEGCRHYEVFDQSDESFQREIFKAEDPVVKQSAGALFDRMWGAHGQEAVRERSDRAREQ

SEQ ID NO: 47758 - protein, 128 aa, Zea mays
  Coding DNA Sequence Number=SeqID_4383
MRSAARGLLQWAEFYVGLRVGRGRETERLVESLRLAACWTKGGNCRPLSLRWFGEIGEGIERRVASSPSPQHLPSEGPVRLSHLVPKASLDGGDAALARSGFAGVFDVTVDGRGTVGLRVSQSVASCV

SEQ ID NO: 47759 - protein, 113 aa, Zea mays
  Coding DNA Sequence Number=SeqID_4384
  Homolog annotation: Hit_ID=Q6J9V9; Match level="QueryCoverage=53%, HitCoverage=20%, E-value=3e-16, Identity=73%"; Hit description =Putative uncharacterized protein
MAQQCQPSTSVMGQSAAGEGAMVDTAKNGPAVMAAAGTGKGDIPKGILLREGSGPRALLLIRGLKAGPSEGFRQPPQSTRAPRPLLIRGSKAGPSKGSTAALEHAERGMTLGT

SEQ ID NO: 47760 - protein, 121 aa, Zea mays
  Coding DNA Sequence Number=SeqID_4385
  Gene Ontology: Mol. function=carboxyl- or carbamoyltransferase activity; Cellular component=ornithine carbamoyltransferase complex; Biological process=amino acid metabolic process
  Homolog annotation: Hit_ID=Q8SA97; Match level="QueryCoverage=59%, HitCoverage=12%, E-value=2e-10, Identity=53%"; Hit description =Ornithine carbamoyltransferase
MSWPSEERLSPVEAQLSGLLDLADVSLLPPRSGEAETPPRSRLRPSEDAIPPGVEVEAEPWGRARRSPSSEAEAGAEPWGRARQSPSSEAEAGAEPWGRARRRLLLRPRPKVGRGGASCGA

SEQ ID NO: 47761 - protein, 43 aa, Zea mays
  Coding DNA Sequence Number=SeqID_4386
MTTDRPLELLHMDLFGPIAYISIGRRQISYPRDLKGILKTGSK

SEQ ID NO: 47762 - protein, 88 aa, Zea mays
  Coding DNA Sequence Number=SeqID_4387
  Subcellular localization annotation: CTP_CleavageSite=61; ConfidenceScore=5.06e-01
MPSMEAQAHASCNRRAECFVHATAPPLAPPPRLLDYGTSTATRGGASGRRSRRRFAFAIITAPKKGPGKGIPRKGSFPVKEPGSEPPY

SEQ ID NO: 47763 - protein, 234 aa, Zea mays
  Coding DNA Sequence Number=SeqID_4388
  Subcellular localization annotation: CTP_CleavageSite=30; ConfidenceScore=5.40e-01
MSSRSLMHRVFPPSKPPDGGYPPSFRLIVGGMQLRGSWYLSAIVRLQGFSSASPAVPPRRRSPKTVTTSPWVGRSKPGCDLGPTLSFKDVHHPRWGGGRAELELYLPRGFVGHPLLRRSRERALTGPSGGSDFDNVGLVDGGRRQPQRVELVGLAPGAPSCQKAASAPYSPVGCLNRFTKRESPRVKVTSESGDPWTASPSEARSDLAEGVVDAKGAAAPFQRQDPSLQDQIVL

SEQ ID NO: 47764 - protein, 134 aa, Zea mays
  Coding DNA Sequence Number=SeqID_4389
MGKNNKRKCEPTPPSEDFGDSEYSEEEFSSESEGSPAPIPLQVWTYIRAVERSGLEGSDESEYSSDEEDSDGGGEDEDDDDEGGGGGDGDGSGRGGSSGSKDGDGGGRGGSSRGGSSRGSNRGGSGGGSNRASG

SEQ ID NO: 47765 - protein, 153 aa, Zea mays
  Coding DNA Sequence Number=SeqID_4390
MALNKGEGRGPAKEEKLLLEKSRRHAGQQRRRAMAGRCLSAEFLRRERDGVGEGMGRDAVDLGCLEANNDGGLGELGHGAPARREEKAPCCRTSWIRGRSPWGPCSRDGVLLHPREPRGEKGAVAGRPWEGRSLAPCACRTREEEEPCWLLMA

SEQ ID NO: 47766 - protein, 260 aa, Zea mays
  Coding DNA Sequence Number=SeqID_4391
MAPRGSFYSPKRPRSRWNSIRKALVAFWPWVHRTVRCTLDTSQCNSHVSLDWLLSASGAPDRPMGGIGQSDTVPTRLSLSRVVKVLCVGPNHDSPQPQATTLGPQQRLTPPYGRIQSRHVYRESDILQGINSESGPPWESAGPLDIQSGPPRLVQDLHECKPDPWNGIRTPRMGSRPPTMGSQGPRTEHTQALNRTQAGVRCRHVSGPSLVGSGPVRIHSCPLLKRRPVAATWHTACGLSQRAEPSMTPLGYARLRIHYR

SEQ ID NO: 47767 - protein, 46 aa, Zea mays
  Coding DNA Sequence Number=SeqID_4392
MAMMGSTSKKMYLCQVRKRQIFAAFVPRWYPKKKVKTEDPGGSVLH

SEQ ID NO: 47768 - protein, 183 aa, Zea mays
  Coding DNA Sequence Number=SeqID_4393
  Homolog annotation: Hit_ID=Q7XBD0; Match level="QueryCoverage=21%, HitCoverage=15%, E-value=3e-07, Identity=67%"; Hit description =Putative gag protein
MSEQSTIPTQMMIGPIILRAASIAHRLWESNKLPIGHQPREAEEGEALEEGMVISPVNCSTYSVAKTRDTPQGRAKSRSRSRRKSLKPKHDRTSRSRSCILLLLLYVYLGVCGQSTAYDLCCFSKSFPSFLGSVATTTTTTSACPIHNQQPEGHHQVQQKCDLREESKARTVNNTVPESRHIY

SEQ ID NO: 47769 - protein, 148 aa, Zea mays
  Coding DNA Sequence Number=SeqID_4394
MGTILGKSTIYFVEKTRATIQEHVKSLSKSKKKLQKPKPRKISRSRSCTLLRVIHPTYQNMWVIIPQLLLLRLVSRKFLGHSFQLRRRYSLPTHEAISQKGVNRLIRSEISGRGPKLAQLTALCQSQNTYIERYPTFGTVLHSLSFSF

SEQ ID NO: 47770 - protein, 279 aa, Zea mays
  Coding DNA Sequence Number=SeqID_4395
GDVGETPKPRLSLSSVAEAESEPLGRARRKSFGRGQGGVRALGSGEAEFVVFRGRARVRALGSGGADPSPSPGSGGAEFAVFRVLARVRALGSGGAEFAVFRVLARVRALGSGGAEFAVAPLARPDCLSDSLCRVAPQSEWRRRRCPSVRLLYADGGYQLRIRRLEAPEPLHRARGRSGTDSTFYIRPYVAFPQGGGGSAPCYPRWAPNMVSPVSCKRVTRVGVRAPFVGGRLGAQRHAQKYLRVICRTRSPGDGVRGLDASLRWDSVTRSFPLVSEMS

SEQ ID NO: 47771 - protein, 333 aa, Zea mays
  Coding DNA Sequence Number=SeqID_4396
  Homolog annotation: Hit_ID=Q6QP51; Match level="QueryCoverage=51%, HitCoverage=90%, E-value=4e-17, Identity=36%"; Hit description =Putative growth-regulating factor 1
  Subcellular localization annotation: CTP_CleavageSite=65; ConfidenceScore=5.18e-01
MDQSAVGEGAAIDMAKSGPTVMAAAGEQKQRSNRLQAHVPSWGSRRALSHGVKTTRPCSVPRTARATAAPRTTRPVPLTPRQGRRHLWHAKRAMLHLRHDDRVKKGTRKGDTPKGILLCEGSGPRALLLIRGSKAGPLEGLAPRKGSTAASGHSGSAPTTDQGFEGWPPEGFDSHLRTHRTRDDSGYVRYMAEAQATLPRSKLRPLKGHNLASPGPSLGQEQQTQENSVACSTPTVVPPARVRLTAAKSSLGRHRKLHLARPQGSDSTSTSEDGLRLARPQGSDSTSTSDDGLRLARPQGLDFTSTSEESPPRPTLGSDQPRHRGPHHYPTPS

SEQ ID NO: 47772 - protein, 30 aa, Zea mays
  Coding DNA Sequence Number=SeqID_4397
MASGWRVAASIGAWVQIHETLQHGCVTKCK

SEQ ID NO: 47773 - protein, 327 aa, Zea mays
  Coding DNA Sequence Number=SeqID_4398
  Subcellular localization annotation: CTP_CleavageSite=47; ConfidenceScore=5.09e-01
MRLILRYLCLTCGGVRQQGVDQTPYTSTKEAGQGTTTRPLQSSTSFRKSAIVSRKPQCRDPSSDRHHSKISPRTSLHRPLPYCPCHFRVKRSDQGHNLPETQDSRHQDDLQVLVTSLLFVAIQTNMLLFFESKGSKLQISGLRCKVLLHRVDRRLILVFVRVSFIKVYGEETSFCRLLLTLFSSTPPWGKSKKVRSSSHHSDDKRKREPTPPSEDFDNSEYSEEEFSSEFEGSPVHASPPASSDDSNVSWGIAAEVWTYIRAVERAGLEGSDESGVSSDEENSSDSSEEGSGGDGDDEGDDDGGGDDDGDGGRGDGKGGSGRSKASG

SEQ ID NO: 47774 - protein, 248 aa, Zea mays
  Coding DNA Sequence Number=SeqID_4399
  Subcellular localization annotation: CTP_CleavageSite=62; ConfidenceScore=5.45e-01
MYLELILRRQAAAPPFLSPSPSRERPPRRCRARAQPPPSPSWAPVPVPERHRHPRRPPPRPRARAPPSPSPSAPPSPSPSPSPSAAEPISECATVPFPVPEPERAAVPISECATVPFPVPEPKRHRLRGQAPPSPSSSPSAAEPERRVRRRAHLRALDPKKRLSPVVYHLPLFVGFTDGWKHLVIANDLRVEDVCELVKGPDDADIREEKRTDEAGAALNFVTTHPDIVHRLTIVWPLNKLADVFNPK

SEQ ID NO: 47775 - protein, 84 aa, Zea mays
  Coding DNA Sequence Number=SeqID_4400
MRPLLSLSHLDFPRSNLPLPLPTLSPWCPRDWRQRSPEFGPRGGNETDGFGYDYGAGCQHCNHCSGEDEAVEGDFQEFQDYDEF

SEQ ID NO: 47776 - protein, 283 aa, Zea mays
  Coding DNA Sequence Number=SeqID_4401
MARIRCTACKSMIPFLPSRLAERPLRRTVLGQSSHLERLHRRLHEEQERRRQEQEQEQQDSSPSPQREVESERPHSPAPQPEMPPAPPQGIPAAGGDPDGDDDDAGGSSSHGTEISKEPEPEGWIARPITRDAARGCHFHDALDTLLRRAFDRHTCGVADGLDLKYYPRRSTSSAGGVIASPAGEGNPRLNSMVNLAAVLNTELDYALTSWARFGQRLRNCILSAQHASIWMVVLLPLSGFSTLTIHRLVVTSTMVPQTTGPGEILIPRSTESKSAIMLSSVS

SEQ ID NO: 47777 - protein, 119 aa, Zea mays
  Coding DNA Sequence Number=SeqID_4402
  Homolog annotation: Hit_ID=Q8LMF2; Match level="QueryCoverage=47%, HitCoverage=6%, E-value=5e-07, Identity=43%"; Hit description =Putative uncharacterized protein OJ1325D05.18
MLSKTFFVTCIKSMLWQISISFQYGSAYRFYWKDLGGEHPEDKPNLSISLFPYGDKQPPGTVLCSYYVCEWCRVTFHYMVNREDVPKSKINAEWLERDMVSVGVAKVAVHHKRFLEPPV

SEQ ID NO: 47778 - protein, 206 aa, Zea mays
  Coding DNA Sequence Number=SeqID_4403
MGMGRRGRGLPHRFDGKRKRAPSPPSKDFGDLEYSEEASSEYDRSLAPASPVASSEDSDDSMGLSAVARAYWRSIEHAGLGGSDDSEEVSSEEVDSSDSSEEWSGGEGDGGEDDGSSGDNDGEGGGGDNGEVNGDSKGDDNSDCEGDVDSRGDGSKGDGDSSKGDNDGGKGDGDDSKGDGKGDGKGDGDGGKGWERLTHNESASSL

SEQ ID NO: 47779 - protein, 123 aa, Zea mays
  Coding DNA Sequence Number=SeqID_4404
MMLVDYTMVLDGPSVSVEGPTQQVVESIMEVTPASGVKSDGSSDPPLRLRLLRALRVVARTATDVVVVSVSVSVRVSSSSGMHCGGDDAVSPGDWTDLAPYDAVGAPPGEKAKRGSQTYVQCT

SEQ ID NO: 47780 - protein, 93 aa, Zea mays
  Coding DNA Sequence Number=SeqID_4405
  Gene Ontology: Mol. function=carboxyl- or carbamoyltransferase activity; Cellular component=ornithine carbamoyltransferase complex; Biological process=amino acid metabolic process
  Homolog annotation: Hit_ID=Q8SA97; Match level="QueryCoverage=88%, HitCoverage=21%, E-value=6e-15, Identity=50%"; Hit description =Ornithine carbamoyltransferase
MALPVDVAGLRPRLGDAEAPPKPRSSLSSMAEAEPEPLGRARRRSFGRGLGGVRALGPSPSPGSGGAEFAVFRDLARVRALGRAERSSPSSGT

SEQ ID NO: 47781 - protein, 133 aa, Zea mays
  Coding DNA Sequence Number=SeqID_4406
MSNRLKVMKKKIKKMSHLKRRTRIKGEMKLIKTRKMIKKFRVKDRHTQESTKQSNEITPIKDALRDSDWVMELQEEHNNFTRNEDAKPIKTPMGTNGHLDLDTGAPLLYNSPDCPVHQQSNGSFAQWSTAQCP

SEQ ID NO: 47782 - protein, 342 aa, Zea mays
  Coding DNA Sequence Number=SeqID_4407
MHCVLPPSERPDGERPRCFRLAVVGGAQLRGSWYLLATTRLQGFSSGSPAASPHRWSPKTVTTNLMVGRSKSGCDLCPALSFKDLHHPCWGGGRAEPELYLPHGFVGHRLLQHSGERALTGLAEGADFDNAGPSGRKRRRLQHAWFAGSAGSGTTSGATSHRWAECGYLPAIRVAVALRAPGDRPRRRALLGWRSCSWAVLPLLRHDAFARRSVLARPGVLEWGSACGQVAAVVGAEVVAAGEVLVADEIAAAIRAPGLGSLALIACPRPSSGDVGEGLIAAASALRSSLLLSGRPERRSLSLLPEWAAVSHLGFCRPAGLLMWGVVRTCGSGTGVPFVMAP

SEQ ID NO: 47783 - protein, 421 aa, Zea mays
  Coding DNA Sequence Number=SeqID_4408
  Gene Ontology: Mol. function=structural molecule activity; Cellular component=protein complex; Biological process=microtubule-based movement
  Homolog annotation: Hit_ID=P29512; Match level="QueryCoverage=37%, HitCoverage=41%, E-value=4e-70, Identity=73%"; Hit description =Tubulin beta-2/beta-3 chain
  Pfam annotation: Domain name=Tubulin_C; Domain location=14-120; Score= 123.1; E_value=8.2e-34; Accession=PF03953.8; Description=TubulinFtsZ family, C-terminal domain
  Subcellular localization annotation: CTP_CleavageSite=51; ConfidenceScore=5.05e-01
MSDVTCCLRFLGQLNSDLRKLAVNLISFPRLHFFMIGFAPLTSRGSQQYPSAMFFGKMSTKEVDEQMINVQNKNSSYFVEWIPNNVKTSVCDIPLRGLSMASTFIGNSTSIQEMFCHVSEQFSALFRRKAFLHWYTGEGMDEIEFTESESNMNDLVSEYQQYQDAAADEEAKYKDEEAIQDESGVAYEWVVTKKSGYCSKGDIIALFKKQPEQQRPDRGLMVLGQGEPASRGARAGNSRPDECKEQGAGRPSAIGDGACASLRLEGESRPQGREHRGARGKTPWGSSTRGAVLQEKIQGGGGWRESGKLTAQRKTSATGNQRAAQSELGGRGAMDLRSREGTGREEKGKDEAKGLRSGQANDARRKRREREARGCASMEMAARRVSRGTPRWSLSRGKLHAWKIRLQRTATRRGKIKAQLE

SEQ ID NO: 47784 - protein, 55 aa, Zea mays
  Coding DNA Sequence Number=SeqID_4409
MGRLEPRAEWESRLVGKLCNLYRVLETGCPHYTQCSGGDVGNMEDFEEFQDYDEF

SEQ ID NO: 47785 - protein, 92 aa, Zea mays
  Coding DNA Sequence Number=SeqID_4410
MRIGRHGSGGGGAHGGWAFGREVRCGREVRWGARCMRGHEVRCGGDGARHAGAQLMDGIGNRTVGMEAGAWLCQVYTIVLRKSRDWVIGVVC

SEQ ID NO: 47786 - protein, 169 aa, Zea mays
  Coding DNA Sequence Number=SeqID_4411
  Gene Ontology: Mol. function=carboxyl- or carbamoyltransferase activity; Cellular component=ornithine carbamoyltransferase complex; Biological process=amino acid metabolic process
  Homolog annotation: Hit_ID=Q8SA97; Match level="QueryCoverage=48%, HitCoverage=14%, E-value=8e-12, Identity=53%"; Hit description =Ornithine carbamoyltransferase
MGRREAEREGGKRKERIQVYNGGWCDVVAVGGVLEPGGGTAVGAVESLLTSSCFRKGAESRRRHRVCGAPSLPFWRSEPDGTPVLFPVARVRGRVMMASSWGRAERSLSSSGAEPKSEPWVGRSGVRRLPGLSPSPSPGSGGAEFAVFLGLARVRALGRAERSSPSSGA

SEQ ID NO: 47787 - protein, 531 aa, Zea mays
  Coding DNA Sequence Number=SeqID_4412
  Gene Ontology: Mol. function=aspartic-type endopeptidase activity; Biological process=DNA integration
  Homolog annotation: Hit_ID=Q94GR9; Match level="QueryCoverage=61%, HitCoverage=16%, E-value=2e-11, Identity=23%"; Hit description =Putative gag-pol polyprotein
  Pfam annotation: Domain name=zf-CCHC; Domain location=446-463; Score =28.0; E_value=3.4e-05; Accession=PF00098.14; Description=Zinc knuckle
  Pfam annotation: Domain name=zf-CCHC; Domain location=87-104; Score =27.0; E_value=7e-05; Accession=PF00098.14; Description=Zinc knuckle
  Pfam module annotation: Pfam domain module=zf-CCHC::zf-CCHC; Domain location=446-463::87-104
MYMHINDKDGSSSKRKDLALKANQENKGKAKMKIEEESSSDDDLDANIALLVRKTTKMLKKLNREGIKFDSRKKKFFSSKRKPISKMDCYNCGELGHLAHQCNKPKKNKFKGKKDDDSDDEKKEKKFFKRKDGKHKRFHKKKNGKAYIVGDWLTDIESSSESSSSEEENDEKVAAIAGDFSSPPPSPSSTSHLCLMAKGEWKVQIENDIIDDSDSDSDDEFASRSYDELVDLLKEYTQIIRKSKAKCDKLKDENEFLTAKYDIVVKASDEMKEENKTMSSTANELKSSLKDAKDKCDKLNEANRELKDRLVKVKKDYTKIKLDYDNLLVANELLSCNIHEAINHAVKIDVATSYATTRGKVSIESNAINNELAVDNERLRNEVKKLKNENEHLATSVQKFNKGQYLQNELLMNTIMKNNKSGIGYNSFVQKKATSQYKATQTPKPIKCFECGKEGHFAHNCKAKPPTPLSKHSRPFAFNAHYVLRKVANAKVKVTFLGPPSKSRPRQIWVAKSLIEKVTGPMQNRALKIET

SEQ ID NO: 47788 - protein, 87 aa, Zea mays
  Coding DNA Sequence Number=SeqID_4413
  Homolog annotation: Hit_ID=Q8S474; Match level="QueryCoverage=40%, HitCoverage=4%, E-value=3e-08, Identity=71%"; Hit description =Putative pol protein
MTLITLARIMIDEYNTPERLWAEAVNTACYASNRLFEREMCLWAISILFWNSIKSSPKGAKGVQLKQPVEHQLRVHRTVPGAQAAQQ

SEQ ID NO: 47789 - protein, 108 aa, Zea mays
  Coding DNA Sequence Number=SeqID_4414
MCHGHGNTWGVTGGVIVSPIGEGNPRLNSMVNLAVVLNTELDHTLDELGKMSKNRCRGARRAQPEQQPPQEDAAHQQLPPPPPMTIEQMFLMQTQAVQAIGQTLAAMQ

SEQ ID NO: 47790 - protein, 144 aa, Zea mays
  Coding DNA Sequence Number=SeqID_4415
MGKSKKGGSSSHHSGDKRKREPTPPSEDFGDSEYSKEEFSSESEGSPVHASPPASSDDSDDSQGIAAEVWTYIWAIERAGLEGSDESEVSSDEQNSSNSSEEGGGGSDGEGGDDGGGDGNGDGGEGDGKGDGEGGSKGSNKASG

SEQ ID NO: 47791 - protein, 52 aa, Zea mays
  Coding DNA Sequence Number=SeqID_4416
MTTNRPLELLHMDLFGLIAYISIDGRKISYPRDLKGILETGSKRVRLKDQEN

SEQ ID NO: 47792 - protein, 219 aa, Zea mays
  Coding DNA Sequence Number=SeqID_4417
  Gene Ontology: Mol. function=kinase activity
  Homolog annotation: Hit_ID=Q6QP54; Match level="QueryCoverage=22%, HitCoverage=24%, E-value=3e-10, Identity=60%"; Hit description =Putative kinase
MAVGVSEALYAKAVSPSLLTGNRWGRLICVETECLATSGNDGASCDVVGPSPGLGEVEAPPRSRSSLSSKAEVESEPLGRAKRSLSSSGAEPESEPWGRAKRSSSSSGAEPESEPWGRAERSFLWRLRPDLAAVSITLSSGTAVGAAQAALSFCQAGQWSGEATFALNAPAIRSVGEATWPRLLLGEDWASGEPKLCADGGYQLRFRSLEGTPNYGPRQ

SEQ ID NO: 47793 - protein, 349 aa, Zea mays
  Coding DNA Sequence Number=SeqID_4418
MNKTPALKVPLQMELRFRPHGYEQPPHQGACGATSSGRLASDLCSSGYGPRTDAATGRLSFASPLKGREPDIKAKEPEAELEDGFHHQKLEEEVASRPMREVEPRLTSASATARMMNILEAEGRAEAAARLASPHPGAGGQKKPNRRAVHATAQRLQAFLHFCPDQRVKGRTAMQAACNRAKWAHPSDSNAPAWRPRPTRHATGAPVATCEQLHRPSHHYRASSTAEPVPRLEATLRMTQQCQPGASVTGQLAAGEGATVDAAKNGPAVMAVAGEPKQRSRRQPSSCPLMGQRENPLPRHEDGAPVFRSSNGSRTRNGCPVNHSSRRINSAAGQAAPLAGEAGDASPSP

SEQ ID NO: 47794 - protein, 58 aa, Zea mays
  Coding DNA Sequence Number=SeqID_4419
MELRLFTLQLQLRLGQPVSRLQKGNKCAPRSCQGTEVAMTSYNFVKIINFTFINFCPR

SEQ ID NO: 47795 - protein, 183 aa, Zea mays
  Coding DNA Sequence Number=SeqID_4420
MEQRITRSTFTSGRVKFGDRGLASLAEQSPIPCSGSFTEACTVSSKGRAWLGRALLAGLRWQGLGGRGHAVHGANAGGFELRGCLRWYATFLVYNLGGFGAIYKSLVHRCAIAMVTLGVLQPSPLKESRPEILGRVLRRGAEKVALQWVSGHIFAAEIHGTHHEQLTGVVATSIDMLLVHKSP

SEQ ID NO: 47796 - protein, 32 aa, Zea mays
  Coding DNA Sequence Number=SeqID_4421
MGDHVSGRVRGYVHCQVHSGFTNIMLKGEKLS

SEQ ID NO: 47797 - protein, 244 aa, Zea mays
  Coding DNA Sequence Number=SeqID_4422
  Subcellular localization annotation: CTP_CleavageSite=59; ConfidenceScore=5.04e-01
MARVACTLRGKRLDGGVSVLSISYCKCFRFSVSLMICNVCKTGKTLLGRKMPPRTRKTACKHIGPISVPRHQLAPRHEDNSSGSNDPIGDLEVQINQLQTELRRRTDIWVADGDRINELRSDICRLQDQLADRDLALDWAVHSRSLAWAKEAKARARVEELSSAIDNLQAYCNTLHEEVHVLYSQLHPNVPADPVGTEAEPSHVAGEAFGGELDLSRPPPSMKLVDEWSATPDSEATRSNGKQE

SEQ ID NO: 47798 - protein, 31 aa, Zea mays
  Coding DNA Sequence Number=SeqID_4423
MEARYRTTVLGNNTDLMPFWRCLEEAIYGIV

SEQ ID NO: 47799 - protein, 289 aa, Zea mays
  Coding DNA Sequence Number=SeqID_4424
  Homolog annotation: Hit_ID=Q6QP51; Match level="QueryCoverage=33%, HitCoverage=68%, E-value=4e-23, Identity=45%"; Hit description =Putative growth-regulating factor 1
MVTASKKAGPSEGFDSRLRALRLRAHYWSEVRRLSPWKGSTAASGHSGSAPTTDQGFEGWPPEGFDNRLRTRRARDDSGYVRYMTEARATLPSRQGRSDRSHFAPPLTDLIGKHHCLPCSDCCATRQGSSASPDPEARPRLDLGRRSPPRTTLGLGPRLDLGRRSPPRLTPGLGLNLDLGRRSPPRPTLGLGLNLDLGRRSPPCPPPGLGLNLDLGGVTASPDLGLGPTTLLGGPSYEKVAAREDGLTSRLSPSLANACNPYCKRIRPGRRITRAVGPPGVETPTSPYA

SEQ ID NO: 47800 - protein, 129 aa, Zea mays
  Coding DNA Sequence Number=SeqID_4425
MYGCLKLVDCTLSKDGVLWGGLFTKTTKWVVGLLKLIRVDGHVFEGIHENYVFLATDVNEDFVPVPIADVVVDDHGVCMRGTSQIDIPYVKGYEDGLEVVVLRLLGVEVVVGGWGGAVGEGELQPFLVW

SEQ ID NO: 47801 - protein, 113 aa, Zea mays
  Coding DNA Sequence Number=SeqID_4426
  Gene Ontology: Mol. function=protein serine/threonine kinase activity; Biological process=protein amino acid phosphorylation
  Homolog annotation: Hit_ID=Q75H77; Match level="QueryCoverage=63%, HitCoverage=27%, E-value=2e-09, Identity=40%"; Hit description =Serine/threonine-protein kinase SAPK10
MDLLTSTLAAKMYVHTVGTPAYIAHDVLLKKEYNGKELLTLPIQRITIPEIRNHPWFLKNLLADLMDDSMMTAGSRGLNQFLNDDIDLDDDIEDLDSDADLDLESSGEIMYAI

SEQ ID NO: 47802 - protein, 268 aa, Zea mays
  Coding DNA Sequence Number=SeqID_4427
  Homolog annotation: Hit_ID=A7P225; Match level="QueryCoverage=87%, HitCoverage=33%, E-value=4e-17, Identity=30%"; Hit description =Chromosome chr19 scaffold_4, whole genome shotgun sequence
MGSRLQAPPKVLDSSRGGRMGIRGGRLGIVGREEIFNQPFDYENCLRDNRYCSLSPFGFLPSLRHAHEGIYSQFCHFTIMHKFCGVLNSFVKRTSNGKHVSSLPPKPLNSAAVVARSKPSVTPKEQFVTARRQDLPVSSKQGAGTKSEKDNSTILDKVGNGPVVKEQSVDTYASKSKAQNGKAMPSNGGSLANMWGRASAKPMPPSTTNSTAVASVAATADAQICAKEEADGNSSDDEHGIKYKRGSTNANNRKRRVVFDYSDDEEDE

SEQ ID NO: 47803 - protein, 22 aa, Zea mays
  Coding DNA Sequence Number=SeqID_4428
MDESGVVWQLVFCFQKKEKEIR

SEQ ID NO: 47804 - protein, 156 aa, Zea mays
  Coding DNA Sequence Number=SeqID_4429
MGKSKKGGSSSHHSGDKRKRDPTPPSKDFGNFEYSEEEFSSESKGSPVYTSPPASSDDSDDSQGIAAEVWTYIRAIERSGLEGSDESEVSSDEENSSDSSEEGSGGDGNGEGDSDDGGDDDADGDGDEGDGGEGDSKGDGKGSSGSSKASGKAPLA

SEQ ID NO: 47805 - protein, 207 aa, Zea mays
  Coding DNA Sequence Number=SeqID_4430
MARVACTLYGKRLDGDMPRTRKTARKSTGPIGVPRHQLAPKHEGSSSGSNDPIGDLEAQVKQLRTELHHRNRVWAQDGQRINKLAADVRRLQDELAERDLAVDWAVNSRSVAWDREAKGRARVAELSAALDNLQVYCNTLHEEVHVLYSRLHPDVPADPVAMGAGPSGTSGEGPDGELDLFRPPPSMNLADDRSPTAENEEIKDDED

SEQ ID NO: 47806 - protein, 133 aa, Zea mays
  Coding DNA Sequence Number=SeqID_4431
  Gene Ontology: Mol. function=nucleic acid binding
MEVLDELDVVLCRLEPDIGCNESTDVSDDEEDKEVELNKNNVGDGMEDDNTITCHKKDEHNTMTGCEHALTLITTGNQEDNMRIPQEVGDTSSPCHVAHEQMEHIVASSEAKKKWKMKKPMSIWNWANNLKCD

SEQ ID NO: 47807 - protein, 378 aa, Zea mays
  Coding DNA Sequence Number=SeqID_4432
  Gene Ontology: Mol. function=cysteine-type peptidase activity; Biological process=proteolysis
  Homolog annotation: Hit_ID=Q8S456; Match level="QueryCoverage=98%, HitCoverage=49%, E-value=1e-178, Identity=79%"; Hit description =Putative uncharacterized protein 163K15.6
MKSVDRPPSNPKRLTIESSQEVFSIDISRRTRSSISARQDDIPQNQEQNEPQPAPIHRFCRKALACRLKRKPSAPSTLSDDDFMDAPSFKRQFRSASPSPSEQISAKKLKKLNIRCIPYDVIVSSWIMSDRQRDAVARLGFSSIFDLRTDALESISLIRWLMDKLDPHDMTIRPGAGKELKITKDTVHLILGLPCARGGKEFTDWYGEVDAAAKLRRDLNVGKEEFDVVKLQDKIVLGNDDELSIRCFFLILFNRLLFPSTSWGITNNEVLMTSNMARMADIDWCQLVYTDLCDAAARWHKRNKTNITATIYGCSLIVLIYYLDHLHHPASPDNKYGTPRIKFFDNETIRELARGDRPPPRKTGEPFGYAEMFKYYYC

SEQ ID NO: 47808 - protein, 101 aa, Zea mays
  Coding DNA Sequence Number=SeqID_4433
MDVLMIRYLGEDQQGLGKGLGVEEEEQGRPQQEGDHVRLGCDSISGSRTRPKNQMDKDKGPKLNDDECVSQMELKEMMRVMTEAFKKYQDSAATSYEQLDR

SEQ ID NO: 47809 - protein, 316 aa, Zea mays
  Coding DNA Sequence Number=SeqID_4434
  Homolog annotation: Hit_ID=A2YGC2; Match level="QueryCoverage=40%, HitCoverage=55%, E-value=2e-09, Identity=36%"; Hit description =Putative uncharacterized protein
MSPSHEDYVTVTERPGHHCNALNLRDNGQLAESEGVAGEDPEQQLMARLRHTARKSVIPFFPSRLAKRPLCRPVTGQSSHLERLHHLLHEEQERRRQELEQQGSSSSPQQEVESVRRCSSVPLLEAPPAPPLGVPAAGVAVGGDPDDGGDDSSSSYSTDLSEEQEPDGWVARPITRDAACGGAKVCSEHYPISKRDPAEAAIQDATRRALSHYYSVFSGVADGLDLRYYPRRQPGSTRGMIVSPVGEDNPRLSSTVNLVVMLNTDLDHALDELSRARAEIAQLRAERVERRHLEDGSPALVGTQHPYRSPQCGHHA

SEQ ID NO: 47810 - protein, 409 aa, Zea mays
  Coding DNA Sequence Number=SeqID_4435
  Homolog annotation: Hit_ID=Q6QP51; Match level="QueryCoverage=22%, HitCoverage=45%, E-value=4e-18, Identity=56%"; Hit description =Putative growth-regulating factor 1
  Subcellular localization annotation: CTP_CleavageSite=46; ConfidenceScore=5.62e-01
MQAACNRTKGAHPFDSDASSMGAQAHTSCGTFGRRSRRRFTSAIMTASKKGPRKGILRKGSFSAKESGPEPPTDQRFEGWPLGRVRQPPQSTQAPRLLLIRGSKAGPSEGFDSRLRALGLRAHHWLEVRRLAPRRGSTAASSHSGSVPTTDQGFVGWPPKGSTAASEHAERGMTLGTFDTQPRLGLRSRGSRAALANPAPAKPLTASTYQPENLEPDSDPGGFTSRPRAPSSDGHTFGSPEAQSSRRSNLGQIATPTDCIAGAFNARENSVACPAPTAVSLDRVRLTAAKSSHGCHRKLRLARPRARTQPRPRKTNSASPDPRARTQPRPRKTVSTSPDPRARTQPRPRKTVSASLDPGLGLSLDPGRRTPPRPTLGLGLDLDLGGASASPDLGLGPATSQERLSLPYP

SEQ ID NO: 47811 - protein, 223 aa, Zea mays
  Coding DNA Sequence Number=SeqID_4436
  Homolog annotation: Hit_ID=Q6JAD6; Match level="QueryCoverage=31%, HitCoverage=10%, E-value=1e-11, Identity=57%"; Hit description =Putative uncharacterized protein
RQVRMPRTKNVSAPGGGDDEDPPRPFRQVKGKTVYLEQQEGRKKRRLDRAALAAAAAAAEQTERGDQLQIPSNQIAYRVRRHASRPRSSAPTTPATATTPPPTLPAPVTPAPSTTSAIPTTSTTPASTAPPPAPLSAPPISPARFWERDETEVQPLVADPMLFDLQRATTAQLARGRVMMYPKWRSRSEAETSPEVEAEVGRGCDSSRGPRSGKAETFSRGRG

SEQ ID NO: 47812 - protein, 168 aa, Zea mays
  Coding DNA Sequence Number=SeqID_4437
MVYLFVKCNLSKACWDSIGLLPLGTSCPQRAINRLRIQLEVSCDIKVVEYLEMQEIHGCLTMCPFDGRLAKNAQIYAISYAFSGYLGYPTIFLLIQRWYPLPTSHVTHLPRDRDFPYTSTEEARQEHEWVKEVIKGTTCLGLEIPVTRVILQILVTSLLVVAIQADMI

SEQ ID NO: 47813 - protein, 50 aa, Zea mays
  Coding DNA Sequence Number=SeqID_4438
ELSPPLEQYDPLADPETKEALDIINMADSIIDEVVDKLLNEVAEKVLREE

SEQ ID NO: 47814 - protein, 604 aa, Zea mays
  Coding DNA Sequence Number=SeqID_4439
MSSPELRESSARMLKVTRGRWPKNVLIPRMAGEDFFTSRMARDLKIFPYGRNIAAVVSAVTEKDRQDAAQKRQAVVRIGDPFREAKKARGGTKYAAPGSSKPVPAVKPAAPRPSKASTGVKAAASGAGKPPSGGPAKGQRMPSPARTDEAAVRVADFDTDICVGDYFVGCEYHGFLWQATDFADHVASGALTAEFATEVEHLRAQHADAVWEKSAAESKNHRLMEKVAAMEAEKGDLRRQLVKERREANKAIADAQAAQAEAKVARAEGSLAHQRAEELEARLNALRNRVNKAETSTRAEVERTHAQFVDAYRELGVQTADFEAPSQEAGLHFLEWLQEELGVLPTIVTGLMSFASLVTCEGAVNALSREGCRHFEVFDQSDKKFEREIFKVEDPMLKQSAGALFDRMWGPHGRDTVQERSDRAIDQMVHAKGVEDLGGLDGTLSEATGAELVPPSDAGEGPSLTPAPTGAGEDSAPAPAPTCEDASKAVVERAAEDPTAVAEPSQVPTFGPAQATTTDNTDFAAETSIVVPADVSVPSFMSECFESDGESASLFLWTEESSDEVLDYFVVLDVAAAETSPRVEGAEDLHGASTGCRRRRVVGK

SEQ ID NO: 47815 - protein, 290 aa, Zea mays
  Coding DNA Sequence Number=SeqID_4440
MAASQTKRGRTEGIRRHRPGDWARRGAPACPLRRATGSPPRTAAPGALLAPPPATAESSVVELLKDRGMASLDSTTTRCLRAWSQLPPLRPCSEEYQVPVAKNVGGRGRGEIGTGNQQPREGGNPAHQSWGRGSGGGMAAPLLSFFLRDSSAANNLWQGKGPQWHPRPPPPQQPSPPPLLLPCETTGPCAETTGAGEGAPLRDDEPLRRDDEPLRDDVGRGRGAEDLRVGGQGWWGRVGARTAESGRGREWWVIPGMAPFLRWRVGRGRGWRQRRGHGRTTNLCTPTLIT

SEQ ID NO: 47816 - protein, 127 aa, Zea mays
  Coding DNA Sequence Number=SeqID_4441
MGMVLDASAADGRRVELDGDMRWTSQVGPSSDPSQTLARARIMNDMKIRSSSIIYVNKKQRREAVRIAGDKDFTCLASSGLQDCSDEAGGCLAGAEGRWCCQNVFLEFWWMMLSDCNAKDPSVLSTE

SEQ ID NO: 47817 - protein, 519 aa, Zea mays
  Coding DNA Sequence Number=SeqID_4442
  Gene Ontology: Mol. function=binding
  Homolog annotation: Hit_ID=Q84Z28; Match level="QueryCoverage=100%, HitCoverage=97%, E-value=2e-46, Identity=49%"; Hit description =Abnormal spindle-like protein
  Pfam annotation: Domain name=Arm; Domain location=398-443; Score =18.7; E_value=0.023; Accession=PF00514.14; Description=Armadillobeta- catenin-like repeat
  Subcellular localization annotation: CTP_CleavageSite=81; ConfidenceScore=5.67e-01
MSRREPDTSPFCDLSNLRTPRPNPKTVPPSPQFFTASKSALQAPTPTSLRRRRPGDGVPTPTPLGRRLHALEVDQSRSARRAESGRERALRTFSASASSWLSLLLRDPSACGCFPGFTGSAAAAQPWATGKRGALDGDRARGGRSPKRCRGGGDRGGERSKEMTPAMVAALRESLKDACSLEDVTERMEKHMSKGACEEAVVIATFFILSVENPHAWVSVNWLRDDGREAVGAEELVGSVAANWPAMMVGTAGATPEMDAEAGPCPKWRPRSGRRWHPRRRAICSKIGMTVESSSQLDRRALNCFINYYLNIDISPFKETPTGCRKELFTCHQLDTISDIAGWPSSEMGKVLSDVLQAVSYVKAYLVRKASKQEVAHIRSRLQKSSSQVDDSTATEYSKKCCEKLVAAGAVDILLKQIYLLNRGIADQEVLKQVFLTLRNIARYSNLRQVLASTAESVEIIFQELLRNKADGFFIASDILKSLCESKEGRETVQALSHLIKRLRNLVHDLEKKVELDKR

SEQ ID NO: 47818 - protein, 35 aa, Zea mays
  Coding DNA Sequence Number=SeqID_4443
MAHRTVRQELALVARSIAQRTVDNQRRSGAAIAGF

SEQ ID NO: 47819 - protein, 241 aa, Zea mays
  Coding DNA Sequence Number=SeqID_4444
MEHQSSDHDELTHADYLSYKAGRLLTNLADVNVIDAFILGTTDKTLVHKLRQNSLQTAKEPFDIAISHGSREEAVGAIFDRCKRKVVRDKELDKGVNSQLNTEGRGSRRQRVSVLMVVASQTERRPLTEETTDHFKKNSSKPHVQTISIRFDMPIRIESKFPQAPKQEDFADQLYRGVIHMITRGSSVDFDTKRQKRDHYRSINHVAITGPSRANEVVPCAADLRRPEMLTYAAHPTLTPW

SEQ ID NO: 47820 - protein, 109 aa, Zea mays
  Coding DNA Sequence Number=SeqID_4445
MPNTLIEYLCARSANQRQRITYSPPLGALTHIQDTVHDPIMTRMNNMQQSFQDNMGALSSQFDNLSTNESIQDIRQRQQQLQHDFGQFSSVFDTFSTHYYSMYPPPSDQ

SEQ ID NO: 47821 - protein, 130 aa, Zea mays
  Coding DNA Sequence Number=SeqID_4446
MALKSGCQIIQRLNIDCHTLKYPRIQSPSLPVIRVPGFASVAVIRAWHAVDIHGEPLPILAGPSIRVVDENEEEVEVEETRATPPPPEEPPAGDCFYFDICGAEPDSPITQGKPWCICHLLANLKSFSLA

SEQ ID NO: 47822 - protein, 180 aa, Zea mays
  Coding DNA Sequence Number=SeqID_4447
MADSPHFNLRCTTARYTRCEMKLGRTRTWGRDSYRQFRSAAPCPPRCADPRRRKKHGSGPDLRLWASTGRRVHGGTDYLVVGSPIPHLRTAWAPLTGGPPMPGGSALCGRGMCFTLISAVTEPPKSLGPPTVVLVHRTSDNPAGAPDHLTSSVSKFFTLPKSVSPITQILQHIRETSMRK

SEQ ID NO: 47823 - protein, 197 aa, Zea mays
  Coding DNA Sequence Number=SeqID_4448
  Subcellular localization annotation: CTP_CleavageSite=22; ConfidenceScore=5.07e-01
MAMVMAMVWTGLKRSFLSACVVASRLFKWLSCRAIMHAHAAGWVVSLPRFPHQLPRPIAPRDHRSSPTASRGTSPAPSRTTATFPQRPGLPVDGAELSATTLELSGTALLSLLGPSKPYRALSLVPISLVLLPVAVNLEQVVVGSLPAAMEKSPRSINIGSGPARADTRKDVVEAADGSRRTSIVGTSKIDYGTILV

SEQ ID NO: 47824 - protein, 116 aa, Zea mays
  Coding DNA Sequence Number=SeqID_4449
  Homolog annotation: Hit_ID=Q6QP54; Match level="QueryCoverage=67%, HitCoverage=31%, E-value=8e-07, Identity=38%"; Hit description =Putative kinase
MEAPPKPGSSLSSMAEAESEPLGRARRKSSAEARAVSEPWGRPESEPWVGRSGVRRLPGLSPSPSPGSGEAEFIVFRGLSPSPSPGSGGAEFAVFRGLARVRALRRAERSSPSSGA

SEQ ID NO: 47825 - protein, 733 aa, Zea mays
  Coding DNA Sequence Number=SeqID_4450
  Gene Ontology: Mol. function=heat shock protein binding; Cellular component=integral to membrane; Biological process=response to stress
  Homolog annotation: Hit_ID=A2XHR0; Match level="QueryCoverage=99%, HitCoverage=90%, E-value=0.0, Identity=64%"; Hit description =Putative uncharacterized protein
  Pfam annotation: Domain name=DnaJ; Domain location=66-127; Score =108.1; E_value=2.7e-29; Accession=PF00226.22; Description=DnaJ domain
MECNKDEAQRAKGIAKKKFEAGDLQGARKFALKAQTLFPALEGVDQMIAIFDIYLASEGKVAGEKDWYSILSVPLNANDEKIKKQYKKLVLQFHPDKNKSVGAEGAFQMVQEAYTVLSDRTKRAVYDQKRNVRTFQQRTAQSGKASTVPGASNGFYNFAANAATASKWTVNKQTVGSATHAPSAPSTATRAPVAKPDTFWTSCNKCKMNYEYLRVYLNNHLRCPSCRQPFLAKEVQKPPAGNVVQDSNISGANQNTTTNRNLQWGPFSRAAGAASATASSAAAAQAANVVHQTYEKVRREREEAQAAARREEALRRKYNPLKRHASMSGNVNLGPGDATSGKKTRTMTKDAEVGSSSTISSPGANFFRVPGVNISFSNNIGAYEFQGDDGGPSWKPRPLIHLSLAKTFSQMDLRGLLLEKTKTELKNKLTVIKSKTSQVASEKASKKIAVKENGGDNEALGPEDPTAIKDSHDSEQTGSNTSTDAENEDDDHLSYNVPDPDFHDFDKNRTEECFQSDQIWATYDDEDGMPRYYAFIQKVLSLKPFKLRISYLTSRANSEFGPLNWVSSGFIKTCGDFRIGKYESCDIVNMFSHQMKWDKGPRGLIKIYPQKGDIWAVYRNWSSDWDEDTPDNVLHAYNVVEVLDAYDEDHGISIIPLVKVTGFRTVFQRHQDPNATMKIPKEEMFRFSHLVPFYRMSGEEAANVPKDSYELDPAAISKELLQGITEAVEPNGT

SEQ ID NO: 47826 - protein, 191 aa, Zea mays
  Coding DNA Sequence Number=SeqID_4451
MELRSSNKEAERRRIPPIRGLGRREDPTLKGGRRHGCLTKGASLLFKGNSPYVRPQAPRAESSPTRSKALPCDSGAGSRTSCKPAQGRRSQTAAHGTGKGGYPERDPSPRRNRAPSPPLLIRGSKAGPPRVQQSPQIAWARHPLLVRGSKASPPKGFMAASGYSGSAPITDQGFEGWPPKGSQSPQTPSEG

SEQ ID NO: 47827 - protein, 167 aa, Zea mays
  Coding DNA Sequence Number=SeqID_4452
MSHLMALLEATKITLDNQEELVVDLSTEMVEKDLQVEQLSNEIQELEELVGTRENTIEMAGRARHGQNERVPPPPPPPPTLQELMAQHNEILRQLAQRQPPPQHYGGGDHQRNPVASTYQEFLMPICLSPASGHQHPGMKIITTCAGSLSHTYEEPWYRIECLIFTT

SEQ ID NO: 47828 - protein, 204 aa, Zea mays
  Coding DNA Sequence Number=SeqID_4453
MGPFCHSHLSPFFAILVRSASTTRAPCVDSFLASRELGHDPDSEGSVDKSRAHALFLPYPLFSPISPRHQNATASRVRGFSPPSSTGRFLSDWTEVWGAGAPPGPVGHGWNLAWAHRAADDLEFLVVAASSPCAADRAERHSIPGKNLTNAFAMLSYSFSSVLSEGRELGALMAECRRWRRRVESPRRPELGDAAELMRGPLIF

SEQ ID NO: 47829 - protein, 134 aa, Zea mays
  Coding DNA Sequence Number=SeqID_4454
MVKNFGSETVQIAMNAVEPVIGLHITLVFFKTEEKWKRYQITNVPSAREKLFYTQLRLCANLRVHCASSYCGSDPSPKIPVNLGLLGNQTHSQTAAWSRGSLEDMVAGVTWSSILPPGWIVEWDPASAEEEHEE

SEQ ID NO: 47830 - protein, 66 aa, Zea mays
  Coding DNA Sequence Number=SeqID_4455
MESARLIISNASFISGSARGSYGSEGGDSSAEVGGYEIDGFGYDYGAGEDEAVEGDFQEFQDYDEF

SEQ ID NO: 47831 - protein, 347 aa, Zea mays
  Coding DNA Sequence Number=SeqID_4456
MEGSWVIRTSYCSEEEGFPHVLRSCALRMGIHKKPEYVWKEYQENGVEKCSMAVYLGESRSYPNHPPFQVTFIGHRFPDTCQNVARKALKHLCQNYNREVFETPLRYFPPSNKNTPTWRKRLQALSGRDPTEDDPTIVYMAGYLHTLDNHYDDLSSHYIHLNSRVESLEQQVKELKKEKASLQECLDIAEGEEANTCEAYRTLKMDYDKKLKKLAPTKKIQKKTKSQGCQTERKKKASPAPPPARIENLSDVEDMSLASLDDLLKEFGDTLEKEFEMTLSPWQMASDKTTPTASGIGAGFPLRAEREAGGEGSETHLPAPPELPLDLAQVLANQTRLIEVLTRIKLI

SEQ ID NO: 47832 - protein, 21 aa, Zea mays
  Coding DNA Sequence Number=SeqID_4457
MSVRSKGVGAESRKPKQDGTG

SEQ ID NO: 47833 - protein, 179 aa, Zea mays
  Coding DNA Sequence Number=SeqID_4458
MGREKATRSVPSPLPLPSLTVARASCREAHMGMRMAGPALVWWHGSGDKLPRQAHDGDNSGGAPSNRWLWWLRLPGATTTTGIEKIAIMKHHVCGFDELKEAVDAARAAAVAVAEARCAALVAEKEARAAVQSSTIAADKVQLVVEAVKYRSFVEDNSMVEFLVADFLSLFLCRMWNRV

SEQ ID NO: 47834 - protein, 516 aa, Zea mays
  Coding DNA Sequence Number=SeqID_4459
  Homolog annotation: Hit_ID=A2ZSU8; Match level="QueryCoverage=100%, HitCoverage=68%, E-value=0.0, Identity=74%"; Hit description =Putative uncharacterized protein
MGISDNVAKVGVCYGEVVSNEAVRRTKELWEDAYDEPYDMAGSEVDVGAVSTAREAFYWVPAASEEDANRLYKSLQPRFLIEQPSICFWTTYGTMPTTVYVFLKGEFDKEPTSKEFLRLRTQRCHRSLKLNISMSNLSCKSWQKVWHLYCEFATRGLFIEFRRTLSGCFRKSKFLKNISFSWSDVLHEKALALTEELDVRMRAMASITPPVQAPYLLKCVPDRVTDDGGAMISDVILRMRNYRPQEGRWLTRTVLDHSGRECFVIRMRVGRGIWRRGAETPMAVKWEDRSIEVREGSWSYIASTSSVGYAPEKIVGTGTVMKDHQENKVVWSLSTGDTLTIRLGDELSFQLKNDSSEEEARLLVGRRLSYRVNTDNASSNLVEEEQYLTLVRKSPYHHGDRATVLLNWKLLAVEFLPEEDAVFVLLLCMVIARTMTEIRREDVAGLLVRRRISEARAGQRDWGSVMLPGSLSPDPHLQPWYRNATQVLSSAETGPVLTKYSPADGKDMLYRQALIP

SEQ ID NO: 47835 - protein, 25 aa, Zea mays
  Coding DNA Sequence Number=SeqID_4460
LPGNSIAHSLFSAKLQGSKPFSVRA

SEQ ID NO: 47836 - protein, 138 aa, Zea mays
  Coding DNA Sequence Number=SeqID_4461
MPHPFPPPIALDCLAGDFTAASTRQCAVDRPPQASTGQIDPIFVTPYPRPCLATTPPSQNRTPGGEPPRDFTGGRTPAGSLSPITVPRRQPPFPLACGPAPRHRPHAVSPAGGPSGPPAHAAACALALGWAKNSPRPS

SEQ ID NO: 47837 - protein, 242 aa, Zea mays
  Coding DNA Sequence Number=SeqID_4462
MFQEYSKSSPDGIDSLYALGDAFDLTMNGPSHFGSSLPRDCPGGPDEYEVSFVELSWDDRVVVPGLGWSLVFVEGLQGEDAVSIDEGDPCFISYGVMASDPYNRRKGVNPVARHSVVLRAQTTSDSWSAHLPFLSSRSLFLDGSENLAIGALDDAVGLWMVYRGEGKLGADGEAEVPEVLAVKLFVVVDCELGRDSESANNVFPEELLGSLRRYCEYCPGLDPLGEVFDGDEGELEVPLSRR

SEQ ID NO: 47838 - protein, 330 aa, Zea mays
  Coding DNA Sequence Number=SeqID_4463
  Gene Ontology: Mol. function=aspartic-type endopeptidase activity; Biological process=DNA integration
  Homolog annotation: Hit_ID=Q8H8K3; Match level="QueryCoverage=40%, HitCoverage=9%, E-value=9e-12, Identity=32%"; Hit description =Putative retroelement
MESAGSIQEEAEADHHLRVEKARGSLQSYSTMVLGPLVGYPLRSGTNEDSGPCVVPDTSLHDDTSNIREQKHCLVLDEYNSFAMKENDLVRDMYSHLNLVINELNSFGINKLSDVDIVRKIISLLPQQRYGIIITNLHILEDLSQMTPTIVIGKIAAFEMSRKMGQEEELTSSKPYAFACDEHKRMKGKKKAPSSSSSSEEEEEKDENDDEENDQASTSSYDEETVRCVRKEKSRGREDASHVGIRVTSGTTIQIWSNPKRGGAKTRRLQVSKLGMILQVNMILQGLAAIALHHTPHDHLTNALWQGVNEVSHPLVMIVKMSVMARESPP

SEQ ID NO: 47839 - protein, 242 aa, Zea mays
  Coding DNA Sequence Number=SeqID_4464
MWGPQGRETVRERSDRAMDQMAHDEEVEDLGDLDSTLPEASAVELVPPSDAGEGPSTTLAPTGAGEDPAPATALTGNDTSKVVAEPAAEDPAASAGPSQVPTFGPAQATTAGNTDFVAASTVVPVDDNLFGSVSECFESDGEFESSFSWTEESLDEGLDYFAALDVAAAESSPRVEGAGDFPSASTGYRQRRVVSKHSVGEFSRSGRRRRMGMEHGRLRVDRIGKRELLSSLIGASIGEGDL

SEQ ID NO: 47840 - protein, 91 aa, Zea mays
  Coding DNA Sequence Number=SeqID_4465
MAANPGLWRRRKRWFFSTDCEREGGRVVVLEDSAVAASSAPFSRSRYQDDLQMTRDLTAKRSNTDKYDPRMAATIPEKSEGSHANFRAQLR

SEQ ID NO: 47841 - protein, 230 aa, Zea mays
  Coding DNA Sequence Number=SeqID_4466
  Homolog annotation: Hit_ID=Q6QP51; Match level="QueryCoverage=78%, HitCoverage=80%, E-value=6e-13, Identity=36%"; Hit description =Putative growth-regulating factor 1
MQAACNRTKGAHPFDFDVSSIKAQAHTSWTEKGDTPKGILLREGSGPRAPLLIRGSKAGPSEGFNSRLRALGLRAHYWLALEGFDSRLRRRARDDPGYVRYITKARATLPSSLETPCSAPSKGNMALFPPPPCGKATQGPMSGIRRHRKLRLARPQGSDSASAPEDDELRLARPQGSDSASAPEDDELRLAQPQGSDSTSTSTSEEPPPRPTQGSDRPRHGGGHHYPTPS

SEQ ID NO: 47842 - protein, 150 aa, Zea mays
  Coding DNA Sequence Number=SeqID_4467
MAGMYCNARDCLNKRMQPPARTAARILLSPVDKAKGSARKKEKKGAERRTVTGPPLKYMKARAKPFPARRLDRTQGTGKGGYPERDPSPRRNRAPSPPLLIRGSKAGPPKGSTAASDRVGPTPTTGQGFEGQPPEGFHGRLRLLGLRAHY

SEQ ID NO: 47843 - protein, 47 aa, Zea mays
  Coding DNA Sequence Number=SeqID_4468
MTTDRPLELLHMDLFGSIAYISIDGRKNSNPRDFIKILRDGLKMSSD

SEQ ID NO: 47844 - protein, 257 aa, Zea mays
  Coding DNA Sequence Number=SeqID_4469
  Gene Ontology: Mol. function=phosphoprotein phosphatase activity; Cellular component=intracellular
  Homolog annotation: Hit_ID=Q75KI1; Match level="QueryCoverage=70%, HitCoverage=34%, E-value=7e-53, Identity=61%"; Hit description =Putative uncharacterized protein OJ1057_G07.1
MSLTEAPSPSPSSSSGSDDFAAFLASELELTSGADSAFPGDPSSVFPATDDEGEDEDPEELEVEAIEQNGTKRRRVEEQCQDQGTSVRPDKIPTGASKIVQVEACPHPGHFGGLCIICGKPQDEEDVSGVAFGYIHKGLRLGTSEIDRLRGADLKNLLRERKLVLILDLDHTLINSTKLQDISSAEKDLGIQSAASKEGFRKERGFFLRLFRFLMDQGPPFSSLWASSIVGVDGVPAVLDVPHFSKLDFSTYDGKDP

SEQ ID NO: 47845 - protein, 184 aa, Zea mays
  Coding DNA Sequence Number=SeqID_4470
KDGLAFVEAFLAQKIYFREIRLRPFFRGYGFRINGARGKGSGGARRAPVRCTALSLMPHSGDDETSRRGAVPGDYTVKRQGRAVPNFPVRRGDGRGDGDGGDGDESYARRTTKRLTGGAVTQSKLVRSNPRVMKAGEHREDKKGKCFIRFGHGGGLTPSGMDDSGVGILFYIEKLPASLGEDAL

SEQ ID NO: 47846 - protein, 114 aa, Zea mays
  Coding DNA Sequence Number=SeqID_4471
MCYSTTYIMFEDTHTTSATSIVPAHKNSCPNNPRVVDVGDNHEASLLNDGQCGAAALDRVQVVASRELVEHSGACDHVGLLLEVELTVAKLLLVIDERRQRECLLLMVFVWGFK

SEQ ID NO: 47847 - protein, 186 aa, Zea mays
  Coding DNA Sequence Number=SeqID_4472
MVGRSEPGCGLRPSLSFKDVHHPRWGGERGEPELYLPHGSAGHLFFQLLGVETIPQLCGGGALQPCRGRRTVAAQPGCNIPSSVLVFVARTGVRTCWCALGRPALAGAVLVDAAIGADVVAAGESFSADKSVSATRGPTSGSLALMSGSRPLSGDTNESLLAAASVLGPSLLLQRSLASHQEFVAP

SEQ ID NO: 47848 - protein, 200 aa, Zea mays
  Coding DNA Sequence Number=SeqID_4473
  Subcellular localization annotation: CTP_CleavageSite=93; ConfidenceScore=5.37e-01
MGSSASPDPGLGLSLDPGRRTPPRLTPGLELSLGLGRQSPPRPTQGSNSASTPEDGLRLARPRARTQPRPRKTDSALSDPRARTQPQPRQTVSASPDPGLGLSLDIGRRTPPRPTPGPRLDLDLGGAFALPDLGLGPCWELVLKCYELRTRQHRMLNVKALRPLKHYFPEDLMSFGRRSLMINHEGPTFVFRNKTMLSEI

SEQ ID NO: 47849 - protein, 335 aa, Zea mays
  Coding DNA Sequence Number=SeqID_4474
  Homolog annotation: Hit_ID=Q6J9V9; Match level="QueryCoverage=52%, HitCoverage=43%, E-value=3e-11, Identity=36%"; Hit description =Putative uncharacterized protein
MQAACNRTKGVHPFDSDASSMGAQAHTSCNRRADYYVRETAPPHAPIPRLLDCGTSVATRGDPAHGPTVPTEHIDHGRRFTSAIMTASEKGPGKGILRKGSFSAKEAGPEPSLLIRGSKAGPSEGFDSRLRALGLRALLLIRGSKAGPSEGFDSHLRALGLRAHHWLEVRRLAPRMGSTAASSHSGSAPTTDQGFVGWPPKGSTAASEHAERGMTLGTFDTQPRLGLRSRGTLGHFRDQRERFCNGIPSEGGIEPSDPIKRDQATQGRMKKAESVLDRPLALCGGSGAALANPAPAKPLTASTYQPENLELDYAPGLRPVRMREQPDRPKHHETR

SEQ ID NO: 47850 - protein, 176 aa, Zea mays
  Coding DNA Sequence Number=SeqID_4475
  Subcellular localization annotation: CTP_CleavageSite=45; ConfidenceScore=5.22e-01
MNIHRHSRCHYKRNSGSTPAGMNNLHIREPAGRQTPGGSSANSAAAAMAPGRTLPPRRLSFVSPHGGQEPDIKAKEPEARSAGDADDLVGGETFSGCHHLSTDDGVHLPTNTAPASVGRPKAHRSPSLAWLEDASFAELEDGFHPQMPEEEAGRQPTRRQAPARLALLPNKDDEDP

SEQ ID NO: 47851 - protein, 229 aa, Zea mays
  Coding DNA Sequence Number=SeqID_4476
MQAACNRTTRMHPFDFDASSMEAQAHTSCNRRAGYYVRKTALPLTPMLRLLDCGTNAATRGNPAHGLTVPTKHVGHGSVSRERRRDGRYGQKWADSNGGSRRAEAAVKSSAGSRPLLEQQGSPLPRHEDDAPVFRPSNGSCNGYPTNHPYRRINFAVGQTTPLAGTGKGDTLKGILLREGNGPRALLLIRGSKAGPSEGFDSRPEHSGFRLITDQRFEGWPLGRVRQPP

SEQ ID NO: 47852 - protein, 154 aa, Zea mays
  Coding DNA Sequence Number=SeqID_4477
  Homolog annotation: Hit_ID=Q6QP51; Match level="QueryCoverage=37%, HitCoverage=30%, E-value=6e-07, Identity=51%"; Hit description =Putative growth-regulating factor 1
  Subcellular localization annotation: CTP_CleavageSite=76; ConfidenceScore=5.57e-01
MSTFWFPNFLVFTKENSAACPAPTVVPLDRVRLTTAKSSLGRHGKLRLARPRARTQPRPRKTDSASPDPRARTQPREMVSASPDPRARTQPRPRKTVSASPDPGLGLSLDPGKRTPPRPTLGLGLSLDLGGASASPDLGLGPATSQGRPSLPYP

SEQ ID NO: 47853 - protein, 103 aa, Zea mays
  Coding DNA Sequence Number=SeqID_4478
MQKIGIRNDRHVVTGEWMLAVGINGRNYRNSGTLSLSLGSHHNLSGGVGGSNTNLKPTHYESASSTPGHYITLPYYLHYTNTTLVHYYLLLLIATTTAIYTNI

SEQ ID NO: 47854 - protein, 363 aa, Zea mays
  Coding DNA Sequence Number=SeqID_4479
  Homolog annotation: Hit_ID=Q6BTJ4; Match level="QueryCoverage=49%, HitCoverage=19%, E-value=4e-07, Identity=31%"; Hit description =Similar to CA1621|CaIFF6 Candida albicans CaIFF6 unknown function
  Subcellular localization annotation: CTP_CleavageSite=90; ConfidenceScore=5.18e-01
MQSACNRAKWAHPSDSNAPSMEAQAHTSCNRRAGCYVRATAPPLVPLPRLLDCGTSERKQRSRRQPSSRPLMGQRENPLPRREDGAPVFRSSNGSRTRNGCPANHSLRRINSAAGPSEGFNSRLRALGLRAHYWSEVRRLAPRKGSTAGSGHSGSAPTTDQGTPSSNGHTFGSPEAQSSPRSNLGQVATPTDRIAGAFNAKGSDSGSAPEDDELRFARPQGSDSGSAPEDDELRLARPQGSDSGSAPEDDELRFARPQGSDSGSAPEDDELRFARPQGSDSALASADGLGPTTSQEAPSLPYPKLTQATGNKTGVPSGSPRLQRSSDGHDTTRTGCQNLSGCHDGMALLQRVGRAGKDGTALE

SEQ ID NO: 47855 - protein, 201 aa, Zea mays
  Coding DNA Sequence Number=SeqID_4480
MNKTPALKVPSQMELRFHLRRHEQPHTIGGPAEQQKADGWLAAARSNNDDDDFCSEGPNSSSDDLRADAAAIGPSLTSSLERQGRAEGRRVGGQSVGGTVYLVGEETSSGCRGGRRRRKRLRSRSGQRAGHAAAASATNGERPSPRSLREGAGRCPRRDRPQLGALPSPALMMNILEAEGGAEAAARLASPHPGAGGHRLG

SEQ ID NO: 47856 - protein, 246 aa, Zea mays
  Coding DNA Sequence Number=SeqID_4481
  Gene Ontology: Mol. function=catalytic activity
  Homolog annotation: Hit_ID=A2YQJ9; Match level="QueryCoverage=14%, HitCoverage=5%, E-value=5e-11, Identity=75%"; Hit description =Putative uncharacterized protein
MAASPHFISPPPTTCSGWRSRLKRIAGVGKAGIGSWDWRLKEDRCTYHALFPRSWTIYDGGRRKGVEDRGTMGDMGGRQMWSGGMELRPEVRSSMVRSAAGTELCESILDAHGGWQVPRGPGDGLAEHLGLVAQVGAKLGEVAAVGLRQGAGSTFASYNGNGGEVVVVAEEEEEEGERGLKTMLVPALPSWPSISHAATAPWGDIPEDGRGGRRGMARGRRRGWGLHHGVGAGATFAGTGAGVGGG

SEQ ID NO: 47857 - protein, 439 aa, Zea mays
  Coding DNA Sequence Number=SeqID_4482
  Homolog annotation: Hit_ID=Q6ZGM0; Match level="QueryCoverage=28%, HitCoverage=46%, E-value=3e-18, Identity=41%"; Hit description =Putative uncharacterized protein OJ1442_E05.24
  Pfam annotation: Domain name=DUF1995; Domain location=96-311; Score= -67.1; E_value=0.038; Accession=PF09353.1; Description=Domain of unknown function (DUF1995)
  Subcellular localization annotation: CTP_CleavageSite=48; ConfidenceScore=5.66e-01
MTSVVLSPLRKQGDVSRIPAAPPAVPLRGSGTSPTATLSRTQGSSISLAATLACTQGPGTSLPDTLAPCYTPIVHLDPLLAFIKGRSARRVNHRVAEKEIVVVLSFASAALVESSVAVVDHLTFLVSHLPPLQNITVASSSSLQNPIAAYNIGSRLCFLPSRRLSCGMYSSPEVSCQSILGFDFSDDNEDRQESDEPPSVYIFINKSMCHLASIEKYVENFATFVPILLFNLELDTFRYVSYIPNHCLFMRQWLMQFMIQFYRGLMGFPQKAKELLRVIGLQEEGSSLEFLRGYKDSAACAAPTAVPLDRVRLTAAKSGLGRHRKLRLARPQGSALASAPEDDELRLARPQGSDSASAPEDDELRLARPQGSDSASAPEDDELRLARPQGSDSALASTDGLRLARHKGSDSTSTSEDRLDLDLGRASASPYPGLGPTTS

SEQ ID NO: 47858 - protein, 120 aa, Zea mays
  Coding DNA Sequence Number=SeqID_4483
MRASRSSAVTVEKSHGSRGGTMVTRSAITKQKRWRRQGLGTEKGDTPKGILLREGNGPRAPLLIRGSKAGPSEGFNIRLRALGLRAHYWSKVQRPAPRKGSTAASGHSGSAPTTDQGFVG

SEQ ID NO: 47859 - protein, 256 aa, Zea mays
  Coding DNA Sequence Number=SeqID_4484
  Subcellular localization annotation: CTP_CleavageSite=21; ConfidenceScore=5.42e-01
MAPPVTWSVRALGRARRRLFRGRGRVCLPRSSPSPWVGRGRDRRLRPGSSPSPGSGEAEFIVFRGRGRVRALGSGEAEFVIFRGRGRVRALGSSEAEFVVFRGRGRFRALGSGEAEFVVFRGRGQGRALRSGEAELPMAPEAGLGCCQPHSVEWHISRSGAGGAVLLSGRSRVRIRCQAILALNAPAIRSVVVAIWPRLVLGEDWASGEPKVVVARVLSRVPSSRAGMLTLSTVLLEPGLREQPPSFRMEREDGQG

SEQ ID NO: 47860 - protein, 146 aa, Zea mays
  Coding DNA Sequence Number=SeqID_4485
MGTAAHSALGLGGARARGWGRRRLASETVALGLGDGEGDGGALGDGHGGALGLGYGEGDGGALGDGLGGARARGRGRGRWRTRRWARRRSGSGTGWRAPRMTVALGDGDGRPARRRWWLGSGSATAWRALTARRRGRERRRSSLAA

SEQ ID NO: 47861 - protein, 264 aa, Zea mays
  Coding DNA Sequence Number=SeqID_4486
  Gene Ontology: Mol. function=RNA-directed DNA polymerase activity; Biological process=RNA-dependent DNA replication
  Homolog annotation: Hit_ID=A3CGC9; Match level="QueryCoverage=46%, HitCoverage=10%, E-value=5e-11, Identity=33%"; Hit description =Putative uncharacterized protein
MEAPGVLVGTVTSEPAVQLVSTILSMSATPPGSGNQVTEVIPQDDSPCLKVYFKRKKFVLEPVQDEESVLSSQLQEFKNDVTKPINSLLPPPRITNRRRRTVPANFIPRHSRRVAKFPPKLGSSSAAQVCRQLGFCDEMENISLEDANGYARLFENGLSSSHIVVVVVLFGWQDCKGKRRFHFEGFWLKLPGFNEVVADSWNQPMLATCPLERLSQKLRRLAKHLQSWGHREARFRKKRNFISYLEEEGRVVSKHEDMQDSRRC

SEQ ID NO: 47862 - protein, 333 aa, Zea mays
  Coding DNA Sequence Number=SeqID_4487
  Subcellular localization annotation: CTP_CleavageSite=25; ConfidenceScore=5.04e-01
MLDASKPKGYALRARRFGFFCPRPARMTRGTQPPCRRGRTLERVGEDLVHDAWGRKWGESPFKKGATPLDGSHAFTLPSCIASFHLSSPRMGSARVAFVLLSLEERNFAEVGTFQTSLGFKDFHQAARLHPLADGNPRRFKDLHHPCWGGGRAEPELYLPYGPAFAWAGVPLLPPASGGGNHPPALRRRRPPAMPGKANCCCPARVQHSVLCPGGGGQPHRGVSQHVVRCEGGTRVLGGSHSRFRGEDGSEDLLVRFGAAGARWCGVGRQVDAAVGADVVAAGESFSANKAVSATGGPTSGSLALMSGSRPSSGDANESLSAVASVLGPSLLL

SEQ ID NO: 47863 - protein, 318 aa, Zea mays
  Coding DNA Sequence Number=SeqID_4488
MDEGTPLDGLESENNAKPSHGLHTILSSLWGRGYLAHRLRIRFPKDEGVRRPKQPVQPRRLTGPAGGGSGHGLTTLDKVSAVSATLPRPRGSVPRPPGGGLGASATTRRPRAPQAHASLGRAVHHRQDFEARNIQAGQQSRRDINRGVAAPSASTPPSAGSGPASDGDTVGGSPPRRKTSAPRLGHRRQGLLQEPGPSRWLDRPLRSLIQLSLEDISPAHGLGSPTLGLVPPVDDPAKFQPPLLHLLGLGTDSASVHADTAASGSGSSQSGRGSSLTEQEKPREARTIEPRDSYASGIRIPHLSPSARGNSHSVKRSS

SEQ ID NO: 47864 - protein, 203 aa, Zea mays
  Coding DNA Sequence Number=SeqID_4489
MGQPRAPLVWRTGLSDMARTKTTQHKSTGPHGVPRHQLASRHEGSSSGSNDPIGDLEARVERLRSELCHGCREHAHDSRCIAELSAEVIRLEQEISKRNTTIDWAINSCSFAWDCEAKALAQVAELSASLENLQAYCNTLHEEAHVLYDRLHPNVPPEVAAMGAGPSRTADGELDLFGAPPAMNLADERSPEAGSGAVKDEEN

SEQ ID NO: 47865 - protein, 86 aa, Zea mays
  Coding DNA Sequence Number=SeqID_4490
  Subcellular localization annotation: CTP_CleavageSite=25; ConfidenceScore=5.26e-01
MAQPTVGRQRAVGAPDMSGAHRTVRCPLLAVGSATCPAQIARPTVGSPDSPVYTGQSADPANQRTGEEKSESERLSGGPFLSALPP

SEQ ID NO: 47866 - protein, 192 aa, Zea mays
  Coding DNA Sequence Number=SeqID_4491
MDAQAPPPNCDIAIIGSQSQPSTDVVHSSSKHYMSIAHVCLIVLAISLFGYLEKIIFIGILALVASEGASHIVGQSASSLTPASDGILLPSVGASAVGSGTDAPTNFDAENDGKDGERPIKRPKKTTSEVWDHFEKYTVTVEVNGSKNISSMPNDLEILEVIKENLILEDAFLDVGGDNVGAEDDDLPEVQL

SEQ ID NO: 47867 - protein, 130 aa, Zea mays
  Coding DNA Sequence Number=SeqID_4492
MSGAPATSSVPLEIDRWSSDFWARLDVRWRTGHALFTVRCAGMGDSDSARAARALNAVAARVPPEIPEGGEFELESSGAPDMSGGAPDTVRWHTGQSGVPDQRCLRLALCSFVEPNSWSYYWLSVNLLHL

SEQ ID NO: 47868 - protein, 140 aa, Zea mays
  Coding DNA Sequence Number=SeqID_4493
MAHRTVRCTPDMSGAPATSSVPLEIDRWSSDFWARLDVRWRTGHALFTVRCAGMGDSDSARAARALNAVAARVPPEIPEGGEFELESSAPDMSGGAPDTVRWHTGQSGVPDQRCLRLALCSFVEPNSWSYYWLSVNLLHL

SEQ ID NO: 47869 - protein, 97 aa, Zea mays
  Coding DNA Sequence Number=SeqID_4494
  Subcellular localization annotation: CTP_CleavageSite=45; ConfidenceScore=5.00e-01
MITSYKSTFGLKEGTGHSPCKITFMPFTFANKSTLRLCAILRILCASSYCGFDPSPKDLSPKIEKFRDALAKHRLLTPTTPLARQGSNDMSLVSSVI

SEQ ID NO: 47870 - protein, 87 aa, Zea mays
  Coding DNA Sequence Number=SeqID_4495
MAALASPSSSSAYPSLSRDLAPTDYECNCVLMDSRIDTLCDELRKMKIEIIPSGALSHISVEPALQDQIIMAQLSDKGVQIIKENLH

SEQ ID NO: 47871 - protein, 166 aa, Zea mays
  Coding DNA Sequence Number=SeqID_4496
  Subcellular localization annotation: CTP_CleavageSite=47; ConfidenceScore=5.65e-01
MKLWKETSRSSKTTTSSRRGLAATPSRLPVKAAFICVSFPHFDLFYRSSSRSSRKCLMARATDDGLIKKNEKLKAKLANSQEAIENLLGKMEILSIHNKELTTKIENIGSTPGVSLVEIPKIIKKDASTSCFDLIDDSNPCNQVLVKNVVIETCSDEIAMENEQLK

SEQ ID NO: 47872 - protein, 61 aa, Zea mays
  Coding DNA Sequence Number=SeqID_4497
MGKPVPSLLMLLLSRVTALVPTITGMGDHVSGRVRGKVCGQVHSSTRLTDLPYFSDLITLC

SEQ ID NO: 47873 - protein, 152 aa, Zea mays
  Coding DNA Sequence Number=SeqID_4498
MAALSPLTEARGRHQGLDSSDSCPSARLQRSSDGHDTTRTGCQNLSGCHDGMKDQGPLTEGWPRGEEDGRGARVRPLAPPPAWTLVTPYCKRTRPGRGTNTKAAGFPPLSRPSPAAFLPPFALGLAPTHLGWGTRRHLTRRPRDPPVSKRRH

SEQ ID NO: 47874 - protein, 135 aa, Zea mays
  Coding DNA Sequence Number=SeqID_4499
MSLEDDPKATGSTNASEATRSDVVFVEGRLRYARLKEIIAFRCCHERSPPPSPLGVGRLPPQTLVLPLVPCAVTVAVSLESWVVARRRRLGPPLMPHAAARVSRHRKPSSMSSHRSPSLAPQAVAAATKPRNPNS

SEQ ID NO: 47875 - protein, 49 aa, Zea mays
  Coding DNA Sequence Number=SeqID_4500
MEGCVQCKSPRTPIHSWVPLKSKKSVKGLFKDLGLFRTVLRAAADVESC

SEQ ID NO: 47876 - protein, 171 aa, Zea mays
  Coding DNA Sequence Number=SeqID_4501
  Gene Ontology: Mol. function=carboxyl- or carbamoyltransferase activity; Cellular component=ornithine carbamoyltransferase complex; Biological process=amino acid metabolic process
  Homolog annotation: Hit_ID=Q8SA97; Match level="QueryCoverage=84%, HitCoverage=23%, E-value=2e-11, Identity=36%"; Hit description =Ornithine carbamoyltransferase
MVPPVDVVGPCPRLGDVEAPPRSRSSLSSEAEVESEPLGQARRRPSAEARAEPEPWGWAKWSPSSSGAEPESEPWGRADRSSPSSGAEPKSEPWVGRSGVRRLPGPSLSPSPGSGGAEFTVFLAEPESEPWVGLSHPVLEGKPNANHVRARISYSRTQQLHNMDIITQCSK

SEQ ID NO: 47877 - protein, 30 aa, Zea mays
  Coding DNA Sequence Number=SeqID_4502
MVGCAEEKEEMGQNGYSRPRYFNDNFICIE

SEQ ID NO: 47878 - protein, 299 aa, Zea mays
  Coding DNA Sequence Number=SeqID_4503
  Subcellular localization annotation: CTP_CleavageSite=63; ConfidenceScore=5.51e-01
MGRGNRHTCSTVADTSGSCPFAHRASQPDFTGGPRSTSPDFSLSMPRVDRANQPDSSPPTSIPACARGPTDSGHPRRRPAHRCDPRDLPYVLDHFTGAISPPMNSPTPASGGDSRFSSHFLSRDGFPSILWEVLNSAGYPTPPLYTVQLYEEHRVPRCRVWLTLEAHPLQPGWRSLDSETIGLRTDDTVEAAAMKTLTTFCGYHPLEMVMHPLGLFPTEKKDDPMWCNRSDAMVLLANTAQTAKLTLDSREDFVVDLSTELVEKDLQVERLSQRITTLEQQVEIRDNTIDVLENQLHDV

SEQ ID NO: 47879 - protein, 203 aa, Zea mays
  Coding DNA Sequence Number=SeqID_4504
MARTKTTQRKSTRPQGVPRHQLASKHEGSSSGSNDPIEELEARVDRLRSELHHGCRERARDSRRIAELSAKVNRLQYEISECDTAIDWVVNSRSFTWDCEAKALARVAELRHRVTPQTKHTISASLENLQAYCNTLHEEVHVLYDRLHPNVPLDVAAMGARPSGTANGGSDEGIDLFGAPPFMNLADERSPEAGSGIVKDEED

SEQ ID NO: 47880 - protein, 104 aa, Zea mays
  Coding DNA Sequence Number=SeqID_4505
  Subcellular localization annotation: CTP_CleavageSite=52; ConfidenceScore=5.44e-01
MAGSAAPRALPRPWPARPPPARPAPCPPGSAAPAPPGLGRPGPGPTARPPLRAAGSAAPAPAPGRFNRPLAGGYEIDDSGYDYGAGEDEAVEGDFQEFQDYDEF

SEQ ID NO: 47881 - protein, 120 aa, Zea mays
  Coding DNA Sequence Number=SeqID_4506
MWGRHSSLTHLAAPAPQATAIWAPSTDRLLLRGDRIALTPNDHDLRESCASRASWRNFAAANCTWNLTSSAPGVHTVPTSWEIGSLCTITGERPAIAPARSVADFSATSSPLSLKQYLGD

SEQ ID NO: 47882 - protein, 120 aa, Zea mays
  Coding DNA Sequence Number=SeqID_4507
MWGRHSSLTHLAVPAPQATAIWAPSADRLLLRGDRIALTPNDHDLRESCASRASWRNFAAANCTWNLTSSAPGVHTVPTSWEIGSLCTITGERPAIAPARSVADFSATSSPLSSKQYLGD

SEQ ID NO: 47883 - protein, 32 aa, Zea mays
  Coding DNA Sequence Number=SeqID_4508
MGKIYSGRGVRVQRRGFQAVLTKNRVWMWDQK

SEQ ID NO: 47884 - protein, 172 aa, Zea mays
  Coding DNA Sequence Number=SeqID_4509
MSELAVASFLQWNGMFSKIKLDGGSIMDMMGSTSDKMYLCQDGQRIAELAADVRRLQDELAERDLVVDWAINSSSIAWDREAKARARVAKLSAALDSLQVYCNTLHEEVHLLYARLHLHVPVDPIAMGAKPSGTAGEGHDGELDLFRPPPSMNLADDWSPAAGNDETKDDED

SEQ ID NO: 47885 - protein, 29 aa, Zea mays
  Coding DNA Sequence Number=SeqID_4510
RYNSTHVLFTLTCIHSHVTLGFSPSVKPK

SEQ ID NO: 47886 - protein, 52 aa, Zea mays
  Coding DNA Sequence Number=SeqID_4511
MLLLSSTLLLLTQAVVQSLQVAGLSGHGTAKRTLSKARGDIKVKAETEVYSP

SEQ ID NO: 47887 - protein, 118 aa, Zea mays
  Coding DNA Sequence Number=SeqID_4512
MAAALCVRAARGKEGLLGRKWGERVRASGGSGHKWPRARWGESHARRGRGEGGREQLGGGYAGTTGLTSRARNAEREKKAGAGAREAGLTGWAHGQRERRERARAGKRQRRQVGPGEQ

SEQ ID NO: 47888 - protein, 268 aa, Zea mays
  Coding DNA Sequence Number=SeqID_4513
MTEVLKRSPTTSTRGAAGELGHHIATGVTEATMPNHRRGDRCKNRWGRGRCSGSRHAKCVERPAAVTLSEKGSGGKIPHRKTKRVKLHGTRVVSSELTDGKKILNDVGATRTLDKRKGPGRTASPTEVTGRAESFPTTMEEGREGWGRWKTEYLRPGWCGRRHRSQPPSQRSRAPTRAGPEAPEGEGAPAEAGEVRRALPKVERQRRPAEGWWGEGPRHPWTARATCGWCQSTGCRKMVTGNHPESCLGHPSCHCVHSCDHDSPPPSQ

SEQ ID NO: 47889 - protein, 318 aa, Zea mays
  Coding DNA Sequence Number=SeqID_4514
MVCLEEAPDGPARGHARSDLGVVARAEDIWPNRAKEPTANAEVSNVPAGSNEDSRGREGAHVVRGAGGGGEVGVRLGRHGDLGERGNTAEGAGDRSGPRRESEPGYRVDHGAEGVGVARGCAGDGGAARGDRGDVEAARSCAGEGGVENAEAARGSAGVSGAGWAERGDLGDAEAARGYAGVGGVGRAARGDSGNAEAARGCAGEGVAGRPREAVKWTNLRGRGARLWGTQGRGRGTRRARQGRHGEWSKGRAYEEQWMRDWGSKRTRRHEDGRKRDRCRRERRSGLGNRLGGETVEEVGGSGEGLSPVLSGNGSLEK

SEQ ID NO: 47890 - protein, 590 aa, Zea mays
  Coding DNA Sequence Number=SeqID_4515
MGRIRVALLLQLSWGLALFSHRSASRIFIMQLDCIPSPMVIHRDDHQPCSRGRAELGPAPVWAGDPLLPPAFGGEGHPPALRRRRPPAMRGKVAAVTGLTEGANSDNAGPVGRKRRQLQRAWHAGSAGSGAAREDLSGDLPVQAGATAIHRCGAGAQVAVVVGAKVVAARGGCLRRRDRRRRLRLDLRLFGFDSLSSPLVWGRGRGPFRSSVCPEVIAAAVEPPEAKVVVAAAGAVVGEPPRVRRPSSVEDVHHPGWGGGRAELGPTPAWAGDPLLPPAFGGEGHPPALRRRRPPAMRGKVAAVTGLAEGANSDNAGPVGRKRRQPQRAWHAGSAGSGAAREDLSGDLPPEEVVSADETVGGAGRSDLRLFGFDSLSSPLVWGRGRGPFHSSVCPEVIAAAVEPPEAEVVVAATRAVAGEPPGVCYPAGPLNLWPLCDELKLEAAVSAWTEAVSARKRGFVGPGAGGFPGRGGAAAAAGAWPGHPRAGPILGQAAEAVSQAEVLGGQLAEATERLAGVSARARTLAESLAMRVRAWCWRPASRWRSFRPCRRLRLGQIPPRVETTPRVLLLPLPMSEPAGTVCLKILLSV

SEQ ID NO: 47891 - protein, 262 aa, Zea mays
  Coding DNA Sequence Number=SeqID_4516
  Homolog annotation: Hit_ID=Q6QP51; Match level="QueryCoverage=36%, HitCoverage=43%, E-value=5e-38, Identity=82%"; Hit description =Putative growth-regulating factor 1
  Subcellular localization annotation: CTP_CleavageSite=20; ConfidenceScore=5.31e-01
MTASKKPPQSTRAPSPLLIRGSKAGPSEGFDTRPRARRVRDDSGYVRYMAEARATLLSRQGRSDSGHFALSLTDLTGKQCRSPRSDCCATHQGKADNSRVQPQAQQEAPPHPTLGLGLRRGSPPRQTPWLDLSLGLRRNRVLARPRPRPQEKSPPRPTLGLDRPRHRGYIITLPLASSGYKGTRPTYHLARPGLRRSSDGHVISYTRLKRFSDSHVGMHTGLRHSTAGHGHTALNSLVGLVEGPPGSETPTIINNNHEIHRM

SEQ ID NO: 47892 - protein, 137 aa, Zea mays
  Coding DNA Sequence Number=SeqID_4517
  Subcellular localization annotation: CTP_CleavageSite=56; ConfidenceScore=5.10e-01
MASSSALLSLLPPPLPGAYKRDHPSTAFHHTRPQPLHLPPSSSIGLGAVVSPLSVYDEGYSPSSPGEWDDQGLPGLGEGLRVMKAGEHREDKEGACFVWFGHGGGLTPSGITIKVRTCEEGKRFGLDLIGHEIAESD

SEQ ID NO: 47893 - protein, 453 aa, Zea mays
  Coding DNA Sequence Number=SeqID_4518
MVTSGLMVGESEPGCGPFPSLSLKDFHHQGWGGESAELSCSVPGLRTQVALEPLAAPASATAAGRGSSAGATARAGHGLTSNSTAFCPSLPHEFWRGRGPPGSSTRPEVSAIAVRPPGTEVVVVAAAGAGDGAPFVGLSLLRRPSPSEWGCSYLRRGNRSSVCNGTSNASVFVHYGCRGLNILVKGTPWPLFDEPRPGVAISVRTEAELARKWEPGWPEPSRVARQRGSTSESISRGLGSGWRPWKRLGRGPRGNRPSRLLGPDSRRSPWTASSSEAGSDLAEGVVDAEGATAPFSVKTRACRIRSSCSVCLLRPPRPENTPSLRCKAASPFLSCRASGLSVGNRDVCVGESCFSRKAWESLGSVGLAAYAYFRPSMRLSHRFSREGLKDRLGRRASEREDIRSAESLYPNASYLSQKVMSEVSVSRRRRSPSARSALAAYVYSVVSRIRFSK

SEQ ID NO: 47894 - protein, 114 aa, Zea mays
  Coding DNA Sequence Number=SeqID_4519
MRLHGRAVLGKDVGQAVRTGRCRTLPMRRGDGPGDGDGGDGEMGFAPIPVVTELPRSLGPPTVVLVHRTSDNPAGAPDHLISSVSVFFTLPKSVSPVTQILQHIGGTSMRKQLQ

SEQ ID NO: 47895 - protein, 150 aa, Zea mays
  Coding DNA Sequence Number=SeqID_4520
MGKSNKRKREPTPPSEDFGDSEYSEEEFSSESEGSPAPVSPPASSDDSDDSQGIAAEVWTYIRAVERSGLEGSDESEYSSDEEDSSDSSEEGGGGDGGDDDDDGGDGDDGDDGGDGGSRGGNGGSEGGNGGSSRGSNGGGSSKGSNKASG

SEQ ID NO: 47896 - protein, 87 aa, Zea mays
  Coding DNA Sequence Number=SeqID_4521
MPRPSEETVHASVKLPEQGIRLCLAGEASPRSPDFTQSPVNVDRPCLWHNFTGSLEDMVAGVTWPSILPPGWTVEWDPASAEEEHEE

SEQ ID NO: 47897 - protein, 277 aa, Zea mays
  Coding DNA Sequence Number=SeqID_4522
  Subcellular localization annotation: CTP_CleavageSite=40; ConfidenceScore=5.49e-01
MARRGASVLRSRRHHHHLGVITPRGTNSSNNNSSRSGDRLASKVTGKSRAPSKCSPFFHESNHRADKVLTHHLFIRASSPAAPKVMPPPPDTRPTDGSGSQQQESAEGGAGGPPPAAAKTALEASHAPAEDPAAAAPASGGVAAAEEVLARGFAPTPDTGGGAGGASSSNPPPAPEEMEVVFGQRLRSSVTLRQQSCGSGRRLRLSTSDWRTQLEERTRTMSRQFAFERSQLERDRKEYKRDLQKVCARELEAARREKKVTRREEAVTQWEALTTEY

SEQ ID NO: 47898 - protein, 312 aa, Zea mays
  Coding DNA Sequence Number=SeqID_4523
MAASGREQGARRKKHSRGAAQRRAQGFVAMDREVARLLLIQARRATAGSREVGDHHGWRCREMGVGPHAMGERAQGLGRHGSREGAGRRRRACCSGEVGRGTGLHPRKGRAARQGSSGRGTPWLLVSMGGRALVQTATGKEEDSVGKIAGGAPWPADSVAEQGGSPRPAGGDITREATMGERASVICCCGGGAEHHGEEEEPGVRRKKEQGQGPPRPGWLKLELDRACDWAPWRQGNREPREGAPSTGGRGRCSTSAGQPTPEGSWAAMGGREPSSLRSARCAWKKTGREEMAARKKMEGGSANLPSEHPYL

SEQ ID NO: 47899 - protein, 95 aa, Zea mays
  Coding DNA Sequence Number=SeqID_4524
  Subcellular localization annotation: CTP_CleavageSite=57; ConfidenceScore=5.19e-01
MARAYKAPRDFDRTPPHALDLTRAQTHRRLPVHGVSAAARSPCHRRPANRTLPNPVRPSEKTEHTSVKLPSEESEFASPERPVHDRRTPPDCRRA

SEQ ID NO: 47900 - protein, 84 aa, Zea mays
  Coding DNA Sequence Number=SeqID_4525
MGKPVPSLLMLLLGRGGYNGSSSLISREKQTIRIEFLSLQVTALVPTITGMGDHVSGRVRGKVCGQVHSSTRLTVGDLFSNAMS

SEQ ID NO: 47901 - protein, 131 aa, Zea mays
  Coding DNA Sequence Number=SeqID_4526
MTRPQPRATTLGPATAPDPTTWAGCKQTPDPHHMGESGAATCPEKVIYSKASTYNGSSSLISCEKQTIRIEFLNLARYPHVNPYSNFHLVDHASPWDPCPQTVTILLSKWIQPIPDLARVLEKSLDFYRDP

SEQ ID NO: 47902 - protein, 57 aa, Zea mays
  Coding DNA Sequence Number=SeqID_4527
MESHDLRAEWESRLVGGYEIDGSGYDYGAGCQHCNHCSGEDEVVEGDLQEFQDYDEF

SEQ ID NO: 47903 - protein, 458 aa, Zea mays
  Coding DNA Sequence Number=SeqID_4528
  Homolog annotation: Hit_ID=A4Q7K4; Match level="QueryCoverage=27%, HitCoverage=34%, E-value=6e-32, Identity=49%"; Hit description =Telomere-associated protein RIF1 , related
MKLGGQSPKRMRDLSSLWVPPVYRRLLSADKAERDMVERCLIKVSCVILPPQPLLSKAVASDLEQKLLSCMVNMLDDPSKKVQTVKSWGWIVSLLGPDAVNNRPLLNKLIKVPEQMFTDLNPQVQVATMATEIVAQQTVISPLKPIEQASAQPELFQDIIPETMVIVMDSATEIFRFLLKGKNSVIKCAALLEFGLRFMKVIAKELDHSLLASENIEIRRPTCNKERLKWLMVYEVVKFSFQSKSSWTAPGHKQIIGDQLTEWLSLSIILYSEMQQGQIVVHLENLWLKMVECLKRSQLVSDVPLINQKHRLLQAALNRPHRPISVATASVCRVATHGNTTLHPGCLISEFAELLMHRRKALDSSRKTVITSNPTDLTAERYDGSVNVSVGLGRKRLKIMKYSTKPKELNKNRANMGISPANTSFVNYSRRFFSNRINNAEKQVMSSPSTFLHKVQFV

SEQ ID NO: 47904 - protein, 224 aa, Zea mays
  Coding DNA Sequence Number=SeqID_4529
  Gene Ontology: Mol. function=triacylglycerol lipase activity; Cellular component=ribonucleoprotein complex; Biological process =lipid metabolic process
  Homolog annotation: Hit_ID=Q2R051; Match level="QueryCoverage=54%, HitCoverage=19%, E-value=5e-32, Identity=54%"; Hit description =Lipase family protein
MAWVDMSDCFCFHLWNAWEDASNGEGNLQHEYSGNDCLQLKGHQTYTEVSSLLEHLKLCMFFSKKSFLAFLKFGGYKQEDILIHKAKARLMQSSFALVCDKRTKCLLLFIRGAISTKERLTAATSAEVPFHHIILSEGKISNVVLGKLQSEVLKDAISQIVQDANKNRKFTETVELQISLKNCNPQKDKRFSGSVKLPHIPRPKMKRAVAMTRAVAMEMPAASA

SEQ ID NO: 47905 - protein, 102 aa, Zea mays
  Coding DNA Sequence Number=SeqID_4530
  Homolog annotation: Hit_ID=Q6QP51; Match level="QueryCoverage=37%, HitCoverage=17%, E-value=4e-09, Identity=76%"; Hit description =Putative growth-regulating factor 1
MQVACNRTAVAHLFGFVASGMEAQAHTSWTGKGDISKRILLHEGSGPRALLLIRGSKAGPQKGSTAALEHSGFKPITDQGFEGWPLGRVRQPPRALGLRAHY

SEQ ID NO: 47906 - protein, 104 aa, Zea mays
  Coding DNA Sequence Number=SeqID_4531
MESGLRRRSGLDWWIESFVKLSESGVGSSNLGAMACITGTAHRRKNTAANPRDAVGDPVAASITAPPSLGGAWLPGCSWGRCGGPWFSDERPRLSHTYRFDREL

SEQ ID NO: 47907 - protein, 325 aa, Zea mays
  Coding DNA Sequence Number=SeqID_4532
MRPGCTPPPAVTQDGDLQFDDRGKANRATGLCPSLSLKDFHHQGWGGDSRVPGSRTRVASEPLSAPASATAAGRGSSADEIARAAHGPTSNSTAFCPSLPHEFGHGRGPPCSSIRHEVIAAAVRPPGAEVVVVAAAGAGDDAPFVGLLLLRRPPHRVGLFVPAERYDSPVGCLNRFTKCGSPRVKATSEPPFDEPRPGVAVSARTEAELACKEDLVGRSLAGLPVSGTDTGIDLSRPRVGLMPAVDSRPRPRGDQPSRLPEPDSRRRPWRRWPGRSDDVVLQSGDLRTASPSEARSDLAEAVVDAEGAAAPFKRQDPSLQDRIVL

SEQ ID NO: 47908 - protein, 289 aa, Zea mays
  Coding DNA Sequence Number=SeqID_4533
MMTTSLVVGRSKPGCGLCLALSFKDLHHPRCGGGRGESGPASAWAGGPLLPPAFGGERHPPALWRRRPPAMRGKANCCCLDRVQLSVLHPGRRSCRARASHVQVLPTPSAAQHVILHEGGTHVLGRSRSCSCGENGSEDLPVRFGAAAARWCGVGGQVAAVVGAEVVVARGGFSADEIVGATRGQTPGSLALMACPRPSCGDVGEGLSTVASALRLSLLLFSRPKRRSLSLLVQWLPASHLEFVVPQALWCGGCSYPREWNRSFVCNGTLSMGVCSLWLSRPEYLGIWA

SEQ ID NO: 47909 - protein, 395 aa, Zea mays
  Coding DNA Sequence Number=SeqID_4534
MAERYQLPQSCVPPMTRRKDCESSPSGGSKGGKTRCIREREDMVAFQGGHPPFKGDSPYLLPEPSRAESSPTRSKVLPLRRGGWVPRVMQAGPEQKKPNRRARCMQLPSGYEHSSTIAQTSGDRERGIPRKGILLREGNRPRASLLIRGSKAGPSEGFNSRLRALGLRAHYWSEVRRPAPRKGSTAASGHSGSAPTTDQGGNNLVTESHQREASSPRTPSKGDWVRQITRRARTRAQPRKTTNSASPDPGLGLGLSPGRRRTPLRPTQGSDSGSAPEDDELRFARPQGSDSGSASEDDELRFARPQGSDSALASADGLRLARPRGSDSTSALEDRLDLDLGGASTSPNPGPGPDHVNRRRHHYPAPKLTQATGNKTGVPSGSLRYTSNDGASHAL

SEQ ID NO: 47910 - protein, 188 aa, Zea mays
  Coding DNA Sequence Number=SeqID_4535
MNKTPTLKVPLQMEPRFHLRRYEQPHTIGGPAEQQKADGWLAVARSSSSDNDPRSGWPNCSSDGLRADAAATLPSPTPTLEGRGQEPSAHRQIPTRILPDEWSTDLRAEAPYRSKGRTAPEHERRPSSARRLGRSSRARGATTALAAGGGTRSQAGKPNALKLTMPAVDQPRVVEVRPSRRASERPLP

SEQ ID NO: 47911 - protein, 123 aa, Zea mays
  Coding DNA Sequence Number=SeqID_4536
MGKPVPSLVMLLLGRGRVPLDSPTQWQDGRPSHSSNHVLQRTCKNYAASKAEYTNTQLDLPGALRPHTHQPSLSIPWQQIRAHRLGVQCLTDPDCRRAVTTLVPTITGMGDHVSGRVRGYVCG

SEQ ID NO: 47912 - protein, 197 aa, Zea mays
  Coding DNA Sequence Number=SeqID_4537
MQESLAGPTSQQNPPEGLPTLTTPLLPLPLSVGPNNRKQQERLHNNPETQSTVAQDCGFYFCFGRGLICKMRDREGVCTVSGRPIANQGPRLDLGIINQYTMTALGLRIYGPDLLNTELRAYRPIMIQGLGINSSHDLISGAPFPSNGHRVPAEPFTWLQIPTVDCKINDTHPFFFPQPEPCWRTESLGGRHGWPPC

SEQ ID NO: 47913 - protein, 95 aa, Zea mays
  Coding DNA Sequence Number=SeqID_4538
  Gene Ontology: Mol. function=signal transducer activity; Biological process=signal transduction
  Homolog annotation: Hit_ID=P49178; Match level="QueryCoverage=100%, HitCoverage=24%, E-value=2e-21, Identity=62%"; Hit description =Guanine nucleotide-binding protein subunit beta
MASVAELKEKHAAATASVNSLRERLRQRRETLLDTDVARYSKSQGRVPVSFNPTDLVCCRTLQGHSGKVVDFGLSPPFRHNFCDFSLSFRLLVCN

SEQ ID NO: 47914 - protein, 123 aa, Zea mays
  Coding DNA Sequence Number=SeqID_4539
MNIERLAMSTDSGARIPLDVLEGRKNFSYCLLPPRCLQSAPSLSLSAHAHLVQPPRRLQESRPPSPVPGSAIPVRVRPSAAPTRPQQGRPPPAKQGQSACSLAPALSALQQLLKRTACLLLAC

SEQ ID NO: 47915 - protein, 63 aa, Zea mays
  Coding DNA Sequence Number=SeqID_4540
MALLTSGISKAKKLPTGLLATNTILILDRFVFLVAAQLFLYLPAREPIFTNINKYTSTAGINK

SEQ ID NO: 47916 - protein, 199 aa, Zea mays
  Coding DNA Sequence Number=SeqID_4541
  Homolog annotation: Hit_ID=A2Y1Q2; Match level="QueryCoverage=50%, HitCoverage=41%, E-value=1e-43, Identity=90%"; Hit description =Putative uncharacterized protein
MRGHAAPGIRRRLAASRFRGYSAVRVPMETSPDHPDYTINGEEKLFFGQVKLLFQFIPQMLSRREKATNFKPDYDIDIHMKVLAMSVQESSILTGYKMKVRTIKVEKRINEIVNRLNKTKVERKPDLKAEREAISAAEKAERKAQLRDKKRREEMERLDKEKQADIRSYKGLMVQEKMTSNKQIASGSKTLQELEEDFM

SEQ ID NO: 47917 - protein, 31 aa, Zea mays
  Coding DNA Sequence Number=SeqID_4542
MARQQHDPRACSCSAHCKILYPIYSQSKKNN

SEQ ID NO: 47918 - protein, 246 aa, Zea mays
  Coding DNA Sequence Number=SeqID_4543
  Subcellular localization annotation: CTP_CleavageSite=31; ConfidenceScore=5.04e-01
MVTQDGDHQFDGGEKQAGMRPLPRPQLQGSSSSLLWRRVRRTGACLRVGWVRHSVLCPGDCGRPYRRVSQHVVRREGGTRVLRRSRSRSCGEDGSEDLPVRFGAAGVRWCGVGGQVAVVVGAEVVAAREGFSADEIVSATCGRTSGSSALAACPRPSSGDAGEEGLVAAASALRSSLLLFSCPERRSLSLLLQWSAASQLELVVPQALRCAGCSYPREWNRSSVCNGTLSAGVCSLWLSRPEHLGI

SEQ ID NO: 47919 - protein, 199 aa, Zea mays
  Coding DNA Sequence Number=SeqID_4544
MVLASVVATLFVILLVFCLPSCLHLRATPFSTEDVRAGASSPYSSDTNPDTDPRSGYCASTRTFHSMRTPSFSPSSDVPFVFSAFALFLLPNLLPPPTVTATSRPTLVDADAQVFVVSFSGNEQWGRRGMGVPDLLHMIHVRWLGIACLHDLSLTTVSTRGILLMSPPDAQVFVVSFSGNEQDLEILALVPRVLASCMH

SEQ ID NO: 47920 - protein, 380 aa, Zea mays
  Coding DNA Sequence Number=SeqID_4545
  Subcellular localization annotation: CTP_CleavageSite=26; ConfidenceScore=5.50e-01
MSSRSLMHRVFPPSKPSDGGYPPSFRLVVGGTQLRGSWYLSAIVRLQGFSSASPAVPLRWWSPETVTTSTWVGRSKPGCDLGPTLSFKDVHHPCWGGERGEPGLYLPRGPAGHLFFQLLVVATILQLCGGDVLQPCRGRRTVAAQLGCNIPPSSSLSWRGQERGPAGALWSSPLFGFNSWFASLEREHEREPSGGRVRPRTMAAAAEVAGGSPGARRPAGSPESLSSVSLVARGFSCSVKGTPRPLFDEPRPGVAVSARTEVELARKEDLVGRSLAGSSVSGTDAGIDLPRPRAGLMSLEDSWPRPWGDRPSRLLGPDSRRRPWRRWLGLGDDVVLQSRDPWTASPSEARSGLAEGVVDAGGAAAPFSRQDPSLQDRIIL

SEQ ID NO: 47921 - protein, 42 aa, Zea mays
  Coding DNA Sequence Number=SeqID_4546
MGTNGHLDLDTTGLRGGYASTKQNFQPHKTKNYCGYRSWNYH

SEQ ID NO: 47922 - protein, 148 aa, Zea mays
  Coding DNA Sequence Number=SeqID_4547
MPTQARGSQGIHAGEEVVGTGEDSGARRKAGGAAHGSGPRRVRRKAAGRCAWGWPERLEREHRRGDTVRSVQIRAWRRESWSRADESGSNRGRNCLSRPAGRGREGRGKGGDGRSGEKGQTGRRWRGAASPPWLRPARRWRSRGRRHG

SEQ ID NO: 47923 - protein, 234 aa, Zea mays
  Coding DNA Sequence Number=SeqID_4548
  Pfam annotation: Domain name=zf-C2HC_plant; Domain location=52-103; Score=37.6; E_value=4.6e-08; Accession=PF07567.3; Description =Protein of unknown function, DUF1544
MLLVLPTTDKSVRAEAQGPIVHVSQSLSETIIDLVIVPRITIPEEDFRRTVKYGFWPDLQNKDKVECTLCGQVVSGGIKRLKQHLAWAYGDAKLCPKASSGLRKEMTSYLEANKRKRPMFLDEDEEDDEVVEVAAADEANDTSAVESQACRLSLVLASSKAQPKTAKSVVEMLRRTPEEVVDERLSGSYQPTILASAKTARQFQIAIEATHSWFRYKPPTPYTTNDQEVASLIE

SEQ ID NO: 47924 - protein, 26 aa, Zea mays
  Coding DNA Sequence Number=SeqID_4549
MQLHTLRDDVVLYPQRCLLLVKGSGK

SEQ ID NO: 47925 - protein, 152 aa, Zea mays
  Coding DNA Sequence Number=SeqID_4550
MQLHTLRAFWGVCGSRGVTRVPGSRTRVASEPLPAPAYATVAGRGSSADEIARAAHGPTSNSTAFCPSLPHEFGHGRGPPGSSIRPEVIAAAVRPPGAEVVVVAAAGAGDGAPFVGLLLLRRPPPIEWGYSPVGCLNRFTKRESPRVKVASE

SEQ ID NO: 47926 - protein, 198 aa, Zea mays
  Coding DNA Sequence Number=SeqID_4551
MGRSAEGGCRPHHSSSQGREGRGGKEESATPQHLHKPQPTAATGRNRTNCQLLRQIRSTGSRSGLRAPDPTAWATGQRPQVELLPSSRKEEGNMWGERKMPHHRPRHLHGHQPAPPQPQQPPTSTPCSRARDGLPACCGACHQREDESLAATIPVGQTAMPAASSGGSVAGEEKRGKAVAGLGAARVAPRGSDALGVP

SEQ ID NO: 47927 - protein, 108 aa, Zea mays
  Coding DNA Sequence Number=SeqID_4552
MLDDGLHLARPQGSDTASASEDGLCLTRPQGSGSTSMLDDGLRLARPQGSDTASASEDGLRLARPRARTQPRPRKMDSASPEPRGQTQPRPRKTDSTSTSEEPPPRPT

SEQ ID NO: 47928 - protein, 94 aa, Zea mays
  Coding DNA Sequence Number=SeqID_4553
MGKPGPSLLMLLLCRVTALVPTITGMGDHVSGRVRGKVYGQNFEVEINSDAHGAKLTKVSEKPVYTRTLGSPKPTLNYAPAQLFTESLTIQKPP

SEQ ID NO: 47929 - protein, 232 aa, Zea mays
  Coding DNA Sequence Number=SeqID_4554
MTLEPHPLQPGWRLLDSESFGYRAEDTIEAIALHGLTTFCGFHPLELSTHPIGLFPAENEDDPMWKDRVEHAKDVWALYPGQTGHLTVRCMNALYRLQAVRGEAMSQLMGLAEATKITLDNREDLVVDLSTKTVEKDLQVLQMATQIQELEELVRARENTIEVLEDQLMNTQQQLEEANQHLDMHHQEIQDMEADEDVDIEGGEEPEPASSLDTTGSGRPPSPESSVVSFAH

SEQ ID NO: 47930 - protein, 59 aa, Zea mays
  Coding DNA Sequence Number=SeqID_4555
MKVHLRKRDRHMRPFRLDDGRVKKELLEVPKGFFGFGCPNEELSFSQEMIQGQTLLAET

SEQ ID NO: 47931 - protein, 645 aa, Zea mays
  Coding DNA Sequence Number=SeqID_4556
MQAACNRAKWTRSPTPDTPAWRPGPTRRATGAPDAACKQLHRLRHHRASSIAEPMPRLEATQRATQQRQPDAAANAAKSGPTTRPWSVSSNGSRTRNGCPANYSPRRINSRGWTGGASGRSSGRRFAFAETTAPKKAPSLLTDQGFEGWPPEGFNSRLRSRGPYTHYWSEVRRPAPRRVPRPPQATRAPCPLLIRVRRLAPEGFTAASDAERGMTRGLGLGLGPGRRRTPLRPTQGSDSGQAPEDGELRSARPRARTRARPRKTPQKMTNSASPDPRARTPPWPLPNDFRLARPRGSDSASAVEDRLDLGFGGASTSPDQGHRPATSTGSAIITLPRADSGRREQDRLRCSSDSHDITPAGCQDLSGCHIGMAFLEKVGRAGTRTGHALSWGRSLPSPAWTLVTPYCKRTRPGRGTNTKAAGFPPLSRPSPATSLPPFALAHALDPSGLGHAALTRRLRDPPGGPLAVSGAMIWFDGMGAHDSWMDPAAGLPLLRGPGGGSTRVQRSHGSSVSVTGRGWPGGPWTPVMGWVGWVGGEARPSLVTWPDPTHRPRGPRAPRLDPSRKWTWAPDLGVRPTPPSAIAPSPNRLVRPIMLLKPHARARLTAVVVVVFAEIRGARPSPSSLLSSPAPTARCCPSARPLAKP

SEQ ID NO: 47932 - protein, 152 aa, Zea mays
  Coding DNA Sequence Number=SeqID_4557
  Homolog annotation: Hit_ID=A2XFR6; Match level="QueryCoverage=51%, HitCoverage=22%, E-value=2e-13, Identity=50%"; Hit description =Putative uncharacterized protein
MKSWRRTSRSSKSTMSSRRGLAANPQSAACEGLQAPAPGGDDPDNSRDDDEDDDDKEDDEENINEEATGGAREDRLNTLAGVVAGLNTDLDSATLDLSRVHLELEDAHARIAALEAQLQGRDPPEAQVPAMALSPPRKRIRYGEPESITRLL

SEQ ID NO: 47933 - protein, 347 aa, Zea mays
  Coding DNA Sequence Number=SeqID_4558
MAGIYYDARDLPLPRRRGKKLREKEMGPQIPMKGDPQIPLAHRYEDSGLRDGVGGEVVQLHPIVVQDRPHKAARRHTESPLVEGDEAHDVPRRWGWSGSAHGRNPFRSLLIGERAKQTLADQILQIARRHRGKGPWIARRDDGHPSLGLRKPKKEAGSGAKNRHQTLSQEKRATLRLRRKNRAKKGLGKGDTPKKILPREGTWLRASLLIRGSKAGPPKGFNSRLRSCGPYTHYWSEVRRPAPRRVPRPPQATRAPRPLLIRGSKAGPRRVHSRLRRRARDDQGSPETPCSAPIEGNMALSPTPPCGKATQGPSTYQPESLGPDRTPGLRLVRMREQPDQPKHYARH

SEQ ID NO: 47934 - protein, 199 aa, Zea mays
  Coding DNA Sequence Number=SeqID_4559
  Homolog annotation: Hit_ID=A2YGC2; Match level="QueryCoverage=57%, HitCoverage=50%, E-value=6e-07, Identity=32%"; Hit description =Putative uncharacterized protein
  Subcellular localization annotation: CTP_CleavageSite=15; ConfidenceScore=5.13e-01
MKSWRRTSRSSKSTMSSRRGVRELLILARTWFAFGLPSKTGCDIGGFKVVLTMARLRHTARKSVIPFLPSRLAERPLRCPVTDRWEATCLVRRPENSLRGAEVCSEHYSISERDSAEEAMQDAARRALSHYCLVLGGVADGLNLRYYPRRPSGRTGGMVVSPVGEDNPRLSSTVNLAVVLNTELDHALDELSRAHAEIT

SEQ ID NO: 47935 - protein, 287 aa, Zea mays
  Coding DNA Sequence Number=SeqID_4560
  Homolog annotation: Hit_ID=Q6QP51; Match level="QueryCoverage=57%, HitCoverage=81%, E-value=8e-14, Identity=33%"; Hit description =Putative growth-regulating factor 1
MEAQAHASCNRRAECFVHATAPPLAPPPRLLDCAGRSSSHVVSQAHVPSGGSERTLSHGVKTTRPCSVPRTARARTTAAPRTTRPVALTPRRDRRRLWQEKQATLHLRHNNRVKKAASDRVGPTPTTGERFEGQPLGRVPRSPQATRAPRPLLIKGSKAGPRRVHSRLRRRARDDHGYVRYITKARAALPSSPETPCSAPIEGNMALSPLLLAERRRRGVCKKAESVPDRPLALCRGSGAALANRAPTEPLTASTYQPENLGPDRTPRLRPARMREQPDRPKHYARH

SEQ ID NO: 47936 - protein, 173 aa, Zea mays
  Coding DNA Sequence Number=SeqID_4561
MSFVLFDYYEKWILKTTEYTRHTLQDNPILQARVLTLEGDSSSLGIDDTFGEGLLRESGPSRRLGRSPRGLGQPSSKDVSSTRGLGWSTPASVPLTDDPTRLRPTRFPFRANSASVHADTATPGLGSSKSGQGVPLTKLEKPRTTRPTEPRDSYASGIRIPHSSPLHGATHAW

SEQ ID NO: 47937 - protein, 111 aa, Zea mays
  Coding DNA Sequence Number=SeqID_4562
MDRADDSAGAERARAIAVGWGSRENEGERRGSPAEKFTSGEAQSTVELRMAVAELGQGWRASLAGGGIGRREPDDWGAPSVTLLYGNIPGMTWASEGTCVLNPRRWALRHL

SEQ ID NO: 47938 - protein, 150 aa, Zea mays
  Coding DNA Sequence Number=SeqID_4563
MGKNNKRKREPTPPSEEFGDSEYSEEEFSSESEGSPAPIPLRESSDDSDDSQGLAAEVWTYIRAVERSGLEGSDESEFSSDEEDSDGGEDEDDDDDDGGDGDSDGGNGDGGSGGKGSTRGGSSTGSTRGGSSKGSTKGGGGKGSGGKASG

SEQ ID NO: 47939 - protein, 63 aa, Zea mays
  Coding DNA Sequence Number=SeqID_4564
  Subcellular localization annotation: CTP_CleavageSite=31; ConfidenceScore=5.42e-01
MQETALWSRYTMFANVIDSSQVRVQRGGSSRSAARSSRRSTQDPAEVEQLREELRRQQDQQAA

SEQ ID NO: 47940 - protein, 83 aa, Zea mays
  Coding DNA Sequence Number=SeqID_4565
  Subcellular localization annotation: CTP_CleavageSite=60; ConfidenceScore=5.34e-01
MVAFQEGHPPFKGDSPYLRPQPSWAESSPTRSKVFPYGAGAGSHTSCKPAQSRRSQTAVRGTGKGGYPEKDPSPKEPGSEPPY

SEQ ID NO: 47941 - protein, 223 aa, Zea mays
  Coding DNA Sequence Number=SeqID_4566
  Homolog annotation: Hit_ID=A2ZWV7; Match level="QueryCoverage=65%, HitCoverage=30%, E-value=1e-06, Identity=33%"; Hit description =Putative uncharacterized protein
MDAALEVAVGSETTQLTGMENAQQATTAFPELGEPAPTTVASFISNHTCPAAPPLLQELHQAPPNLKKKKKQESRPTRRSMRLAAIAWPCGNIQERARQVLLKRLGLLPKEGQPSDQVAASAALETCINLFKGPLSSLVLQALMDLCGILPPQGPAAQESRQQPGAFNCCDSAGPLSLAVVVRRHMCLSVYYLQCSGNFKVHATVYRCLNITANFELESAWAQ

SEQ ID NO: 47942 - protein, 189 aa, Zea mays
  Coding DNA Sequence Number=SeqID_4567
MEVSWHHVIKPTVMPEFGCLAISNGDDGGGAKEEPSEGAADPVDAFTGPCREGKDRQVRPAPTPSGQQWMWMSARAPDGQRLSFSRTPDDQQRMSDEILRSRSAGLLETAGRWALERSRSPQRPRAGLLERTHCAAAGAASTATPSPSASRLGLCVLCVLRAVPGPARPDGSPPCFRAVLGLISTHQAR

SEQ ID NO: 47943 - protein, 821 aa, Zea mays
  Coding DNA Sequence Number=SeqID_4568
  Gene Ontology: Cellular component=chloroplast thylakoid membrane
  Homolog annotation: Hit_ID=Q10A81; Match level="QueryCoverage=100%, HitCoverage=98%, E-value=1e-177, Identity=44%"; Hit description =Expressed protein
  Subcellular localization annotation: CTP_CleavageSite=95; ConfidenceScore=5.42e-01
MACCLQLHHLRRPSPAPLPARVLFLLSTPRLRPVRASPGSSPPNSFAGWSSDSDSADDGADKSTLGFGRAGGLLGPGLAAFFFLAGITFAAVSIRSSGTHAAGKLQNLPTETAATESYPDYHSHKEDGATREASLPTDWDEEDYDNLDKKEDTDEFLTPLQSNEVPGVPAEGEVGHLLQNTEPVTDGDHVVGEEANQFDNLIASDGNQDPPPPLPILDAAGPSEEIPDVEETSDPKMDLPENQHFDETLTSDAMVLDSDVVPIQDISEGAIAAAFHPEDKGVEQNPQTLDKDELSPSGLPDYMEHVPAGPIVVPASVDPTQENAIAALQILKVIESSAQAGELCTRREYARWLVAASNCLSRNTFSKVYPAMYIDNVTELAFDDVTPEDPDFPFIQGLAEAGLISSKLSRSDMNIPEDVHDNHILFSPESPLSRQDLVSWKMALDKRQLPEVDRNCLFKLSGYIDIDKINTAAWPALAADLDAGDQSITALAFGFTRLFQPNKPVTKGQAALAFSAGDSGEVVLEEVARIEAEKIAEAAVNAHAALVAQVEKDLNASFERELKEERERVETLEKVAEEARVELDRLRAEREEEKNILVRGRAAVESEMEVLLKLRSEVEEQLQNVLSKKVEVSFEKSRIEKLQKEIESDNSAVVQLQAWAEEEAKKAREHARALEEARNQWERQGIRVVVEGELKDDASAGVTWANAGKENAVDESINQAEALLEKLKTMSGEMEVRSRGAVERVMQHVRSFIAILKQQAADARQWCTEFGACAASRANEVSAQVKGSVSAFGATLGDKSKRAMEECKDGLERISHRFKTD

SEQ ID NO: 47944 - protein, 300 aa, Zea mays
  Coding DNA Sequence Number=SeqID_4569
MCPWLNKVQITSKGRRRKEVESGCVQPKAVSGWGTGLSGVHRTVSGAPDQRGANQPLSGFSPATSAKIHRTVRCAPDCPSCVRCSFPPYSVPLCELNCKGERLQVVEIPRKREKIKGKKNTVVLSGSRSAEARAESEPWGRAKRSFVVFRALARVRALGSGGAEFAVFRDLARVRALGSGGAEFAVFRVLARVRALGSGGAEFAVFRVLARVRALGSGGAEFAVFRVLARVRALGSGGAEFAVFRVLARVRALGSGGAEFAVAPLARPDCLSDSLCRVALQSEWRRRRCPSVRLASGAVE

SEQ ID NO: 47945 - protein, 416 aa, Zea mays
  Coding DNA Sequence Number=SeqID_4570
  Subcellular localization annotation: CTP_CleavageSite=59; ConfidenceScore=5.15e-01
MTEMTRSKDSLRISTNFDPIFSKCFLSFLSSFKGMSLTRDYSPNIGLQVCYRNYSLKTKAGRRGGFSEAEVESASRCRGRARAKGSGEAEVKGKCAFGPFLSILVIECKHRCLNVKMCPWLNKVQITSKGRRRKEVESGCVQPKAVSGWGTGLSGVHRTVSGAPDQRGANQPLSGFSPATSAKIHRTVRCAPDCPSCVRCSFPPYSVPLCELNCKGERLQVVEIPRKREKIKGKKNTVVLSGSRSAEARAESEPWGRAKRSFVVFRALARVRALGSGGAEFAVFRDLARVRALGSGGAEFAVFRVLARVRALGSGGAEFAVFRVLARVRALGSGGAEFAVFRVLARVRALGSGGAEFAVFRVLARVRALGSGGAEFAVAPLARPDCLSDSLCRVALQSEWRRRRCPSVRLASGAVE

SEQ ID NO: 47946 - protein, 188 aa, Zea mays
  Coding DNA Sequence Number=SeqID_4571
  Gene Ontology: Cellular component=chloroplast
  Homolog annotation: Hit_ID=Q6Z8N7; Match level="QueryCoverage=48%, HitCoverage=47%, E-value=4e-34, Identity=66%"; Hit description =Thylakoid lumen protein, chloroplast-like
MTPALLAPAGALADEATAGTAAPMLSVLVVVVSMLAGWLVGVGEASGINSVTAFYPEQAAADSNVSVAITGIGPDFTSLKSFGDVDAFAEGLIRLYYLEYTLQNPGERRRHIVSAIGMAFNGWYNRLHCDGPATFEYNGRTFPYAFGDVLNGRTPGKQFVKKFQGSPYLFVKMDQCKATIYGSDLTNY

SEQ ID NO: 47947 - protein, 224 aa, Zea mays
  Coding DNA Sequence Number=SeqID_4572
MTKMAEGVLVGVVAPVAIAWAMSCFGLSFYILSKSLLVSNQMTDITSMGDGKRCWKQGSECLKCVEKMITRMHASRWRNTQLCCREESLQCCVKKAQYHQSVLREQLEYQRQQSEYQRQQAEYQKKRDEYYASLQAQNQALLSQLAQQAGVPMPTYGMPPPDFALPMPMLAPPPPSQFPMGFQTPPASVAAPGDGSDQDDTTHSWMNNLFNTHSPSGGGGDGYE

SEQ ID NO: 47948 - protein, 86 aa, Zea mays
  Coding DNA Sequence Number=SeqID_4573
  Gene Ontology: Mol. function=transferase activity, transferring glycosyl groups; Cellular component=integral to membrane; Biological process=cell wall organization and biogenesis
  Homolog annotation: Hit_ID=A2YHR9; Match level="QueryCoverage=97%, HitCoverage=11%, E-value=1e-25, Identity=64%"; Hit description =Putative xyloglucan glycosyltransferase 10
  Subcellular localization annotation: CTP_CleavageSite=54; ConfidenceScore=5.00e-01
MALWKKWNLGSVWSDSLMTDKSVLRKLILPFYSFTLFCIVLPLTMFVPDWVVCYVPALMSLLNVLPAPVSFPFVVPYLLFENTICP

SEQ ID NO: 47949 - protein, 138 aa, Zea mays
  Coding DNA Sequence Number=SeqID_4574
  Subcellular localization annotation: CTP_CleavageSite=72; ConfidenceScore=5.08e-01
MARACNHALRLLPNSIATQLACSGGSTRCRNLSVHAQLSTQDDAYTTEPPLKKAQVTQSLRRTRRRAPGGARQSLISVGTSCGGGDQWSSDIALTLRQLRLDDLVEDGQRDADVLVHLLVQQVPHIRGGIQSYIYFNN

SEQ ID NO: 47950 - protein, 65 aa, Zea mays
  Coding DNA Sequence Number=SeqID_4575
  Subcellular localization annotation: CTP_CleavageSite=33; ConfidenceScore=5.07e-01
MDIFFWINGLTPFSSYFAFTNSVIREQACLRGRFMMRGYPLKVLFGSFKVWYSGELRIIELRRGV

SEQ ID NO: 47951 - protein, 544 aa, Zea mays
  Coding DNA Sequence Number=SeqID_4576
  Gene Ontology: Mol. function=nucleotide binding; Cellular component =mitochondrion; Biological process=embryonic development ending in birth or egg hatching
  Homolog annotation: Hit_ID=A3BRB3; Match level="QueryCoverage=75%, HitCoverage=65%, E-value=0.0, Identity=83%"; Hit description =Putative uncharacterized protein
  Pfam annotation: Domain name=AAA; Domain location=199-366; Score= -35.5; E_value=0.027; Accession=PF00004.20; Description=ATPase family associated with various cellular activities (AAA)
  Pfam annotation: Domain name=AFG1_ATPase; Domain location=123-529; Score=330.1; E_value=4.1e-96; Accession=PF03969.7; Description=AFG1 -like ATPase
  Pfam module annotation: Pfam domain module=AAA::AFG1_ATPase; Domain location=199-366::123-529
MAWRGGVNDGARRMSGADGGMNGKVVLVQSCLEAPSLSVSSRLTARRRRHCRWQLLIAASGGRVAAPGRLLFCCSGLSRTGRGEADIPVRKACSGRASPTAVRALEFLAQAHNFFMVFDIGRGGPMVEYERRIASGELVDGDSFQVDTIQQLQRLYEELIENEEDCQLDRYKSSEKSGRSRWLWSRLITQPSTYAPIKGLYLYGGVGTGKTMLMDLFYEQLPFNWRKKRIHFHDFMLNVHSRLQMHKGVSDPLDVVAAEISDEAIILCLDEFMVTDVADAMILNRLFRQLFSKGVILVSTSNRAPDKLYEGGLQRDLFLPFIDTLKERCIVHAIGSAVDYRQLGSAEQGFYFVGKHYSTLLKQKLQSLIGDEKPSPQTVEVIMGRKLQVPLGANGCAYFPFEDLCDKPLGAADYFGLFKKFHTLALDGIPKLGSSNRTAAYRFVTLIDVMYENKARLLCTAEAGPVGLFENIVTVAEARKVSPRSSRSQKSDDTDLCVDNELGFAKDRTISRLTEINSREYLEDFEMRLRQQQQLPLQGLDKRW

SEQ ID NO: 47952 - protein, 51 aa, Zea mays
  Coding DNA Sequence Number=SeqID_4577
  Homolog annotation: Hit_ID=Q7XBE0; Match level="QueryCoverage=66%, HitCoverage=4%, E-value=8e-08, Identity=60%"; Hit description =Putative gypsy-type retrotransposon
MAPKRKASSSSAAVIPPIDPNSQLPFAAFLGILPHFGMWKYLYHCRPGMAG

SEQ ID NO: 47953 - protein, 190 aa, Zea mays
  Coding DNA Sequence Number=SeqID_4578
MSKNTRDTRFIPRFGHTTKVPYFLVEAPTKSWVSFNPNPPFADHKDLKWERQEMCEREWEVFFKLEMEFGSCSCVGREDRLNRPWDRFNRLGQADSQSASQTGRLQVILQKQVLTPVEPPLGPVQPPGGQTGSHSASQEVRPLKKLSSAAVKFSWKAQLQLKKLNSAEVKFSWKAQLQLKKFSCFSTRTL

SEQ ID NO: 47954 - protein, 192 aa, Zea mays
  Coding DNA Sequence Number=SeqID_4579
MGSLGVENFMAPLLALMRAQQEKKGNPRRSRILISAACAALCFAAIGGRDRERENKGERQAAGSPYGGAGGAAYYRIPPPPPPARGRVYRWGAIGQIADSVSDVAVLGPVILILLQLLMVKRDSWEALYLTTGSTTKLFKFQDPFLFVGQELLASVDYQPDSQLSARIRAQMGQESAADAIPGLMVSVGVSG

SEQ ID NO: 47955 - protein, 379 aa, Zea mays
  Coding DNA Sequence Number=SeqID_4580
  Gene Ontology: Mol. function=sequence-specific DNA binding; Cellular component=nucleus; Biological process=regulation of transcription
  Homolog annotation: Hit_ID=A5AP07; Match level="QueryCoverage=41%, HitCoverage=66%, E-value=7e-16, Identity=38%"; Hit description =Putative uncharacterized protein
  Pfam annotation: Domain name=VQ; Domain location=94-124; Score=42.4; E_value=1.6e-09; Accession=PF05678.5; Description=VQ motif
MRRERLVPLPQPDGMAQPPQKSNYTVARVENDDSHTHILPSSVLTRSLPPRREAKPNLPKTTFFMDAGAATAARERPAPPSPVPVPQASPDPSNPFPTTFVQADTTSFKQVVQILTGTPETAAAAASGGTQASPPAPQKAAPAPPGPKKPAFKLYERRSSMRSLKMLCPLLPAAAAFAAAGGSAGAGFSPRGFSPRGLEVLSPSMLDLPSLALGSPVTPLPPLPGSQEAAAAEDRAIAEKGFYLHPSPRGNAGAGADLQPPPRLLPLFPVQSPSPTGRSPHVVILVFVTVIRRIREGLIDHRIPVLLLVPDELYVADFSLAFSPFLALSMCLLLTWFGGGKLVDEAVKTQLGVSQAKWTLKLTLSIAEVWLEKGVISIR

SEQ ID NO: 47956 - protein, 674 aa, Zea mays
  Coding DNA Sequence Number=SeqID_4581
  Homolog annotation: Hit_ID=A2Y6U3; Match level="QueryCoverage=12%, HitCoverage=15%, E-value=3e-15, Identity=53%"; Hit description =Putative uncharacterized protein
MERPTMESLIGKSPFPATPGARATAAAADVYVALDRFFLISGNMERLTLESMMIGKPTSPTTPGARATATAAEVYATLDRFLILSSNMERPTLESMMIGKPTSPATPGARATAAEVYVALYRFFLLSGNMEHLALESPMIDKPTPPATPGARAIAVEVYTALDRIFHLSGNMERPTLESLMIGKPIPPATPGALATPADVYAALDRFFLLFGNMERPTLESLMIGKPTPPATPGAWATAFEVYAALDRFFLLSSNMERPAPESLMIGNPSPPATPGAAWATAAEVDAALDRFFLARTDLLGIVSQIDELISDAFKCQTVSERATKEIEFFSGFLTDTKASFKHWSSRLKQALETGLVKTEAFSKNTPGMCLNIAAKDPSDSPVPSPAMSDSDEILKDLSSRYDIYGLNESNTEDPLEWSGSSTSSIARSTISRATAAEVYEVLDRFFLLSSNMERLTLESMMIGKPTSPATPAAEVYVVLDRFFLLYGNMERLALESLMIGKHTPPATPRARATGAYVYMTLDRFFLLSDNMERPALESLMIGKPTPPTTPGARATAVEVYAVLARFFLLSGNMERPALESLMIGKPTPPTTHGARATAVEVYEALDRFFLLSGNMECPALESLMIGNPLLPPPLALGRQPPRSTRRSTASSSPAPTSWALFLMLPPPLGSLAL

SEQ ID NO: 47957 - protein, 207 aa, Zea mays
  Coding DNA Sequence Number=SeqID_4582
  Homolog annotation: Hit_ID=A3B660; Match level="QueryCoverage=64%, HitCoverage=25%, E-value=1e-17, Identity=39%"; Hit description =Putative uncharacterized protein
MSKRATEEIEFFSGFLMDTKASFKHWSSRLKQALETGLVKTEAFSKNTPEMCLNTVAKANVKLIGCSSKLPDIDPLQWFMSPLKTMVLTDPSDSPVPSLAMSDTDEILKYLLSRYDIYGLNESNIEDPLEWFLSPLNTMVLSDPCPVRSDMEGDENPIQTPVVHSKTLLATHLESMESTKQKGRLAGESTLKKELWTRFEAASANEL

SEQ ID NO: 47958 - protein, 207 aa, Zea mays
  Coding DNA Sequence Number=SeqID_4583
  Homolog annotation: Hit_ID=A3B660; Match level="QueryCoverage=64%, HitCoverage=25%, E-value=8e-18, Identity=39%"; Hit description =Putative uncharacterized protein
MSKRATEEIEFFRGFLMDTKASFKHWSSRLKQALETGLVKTEAFSKNTPEMCLNTVAKGNVKLIGCSSKLPDTDPLQWFMSPLKTMVLTDPSDSPVPSLAMSDTDEILKDLLSRYDIYGLNESNIEDPLEWFLSPLNTMVLSDPCPVRSDMEGDENPIQTPVVHSKTLLATHLESMESTKQKGRLAGESTLKKELWTRFEAASANEL

SEQ ID NO: 47959 - protein, 219 aa, Zea mays
  Coding DNA Sequence Number=SeqID_4584
  Homolog annotation: Hit_ID=A2Y6U3; Match level="QueryCoverage=35%, HitCoverage=14%, E-value=3e-09, Identity=44%"; Hit description =Putative uncharacterized protein
MERPTLESLMIGKPTPLATPGARATAVEIDELISDVFKCQTVSKRATEEIEFFSAFLTDTKASFKHWSSSLKQALETGLVKTEAFSKNTPDMCINTAAKAHYLPIPRFFLEQGWDDPVVLGSPCRLPTSRGWVRPQRFAMGPPVGSGSSALDFSVGICFQEWIFNKFNCSITYLPGDSRRGLRGARPLLPPLWQHGAPDTGIHDDWQAHFSRHPWRPLL

SEQ ID NO: 47960 - protein, 179 aa, Zea mays
  Coding DNA Sequence Number=SeqID_4585
  Homolog annotation: Hit_ID=A2Y6U3; Match level="QueryCoverage=39%, HitCoverage=13%, E-value=5e-10, Identity=48%"; Hit description =Putative uncharacterized protein
MERPALESLMIGKPTPPASPGAWATAVEIDELISDAFKCQTVSKRATKEIKFFSGFLKDTKASFKHWSSRLKKALETGLVKTEAFSKNTPGMCLNTAAKDPCPVRSDMEGDENPIQIPAVHSNTLLVTPWESMESTKRKERLAGKVPSRKNCGLDLMRLRPMSCTFDKICLKCFLDKLE

SEQ ID NO: 47961 - protein, 76 aa, Zea mays
  Coding DNA Sequence Number=SeqID_4586
MSVTFGTPENYKTEFLRFKADRVRLSKPLSLFSFYWFECCRAKVAAMKHIVLARFMKATNPNHPLNNLGNGNILLG

SEQ ID NO: 47962 - protein, 225 aa, Zea mays
  Coding DNA Sequence Number=SeqID_4587
MPDRVLEVPAVPYGMVHVLVVRTLGIKDFIQCLYPSAGCAAGSSDEWTGGAHLLAGPLLPAPIRRLVRIAPWRGWCGFRASNEVLGTFIRGDVEVCLPEQLFEGGRRFLEYGSDKGRVVGSPVEVFNHRCLDDFGDAVPHGLKPLEVRPEGFIAPAPNGFEVPWLRRLVEEGLEVGDEAPTEVVPTVDAVWGRCRSNYSASCPRTMGKYAVMTSFVTPAARAAVV

SEQ ID NO: 47963 - protein, 190 aa, Zea mays
  Coding DNA Sequence Number=SeqID_4588
MSKNTRDTRFIPRFGHTTKVPYFLVEAPTKSWVSFNPNPPFADHKDLKWERQEMCEREWEVFFKLEMEFGSCSCVGREDRLNRPWDRFNRLGQADSQSASQTGRLQVRLQKQVLTPVEPPLGPVQPPGGQTGSQSASQEVRPLKKLSSAAVKFSWKAQLQLKKLNSAEVKFSWKAQLQLKKFSCFSTRTL

SEQ ID NO: 47964 - protein, 200 aa, Zea mays
  Coding DNA Sequence Number=SeqID_4589
  Subcellular localization annotation: CTP_CleavageSite=9; ConfidenceScore=5.38e-01
MGVGKGWLVAVVGGERLPPSSINSVLVSPTFSHLLLLSTACSLLPPSFPPWARVRRVAVLCLVLVTSVNVSRLLPRRTSATRSTRRRSSPPSLRGLRAPVSPPASSDDWDDSQGIAAEVWTYIRAIERAGLEGSDESEYSSDSSEEGSGGDGGDDDDDGGDSDGGDGSGKGGDGSGKGGDGSGMGGGGKGSSRGSNQASG

SEQ ID NO: 47965 - protein, 141 aa, Zea mays
  Coding DNA Sequence Number=SeqID_4590
MANEAATIEAKTIIIVQSTILDQGVSLNQYNPTILNPRSSLNDSPFGVSLCYHPHRTQILLSLISKTTTVGTLGRGSLACQYTSSTPMARSSMFARGETFAPRGRITFGSLDFLATTASELTSPTPTYHCCRHGTCTLQQK

SEQ ID NO: 47966 - protein, 446 aa, Zea mays
  Coding DNA Sequence Number=SeqID_4591
MHRVLPPSEPPDGERPCCFRLAVVGGTQLRGSWYLSAIARLQGFSSGSPAASPCRWSPKTVTTSLMVGRSEPGCGLCPALSFKDVHHPCWGGGRAEPELYLPHGFVGHPLLQHSGERALTGLAEGADFDNAGPSGRKRHQLQHAWFAGSAGSGTASGATSHRWVECGYHSSRAGLRSSGDSWAQVAGEVLVADGIAAAICAPGLRLFGFDSLSLPLEWGRGRGPCRSSVCPEVIAAAVWPPGAEVVVAAAGADVGEPPEILSSRRPSNVGGCSYLREWNRSSVCNGTLSAEAAVSAWTEAELARKEASSVGAWPGRPLAGPTLESGCQAMSRADVLRGQLAEATERHDADIFLRGGDPSTVSPSEAGSDSAEGGVDAEGVAAPPIDDLFIGNRIVYPSESYFPRKVMSEKVMSEDPTIEVVEKHERCSGRKIFSEENFDAEGVPPF

SEQ ID NO: 47967 - protein, 369 aa, Zea mays
  Coding DNA Sequence Number=SeqID_4592
  Homolog annotation: Hit_ID=Q10QV1; Match level="QueryCoverage=69%, HitCoverage=33%, E-value=1e-100, Identity=72%"; Hit description =SacIy domain containing protein, expressed
MEDIWELNSPSWRCMSASIVVINSNDGGTVAEAKLSPALDPGISDTRIPLCVGASGGVLVGHVQTKVLKAINGACDHVGLLPEVELAVTKLLLVVDERRQRERLLLVVFVRGFQIFCEQRGQWKATTQSQEFLRTLQRYYNNAYTDHEKQDAINMFLGHFQPQQGKPALWKLDSDQHYNIGRQGTLKEEIGRSFIKRSLSDGNILLESSLPVTICNNETDNTELLPVQQLDDIREASDSAPEISICEPNLCSSMNYGTVPGRHSMSEERQSYLKRLGYPELHSSNFFDLDLLSSSGNSFDEEVFERSLLINSPMDVISPESSMSYSEQGHTDEGRDDTDLSRSSSQLSDIRDYSDHFAQWVVNGDTLCY

SEQ ID NO: 47968 - protein, 614 aa, Zea mays
  Coding DNA Sequence Number=SeqID_4593
  Homolog annotation: Hit_ID=A2Y9N4; Match level="QueryCoverage=13%, HitCoverage=3%, E-value=3e-10, Identity=42%"; Hit description =Putative uncharacterized protein
  Pfam annotation: Domain name=zf-CCHC; Domain location=107-124; Score =7.4; E_value=0.12; Accession=PF00098.14; Description=Zinc knuckle
  Pfam annotation: Domain name=zf-CCHC; Domain location=126-143; Score =16.1; E_value=0.0056; Accession=PF00098.14; Description=Zinc knuckle
  Pfam module annotation: Pfam domain module=zf-CCHC::zf-CCHC; Domain location=107-124::126-143
MAVGRLLSHGAPDIPVCHQTLSESSALVHRTLSDGAPDSPLPPPRAARPEPRREPHCPMIKVVAHPVSSRRALRPSPDAEGWVEVCSRCRLRGPQPPRRAIPQDLRRRCFNCMAPSHKVAECRCPVRCLTCRSLGHRAAWCPARLDWAPLCKNSMSVWDRLGPLLIEAKPRSVKVWREVPSRGGTVEGAGAPDPQALMPAEDQASLLSQVEDDWSPNRGLRMAHAEVVLFPSLVMVEFGGIPVHAWELATTQNLFRDFCSEVELHPDTVNCLDFSSFKVFEWCRRPQLIPGSFELLIPERVMSSGGPPAVRRLLSYSVTASVSRVPQADAAISPSSLTSDGGNRETGSRRRRLDQCALERLGVSASVRPKARCGRVVRGICTPPGGLARPLKSDGSVRPLEIGGPNVVSPSRGPIVGSGGLPTAFKGVKVPPPPSVGASPVASDAGWVLVVDGPLSLSHAGGGGGDLVSSPVVGESQGLGSSVPLPDDGSGDPPLSPAAPPAELVGMKSPMKMLAPGMRAGFIERMSKTVDSILGVPKKRQQRSRPQAGSAFPHRSRRLAGAGVEKLLVPQRVQKGKLRIVKELGLLQADHDDVLSPSVLDDYAKVFVKRPLDL

SEQ ID NO: 47969 - protein, 322 aa, Zea mays
  Coding DNA Sequence Number=SeqID_4594
MMPNGGSGGSSKGMGGYASGGSGGQVKGVEWVGAVAASEHDTSGKVAYGSGRAAVAVEDREGSAVERPKAGKKRARWRKGSTQAEWQRRATTRGSTRERGVADRGREQSGCWRGQQDRRSAVKEGVGVEGMRKGVAALGGDAEPQQGAAPGIVGVAGRGREQPDCERGYQERRGRGRWRGGRLRECRRVGPASRETPPMRSTGGSRHRPWSVMGLHRACARWGVATPTSEGVGPRQRGKERAYAGRLRDVGEVDHGQGATDSSLWPSRDDRSLKKTLGERRPEGAAAGGRAERSWRASRLEARPPGGAASGAQPSSGKHAPS

SEQ ID NO: 47970 - protein, 156 aa, Zea mays
  Coding DNA Sequence Number=SeqID_4595
MTTTTPRLRTSPSRRRVGRRVEPKVGGTNECEDEHPKVWVEEAVVLIDEEVPLDGSPKDNIEVEHTGFMIAEKVLLNGNLGLTSCATALTNDVLQLDSDRPRVLGEDHIVLSSSGWDSEGHRIGENMVVQSVALQHEDEVAPAVVGGGDRVEEDKD

SEQ ID NO: 47971 - protein, 99 aa, Zea mays
  Coding DNA Sequence Number=SeqID_4596
MGGLGRHTSQPRKAKHPKETQTELRRVTKVSDFNAKEKSIKNHQIIFITQNTGDMRGPQVTVYAIKIMHGLRGARERKANMDLANRHDKDAQKRSEYKK

SEQ ID NO: 47972 - protein, 60 aa, Zea mays
  Coding DNA Sequence Number=SeqID_4597
MGGCTPKDGPLKVPTNPLDRNQVRLTGIMPVKTNLLDDIHNVEQVKEDRESDSGHDVINI

SEQ ID NO: 47973 - protein, 68 aa, Zea mays
  Coding DNA Sequence Number=SeqID_4598
MDLEHNFHTPLFSQTAQEYLGFHKLVFASSVPPINKGELGLVRCTGSKTQMIKNFKPEFPDENTVSKC

SEQ ID NO: 47974 - protein, 355 aa, Zea mays
  Coding DNA Sequence Number=SeqID_4599
  Homolog annotation: Hit_ID=A2X9M7; Match level="QueryCoverage=46%, HitCoverage=21%, E-value=1e-80, Identity=91%"; Hit description =Putative uncharacterized protein
MKSSLSRGGGLSGTFIGEGSGSTRAALLLAAAEKRAAMHQLVVVLAPAAVRMPAAAPTPQRKEVVAAASKAGDTAAATWRKGGRVVFVVEKPDGACYFASIATQIGEELGDIYDYVAPCFPSRYEIFQLMVNLYTERFIQMLRLLSDRANDIQNINILKVTSWVVQYQEDLIGLGVDESLAQVCSESGALDPLMNMYVERMQATTKKWYNNILEADKTQPPKSREDGKLYTPAAVDLFRILTEQVQIVRDNSTYVMLYRIALAVIQLENGNPNPNQGWKGIYSMLWAKAHYKEDVEIAAKLGENTRQQLLGEDVGKLQRGGEAENLNVTSGDSLADEVQVDLHVLRVLMLHGIGG

SEQ ID NO: 47975 - protein, 106 aa, Zea mays
  Coding DNA Sequence Number=SeqID_4600
  Pfam annotation: Domain name=IQ; Domain location=48-68; Score=27.5; E_ value=4.8e-05; Accession=PF00612.18; Description=IQ calmodulin -binding motif
MGDLSINIRADLAKMQATLQKVEQGLLQIKVAVQHEQHQLALSAWLQTSAVVGIQAAARGFLARRRVRDMRRQMLEAALVTVDLGTRGRNLALSGRPSAAAPGCYL

SEQ ID NO: 47976 - protein, 155 aa, Zea mays
  Coding DNA Sequence Number=SeqID_4601
  Homolog annotation: Hit_ID=Q5GAU8; Match level="QueryCoverage=20%, HitCoverage=22%, E-value=4e-07, Identity=77%"; Hit description =Putative uncharacterized protein
MTDVEKEVATERRMESPPRCDCEDRVVIDEDTAKYFVALMLPSAKQSRMKWYLTRIVSPEEITEQSSKSERLSRSGGGSYVLGLTARHGHHLLLDRLLANETLVKEEEDPTRTLAGVDVADVVAVTVPDKMCIPRAPRVVKTVVESPHNIADDPL

SEQ ID NO: 47977 - protein, 145 aa, Zea mays
  Coding DNA Sequence Number=SeqID_4602
  Subcellular localization annotation: CTP_CleavageSite=65; ConfidenceScore=5.18e-01
MWGHCVSRLHANNPHGSPLSPAGNTCRGLLRLPRSDSGVFISLIAAALPIQSSACARPEAITLPSGAEVFHRGQEETIQTVARVLNSPSCLEASPGVYGSRRAKHPYLGPWSLDESLVGALCPTWRCRGTVVRRGWLRLHPESWW

SEQ ID NO: 47978 - protein, 238 aa, Zea mays
  Coding DNA Sequence Number=SeqID_4603
  Gene Ontology: Mol. function=nucleoside-triphosphatase activity; Biological process=cell division
  Homolog annotation: Hit_ID=Q6YUV9; Match level="QueryCoverage=71%, HitCoverage=36%, E-value=1e-77, Identity=84%"; Hit description =Transitional endoplasmic reticulum ATPase-like
MAAMNGEGNGAGPAEQGPAPDLARGVDGTVTGEVRRVELQGAAGRAIPTEAVGRGPEGRKIFKEDEQLQLFNNQIEEDRKIMISRHNLVKLHKVLEEHDLSCVELLDVKLDGIVLTKQKAEKAVGWARNHYLSSTTLPSIKGDRLIIPRESLDISIERLKEQGITAKKSSQNLKVLAKDEYERNFISAVVPPNEIGVKFDDIGALEDVKRTLDELVTLPMRRPELFSRGNLLRVWLFC

SEQ ID NO: 47979 - protein, 589 aa, Zea mays
  Coding DNA Sequence Number=SeqID_4604
  Gene Ontology: Mol. function=nucleoside-triphosphatase activity
  Homolog annotation: Hit_ID=A3ABD3; Match level="QueryCoverage=81%, HitCoverage=30%, E-value=1e-122, Identity=52%"; Hit description =Putative uncharacterized protein
  Subcellular localization annotation: CTP_CleavageSite=66; ConfidenceScore=5.68e-01
MRLRCLLLHPPMWSNSSSLGISASGVSRGSFVRRFSALGAPRPPGPARRLCRFYGSKGGVGSAEARGAAASPAAAGSSGRCFEQEHARLGERDQQEWLSGERFLTGCKRRESTFLTRRERFRREFLRRVVPWEKGSLSWQNFPYYVNDNARQLLSECVASHLRHKSVTSEYGSRLESSGGRILLQSSPGTELYRERFVRALAHELQVPLLVLDSSVLAPYDYGEDYSESEEEDEHAESEDEGSESEMEDDGDEDWTSNNGKSGESDDEDALKSVEDLKKSVDDLKKLVPCTIEEFAKRIAGAEESTASESSETPESPEEEKRPFQRGDRVKYVGTSAVVEADQRKVKHKVKMNHWMRIILGKIPTQDGSRSAYTFISGRWITKRNISNSNNHRGLSNGQRGEVYEVNGDQVAVIFDPSIEKSHNAHEDVTNKEENGSATVYWVDSQDIAHDHDTESDDWHIALEALCEVLPSLQPIIVYFPDSSQWLSRAVSKSDRREFVQRVEKMFDRLTGPVVLICGQNLLAAAPKDKEQASRSPAREADGSAHIYAGQGVRARCRVEGVSVDPAGKATAATNPTMKTAIRPKGWRI

SEQ ID NO: 47980 - protein, 80 aa, Zea mays
  Coding DNA Sequence Number=SeqID_4605
MAQTRISGVQKTDHLKHLEISPKDCHRNPGEGNGSGCIMWKDNIVDVKYKENGQDLYIGLANSETATRKKMGRVAKISVP

SEQ ID NO: 47981 - protein, 58 aa, Zea mays
  Coding DNA Sequence Number=SeqID_4606
MPQPVLGAFVLRRYLRTQNYEHEVRSGRSLNQTKDGLITKLHEGWCTAEAVRREASSR

SEQ ID NO: 47982 - protein, 247 aa, Zea mays
  Coding DNA Sequence Number=SeqID_4607
MTSHDSSEGGNAHSHTDGLAREGFPRILWEVLQGAGYTTSPLYAVQLFEEHRVPRCRVRMTLEPHPLHPGWRLLDFESFGYRAEDTIEAIALHGLMTFCGFHPLELSTHPIGLFPTEKEDDPMWKDRVEHAKDATMITLDNREELVVDLSTEMVEKDLQVEQMATQIQELEEIVGARENTIEVLEDQLINTQQQLDEANQHLDMHHQEIQDMVDDEDVDIEGRVEPEPASSLDTAGSGRPSVASFAH

SEQ ID NO: 47983 - protein, 266 aa, Zea mays
  Coding DNA Sequence Number=SeqID_4608
  Homolog annotation: Hit_ID=Q6J9V9; Match level="QueryCoverage=66%, HitCoverage=43%, E-value=2e-10, Identity=33%"; Hit description =Putative uncharacterized protein
MKQTIGNKGLQIVRRDGTGKGDTPKGILLREGSGPRAPLLIRGSKAGPSEGFDSRLRALGPRALLLIRGSKAGPSEGFDSRLKTLGLRAHHWLGIRRLAPQMGSTAASGHSSSTPTTDQGFVGWPPKGSTAASEHVERGMTLGTSDTWPRLGLRSQGTLGHFRDQQERFCNGIPSEGGIEPSNPTKRDRVKAQSTQGTRSRLARAQPRAKAADPGGSTSHPRGPSSNRRTFDSTEAQLGQASRRSNLGQITMPTDRIAGAFNARIA

SEQ ID NO: 47984 - protein, 74 aa, Zea mays
  Coding DNA Sequence Number=SeqID_4609
MAVGINEALYAKALVFLATKPHSQTAACLEVERSRLLTPGSLDDMVAGVTWPSILPPGWTVEWDPASAEEEHEE

SEQ ID NO: 47985 - protein, 145 aa, Zea mays
  Coding DNA Sequence Number=SeqID_4610
  Subcellular localization annotation: CTP_CleavageSite=30; ConfidenceScore=5.03e-01
MSGEGQGLLQEVLAVTTVYGSTAGVAGIVRSTRAGGCSRRRRVLRPNHGDLVQSNGTESKNGAEDYPVYARRRSGGVRRPWTGLSGEANSDSSLGELHRGVHSLLRGLDGVGKGPCWPGLRVGGEIGAARGHAVPRANAGGFGLR

SEQ ID NO: 47986 - protein, 248 aa, Zea mays
  Coding DNA Sequence Number=SeqID_4611
  Subcellular localization annotation: CTP_CleavageSite=5; ConfidenceScore=5.37e-01
MARIRCTTPSTASHGARSVQSPGETASSPARGAAVPTPGAGAGPGVAGLLPLASAGGGVWEATFLYTQARDAPAPPQGIPAAGGDPDRDGDDDDAGGSSSHEAFSEHYSITERDTAEAAMQDAARRALSQYCSLFSGVADGLDLKYYPRRSTGSAGGVIVSPVGESNPKLNSMVNLAAVLNPVLDHALDELGKVRAEVAELRAECAARHYLDGGSPSPVGIQHPYRSPPHGRFEYGTPNCRTQIDLDP

SEQ ID NO: 47987 - protein, 353 aa, Zea mays
  Coding DNA Sequence Number=SeqID_4612
VADFANRTASGALTAVVSAEVERLRTQHADAVREKSAADSKCRKLADRVAALEGEKADLRRQLAGERRETNEALVQAQAAQAEAKLARAEGNLARERAEQLQERLIALESRVERAEAAMHAEAERTRTQLMDTYRELGARTGDFDVPDREPGLRCLEWVQEELQELPTVVGGFMSYASLVTCEGAMNGLSREGCRHFEVFDQADEDFDRDIYKAEDPVVKESARAIYDRMWGPHGQEVVRERAETARAQAVRGERVDDFGALNSALPDPEPTSAEAVSGVAPEPTLETAPDAPTSAAAGEDLPPRVAEGAPDAPAAAVPSAEDPAAVAAETAAEATAGPTAEAPATSGPSQVA

SEQ ID NO: 47988 - protein, 116 aa, Zea mays
  Coding DNA Sequence Number=SeqID_4613
MDSQAPTNSDGDQGSFSAETVKLNFRLELQVTPTHNLDNGLCLELQVLRELVSLEVMTSTWLPVVPFSGGAYTSYSKFIRIAGIGFSTTGKSIKSSRNHSASTVAVSSAASSAFHG

SEQ ID NO: 47989 - protein, 147 aa, Zea mays
  Coding DNA Sequence Number=SeqID_4614
MGKNNKRKREPTPPSEEFGDSEYSEEEFSSEPEGSPAPVSPPASSDDSDDSQGIAAEVWTYIRAVERAGLEGSDESEYSSDEEDSDGGDEGEDDDDDDDDDDDGDDDDDGDGSGRGGGDGRDNTKGSSRGSTKGSSGGSGGRGRASG

SEQ ID NO: 47990 - protein, 368 aa, Zea mays
  Coding DNA Sequence Number=SeqID_4615
  Gene Ontology: Mol. function=transcription regulator activity; Cellular component=nucleus; Biological process=regulation of transcription, DNA-dependent
  Homolog annotation: Hit_ID=Q32SG6; Match level="QueryCoverage=100%, HitCoverage=39%, E-value=0.0, Identity=89%"; Hit description=Protein HIRA
  Pfam annotation: Domain name=Hira; Domain location=77-276; Score =229.4; E_value=8.3e-66; Accession=PF07569.2; Description=TUP1-like enhancer of split
MAPSSLTPCSALSIHVINKNGNEDALPVCLEARPVERGAGDMIGVDRISGKVTVLAGNANFWAVGCEDGFLQVYTRCGVRAMPAMMMGSAAVFIDCDDSWKLLLVTRRGLMYIWNLYDRACILHDSLASLVASPDESSAKDAGTVKVISATFSRCGSPLVVLASRHAFLYDMSLKCWLRIADDCFPASNFASSFSFPQGGELGKLQIDIGKFMARKPIWSRVTDDGLQTRAHLENQLASSLALKSAQEYRQCLLSYVRFLAREADESRLREVCESFLGPPMGMVGSASPTDPKNLAWDPDVLMATLQGMKKHKLLKEDILPSMASNRKVQRLLNEFMDLLLEYETDVTLIPQPGTEGNGNGNDKVMTS

SEQ ID NO: 47991 - protein, 74 aa, Zea mays
  Coding DNA Sequence Number=SeqID_4616
MTGAEIRQQIDGLVANTEGFWTNMVGSNWLRRRSRTADEVEQDEAQQAAQQDDLVQQQAAQQDDDDQQQDDDEA

SEQ ID NO: 47992 - protein, 199 aa, Zea mays
  Coding DNA Sequence Number=SeqID_4617
  Homolog annotation: Hit_ID=Q6QP51; Match level="QueryCoverage=100%, HitCoverage=100%, E-value=2e-42, Identity=51%"; Hit description =Putative growth-regulating factor 1
MTASKKRAPSPPTDQGFEGWPLGRVQQPPYSTRAPSPLLIRGSKAGPSEGARDDSGYVRYMAEARATLPSGRTLGSTETQLGQASSRSNLGQIASPTDRVENSAAHLAPTVVPATRARLTTASSASGATGSSASPDLRPRPREEVSASPDPKTRPQPRPREESRPHPTPASGSGEVSASPDLGFGPTAPQGIHHYPTPS

SEQ ID NO: 47993 - protein, 205 aa, Zea mays
  Coding DNA Sequence Number=SeqID_4618
  Homolog annotation: Hit_ID=A2Z4X8; Match level="QueryCoverage=80%, HitCoverage=80%, E-value=1e-89, Identity=93%"; Hit description =Putative uncharacterized protein
MASGRNRSHARMTEFLVTSFDGNRGETNPYFLIRSGRAPGGHVKTKGTIYLSNIRMVFVANKHVGNFFAFDMPLLFVHGQKFNQPIFHCNNISGFVEPVVPDNQNRALYSTHTFKVLFKDGGCGTFVPLFLNLTASVRRYNQFETQSAASMAPRVDPLQAVQTPVDDMMRHAYVDPNDPTKIFLQQPAPESQLRRRNYHGPADAN

SEQ ID NO: 47994 - protein, 57 aa, Zea mays
  Coding DNA Sequence Number=SeqID_4619
  Subcellular localization annotation: CTP_CleavageSite=39; ConfidenceScore=5.22e-01
MTVVAPQPVSATHTLESLFLSRVRKRQTFVAFAPRWFPRKKNKSEAAGGLGPPYRLL

SEQ ID NO: 47995 - protein, 250 aa, Zea mays
  Coding DNA Sequence Number=SeqID_4620
  Homolog annotation: Hit_ID=A0EVH6; Match level="QueryCoverage=47%, HitCoverage=33%, E-value=7e-07, Identity=36%"; Hit description=Milt putative polyprotein
MAGSKDHTKISTTNIIKPAIEALPADDQRPFEDLVMRDEKEVMRQWNEQRDKEEAELLHKLSERRKEAADKYLSHFTVDRHQKIVRQGEIDMESLLPPLQGPAPQPLGTRQVLDATGPSEHHLRQSGYTADRPAYFAGPSDQMQARTQNTQVAPYMAGPSGYNPEHFGPITDRPVHHAGPSGYVADRPPSYAGPSGYGMNRPTYYAGPSDSTRVHTQTAQVTPYMADPSGYSPGPFGPIADRPVLYDRRS

SEQ ID NO: 47996 - protein, 89 aa, Zea mays
  Coding DNA Sequence Number=SeqID_4621
MTRRGPGATVADLPRLHGERWILPNHFDILFGFKQDVGAKHLSLSRLVPMQRSPTTPPVECLKRRHLQAGLITIVVGEFCIRYEMGHLC

SEQ ID NO: 47997 - protein, 197 aa, Zea mays
  Coding DNA Sequence Number=SeqID_4622
  Subcellular localization annotation: CTP_CleavageSite=42; ConfidenceScore=5.19e-01
MAHRTVRCATGAPTVHHRGLDAFRYLSAIVWLQGFSSCSPAVSPRRWSPKTVTTSSWVGRSKPGCDLGPTLSFKDVHHPRWGGGRAEPALYLPRGFAGHPLPRRSGERALTGPAGGPDFDNTGSVVGGHRHLQRVGLVGLAPGGPSHRRAAAAPCAREGHPRCRAPLGRRSCYGVVLPLHRDGALARRPVPHSPGRI

SEQ ID NO: 47998 - protein, 247 aa, Zea mays
  Coding DNA Sequence Number=SeqID_4623
MMTTSFVVGRSKSSCGLCPALSFKDVHHPRWGGGRTESGFYLPHGPAGRLFLQHSGDRALTGLVEGANFDNAGPVNRKRRQLQRAWLAGSAGSVVASDAASCRLIWAWPSVHRTGDCCAARSEGSSKTPYAAWAAFVFLDCLVLTLARRLRAEAGAAAIRWRSASAQVAAVVDAEVVVARGGFSTDETVGATREPRSLCDELKPEAAVSAWTEAELARKEASSAREHVASLAEEVQQQRLELGQADR

SEQ ID NO: 47999 - protein, 105 aa, Zea mays
  Coding DNA Sequence Number=SeqID_4624
  Subcellular localization annotation: CTP_CleavageSite=60; ConfidenceScore=5.08e-01
MVAIQGGHPPFKGDSPHLRPQPAQTESSPTRSKVLPLRHGGWVPHVMQAGPGQKEPKPPRAGVKGQTAMQAACNRTKGAHPFDFEASSMEAQAHTSCNWHTGYYV

SEQ ID NO: 48000 - protein, 359 aa, Zea mays
  Coding DNA Sequence Number=SeqID_4625
MAGSKDHTKISTTNIIKPAIEALPADDQRPFEDLVMRDEKEVMRQWNEQRDKEEAELLHKLSERRKEAADKYLSHFTVDRHQKIVRQGEIDMESLLPPLQGPAPQPLGTRQVLDATGPSEHHLRQSGYTADRPAYFAGPSDQMQARTQNTQVAPYMAGPSGYNPEHFGPITDRPVHHAGPSGYVADRPPSYAGPSGYGMNRPTYYAGPSDSTRVHTQTAQVTPYMADPSGYSPGPFGPIADRPVLYDRRSGYETTHVAPYTAGQSGYTFRPFGQVADHSASYAGPSGYAYAEPRAAQYAQFPHSSQQHYGAPPATHYNHAIPPHGHRAEYYSATREPDGYRAGAGDINRTPNTHLKHTW

SEQ ID NO: 48001 - protein, 145 aa, Zea mays
  Coding DNA Sequence Number=SeqID_4626
  Gene Ontology: Mol. function=protein binding; Cellular component =intracellular; Biological process=nematode larval development
  Homolog annotation: Hit_ID=Q6QP50; Match level="QueryCoverage=85%, HitCoverage=50%, E-value=5e-61, Identity=93%"; Hit description =Putative 40S ribosomal protein S8
  Pfam annotation: Domain name=Ribosomal_S8e; Domain location=1-137; Score=145.5; E_value=1.5e-40; Accession=PF01201.13; Description =Ribosomal protein S8e
MWLSRTLLRCQDLRMLLMCVLQRYELGRQPANTKLSSNKTVRRVRVRGGNTKWRALRFDTCNYSWGSEALTRKTRILDVVYIATNNELVRTQTLVKSAIVQVDAAPFKQWYLTHYGVDIGRKKKVSVAKKDDTKVYSFNLRFNED

SEQ ID NO: 48002 - protein, 151 aa, Zea mays
  Coding DNA Sequence Number=SeqID_4627
MTNGTFGMETSRRRRRRSCSLRLAAAAIRLRLRLLQYFSLYGLQLQQSKQLQQCQLVASRTRPGLLERGIERRLSQAASLELGRNLPGSIRFGPNNADLSVGYTLPVPDGASSALRLRVSTACQTSGGRQSKIPYCLHVDHDVELLWIVGN

SEQ ID NO: 48003 - protein, 143 aa, Zea mays
  Coding DNA Sequence Number=SeqID_4628
MAMMGSTSKKMYLCQQVRKWQIFAAFVQRWCPKKKTRSDASGGKDPPLKTFVDVYREGFLPPRRGRSASLANRQRPPERQALCAECFFSIWPGALFLRSSATDVNLAPSQVRKLASMAIKFDIVLAHRLEANVIFNDKAFPNI

SEQ ID NO: 48004 - protein, 644 aa, Zea mays
  Coding DNA Sequence Number=SeqID_4629
  Gene Ontology: Mol. function=hydrogen ion transporting ATP synthase activity, rotational mechanism; Cellular component=proton -transporting ATP synthase complex, catalytic core F(1); Biological process=ATP synthesis coupled proton transport
  Homolog annotation: Hit_ID=A2Y790; Match level="QueryCoverage=7%, HitCoverage=9%, E-value=1e-16, Identity=88%"; Hit description=ATP synthase subunit beta
MDQAFVQGRNVGEYDAPTGEAAPTGVAVAEALAQEAPSTNMSPSTLPPPPPPCAVLATVRRHPSQTCDLKHHHADAEASSHHHHNFTQPHTEATNDQRRRPRHLPMLPPSSACSHRTCAPQSRAPPPAPRPLDLDGRPQNRCPCRRCRLQVDHNREHHPGPSPRPPPEHHGPVSRKEVVAPTTVAVKAVRGEVAKKRAPRNTCTSPNHCRQRNRHRPPPHLLPAAEADPVDKTICAPWFCLSLADRWTHVSVRSHSLALASHQNPTNHVSPAPAAAASTSRVSSPYASPPRHGFPHHTLRRRRPCMAPERAAPTRTWPPASAPMAACCPTGPPARAGAARPPPDGAGEARGPPGGADAAPGHSGGGRTPDPGVGGRTLLSKSRRLRASKLRNPPPLWKETASAAPRLSVDIIVRVRCALALGPSRARPSSTSLPSPTSRPTPTSAATPTDTPTRKRPMRYAPRNMLPWTTTEKTRRAPLGTFIFVMMLSFRLKCHTVLGILGGGERLAWHLHFRDDAVLQAAVPHSARHFGRDIIMPNLKSSVATTASAVEYRDEVGSLEVAAKAKEADVDGIIIQGREAGGHVIGQVAFSVFAGVGERTREGNDLYKEIIESVVIKLGDKQSERKCALVYGQTNVPPGVLVLD

SEQ ID NO: 48005 - protein, 37 aa, Zea mays
  Coding DNA Sequence Number=SeqID_4630
MARVACTLCGKRLDGGVSVLSVGVNPPYLDSLKPAYP

SEQ ID NO: 48006 - protein, 40 aa, Zea mays
  Coding DNA Sequence Number=SeqID_4631
MPRNMVNRFSGGYSCWSDLAVYLTAGLDSLVGPYLNRRGA

SEQ ID NO: 48007 - protein, 176 aa, Zea mays
  Coding DNA Sequence Number=SeqID_4632
  Subcellular localization annotation: CTP_CleavageSite=40; ConfidenceScore=5.36e-01
MFLISWSSSSSWGVGLVAFLFWLRASRRERVSWFGSSGCRAAAPVAEAFFGGMTKVDACRRWSKRVHRRNRNDIILQVYLRLKGSWFPFLLSRRSSSARFFDSASSFVFFMLLHTVVLIHVRRFQVRRYLFMYYTPETLLNHVFEDLRKPKAPNKKDFGDEFHRTYLDLKFCPRDR

SEQ ID NO: 48008 - protein, 224 aa, Zea mays
  Coding DNA Sequence Number=SeqID_4633
MDKNQNLAYAPYIMALIKAKARFEGLCEIVHTPFRPFKNEIGFLTRPLTPFPDDEEDPGYDAGEAPEAEAEQMPPPPPPPQPQQYWQPGPGYFDPYFQNMQQGLLTHMDNRFQGLMTHMDQRMDAMKSRFDDNWDALNTEYSEFRSHIQDHVTDPIMKRLNNMQQSFQDNMGALSSQFDNLSTNDSMQEISQRQQQLQQDFGQFSSLFDTFSTHYYSMHPPPGD

SEQ ID NO: 48009 - protein, 520 aa, Zea mays
  Coding DNA Sequence Number=SeqID_4634
  Subcellular localization annotation: CTP_CleavageSite=53; ConfidenceScore=5.53e-01
MDRLDANPPNSLPAHAAGLPGAHRHRVRRLPLRRLPRTPSTPGPRLTRRCLRLASALVSLGVSRGDIRYFGTGGYEIDGFDHGYGAASPLQPNRILAEYVDVYSPLLYTPTPPPPQVVSIATTAQAKMKPWKETSRSSKTTTSSRCGLAATPSRLPVKAALSTFLFRTLIYCKTYMDVSDMARLRHTARKSVIPFLPSRLAERPLRRPVAGQSSHLERLHHRLREEQERRRQEQQSSSFSLQQEIESVRSCSPVLPLEPPPAPPLGAPASGVAAGGDPDDGDGDGSSSHDTDFSANPEPEGWVARPITRDAARGCHFHDALDTLLRRAFDRHTWSVEYRCVVYQHSRGVYPDRWEATCLVRCPENSLQGAEACSEHYSISERDSAEAAMQDAARRALSHYCSVFGGAADGLDLKYYPRRPSGSTGGVIVSPVGEGNPRLSSTVNLAAVLNTELDHALDELSRARAEIALLRAERAERRHLDGGSPAPVGTQHPYRSPQRGHQSYGNPALQDQDNSRTIDR

SEQ ID NO: 48010 - protein, 38 aa, Zea mays
  Coding DNA Sequence Number=SeqID_4635
MVLAVVVLLGAVVVLVVVLLLQPRVPGYSSYLSSMARA

SEQ ID NO: 48011 - protein, 599 aa, Zea mays
  Coding DNA Sequence Number=SeqID_4636
  Gene Ontology: Mol. function=cysteine-type peptidase activity; Biological process=proteolysis
  Homolog annotation: Hit_ID=Q5NKQ2; Match level="QueryCoverage=87%, HitCoverage=82%, E-value=1e-63, Identity=38%"; Hit description =Putative uncharacterized protein 9C20.3a
MHSKGLISTVDIQRSTDIGDPTNTQCDGDPPHHRKRSVAADAKKIPMPNVDDDDDFEPPKKKCNITMDAPNKAQKLDPRDMTLRIGPDKELKITKQIVHLILGLPNSGGGKPLNIDEANAAATLRSSLNITSWSISFNEVLLTEELERLPQIDWCHLIFSDLCEAAQKWHNMSTNNVSATIYGSSIVVLLYYLDHLHHAAAPNNRSGTPCIKYFNKNIIRALSMADKRKPRQGGEPFDVCPFWSSSETCYVSKSPSTGQLESTMRPETVDEDPNEHGRLPNINIQLPLMQDLMATKIQMLPVHQRQKFQAKLIDYDLEVGKIVDTMNQCLNNIGQTVPGGIVDHDSGPVFDKTPIGSVCASGIFLSELECAHALRAYLCSKVIELDRNIIDFGEHRANYRDIQQSFVDGACLDNVFIQCFIECVHDDCSKYIPPLNAHQLILDVNVGAILNFEEHEQHNNGTHATLWTLDIMGGTIWKNYHCIPMDMGDRKVSWARLIMSWLNLAIQNARPRSALPAFLKYPIELLNNCPTMKLGSNDCGFFVMRYMQHYDYMDGAMNAVIDLDNSEDIRSLVLQYIIFYRLNRNNSMVSHLDRFKFSQ

SEQ ID NO: 48012 - protein, 264 aa, Zea mays
  Coding DNA Sequence Number=SeqID_4637
MNKKHWHSKCHYVRNSGSPSAGTNDPTPWGRPVEQQKTDGRLAAARSNYGNSGPALLRSCPRPRRRSRDEDKHAGTVARGVGGGSDPVGDEDFLSRLRLGANGRGHQPPGRSPLKSSQTSGAPASAQGRRPSAKAGPPQNTNAAPNSARHHGWSSRAHGAAVAPPAGGAAGGPADDSDTLEVTVPAVDQAHAVKVRAVRRASGRLHPQTPRKGVTRGPARKVERRLSVAPTPVRMMNILEAEGGTKIAARLALPHPETGGHHPG

SEQ ID NO: 48013 - protein, 52 aa, Zea mays
  Coding DNA Sequence Number=SeqID_4638
MRQRGRTLREAVAANSGFADSNPIRLVTDRTASALESIVFVAPGVLILAASW

SEQ ID NO: 48014 - protein, 156 aa, Zea mays
  Coding DNA Sequence Number=SeqID_4639
MAALVGVGTADAGDEVGDITGRRSRDERGGGRLGFSGSKTTRRAYSEDMMHADLSDVEEGEKAEHGEETTTVEGSAEARREVQAIASGVAQARSAETGAWRCPPYSHLSHPDFRGQKPGREHKHQVGAHVKCKAYQRGWLKLSIAFKVGQNFISHY

SEQ ID NO: 48015 - protein, 212 aa, Zea mays
  Coding DNA Sequence Number=SeqID_4640
  Homolog annotation: Hit_ID=Q8SA97; Match level="QueryCoverage=56%, HitCoverage=15%, E-value=3e-08, Identity=48%"; Hit description =Ornithine carbamoyltransferase
MGEWGLWNFDPTGRGDEEPDAQLLGQHLDYKPEVGRGGDSFEVEVEFEPWGRARRRPSSGVEVESEPWGRARWRPSFEVEVESEPWGQARRRSSSGVEVESEPWGRARRRPSSGVEVESEPWGRARRRPSSGVEVESEPWGRVRRSFLWRLRLDLAAVSLTLAGGTAVGAGQAALFSCQVKNRYRQDEEHEGCRDEFVRGLGRRLPVNYGCG

SEQ ID NO: 48016 - protein, 133 aa, Zea mays
  Coding DNA Sequence Number=SeqID_4641
MGKNNKRKREPTPPSEDFGDSEYSEEELSSESEGRLPRLAAEVWTYIRAVERSGLAGSDESEYSSDEEDSSEEGGGGDGDDDDGDDDDEGGGGDDGDGGGRGSSGGGKGDDDGSSRGGSGAGGSSKGSNKASG

SEQ ID NO: 48017 - protein, 379 aa, Zea mays
  Coding DNA Sequence Number=SeqID_4642
MTGVLVFETIVLCVQQPGGPALKNRHLSPAGEWTTLHQRESRWELAPDSSTNGGDHLCTSSDNDLRLGQLDSSSDRPRASATMKMSSPHPPTGGDNEAIKDKESGTQRQMALMPSPAEATTSARGSLTSGGDHLYTGGNVGGGTRAIQPQRARHTIADSLQSADPCSQGLPLPQDWEHPSPLNDGGRSGLACFSPPQGWWSSSWVTVGGGLQPGCVMKILEAEWWWKDANPHGVAPLQRQQEEDKIGDTTTSARSPTVKSPEETNLTRIPPENTGAPHLEARKAKGHGGRKRGEASVKEVTRRARGMQPSHGCAPHQLRHNWRSNSGAQAHTSCSHPPMKRDRGPLSVPKIRGGNPLLVAHDISYRAKPDEKSCRSCIY

SEQ ID NO: 48018 - protein, 42 aa, Zea mays
  Coding DNA Sequence Number=SeqID_4643
  Subcellular localization annotation: CTP_CleavageSite=17; ConfidenceScore=5.37e-01
QQMSHSSASFSMDSVTVASSSSSNPASSSFSTTTLAFFGVPP

SEQ ID NO: 48019 - protein, 220 aa, Zea mays
  Coding DNA Sequence Number=SeqID_4644
MRAEAERTRAQLMDTYRELGARTGDFEVPDREPGLRCLQWVQEELQELPTVVGGFMSYASLVTCEGAMNALSREGCRHFEVFDQADEDFERDVYKVEDPVVKESAGALYDRMWGPHGREVVRERAETARAQAARGERVDDFGALNSALPDPEPTPAEAVPGVALEPTPETAAIATAAPTSAAAGEDLPPKVAEGAPDAPAAAVPSAEGSRFWACARNRYY

SEQ ID NO: 48020 - protein, 287 aa, Zea mays
  Coding DNA Sequence Number=SeqID_4645
  Subcellular localization annotation: CTP_CleavageSite=41; ConfidenceScore=5.56e-01
MPSHSLHASRPSTFRAPGWGALALLSSCRRWRNATSRKLVHFSHRSASRIFIRQPGCIPSPVVTQDGDHQFEGGEKQAGLRPLPLPQLQGCSSSVLGRGVRQVGACLRAGSGPLLPSVIGGKGVHRPWRWQLPRVWLSGLSGFGAASGATSHRGSRKRFLRRRDSRCHPRTDLQLYGLGSLSSPLEWGRGRGPCRSSVCPVVIAVAVWPPGAEVVVTAAGAGVGEPSGVLSPRRPSNVGGYSYLRGWNQSSVCNGTLSAGVCSLWLSGPEHVGIFGCNTVFFPRFEH

SEQ ID NO: 48021 - protein, 29 aa, Zea mays
  Coding DNA Sequence Number=SeqID_4646
MTKAQDAACEKLHLCPLYLLLTYGQLYED

SEQ ID NO: 48022 - protein, 163 aa, Zea mays
  Coding DNA Sequence Number=SeqID_4647
  Homolog annotation: Hit_ID=Q6QP51; Match level="QueryCoverage=90%, HitCoverage=69%, E-value=1e-08, Identity=33%"; Hit description =Putative growth-regulating factor 1
  Subcellular localization annotation: CTP_CleavageSite=53; ConfidenceScore=5.66e-01
MGAIKVKAQSTQGTRSRLARAQPRAKAADPGGFTSRPRAPSSNGQTFGSPEAQSSQRSNLGQIATPTDSKSSLGRHRKLCLARPQSSGSTLMLNDGLRLARPQGSDTASASEDGLRLARPRARTQPRPRKTDSASPDPRARTQPRPRKTDSTSTSEEPPPRST

SEQ ID NO: 48023 - protein, 194 aa, Zea mays
  Coding DNA Sequence Number=SeqID_4648
MQYNGSSSLISCEKQTIRIEFLSLQVTALVPTITGMGDHVSGRVRGKVCGQAGPLVQALVLDLGPPPEQLLALVLGSSLSKLHGLTRKLSEGLDRTEEDGKGAGHGGCSRAALAGRGEVVGAKGWLEEVRRGTEEATGKAAEHWDELYSRGTGVVTGGRGRARVRARACSERAPGCQPASNTWELASAMVQRRI

SEQ ID NO: 48024 - protein, 134 aa, Zea mays
  Coding DNA Sequence Number=SeqID_4649
  Subcellular localization annotation: CTP_CleavageSite=51; ConfidenceScore=5.65e-01
MPPPVSQPSDCVHPHRPIPLPLPQPPPLPSPTLLPRAAAPTSFPAQRVTTRASASFPAQPPSSPRSPPPPTQPLPPRSPRSHPRICSVRVNSICSVRVMGKTASAPRGVDREALVDMGQIQYSEKYFDDTYEYR

SEQ ID NO: 48025 - protein, 79 aa, Zea mays
  Coding DNA Sequence Number=SeqID_4650
MPRCDSRRRRPDSCSSRRITSRGKGIFTAENEEEIEVTEEKTLPPSDSQAGNCFYFDICGTEPDSPTNEGKPRCICHFP

SEQ ID NO: 48026 - protein, 109 aa, Zea mays
  Coding DNA Sequence Number=SeqID_4651
MIVQRYLIRSTIGRKRGILGELDNVQLKPSKNLMKLKDVIKDCKFIQNPENEDCSLADGEYILAPEQGVAQEVAQEPAPEPAIEDLPAPALEGKPRFYANLFYMLFYYT

SEQ ID NO: 48027 - protein, 679 aa, Zea mays
  Coding DNA Sequence Number=SeqID_4652
  Gene Ontology: Mol. function=DNA binding; Cellular component=nucleus; Biological process=regulation of transcription
  Homolog annotation: Hit_ID=Q84PC9; Match level="QueryCoverage=80%, HitCoverage=100%, E-value=1e-130, Identity=50%"; Hit description=NAC- like protein
  Pfam annotation: Domain name=NAM; Domain location=24-161; Score =245.5; E_value=1.1e-70; Accession=PF02365.6; Description=No apical meristem (NAM) protein
MSLSPLDSSSPPAAAAAAATEVPLAPGFRFHPTDEELVSYYLRRRVLGRRLRVDAIAEIDLYRLEPWDLPSLSRIRSRDAQWYFFARLDRKVAGAGAGGRGGPGNRTNRATPRGYWKTTGKDREVHHRGKPVGMKKTLVFHAGRAPKGERTNWVMHEYRLLDADGPQVVLPFLPNQSTSPAILSRYQLECSSNQLGIFQKHGSGPQNGAQYGAPYMEEEWEEDDDAIENGSTHDASGQIAATTCAVDEESNEDDENAYCETNRPARVEPSHLPSVHEMLNPPEMAPLQGQDSKETSDGSCSDVAISLEEILQEPLSNISVENMHRLEGQNATDDNISVDNLLSAYPTKDNGYVGQYNTMNGSAPADEAHARWPLRTYSNQNYVNGPLADEFFDTGNDTNGVAYSRQQQADGFPAPRQVDESMVFYDAPSDYNLVDGKDDFVYLNDILNEPLGNESLFDGDDMMAYFDATENDFKYDILGSGQGLDYPLADMPLNFAQKSDKEDKFTFEGISEVPEANPQYGASSSGSHEDLYTDTEFLGVPTDDTADKTYGNRLASMLGSIPAPPAMASEFPPSTGKSAGMLSAVSSSSIRFTAGIIQLDGLTFSSGSGQWPLQKNGDLSLLVSFAVEGDVASKLPVGLGRATRISTVPMVLRSGFYLFFMSAMILLFSYKVGSCIYSR

SEQ ID NO: 48028 - protein, 437 aa, Zea mays
  Coding DNA Sequence Number=SeqID_4653
  Gene Ontology: Mol. function=catalytic activity; Biological process =metabolic process
  Pfam annotation: Domain name=AMP-binding; Domain location=44-418; Score=-26.2; E_value=3e-06; Accession=PF00501.19; Description=AMP -binding enzyme
  Subcellular localization annotation: CTP_CleavageSite=49; ConfidenceScore=5.10e-01
MEEILLPVAAHDAAAFVLSRLPHPGTAAADAAAFVDAATGASLSFSALRRAALSLASALRLGLGLRRGDAVLVLARDSLLLPQILLGVLAAGAVVAVTDTDATPAEVAAAARASAAVMVVAAPDLAAKLSLDAGAAVGLPPLLLTSRSPEDPAALSAEELIDGGDPVAAEAVAVSDSDVAFLAYPSARATAAVAMTHADLVAAMAHVVADDGRVCLASLPMCSAHGLPLVALGLPAAGVTTVLMPPPSSQSGTKAAREAVAVHAATDFVATPEVAVAALTAPVPLDGKLSSLRRVIVAPTPLAPGAREEFRRRLPWVQLTQLSGTPENQTEMLSLPPEVITPPAGAAVIQQNSLPADQVSATNEAASLTAQENFLPGATTEEDKQDYFGRHIFEINHEQDLEEAPGNWQQTSCLKTVADPPLTFPVRKLLVNLMKHD

SEQ ID NO: 48029 - protein, 153 aa, Zea mays
  Coding DNA Sequence Number=SeqID_4654
MSGGGSGAHATCEWLAEVTDVVGCWLPTYSRISFSEVCGGLLGKIMHYWSWSEPLDHWLNDNLIWHRWRMSSDTQKPLYISLQASRRGSPSWLMSSGARAALGAIAFISGMAKVVARAVVKGGHLSSAEVGNNVDHSFSKAVNQEQGNTIVKD

SEQ ID NO: 48030 - protein, 139 aa, Zea mays
  Coding DNA Sequence Number=SeqID_4655
MTVGGGCLSYGAPDSPVHTGHVRCASHVTNAVGFRPLELLSSGPAWMSGAHRTAEQPLRFPEADEFRRPLFLGAPDTVRCTPDSPVNYSGVPLKIPEGGEFELESSGAPDTVRCTPDSPVLPDQRCLRLPFCSFVESNT

SEQ ID NO: 48031 - protein, 74 aa, Zea mays
  Coding DNA Sequence Number=SeqID_4656
MTVGGGCLSYGALDSPVHTGHVRCASHVTNAVGFRPLELLSSGPAWMSGAHRTVGPRPRSGEVETSPEAEDEVG

SEQ ID NO: 48032 - protein, 207 aa, Zea mays
  Coding DNA Sequence Number=SeqID_4657
  Homolog annotation: Hit_ID=Q6J9V9; Match level="QueryCoverage=61%, HitCoverage=44%, E-value=7e-51, Identity=81%"; Hit description =Putative uncharacterized protein
MEARAHMSYNRHTGYYVQRNCTATCANVVSSRDYRTSATTRGSPAHDPTVPIKCDGHGSGSEKGIFRKDPSQRRKRAPSPLLIRGSKVAPCGVRQPPQSTWAPSPLLIRGSKAGPSEGFDSRPRACRVRDDPGYVRYMAEARATLPRYPRTFPSQAGMICNGIPPEGGTEPSDPIKWVRVQQITCRGSEAALAPGYGQIVDHVDKTA

SEQ ID NO: 48033 - protein, 459 aa, Zea mays
  Coding DNA Sequence Number=SeqID_4658
MSGPSPTRAPTELRWFVARGSRKPGPSLPRDHEKANRRKTSAITNETAPPRLYTLKRRTRNFARWHGGCAKPHLGRIVLVASGISRRWGNSAADHGHPVASSLYRTNSGAVADSLVMAPPLGLAVSPSGWFKEEDGWTVDSAMDGSHLVIMFAPGFGTPEIRPGCSPPPAVTQDDDRQPCGGEERAGSWPLPCPQLQGCSSSVLGMKASRVGVLPSVWADDPLLPPAFGGEGRLPALRRRRTATCCLVEVWLSVHRTSDGRAVRRAVSASPDGVFLPPVARMGVRSSLCAGAAAIRRCGVGAQVAAVVGAEVVVAIGEASHCRSGFLRRRDRQRHLWPDLRLFGFNGLSSPLVWGTGNHLSERELPFAEGVSEDSVIDAVERHAQAMALQQRARAEGLEAALNESVENCKALAQAAEQKEADRMAIVTCGPWAAMCAADSAGRCTTALGGPSSVKAPNP

SEQ ID NO: 48034 - protein, 142 aa, Zea mays
  Coding DNA Sequence Number=SeqID_4659
  Subcellular localization annotation: CTP_CleavageSite=38; ConfidenceScore=5.11e-01
MAMIRGGVPPTARNSGGHKHNPPKARLRAPSVPPCEVPGAAFEGVEAGWRCFVGDGRSLAAAGFLVVSRQAGSWFSAAVRSRREREGEDSATHLCATNKGPTDTQVRIGSNPGSSSAMRGIEGDGGYRISWRPGKRRTRGVR

SEQ ID NO: 48035 - protein, 901 aa, Zea mays
  Coding DNA Sequence Number=SeqID_4660
  Gene Ontology: Mol. function=two-component response regulator activity; Cellular component=endoplasmic reticulum membrane; Biological process=two-component signal transduction system (phosphorelay)
  Homolog annotation: Hit_ID=Q9FXT2; Match level="QueryCoverage=81%, HitCoverage=95%, E-value=0.0, Identity=89%"; Hit description =Ethylene receptor homologue
  Pfam annotation: Domain name=GAF; Domain location=330-478; Score =58.1; E_value=3e-14; Accession=PF01590.17; Description=GAF domain
  Pfam annotation: Domain name=HisKA; Domain location=514-579; Score =23.0; E_value=0.0011; Accession=PF00512.16; Description=His Kinase A (phosphoacceptor) domain
  Pfam annotation: Domain name=Response_reg; Domain location=779-895; Score=57.4; E_value=5e-14; Accession=PF00072.15; Description =Response regulator receiver domain
  Pfam module annotation: Pfam domain module=GAF::HisKA::Response_reg; Domain location=330-478::514-579::779-895
  Subcellular localization annotation: CTP_CleavageSite=44; ConfidenceScore=5.13e-01
MSPGRWVLTVGASDNWVTGQSGGAPDRSCSLSGAPSDACSDSARAVGTVPVHYSHCRRPLALGAVAPLGAPDSPVNYSGAASRIPEGGKFRVGFPGAPDSPERRRVQCGIDAERLQSVQECANARLNEAWLVVEPMVVGTAPCGVSVSSVWILLLLSSLLLSPSAASVDFGHCGCDDADDGALSSTYNILQCQKVSDFLIAAAYFSIPLELLYFATCSDLFPLKWIVLQFGAFIVLCGLTHLITVFTYDPHSFHLVLALTVAKFMTALVSFATAITLLTLIPQLLRVKVRENFLVNKARELDREVGMMKMKEEASWHVRMLTQEIRKSLDRHTILYTTMVELSKALELQNCAVWMPDETRSEMILTHQPRERDIMDQQNCSIPIDDPDVQEIKATKDAKVLGPDSALGVATRKLDVGPVAAIRMPMLRVSNFKGGTPEVMQTSYAILVLVLPNDGSLGWGRRELEIVEVVADQVAVALSHAALLEESQLMREKLAEQYRDLLQAKHEAMRAGEARNSFQTAMYDGMRRPMHSILGLVSMMQQESMNPEQRVVMDAIAKTSSVASTLMNDVMQTSTMNCEHLSLVRRPFNLHSFIKEAVGVVRCLTGCKGVEFEFQVDNSLPERIIGDEKRVFHIVLHMVGTLINRCNVGCISLYVNGHNEVEERHNHDWMLRRTNFSGGYVCVKFEIRIRKSKDYLLSSNGQISHGSKPNNSEMGLSFNMCKKIVQMMNGNIWSVSDSKSVGETIMLVLQFQLQPLTAVSSAASSDLSRSSAIPNFNGLRVLLADSDDTNRAVTHRLLEKLGCRVLSVASGVQCTSSFAAEPSFQLVVLDLALQRTDGLEVARAIRKFSSNSWLPLIVALAARIDDKVRDGCQRSGISGLIQKPATLAALGDELYRVLQNS

SEQ ID NO: 48036 - protein, 82 aa, Zea mays
  Coding DNA Sequence Number=SeqID_4661
MESFGLGFVILYVNIIRKIQIQRKRKARLQEGNSCAPRSYQGTEVTMSSNDFVKIINFTFDMFEGTRQVFSRRSKFFDAGSN

SEQ ID NO: 48037 - protein, 85 aa, Zea mays
  Coding DNA Sequence Number=SeqID_4662
MMVDYTTGGSLAEVQGKAASQTPPSAEARGKSSAAPAPGVSAPAPRADDGAVSPGDWTDLAPYDAVGTLPSEKAKKGSLTYVQCI

SEQ ID NO: 48038 - protein, 57 aa, Zea mays
  Coding DNA Sequence Number=SeqID_4663
MGLGVCGSLCQDDDEDDGFDYDYGNGCLWCNLCSGKEKENGVEADLREFQDFDEFED

SEQ ID NO: 48039 - protein, 43 aa, Zea mays
  Coding DNA Sequence Number=SeqID_4664
MVRLQMMMRMMVLIMIMVMVAFGAIYAQVKKKENGVEADLREF

SEQ ID NO: 48040 - protein, 118 aa, Zea mays
  Coding DNA Sequence Number=SeqID_4665
MARTGGQSAVNCGTTRLSHLGEEFRLLHASIGSAAAPISLPRARRRSLANHAPQFSSTVKNGCSSGCLPSRSAATLQQVIHRDGETGQERTRGQGRECEDLSSGSAIGCNNLHFPRPR

SEQ ID NO: 48041 - protein, 158 aa, Zea mays
  Coding DNA Sequence Number=SeqID_4666
MEAQAHASCHRRAECFVHATAPPLAPPPRLLDCGTNAATRGDPVHDPAALAWRDGQCGQKWAGPGKGDTPKRILPCEGTRLRASLLIRGSKAGPPEGFDSRLRSRGLYTHYWSEVRRPAPRKGSTAASGYSGSAPITDQGFEGWPPKGSQPPQTPSEG

SEQ ID NO: 48042 - protein, 442 aa, Zea mays
  Coding DNA Sequence Number=SeqID_4667
  Homolog annotation: Hit_ID=Q8S467; Match level="QueryCoverage=11%, HitCoverage=9%, E-value=9e-08, Identity=66%"; Hit description =Putative gag protein
  Subcellular localization annotation: CTP_CleavageSite=4; ConfidenceScore=5.02e-01
MPMYAVSGTPPRAPPTPPPMRTLLSHPDFRAPRPGREHNHQTQSIPEQDRGLITTKSRDSYVKTAQRKDGRAAFFPNGTGPAAQHTGDRRPSNPVYQTDNGKAIHDAEVEAKRLVKFLPGFEVWREPAHDAGPDHGGKTDTVRNWNDPGAPFYQQMPREHAVHQGESHMPYGVARAAARGETIAPVYIHATRESQGQLLRADSADLVASSESDLRKKTTDEVDPPTQSIPEQDRGLITTKSRDSYVKIAQRKDGRAAFFPNGTGPAAQHTGDRRPSNPVYQTDNDKAIHDAEVEAKRLVKFLPGFEVWREPAHDAGPDHGGKTDTVRNWNDPGAPFYQQMPREHVVHQGESHMPYGVARAAARGETIAPVYIHATRESQGQLLRADSADLVASSESDLRKKTTDEVDPPVSGSAANIAVTKGLLFPNVGHKCLMAKDDKRKK

SEQ ID NO: 48043 - protein, 99 aa, Zea mays
  Coding DNA Sequence Number=SeqID_4668
MKKSKRDLEMKHKTVALKLTQRFLSKDLKWERQEMCEREWEVFLRLEMEFKSCSLLWGEREFRRENPSSTAWRQVQLVYGQRGSQLKLSSAEVEKAQLS

SEQ ID NO: 48044 - protein, 50 aa, Zea mays
  Coding DNA Sequence Number=SeqID_4669
MTRGPDFCALWRAFNAPAAEQPLQIPEAAKFQSRVLLEHRTLSGVHRTVR

SEQ ID NO: 48045 - protein, 255 aa, Zea mays
  Coding DNA Sequence Number=SeqID_4670
MQPGCLMKILEAERWLKGANFREVALLQWQQDEGNSGAPHLEARKTEEAKLPRTERVTAQWLQALLRLRLNQRVKGRTAMQAACNRATGMHPFDSDASSMESQAHTSCNRHAGYYVRKTAPPLAPVPRLLDRGTGVAIRGNPAHGPTVPAKHAGHGSVSHGRRRDGRYGQKWADSNGGSRRAEAAVKSSAGSCPLLEQQESPLPPREDDAPVFRSLNGSRMHNGCPANHSSHRINSAAGQATPLAGEAGDASPPP

SEQ ID NO: 48046 - protein, 200 aa, Zea mays
  Coding DNA Sequence Number=SeqID_4671
MPPRGGRCSSVREDLSGDLPVGRWLPSSVLRWWQLEKSSSPTRSSAPCALRASGSLALIACPRPSSEDTGEGLVTTASALRSLLLLFRRPKRGSLSLLSGRLPVEVLLLESSSEAGPSSAEGGINAKGAAVPPADARTCRNSLSIDLLVGSRIVYASESYLSRKVMSEDPTIDVVEKRERCSGRKTFSEENFDAEWVPPF

SEQ ID NO: 48047 - protein, 218 aa, Zea mays
  Coding DNA Sequence Number=SeqID_4672
  Homolog annotation: Hit_ID=A3B0Z6; Match level="QueryCoverage=46%, HitCoverage=43%, E-value=2e-08, Identity=36%"; Hit description =Putative uncharacterized protein
MCCVANANDSGSTNEDEEEERSLVQLYARLSQEDKAVMLKLLERAREQGEARQRLESILSMKMQCFDELTKEHEELKCSHVDLVQSISSFELELAGTKNDTYQKLKEENERLKMSLTQLKGKCIAQPSQDNRDHMVKKLETGTTVACTTSLEENVKDLRIAKRKKQKMKFNTSSKSLNHASTKGNIQGNPKLQLVLERYREIFHVLKGIRCHVRNSNP

SEQ ID NO: 48048 - protein, 82 aa, Zea mays
  Coding DNA Sequence Number=SeqID_4673
MNSDDAAARVFGGLRFGPGKSANCSPEGVLHHRVVLPRGRTPPSRWSSVDDSACASCGDSIGWPVLVDIPSQDVLAKEPFQY

SEQ ID NO: 48049 - protein, 34 aa, Zea mays
  Coding DNA Sequence Number=SeqID_4674
MANKIINRNEKETHDAREEAKRAKEAAERIRHIE

SEQ ID NO: 48050 - protein, 302 aa, Zea mays
  Coding DNA Sequence Number=SeqID_4675
MSSKEGKLLVEGITQCAAWHGCTVRQQTQQARRLLDDLDAACQRMGRDTLNAKRARRPSAQWQAAPSSVWPGDVAWVRRLHAVEEVAAGPALWVTPDGHAPFFTVDPALFRDGAEESRHWREWRCDFSAPSDLRAGCMTCGPGPHVGPPVAAKLRGRITAGRFNHALLLSPSSRPSAFQASRWGAPVFSREVHVRATPSGDLTAGELAPVVPGRNLRPVVIHKDDYQPCGGEKRAGLRPPPALSFKDVHHPCWGGGRAESGLCLSRGLAACFFLQHSGEKGVRQPCEGGQLRLLGVGRVRHR

SEQ ID NO: 48051 - protein, 219 aa, Zea mays
  Coding DNA Sequence Number=SeqID_4676
  Subcellular localization annotation: CTP_CleavageSite=54; ConfidenceScore=5.06e-01
MGAASAFLDGLVLTPAVSTGARTSLHARWGGRHSPVRHCSTHPEVIAAAGEPLRAEVIVAAGAEVVAVADDPSMQRWLTVRDQAERLHGFRTPQETSARSSEPDLQKSGPVGDPEWFPEEGRLQLRRPGDMGSRRCRDYLAVVDVFLARATTRWGAILGRLLTPLADAFADVFREINDLAALRGAVATIGVYRARAAATPLRPWAFVVVAPAPGRSCND

SEQ ID NO: 48052 - protein, 131 aa, Zea mays
  Coding DNA Sequence Number=SeqID_4677
MSQLMGLVESTKITLDNREDLVVDLSTELVEKDLQVEQMATQIQELEDQVEARENTIEVLEDQLQTTQQQLDEANQHLDLHHQEIQYMEAEGADEDVDIEGGEEPEPASSLDTAGSERPPSPESSVASFAH

SEQ ID NO: 48053 - protein, 121 aa, Zea mays
  Coding DNA Sequence Number=SeqID_4678
MPGRDLAQDIFARFGALLAQELGQMNTTTCSTRPSVPEHALGAPPTREAQCRANPASAAIKNTPSSTVHPRASLTQLELKFIGVCPENGVPAAAQATTTVDRPNQPLLVPSDPRVSFCGPR

SEQ ID NO: 48054 - protein, 107 aa, Zea mays
  Coding DNA Sequence Number=SeqID_4679
MDRELGSQGREGAPCAAVWEEERLHGRRKGALGRGWSSGVVDLGRVMGLVLARRESPAPWLLAGAGEDDSLLQPLAMRRSREGAMAEERKLPAGCCYCRGENREEET

SEQ ID NO: 48055 - protein, 265 aa, Zea mays
  Coding DNA Sequence Number=SeqID_4680
MTVAGGWEQQSRRQPGSRPIQGQQESLLPRSEDGAPVIRSSNGPRTRNGRPANHSPRRINSAAEQAALPAGEADDASPSPDRERGIPRKGSFPVKEPGSEPPPTDQRFEGWPSEGFNSRLRSRGPDTHYWLAPEGFTVASDAERGMTRESHRREASSPRTPSPGDRVRQITRSSPETPCSVPIEGNMAHSPPSSLRKGDVGAPQQGRHRELRSARPQGSDSGYYPEDGELRSARPRARTWSKTRKTANSAPPDPRARTRTKTLKT

SEQ ID NO: 48056 - protein, 49 aa, Zea mays
  Coding DNA Sequence Number=SeqID_4681
MKLVHSAEAFDKWFHPLASESPDINVLGAFGFRRGRSSKNTKVDTAPKE

SEQ ID NO: 48057 - protein, 27 aa, Zea mays
  Coding DNA Sequence Number=SeqID_4682
MGDHVSGRMRRAICGHVHSGFSKHYAK

SEQ ID NO: 48058 - protein, 158 aa, Zea mays
  Coding DNA Sequence Number=SeqID_4683
AVRSGIDDGDWVAGFCLPLRLAEAVAPVPAAENSPETRGAGGSAGPWDALGDRGGWGERGEPSEEVPYLKANPGDSSVAAKARRWLGSTMADLGGCAENGRRQGGAPTTTEKRAHAAAVNGGGTLACEQRGRGGREEPERSEAAVEPLRGASLRTSDQ

SEQ ID NO: 48059 - protein, 565 aa, Zea mays
  Coding DNA Sequence Number=SeqID_4684
  Gene Ontology: Mol. function=protein kinase activity; Biological process=protein amino acid phosphorylation
  Homolog annotation: Hit_ID=A2YNM9; Match level="QueryCoverage=20%, HitCoverage=24%, E-value=3e-19, Identity=44%"; Hit description =Putative uncharacterized protein
MEGVCGARIIPKPRSVSMEGSSTSAPDLRPSHPPPWIRGEKFPSKYLGQTSSPRISLAIHGSGLAPDSARVKGQYSTRVAQSVALVVYWCLSGSPKNRPDMSTIIQALEPLLDLDDDMPVAPLGHAGPVMLFVAATAEEKKERAPRKDVLGHRRRPLSPKASPRKHPSAGTKEEFWVWHLPADQKTRPSLGGVVQAPVGSSEGEDDSYGMEIQLPMDVQHVAHITFDSVDVSNLGGSLDRRVNCRRVPQPRWVGARRSVKGGRSRRETGVKGETRGLCVYPAPRSGALAVGGYKRPRGRERAAYASVIPSFPARPTLYKRALDLPFIGSNDGASYDVVGPSPGLGEVEAPPRSRSSLSSKAEVESEPLGRARRRPSAEARAEPEPWVGRSGVRRLPGPSPSPSPGVGRSGVRRLPGPSPSPSPGVGRSGVRRLPGPSPSPSPGSGEAEFVVFRGRARVRALGSGEAEFVVFRGRARVRALGSGDAEFFVFRGRARVRALGSGEADLTLSSGTAVGAVQAALPSCQTGQWSGEATFALNAPAIRSVGVATWPRLLLGEDWASDEPK
